United States Patent Application Publication US 2026/0103690 A1 - sequence listing, part 74

SEQ ID NO: 363058 - protein, 416 aa, unidentified
MNAVGIDVSSRKSTVAVLRPLGEVVCLPFDVTHDIAGLASLVEKLKALDGETRVVMEHTGRYYEAVEKALHEAGLFVCAVNPLLIKEYGANSLRRVKTDKADAVKIARYALDNWADLRDFTPMDAIRYDLKTLNRQFQLASKQRTASANNLIALLEQSFPGIRKCFDSPVRSDGTQKWVDFAHSFWHVDCVRKQPFPAFCERYRKWCKRHAYLFKLSNAEEVYALAKRAVVLTPKSKVVKVLVQEAANQLISISRSVEVYRAEMDRLAAMLPEYPVVMAMYGVGKSYGPQLMAEIGDVRRFERKQALVAFAGIDPMPNQSGDKNVRSNKSSKRGSPYLRKTLFNVIRTYLQCAPQDEPVFQFLNRKRAEGKPFYVYMLAAANKFLRRYYAKLRDYFASLDTLQPVDPIPTTLKASL

SEQ ID NO: 363059 - protein, 343 aa, unidentified
MDQFAGLDVSVNETSVCIVDETGKIVREVKVASEPDALLTVLKNRAYHFKRIGLEAGPLSQWLYSALAEAELPVVCVETRHMQAVLKAQINKTDRNDARGIAQMMRVGLYRPVHVKTLRSQKLRMLLTHRKLMLSKAIAIENDLRGTLRNFGLKVGMVGTVKFEARIKELIENLPDLAVLVEPLLVVRRVLREQIGILHRRLLVIVRDDAVCRRLMTVPGVGPVVALTYRATVDVPARFRNSKAVGAVFGLTPSKYQSGEINRTGAISKCGDEMMRVMLYEAAQVMLTRTNKWSWLKAWAMKIARHRGMRKAIVALARRLAVILHRIWVDGTDFRWTREVAAA

SEQ ID NO: 363060 - protein, 340 aa, unidentified
MDKAIMIGIDTAKNVFEVHGRNAAGEVVLRRRLKRAQMEKFFASHPKAVIGMEACGSAHYWGRLLERLGHEVRLMPPAYVKPYVKRNKNDGRDAEGCCEAVSRPGMRFVRIKTAEQQASLSLHRSRQLLVRQRTQLGNAFRSLLAEFGVVAAKGREGLAKLATDLRAGVLDLPAAACSAALALADQRANLVPAIKDLERQIGEQAKAEPRAKMLQTAPGVGPMTAHATLATVPDPAMFKSGRDFAAWIGLTPRESSSGGKQRLGSITKQGDQTLRRLLVLGATAWLRQVESHPEKASPWLRGMMARRPKKVVAVAQAARTARILWAMLTHNQPYRAPASA

SEQ ID NO: 363061 - protein, 341 aa, unidentified
MERYYVGLDVSKEKTAICVRRSDGSMDKACETRTDPDAIFAALAPFRDGLERVILETGRMANWLYDELTRRGLPAVCVDARQAHAVLGQMHNKTDTNDAAMLADLARTGFYRKVEVKSRQAQERRALLTARDAAISIRTNAENTIRGLLASFGLRVPTQPRTYEGRICAVLEGHDALAPIILPLLAVRTEALRQAAALTKELVRQVKGSDACLRLMTVPGVGTVTAATFVATIDAPERFAKSRSVGAYAGLTSRRYQSGAIDYGGRISKRGDRLLRTILYEAANSLLCRVKPGRGMALKNWATALKQRTSHKKAVVALARKLAVIMHAIWTSGGVFEEREA

SEQ ID NO: 363062 - protein, 362 aa, unidentified
MPNATRWVGLDVHASQTACAIFDSETGEVITRRVLGRPHEVMGVLLELERPVHAVYEAGPTGYGLARRARAAGIDMQVCAPGMIARSPTERIKTDKRDAMKLARLHAAGQLVCVHVPSVEHEQLRDLARCREDARQDLMRAKHRIGKFLLRRELYYPGRGRAWTREHRAWLASLRFADAASEATFADYLHAHDTLAARRDDLDRTIDTLARECSWAATIARLRCLHGIDTLGAFGLCGEICDFQRFTRPTALSAYLGLVPSENSSGDKRRQGSITKAGSTLARRLLVEAGYHYRRPPRVGGALLTRQDGAEAWVVDLSWRAQRRLHGRWQRLRSERRKHNGIAAIAVARELAHFCWELATTD

SEQ ID NO: 363063 - protein, 357 aa, unidentified
MTNINKKPDFTGSTMYVGIDVHLKSWNVSLYCNELFIKNFTQPPEPAHLRTFLTKNYPGAIYKCAYESGFCGNWIQRDLTENGIECIVVNAADVPTTDKSGKNKSDKNDSQRIAKSLQSGFLHAVYIPDKELEADRQLVRCIERFNRDLTRIKNRIKGLLYQIGIKIPEHFAKCKWSKKFILWLQQLECSDKSIKLTLTHQLQMVELYRQQKLILLRDVRTMLQKDRYKDNLNYLQSVPGIGPITSASLLTEVGDINRFINFEKLNCFVGFYPSEFSSGERIHHGTITGRKHNRLRSLLIEASWVAIRIDPAFTKAYNEFKLRVGSERAIIKIARKLLSRIRFVWVNQVTYQIGLVK

SEQ ID NO: 363064 - protein, 398 aa, unidentified
MTESSDDESVQVFIGVDVGKDTHHAVAINRSGKRLFDKALPNDENKLRSLISDLKQHGQILLVVDQPATIGALPVAVARSEGVLVGYLPGLAMRRIADLHAGEAKTDARDAAIIAEAARTLPHALRTLKLADEQIAELSMLCGFDDDLAAQTTQASNRIRGLLTQIHPALERVLGPRLDHPAVLDLLQRYPSPEKLASLGEKKLAAQLCKLAPRLGKRLAADIAQALAEQTVVVPGTNAAAVVLPRLALQLITLRKQRDEVALAVEQRVLAHPLYPVLTSMPGVGVRTAARLLTEVACRAFASAAHLAAYAGLAPVTRRSGSSIRGEHPSRRGNKALKRALFLSAFAALRDPLSRAYYTRKMSQGKRHNQALIALARRRCDVLFAMMRDGTFYTPQAS

SEQ ID NO: 363065 - protein, 416 aa, unidentified
MNAVGIDVSSRKSTVAVLRPLGEVVCLPFDVTHDIAGLASLVEKLKALDGETRVVMEHTGRYYEAVAKALHEAGFFVCAVNPLLIKEYGANSLRRVKTDKADAVKIARYALDNWADLRDFTPMDAIRYDLKTLNRQFQLASKQRTASANNLIALLEQSFPGIRKCFDSPVRSDGTQKWVDFAHSFWHVDCVRKQPFPAFCERYRKWCKRHAYLFKLSNAEEVYALAKRAVVLTPKSKVVKVLVQEAANQLISISRSVEVYRAEMDRLAAMLPEYPVVMAMYGVGKSYGPQLMAEIGDVRRFERKQALIAFAGIDPMPNQSGDKNVRSNKSSKRGSPYLRKTLFNVIRTYLQCAPQDEPVFQFLNRKRAEGKPFYVYMLAAANKFLRRYYAKLRDYFASLDTLQPVDPIPTILKATL

SEQ ID NO: 363066 - protein, 423 aa, unidentified
MMKLKYSICCGLDVHKNVIVATIVITNNDGISEYKQKSFSTINSDIQRFHNWLIENNCFHVCMESTGKYWIPIFNYLENDIDVCLTHPKYVKAIKGKKTDKKDSKWIADLYKFDLVRCSFIPPKDFRQLRELARYRFKLVCMKSSEKNRIQNCMTVSNVGIASVLSDPFGRTATEIMSYLLEHTADSMDEKAVRKLIKKGARAKSDEIIEAIRGYNIETDQAKKLELARGHLEYLDDMITQTEVELYVRIKPYYEFVEFISTMPGMTELSSTIVLAETGVDINIFDDAKHLCSWCGLSPANNESAGKKKSVRITKAGDYLKPMMVQCALAAIKNKKQPYFAIKYGRIKKRRGHKKAIIAIARMMMVCIYHMVSEKKPFSPTDYEELMDPCNHVKRVVLNENNVFAYLESLGYDSSKLVKRNDN

SEQ ID NO: 363067 - protein, 343 aa, unidentified
MEHYVGLDVSLKLTSICVVNQMGSILQEGVVDSDPEAIASFVRLKAPGTVRIGIETGPTTTWLWSELKRLGLPVICIDARHAKAVLKMQINKSDRNDAAGIARIMQTGWFKEVHVKDLDSHAVRALLASRALLVKIKRDLENQVRGLLKNLGLVIGRAKFNVFATRAEELIEDRPELVAAIRPLLEARKAIEKQVADLDRKVHRLARHDVQVRRFMTVPGVGPITALCFKATINDPTRFKRSRSVGAYVGLTTRRHASGEIDWSGRISKCGDAMLRMYLFEAAGVLLTRVPKWSGLKAWGAKLTKRNGLRKAKVAVARKIAVILHRMWIDGTEFNWSTNKAPA

SEQ ID NO: 363068 - protein, 544 aa, unidentified
MRTECRSGVAGPGFPESSDISPGVIHGRAKRPRTARRSEVVNNSAVCENSIGVSPASARSRSPESYRKTVTERQPGEPEALASTSNRTKPLEGCYISSMDGRVKGRRKPKTPNKVMKPSEQTAEDWLTHRAFGALDWASEKHNVVMVDARGKVVEDFEIEHSALGWKRFRERLAPYGSIPFAIETSQGAAVEQLLEAGMEVYPINPKSAQAYRDRKAPSGVKDDQLDAWSFADACRVDGHGWRPLRPEDPLVKELRLLCRDEVGLIEQRTSFINQLRHALADYYPTALEAFEDWGSVSAWMFVQRFPTPQLLKEAGKRQWEKFLHSRRLWRTESGPRRMELFAHATELCGSVPMANAKSQLALSLISMLFALEKQLGIYRQRIEELFGRHPDHDLFGSLPGAGPKLAPRLLSEIGDDRDRFPEGPQALQCLAGTAPVTRRTGKSKIQTKPERWPCHQRWACDKHLRHAIHLFAEQSLTRCVWAQIYYNSHRQKGCSHADALRRLGQRWLKIIFRMWMDRKPYDPMLHNQNQLKHGSWVLQLNPT

SEQ ID NO: 363069 - protein, 352 aa, unidentified
MTVTIVETRAPARAITGGVDTHAGAHVAAALDPVGGLLGVQEFPATPAGYAQLLGWLGGFGAVCLVGIEGTGSYGAGLARYITAAGVRVVEVDRADRQDRRRAGKSDPLDAVSAARAAQSGRAAGAPKGRDGAVEAIRALMVAKRTARSERTQTINQARALVVTGPDDLRIRFATHAPADLVAELASLRPRPGAVVGYATRIALRELGRRAQFLDRQLERLDEFIVPLVTARAPGLLALYGVGPDTAALLLITAGDHPGRLRSEAAWAHLCASAPIPASSGKVTRHRLNRGGDRQANHALWRIVITRMGSHPPTRAYVARRSKEGLSKPEIIRCLKRYAAREVYPHLRPGPG

SEQ ID NO: 363070 - protein, 327 aa, unidentified
MEQQVAGIDVAKLTLDIVLSNGQKELHNQFENTPKGHESLARWLTRQGANSAHICMEATGQYGDGIAEYLYSLGFPVSVVNPARIKHYANSKLRRNKTDKADAQIIAEFCYREKPGLWTPPPASFKDLQALVRHLDGLQTTRQQEVNRLNSGVKTPAVIESLKQICSFLDDQINQAKEAIQEMIDRNSELKRRQNLLITIPGIGNLTAAKLLGEIRDIQEFQNARQLAAYAGLTPRNFLSGTSVHKKARLSKTGNSHLRKILYMPAISAKHWNSIVNTFCARLEIAGLRPMEIIGAAMRKLLHLVFGILKRETPFDPNYLSTSPTLP

SEQ ID NO: 363071 - protein, 428 aa, unidentified
MDFTQNNRLAQINEQTLIIGVDIAKRKHVARAVDDRGRDLVKRLVFTNLLQGFSNLIEWAESLSDEHERPNIIIGMEPTGHYWLNLAYHLKAQGIHVVVVNPMKVKRSKEMDDDSPTKNDTKDAKVIAQIIRDGRYHEPILPEDVYAELREGMKLYDMIQEDMASIKAQMHNALDRYFPEFLNVFKDWTGKTALHLLESGYLPEDIRKASEEDLLLEVKRAAKRGVGIKRIQDLKQAAENSVGLTVGLRMGRQEMRYLIDQYKALEERLIALEAQLEELVLHIPGADQMIAIKGVSAITVAGFFAEVGDLSNYRDPRQIIKLAGLNLKMNQSGLFKGQTTITKRGRKRLRSLLYQVARPLSLHNEGFKQLHHYYRHRSDNPLTGKQSFIALSRKLIKIFYVLGTRKCTFSEERMMRDIPMISTLQEAA

SEQ ID NO: 363072 - protein, 331 aa, unidentified
MCYFTGIDVSKDKVDIGWLRDVATGKKKTKVFRNTAKGHQQVADWLLKNIKVPADKIIVALEPTGVYHEALLYYLHECGFKVLLVNPGKARKYAESVNLIHKTDKLDAVMLAYYAHDQHSKLTLWQPEAPEVRELKVMIRRLDALEKDLQREQNRQEATRVSLSSDRVAQSLKVMIETLEAEINRLQEDIDDHIDGFPELKRNRQLLESIKGIGPVMSRELVYLFAAKRFKSAKQVSAYLGLIPKLRESGKFKGRTMLSKVGSARIRAKLYMAAVCASTHNPDIKAQKQRLLKAGKLKMQALGAAMRKLIQICFGVIKHQSEYKPQLVLIS

SEQ ID NO: 363073 - protein, 426 aa, unidentified
MSKSDYNKQVLRRQRIRKTTLIVGVDIGNAFNALGFMDKEGNVLGSCAKLYNSREGFEQFVDMIEGLKAKHHLRDVLIGMEPTGHYWRKLAYFAKEHGYEVRFVRTTALKHHRELDESSSAKSDQRDALTIANITREGKYIDTVIEDGVLRQLRTLSKARERLLRYSVSAKNSLHAALDDYFPELHEIFWSMGSRSLWTILEQCPFPQDVVLIKVSTLQDLIAQSSRKKAGSAVKAEKLIESAQKSIGIKQIGNADRYRVQMCLEEVKRTVLSLKNIDKQLKFLLKETTAASYLMSIPGIGPLSAAVFLGELGDPTHFHNARQIVKYAGYDPQESDSGSHIGRKFISKKGRWLLRKYLFFMSMRVVVLSNYFQEYYLRKLETKNRVGQQPRRKEMLCAVAIKLIKVIFALLRDKREFVDLVPAAAA

SEQ ID NO: 363074 - protein, 343 aa, unidentified
MEGYAGKQFVGIDLHRRRTVIVRTTEGGEVLESVRIVNDVERLASVMARAGECPEVVLEATYGWYWAVDALQAGGASVHLAHPLGVKAFEYRRVKNDVRDAADLADLLRMGRLPEAWIAPPATRELRELVRHRAKLVGLRSHCKAEVHAVLAKCGVQVLMSDLFGVAGTALLDGLDLPAPYAARIASLRRLMDDLDFEVDLFAGMVRGRMAREPGYAAVQKIPGIGPTLGAVFVAEIGDITRFASAPKLTCWAGLTPKHHESDTHVRRGRITKQGSRLVRWAAIESVKTISATTPAGVLRERVADRRGRNIGSVAAARRQLEFVFYALRDGHVRALEHPPRVA

SEQ ID NO: 363075 - protein, 426 aa, unidentified
MKLEEKELEKQICAWIGIDWADERHDVSLYDVGTGKQEAWIIRQSPEALQEWLGQLRSRYEGGYVAVVLEQGRGGLLNALMGCEFLVLYIINPKSLSSFRDAFYGSGATSDPVDAALMRDMVRQNPSRFRAWRPDDVMTRSLRLLTEGRRHLVNQSTALTNQLTALLKGYYPQALSWVGTLDTAWACDFLEQWPTLQSLQASSRRQILRFYEKHPRASLDLGEQLKQIQDARALTQDAAVVESSALMVHALVSQLRPLLASIAEFDRKIAMIFRKHPDRPIFESFPGAGAALAPRLIAAFGTDRDRFQAATEMQELAGIAPVTEKSGKKCFVHWRYACPKFTRQTFQEFADHSRRWCQWAKAHYELLRKRGKSHNAAVRALAYKWIRILFRCWKDRKPYQDEFYTKSLLKHGSPLSSLLAKPVENP

SEQ ID NO: 363076 - protein, 357 aa, unidentified
MKVQNNILDFKNQRFYIGLDVHKNQWTVTIRSNKLELKTMSIDPSAEQLNKYMQKNYPGGEYNSVYEAGFCGYSAHRQLTSYGFRNIIAAPTEIPTSNKEKNKKRDPVDSRKLSRELENGSMKGIYIPNELKQEFRSIVRQRYQIIKKQTRLKNQIKGYLNFYGHTLPDNYELKHWSKNFIEYLRDLNFNYTVGREQLEIYLEELTELRKLLVRIIKGIKNFINENNLMDEVNLLCSVPGIGFTVAITLFTEIIDINRFSDLDHLASFVGLIPCITSSSDKEKKLGINKQHNKFLRKLLIEASWIAVRKDPALTYTYNEYIKRMSKQEAIIRIAKKLLSRISYVWKNKKPYVKSVVK

SEQ ID NO: 363077 - protein, 359 aa, unidentified
MQTQSNKIDFTGQNIYVGFDVHLKSWSVTIMTEKLTHKTFSQAPDPEVLYNYLSKTFPGANYYSAYEAGFCGYWIHNKLLGFGIKSMVVNPADIPTTGKEKVMKTDARDSVKIARSLRSGDLKPIHVPLTITLEDRGLVRTRATLVKDMTRYKNRIKSFLYFHGIEYPEAFSKSRTHWSNRFNIWLEGIEMKEKSGKDSLNALIGQSKQLRASILFVTKQIKELANNDRYKERVVLLRSIPGIALITAMTILTEIETINRFATIDQLCGFIGLVPSCNTSGDNENIGEITPRGHSILRSAIIESSWFAARLDPALTKCYHNYCNRMESNKAIIRIARKVTSRIKFVLKNNQPYVHSVVK

SEQ ID NO: 363078 - protein, 417 aa, unidentified
MKCFVGLDVSSTKLDVCIMLSDTSTPVTASLSNDLSGATEIKNHILDLNHTYHFERIVIGMEATSLYSFHPAMFFHEDSQLKELHIEIMVEQPNKIKKYRDAFEENKNDTIDAFYIADYFRIERFSPSFLKEEKYMALQHLTRTRLQIIEQLTRTKQHFIENIYYKCNTLAYQFKKEELSTNLWSSTMMTLMTDEMTLDELANMPLQELDDWLQKLGKGHFKDSEKLAQTIQAAIRGSYRLSKLQQDSVNVILGLLAREIRNLEKMIKEIDKAIEDMVETIPEYQCLTSIPGVGKVYAAGIIAEIGQIERFKDHPQVAKFAGLNWREKQSGNSNSQHTSLVNRGNRYLRYYLVEAANSVRRYDDEYKDFYKKKYHEVPKHQHKRAILLTARKFVRLVDVLLRNHQLYTPPRRIMEDN

SEQ ID NO: 363079 - protein, 427 aa, unidentified
MAYKIAGIDVHKKVLAVVVADVECAGQYAFERRRFGSNPEQLQLLSEWLIEQQVEEVVMESTAQYWQPVWGALERYWRPSCQKQEGAGAMSGKLHLAQAQSNRGRRGRKKDFPDAERLVKRLVAEELVLSFVPDPEQRLWRAVTRRKLQMTRLHVRMQNQLESLLEEAHIKLSGFVTDLLGVSARRMLQALAEGETDPAALATLADKRLRATPAQLCDALGACTELNPVYRRLIKMALQELQFLEQQMGQLDQEIANLLRPHEDAVKRLAEVPGLGVDSAQQIIAEVGPTAASFASDKQLCSWVGVCPGDNESAGVNHSHRSPKGNRHMRRILNQAGNAAARTKGSIFEIVYRRQVPRMGHNQAIGVIAHRLCQLIWILLHRKVRYQERGPAVTETSKRKRTARMIRELRALGYQIEALNLQTTASM

SEQ ID NO: 363080 - protein, 397 aa, unidentified
MYIVGIDIAKRKHEAAVIDGEGTVIIKPFSFTNNCSGYNRLLAMLTKAKLPLDEVSFAMEATGHYWLALFTRLQKEGFRVQVINPVQTNSIRSFYIRQAKTDPRDALLIAEVIRFGHFSESTLHPENIYELRELCRGRHAIVSMQADVKRKVVALLDQVFPEYETAFTNLFSDTSMAILQNCPTPKELSEMPLEELCHLIEVSSHKRFRMAKAQELQALARNSFGFAMAGDVFSTMIRLYAKHLVFLKQQVQEMDRKIAEIMETLDTPITTITGIGPTLGAYILSEIGDISRFSSAAKLAAYAGIDPTMRQSGEYNGVRNRMSKRGSPYLRHAIWLAASSAVLHDPALKLYFQKKRDEGKPYMASVGHACRKMVSIIYAVMRDNKAYVPCIPSEISA

SEQ ID NO: 363081 - protein, 344 aa, unidentified
MYPFYLGIDLHLKRTYVVLMDNMGQIVDERRLPNDEMQEYLITTVPQNTYAVLEATRNWPFMYDLLSEHVDRVELAHPKELHLIAKAVIKDDPIDSKALANLARLNYLPIAYAAPREIRDLRTYIRHREWLIVQRTRAKNRVHAMLAYYNLVSPVTDLFGSKGREYLDKVMPILRPAARRVVMDSLDMISHLNQNIDNLEDEMELTPEQKKQIKLLTTVPGVGKTIATVILAEIGDIQRFDNPKALCNWAGLTPRVRKSDLSVKHGRISKQGSAYLRVSMTRAAAVASRINKHWHLVHEGLVPRCGKKGAKVAVARRLLTVIYFMLKRDQPYQEDYSQCHAADR

SEQ ID NO: 363082 - protein, 349 aa, unidentified
MSQTAQTAVAVIGIDIGKNSFHIVGHDERGAIVLRQKWSRGQMEARFANLPPCLIGMEACVGAHHLSRKLNGLGHDARLMPAKYVRPYSKGQKNDFRDAEAIAEAVQRPTMKFVATKTADQLDLQALHRVRERLVSQRTGIINQIRAFLLERGIAVRQGQRFLRAELPRILATPPDVLSPRMARVIEDLAGDWRRLDERIESLSSEIEAVARQDAGCERLMSVPGIGPIISSAMVAAIGAGDAFTKGRDFAAWLGLVPRQMSTGDRTILGKISKRGNRYLRVLFVQAAWAVLIKPKSWERHGLKPWIEAAKKRLHHNVLAIALANKLARIAWSVLAHGRNFEVSKIQTA

SEQ ID NO: 363083 - protein, 342 aa, unidentified
MGYFAGLDVSLEETAICIVDEAGHIVREARSASEPDALVAFFGACGLEMERVGLEACSLTAWLHAGLTEAGLAAICIETRQAKAAMGAMPNKTDRNDARGIAQIMRTGWYRAVHVKSPSCRSWRALLTARRMLVNKRRDVENGVRALLREAGLKVGTPSRRDFPARVRELTGDNPVLAELGQSLLSVIEVIDKEVVRLTRRALDEVKAEPTCRRLMTVPGIGPLTALAFRATIDQPGRFRKSRDVGAHLGLTPRRYQSGQTDVQGRISRCGDELARTALYEAAHSPLIRSSKWSALRAWGLSVAKRRGMARARVAVARKLAVILHRMWADGSEFRWGKQAVA

SEQ ID NO: 363084 - protein, 416 aa, unidentified
MPQIWAGVDAGKGHHHCVVIDEDGRRLHSQRVANNEAELLELISIVTDLAAGGRLIWAVDLNRGGAALLLGLLAAHDQTVLYIPGHAVHHASKAYRGDGKTDAKDAAIIADQARMRRDLQIRRPDDEIGTELRVLTTHRRDLVRDRTRTLNRIRAHLLEYFPALERSFDFSASRASLILLTGYATPEELRRMGQSRLTKWLLARGCRTAVATAQIAMEAAKSQQSVLPGQRIGAQLAAQLAEDVMALDTRIKGIDKLIERRLEGTRQAQLLTSLPGFGSLLAAEFLASTGTELTVFTSVDRLAGVAGLAPASKDSGRVSGNHYRPRRYDRRLLRTCYLAAMISIRHDTKSRTFYDRKRLEGKSHIQAVLALARRRLNVIWAMFRDDRPYAPVPVESRSASRQMPAATSAARDTIAA

SEQ ID NO: 363085 - protein, 415 aa, unidentified
MIDQHQWYAGVDWASESHHVFLTDNSGKKIGERVFKHDGEGLAAMASWLIAASGSKDPMQIQIAIEIPHGPVVETLIERGFRVHSINPKQMDRFRDRFTMAGAKDDSRDAEVMASSLRTDPSCYRELAGADPVITELREWSRMAEDLGTERNRLTNRMREQLWRYFPAILELDSDLGAEWLLDLWEAVPTPAKAMRVREKTIAALLKRHRIRRFDAAHVLAVMRKQPISVAAGTTEAASAHIASLIARIRLLNQQLGEAHHQIDKLTMHLVPQDGKETGQRKLHDVEILASLPGVGRIVLATLLAEAFDALQRRDYAALRSLTGVAPVTKRSGKSYIVLRRQACHNRLANAMYHWARVAIQHDIKSRTKYAALRSRGHSHGRSLRSVADRLLNVACSMLKNGSAFNSSPKAQNAT

SEQ ID NO: 363086 - protein, 339 aa, unidentified
MKLTVVAIDIAKKVFQLHWVEPETGVIERLKLKRAQLLPWMANRQPSVVMMEACGGAHEWGRQLFKLGHDVRLLPPKTVRPFVQRNKTDAADAHAIWTAGQQPGAKFVAVKNEAQQVVLSLHRLRAQLMKMRIMQTNELRGLLYEFGFVLSEGHRALLKELPAVLLEAQSRLPAMLLESLQEQVRRISDLEADVGKIERRLSTQLRETPACKTLAEIPGIGLLTATAVVASMGSPTAFKDAREFAAWIGLVPKQTGTGGRVRQLGISKRGDAYLRTLLMHGARAVVRSNRATSWPWLADLLKRRPYSVAVAAVANKLARTIWAVLAKGQEFRPQAWQAA

SEQ ID NO: 363087 - protein, 351 aa, unidentified
MCKVPSYFIGVDLHKTVLQICVLDRSGEIVEELRCRPVDQAGGELVLDRIQPYMNSGRIAVEAIGLNRWFVNRLITRNVDFVVCDPIKLNLKILGKKTDKRDALEIARRLLLGDIDRNAKTYYATDDEFGRRKLIRARQSLVRMRQQVINQIRSLLNSYKISDFPGRLTSKKNLTKLSELEMNTNELTVVLKAFLSQLVSFTETIEALDKKIKDLAQETLPLSLQEIPGIGPLTALILVNELGDVQRFKNSRAVACYAGLVPRISQSADTAHHGSLTKRGNRELRHILGEWAVRLLSSDKRVSDWARSRLKRSHKNKVRMALARRLVVGIYKTLLTGDEFSLERCLSYPKI

SEQ ID NO: 363088 - protein, 343 aa, unidentified
MEAKRYIGIDLHRNCFTSCLRLENGREYLKTWKLEQLETFASKLRRTDEVAVEVTGNTRLFHDAVAPHVERVVAVNPSQFKVITHSVKKTDPNDARNLALYLAKDLLPEVRMKDKTQAQIASLTQTRDSMVKLRTALKNKVNNICSGHGVNLNKESLASEKGLKAVLAMQFDPLVNLELKIIIDQIRSLNKSIAELEETIGREGRKLEGHQNLTSIKGIGGLSGSILLSIIGDISDFADEGKLAAYFGIVPRVANSNETEHSGRITKRGTKLGRTTLIQCSLIAQRYSPYLRTYYEKMKGRRGTGKAIVALARKFLGIIYRTLKNKWVFEDFPNFVLAEEATA

SEQ ID NO: 363089 - protein, 412 aa, unidentified
MEVLYVCCCGIDVHAKMLVACLLKPGKKEVRTFSTMTEDLLRLLDWLTQEGCTHVAIESTGVYWRPVFNILEGVMEVMLTNARDAKGYKARKTDVIDAEWLADLLRHGLLKPSFIPPLPIRELRELTRYRESLVREQTALANRIQKLIESANIKLGQVASDALGVSGKLMLRALAAGETDAEKMSHLARRTLKRKQPQLQQALEGRVTPAQRWILGQLLDQYDQGEAALQSVAERIRQEVDSSADPFVPEAIKLLDTIPGVGETVAQIIVAEIGVDMERFPTDHHLASWAGMCPGNNESAGKRKSGKTTKGSRYLRAALVQAAWAASHQQGTYLAAQYKRLVKRMGKKKALVAVGHSMLVMVYHVLQTRTRYQELGGDYFDRRNVDKQRKRLIRQLESLGVKVTVEEIQQAA

SEQ ID NO: 363090 - protein, 342 aa, unidentified
MNKVYVGLDLGSSSFQQAAINQDGVTIMNRSYPTSEANLRIAFTGLRGEIHVHLEAGELAPWAAAVIAPLVKRVVCSHPRDNAWIAKDNDKCDRVDAYKLADLLRLNRFKQVHYAPDQPRRNFKQLVQHYDELTAHQARWKTKLKARLRMQGVIVTGERLFSGGGRTAVLARVESRDVRTAIKQLYEVLDQSVAAQEQARLLMLRAAQAFPEIKLLRTVPGVGPIGVCRFSAYIHTPQRFSSKRKLWKYCRLSVSHRSSNGKPLRRPKLDYSGCGRLKDVSRKAFEVALRSRTDNGFKRTYQRALETTHDKTHARLTVQRKILSTLRAIWLTRTPYRDELSR

SEQ ID NO: 363091 - protein, 347 aa, unidentified
MKFYTKQHKHYCGIDLHARNLYVCILDQSGSIQIHKNIKANPQTLMALITPYRDDLVIGVECMFSWYWVADLCRQKDIAFILGHALYMRAIHGGKAKNDKIDSHKIAVLMRGGMFPQAYVYPREMRGTRDLMRRRMHLMRKRSELLAHVHNTNSQYNLPEIKKNLRYAFNREGIAERFSDPSVQKSIELDLNLIDFYDKQLSRVEWHIQKHARACDQHSLMLLRTVPGIGQILSLVILYEIHTIERFPTVQNFASYCRLIKCKKESAGKSYGTTGRKIGNAYLKWAFSEAAVLFLCQNPEAKAWLERMANKHNKARALTILAHKLGRAVYFMLKRKTVFDQQRFLNS

SEQ ID NO: 363092 - protein, 345 aa, unidentified
MQKVVTVGLDIAKQVFQAHGADASGETIFNTQIKREDVREFFSKLKPCLIGMETCATSYYWARQLLEFGHDVRLVHTSYVKPFVKRSKTDANDAEAINVALTQKTMRFVPVKTLNQQAAVTIFRTRSLFVSQRTQLVNALRGHLAEAGLVAAKGIQNYSKLVNLMETAADTVLPTVMKRALTDICDQIHRLNDLVTKLDKEIEQRVRDDEDAGRLLTIPGVGPKTAMCVIATLPDIHRFPSGRHFSSWLGLTPRSHSSGGRSVLGRITKMGNAELRKMLYLGASAVIVRNSKTPIGLWAARLRGRRPYKVAVIAVANRIARIVWALLTKGGLYDPEYGRAFPRSE

SEQ ID NO: 363093 - protein, 426 aa, unidentified
MKEHIDYLSTLFVGIDIASRIHVISALDFNQDFYIKMKPFENTKEGAYIVEKMIADVLADNHQFKYVVIGMESTGFYGVHLANYLSTSELLAPFSVCVYCINPKEVKNYKKSFNDIGKNDGIDSFVIADFARVGRIAVKPWRGSQYLALQRLTRHRMHITECITREKTYMLNNIYLKFSEYALLRNGEHPFSNKYGATAEAILTEYTTNEDIVNSSIEELVEFINSKSKGRIADPEETAKIVQAAARNSYKLDKCLYEPLTISIASSFNCISSFEKELKAIDKAILKTVQGLNPDEYTVLNSIPGIGKVYSAGILAELGSIKAFQNANQLAKYCGIVWNDNDSGDFESEDSRMSKAGNRYLRYYIIEATGSVINHCPEYKAFYQKKYAETRNHQHKRALALTSRKFIRLLFGLLDKGQLYSPEKSR

SEQ ID NO: 363094 - protein, 361 aa, unidentified
MDAPSESQCKEHRALTATKGDRMMQVTRIGLDIAKSVFQVHGVDEHGKVVLRKQLSRSKVLPFFAQVPACRIGMEACGSAHYWGRELQKLGHDVRLMAVQFIKPYRTKPKNDRNDAEAICEAVSRPQMRFVPIKTAEQQAVLTVHRARELLVTERTAVANQIRGLLLEYGVAIAHGIQRLRRELPAVLRVEDTVLPTLAHNVVMELKERLLELDERIAGHDRQLVQVARQTEAAKRLMRVEGVGAITATAVVATVGDAKVFSHGRQFAAWLGLVPKQCSTGGKPRLGQITKRGNVYPRTLLVHGARSVLQFTAQRTDAKSVWVEAVRHRRGDNIAAVALAAKHARILWVLLAGGQEYRVVA

SEQ ID NO: 363095 - protein, 444 aa, unidentified
MAMQVPQPVAAEEHDVILARVAAVDVAKATGKVCLRVPDPCDASRRATSVWDVASTTGSIMELGAFLAAAQVQRVVVESTSDYWRPFVYLLEAQGLQVWLVNARHVRQAPGRPKTDKLDAVWLAKLTERGMLRPSFVPPAPIRQLRDLTRARHDLSGDQTRCKQRLEKLLEDALIKLSVVASDLFGVSARMMIEALISGQRDPHALAGLARGRLKAKHGALVQALHGRFDDHHAHLARLLLQQHDLIQAQITELTTAIEAAITAIEYPHPPPAHDQPDQPPPLPVVARLDEITGVGPEIAHAIIAEVGLDMSVFPTAQHLVSWAKLSPRTRQSGAKTHHGKTGKGNPYLKAALGQAAAATARTDTFLGHRYRRLVARRGKLKALVAVARSILTIVWHLLANPHARFHDLGPDHYTQHIDKQRRTRNLIRQLQVLGYQVNLTQTA

SEQ ID NO: 363096 - protein, 406 aa, unidentified
MNAVGIDVSKGKSTVAILRPFGELVASPFEVSHTPRELNELAALIKSMDGDTKIVMEYTGNYYLPVALFLQKSGLFVSVVNPILVKDYSNKSLTVRKGKTDKKDSIKLAAFALDRWNELPLFSSQSDTRTLLKSFNRQYNQYNKLKVMLKNNLISILDQTFPGANILFNTPARKADGHEKWIDFVLKFPHCECISRKTYSAFSKSYLSWCRKGRYNFSDSKAKEIYAFACNCTPSLADSAAARALVSTAILQLNTLNETLASLQKEMDLLASSLPEYDAVMSLFGVGSVLGSQLIAEIGDVSRFSNKKALVGFAGIDAPPFQSGNFNPQSRSISKRGSAALRKTLFQVMAVFLQKAPANESVFLFMDKKRSEGKHFYVYMMAGANKFLRIYYARVMEHLNSLQTAA

SEQ ID NO: 363097 - protein, 417 aa, unidentified
MFKVAIRSPGEKPWTRTTEIFEYRTFYGVLQQMAADLRKRGVTHVVMEASGVYTEPVYYALAEQDFEEVAVINPAHAKALKGHKTDAKDCARLAELSECGLLRGSCIPAPELKEVRDLTRYKIKTVQARTPEIQRLGKALESAGIKLGSVASSITGVSATSMIEALIDGERRGGVLADLALGRMRSAGKLADLSMALAGRFTDHHALLCRLHLDRIKVFDDAAAGLGAQIAARAAPWQRELDLLKSLPGFGDVVAQAWIAEIGPAPHLYFASHEKLACWVSLCPGNNISARKRKHGRTGDAGTYIKPLLVQAAWSAIRVRGRLQARYNRLVRRFGGDKNPAAKKKAITAIAHTLLKIAYQVLKTGTPYQDLGADFYTRRESPVQRQAYLERQLQKLHPGCTITITISPPEAALPPGA

SEQ ID NO: 363098 - protein, 334 aa, unidentified
MLTATATAIAKAKARCHLAADAPARSCYEAGRYGFWLHRWLAVHGITNLVVDSASIEVTRRARRVKTDRLDADKLLSMLMRYYGGERRVWAVARIPTPEQEDERRLYRELERLRQERTAHSNRIRSLLVLHNLRVERIGGRAWARWWAEHATQLWPGLRAEIERESEGLSLVATQIRTLETLQEQQVRNGVQPAIAVLARLAGIGTGGAWTLVKEPLGWRQFNNRREVAGCLGLAPTPYSSGTSEVEQGISKAGNKPARWLMVELAWSWLRFQPASQLSLWFNQRLAGGGKRLRRIGIIALARRFAIALWRYLQYGEIPFGVTLKLSGSNVVAT

SEQ ID NO: 363099 - protein, 343 aa, unidentified
MQAVTTIGLDIAKSVFQVHGVDAEGKVLIRRKLKRRYVLAFFQKLPPCLVGIEACATSHHWSRELKALGHTVRLMPPAYVKPYVKRQKNDAADAEAICEAVTRANMRFVETRTPEQQSCLMLHRTRHLFIRQQTSVINAIRAHMAEFGIVAPVGRQGVEALLEVAADGGDNRVPEVARSCLAALGAQLRALKAQILEFDRRITAWHRSNETSRRLDAIPGVGPALATALVASVADPKAFRSGRNFSAWIGLVPKQHSSGGKDRLGSISKQGDRYLRSLFTAGALAVIRYAKIHGTKHRPWLTALLARRPTKVAAIALANKIARMAWAMMARGERYKEPVALAA

SEQ ID NO: 363100 - protein, 409 aa, unidentified
MNALIARCAGIDVHQGSIVVTVRTPTDGGGRQQVTQTFGTMTSELLAARAWLQAHGVTQVAMESTGVYWRPLYYLLEEGFTVLLVNMQHLQQVPGRKSDVRDSEWLAHLLECGLLKRSLVPPAPIRDLRELTRYRKRQIEDRAQEVNRLYRVLEDAGLKLASVMTDVMGRSGRAMLDAILGGSTDAHALAELAKGRLRAKLPALRLALESQLRARHTFLIAQILGKIDFLEEQIAALTAEIDRHVAPFEPVIAKLTTIPGVARRTAVTILVETTGDMAHFPTAGHLCSWAGMCPGQNESAGKRRSGNTRSANRYLRGALIESGEAAKRAKHTALQARYHRIRRHRGHKKAVVAVGHQILEIAYFIMRDGVTYQELGPEYFERRNRERVTRRHVKHLESLGYRVTLEEAA

SEQ ID NO: 363101 - protein, 317 aa, unidentified
MSGTCFVGMDISQDTVDVAVHPGTVFQIPNDDEGIAEAVKRVQPLQPTLIVLEATGGLEIPLAGALAAARLPVVVVNPRQVRDFARATGQLAKTDRLDAQILARFAEAIRPPVRPVPDEQTHALAALVARRRQLIDMLTAEKNRLRLAARPIRTRVQVHITWLETELDGINTDLTTAMRHSPVWREKEDVLRSVPGVGPVLTTTLCANLPELGTLTRKEVVALAGVAPFPRDSGTLKGRRAIWGGRAHVRAALYMAALVATRKNPVIRAFYQRLCQAGKAKKLALTACMRKLLTILNAMVKSGTPWRQAMEPACAEA

SEQ ID NO: 363102 - protein, 451 aa, unidentified
MEDRPVLEPNAAGIDVGAREMFVAVPPGRDENPVRVFATFTEDLERLTDWLEQCGVTTVALECTGVYWIPLFEILEQRGIRPCLVNARHMKNVPGRRTDWHECQWLQFLHSVGLLRAAFRPGQDVCAVRTILRHRNELVAAASQHVQHMHKALTQMNLQIHHVISDITGLTGRTIVDAILAGQRDGAELAKLRDPRIKADTETIRKSLEGNWRPEHLFTLGQSRDLYRIYQQQIVNCDLEIEKMLQGFAPRIDPGEKPLPPDRKRNRAGSKRRRKNGHPHPEFDLRTEAYKLFGVDVSQIPGLEENALPLFSEVGRDMSRWPSAAHFVSWLALCPDNDISGGKLLWRGARRVKNRAGHLFRMAAYALHRSLTPLGNYLRRMKAKLGPQAATMATAHKIAVIFYTMIKNQVEYDETIWDARDAQREKKLQAKLKRQAKQLGYELVPIEPQAA

SEQ ID NO: 363103 - protein, 360 aa, unidentified
MKFQRTSVGLDVHARSVFGCGLDGETGEVFSRRLSTDHREILDWVQGLPGPVAVTYEAGPTGFGLARFLLDSDVSCLVAAPSKLVRPCGDRVKTDARDAAHLARLLHLGEITAVCIPSLEREAARDLVRAREDCRADLMRARHRVLALLLRHNIVYTGGPAWTVTHLAWLRRQRFPAAPAQRAYDSAVDAMLACIDRRDGLDGAIAAMAIDSEFSAVVRRLGCLRGVSTLTAVGLAVEIGDWSRLTGRSIGAYLGLVPTEYSSGASRVQGSITRTGNAHSRRLLNEAAWHHRRPYRPGVELRRRWQAASPSARLRGQQANQRLHTRWRGFDARAKRPAVANAAIARELAGWCWSLAVLEE

SEQ ID NO: 363104 - protein, 339 aa, unidentified
MAIVCGLDIHRTQVTFDWVDVDTGEGGRGKLAPANRETFRRWLEQFAGHDVDVVVEGCTGWRFIVEECRAAGVRPHVADPAEASIRIHGVKRRAKTDKVDAKGLRELGVQGRVPESWIPPAQVLEIRTAVRLYHDLMTDRAAWLHRIHATLFHQGAAAQTQLLRGDRDRLHDSELLSPAGKEAVQSILRVVEVLDREINRIRQQLQRFAARQPGCKELQKEYGIGKLTSVIIWSEIGDCRRFSSSDGAVRHSGLDVTVYSSNGKRSAPHLSRQGQPLLRWALYEAGRCGGRATSPDHEYWQAVANRVGRKRAGISVGRKLTRRCHHRLRALGDEAFAEV

SEQ ID NO: 363105 - protein, 320 aa, unidentified
MTILTSPTVIGVDVAKAEIVVYREDLKIIQAINNDRTSVGHWLKTLPAQSSIALEATNLYHLDTAELAHGMGHRVYIVDPYRVSHYRESIGQRAKTDPCDARLLARYLTSEQHRLRAWNPPPRHYTVLKSLLNKRAQLMKVRVSIKLSWSTEPLLEDLLADGLKHFKQLDQAIQELLRKVSQEAGISENIRRCKAIEGVGELTATGLATTYMRGEFASADAFIAFLGMDLKAKDSGKKHSPRHLSKKGDGELRRLAHNAAMAACRSPVWKPFYESYLARGLARTQALVILARKLCRVAFALMKNQSEYQPNLRLQGSPAT

SEQ ID NO: 363106 - protein, 405 aa, unidentified
MLCVGVDWAEDHHDVCVMDHEGHVLGTRRVADSVSGVGELHALVAQHAEEDDEAVVVGIEIDRGLLVGSLVGAGYEVYAVNPLSVARYRDRHGTSGAKSDPGDAKVLADLVRTDRHNHRPVAGDSDLVEGVQLLARAHQNAVWGRQRQLNALRSTLREYYPGALEAFGTDLASTDALAVLAVAPTPELGRGLSRSKIASALRRGGRQRNIEGRAEEIQAALRSEQLEAPALIASAHGRITRSSVTLIGAFNAEIAELETALSEHFEQHPDAKVVLSMPGLGTVLGARVLGEFGDDRTRFSGPKSRKNYAGTSPVTKASGHSRVVLARFARNRRLANACDRWAFCALSSSVGTRRYYDQLRSRGKTHSQAIRQVANRLVGVLHVCLERRVLYDEETAWVSDKDIAA

SEQ ID NO: 363107 - protein, 366 aa, unidentified
MKKTSTVRVNGNMIFKGHKLTIGLDLGDRWSNYCVLDEAGEVLLEQKLATTPEAMKQTFERMPRSLMALETGTHSPWLSRLLKELGHEVLVAHAQKVELITKSNRKDDRHDARTLARLARIDPELLGPVRHRSAKAQIHLTVIRARAELVSARTALVNAARGLTKSYGERLPKCGTEQVSRELAAKLSAELREVLEPLLREIESLNERIKEYDARMEKIARESYPQVALLKQVKGVGTQIALTYVLTLDDPHRFAKSREVGCFLGLKPGRRDSGESQPQMQISKEGDRYLRTMLVQGAHYILGPFGADSDLRRWGLRLAERGGKNAKKRAVVAVARKLAVLLHRLWVSGEVYEPLRNSHKAMRAVA

SEQ ID NO: 363108 - protein, 356 aa, unidentified
MIANKVSRKSKKDNSSLTETESYDHYIALDWSERNMAIARMGKKDSEPKVIDVPTDLKGLKKYLSNLKGKKILTIEETTTSHWLYVELHDHADKIFICDPYRNRLLSDGPKTDRIDAGKLCKLLKNRMMKEVFHSTNELYELRKLVSYYDDEVRAGVRLLNQKSALYLAENKSWKKQEQLEASQVNKFIVAQLDEKIESYHEKHKKYEKEFERISKNNKVLKSLKTIPGLGPISSVTILSIVIDGKRFKSNNHYLSYCGLVKHEKQSGGRSYGRRLPRYSRRLKAVYVSAAVRVASTENPMREYYEYLLKEKKLPDYNAKNALARYIAKVSLGIIKSGEKYKPYKWRDNKKAKAAA

SEQ ID NO: 363109 - protein, 346 aa, unidentified
MRKIVKQVCGIDVAQAELVITLGRLYDDLTLELFAYKILPNTEKGFTTLVEWIKKITDVAIETRYVMEATGVYHERLAYFLYAKGQLTSIVLPNKISNYFRTLEIKTVTDKTASEAITRFGLERKLDTWKPANPVYKKLRQLTRERDQLVQSRTIAKNQLHAEQAEAEPNKTSVARVKKQIALFDKQEQEIKTELADLVKQNEAIKKKVELITSIPGVGALTAVTVLAETNGFELIRSKKQLTSYAGLDIKEKQSGTSVKGKPRISKKGNKFLRKSVHLPALAAIRHDERFKAVFARLVSKHGIKMKAAVAVQRKLLELIYIIFKTEKKYDKEYLQKTREQQIATP

SEQ ID NO: 363110 - protein, 369 aa, unidentified
MEKRITFVGLDVHKNSIDVAIADSERDGEVRHYGKIGGDLDSLHKVVRKLQSTGATLRFVYEAGPCGYEIYRSLTKLGFDCIVVAPSLIPKKSGDRIKNDRRDALNLARLHRAGELKAIYVPSETDEAMRDLTRAREDAVKAQRIARQTLLSFLLRHGYRYEGKSNWSLAHFNWLADIKFPHPAQQIAFQEYIHAVKELTERVQRLTGQVQELVATWKLAPMVKVLQALRGVSLIVAATTAAELGDLTRFDSAKLLMAYLGLVPSEHSSGNTVRRGGITKTGNGHVRRVLIEAADAYKHPARETRTLLKRLEGLPEEVRKIAWKAQVRLCGRYRKLMARGKSRNSVVTATARELSAFMWAIACALLPAA

SEQ ID NO: 363111 - protein, 380 aa, unidentified
MEDCILSGCDVHEKTLELFAGKNAEEPERRGFAATPAGREKLMAFLKGRAKELGASRIVMAYEAGPFGYGLYDDATAAGVECYVLAPTRIERSLRDRKNKTDKKDARRILEVLRGHVLAGNDLPSVWVPDEGTREDREIVRQRLELGRTCGGVRTKIGSLLRRWDVWKPKGMGNNWTQSHRRWLVGLTGSGSVLGEWARKVLASLLRQMGFYEEELRRADKEMLCLASRDRYRELVEELCRLKGVGELTAMVFLTEMGDLSRFKNRRQIGSYIGIAPSSHESGEDSDRKGHITRQGSSRLRHVLCQASWVRVRCDAKEQAWYAQAAERNPKHKKIALVGSMRRLAIVMWHRALEAQEERGKAPPNLPSPNGAAGGPKGKG

SEQ ID NO: 363112 - protein, 442 aa, unidentified
MNPNGIAMKLTQIRENTAGIDIGSEHIFIGLDDDSVYQFGTFTCEFRAAIELLKTHHVQSIAMESTGVYGVILHEMLQQAGFEVWLVNPAHIRYVPGRKTDVSDCQWLQQLHSYGLLANSFLPDPAIKALRAYLRLRERYINESAKAVLHMQKALTMMNIRLHQVISQIHGASGMRVLKAILAGEHDPHQLIALCDRRIQANKHDQVVASLEGHYRPEYLYELADAIDCYEFFQGKLTECDRQIDKEISQLAEKQPVPKEYGKAKPIRHHTPAIDQLHQKVVRAAGGVNVNELPGFTDYSALRLIGEIGVDLASFPSEGHFTSWLKLAPGKKQSGKSIRKHKYKSAPRAAEIFKQAAQSLLESKNHALGAFGRRIRARRGPGIAIKAVARKLAILYYRAMTQGMVYVEQGVEAYEKQYQERRLHNLHKQARRLGFTLVELNE

SEQ ID NO: 363113 - protein, 355 aa, unidentified
MNDAKYIGLDVHQATISAAVLDSSGKLVMECILETKAATILQFIRGLRGNLHVTFEEGTCAAWLHDLLKPHVAQALVCDPRKNTAMKTGNKNDRSDARKLAELLHLDKLHPVYHGETGIRALKELARSYLALTRDTTRVMNRLKALYRSWAIPCAGQRVYAPRYRSEWLAKITEAGVHRRAEIYYQQLDALRSLREQVRRDLLAEGRKHSAMNLLRQIPSIGPIRAVLLIALLQTPHRFRTKRQLWAYCGLALKTSTSGEYRIVEGQLKRAKKFLAIRGLNANHNHDLKNIFKGAATRAAAVPGPFQEFHAALVARGMKPTMARLTLARKIAAIVLIVWKKGARFDAEHLKQQAA

SEQ ID NO: 363114 - protein, 340 aa, unidentified
MDITTLGIDLAKSVFQLHGVDAQGVIVLQKKLRRGAVVKFLSKLEPCLIGIEACATSHYWAREIAALGHDVKMIPPAYVKPYVKRQKNDAADAEAICEAVTRPNMRFVPVKTEEQQAVLVLHRSRDLLMRQRTMILNAIRSHCAEFGIIAAQGARKVSELVTKLRNDDTLGVPEVGVSALLSLASQLDCLEQEVRKIEHQLLAWHRQNAASQRLETIPGIGLITATALAASVPDPAVFKSGRQFAAYLGRVPRQNSSGGKDRLGRISKMGNGYLRRLLVVGATSVTRRAPTIDTRTGTWVRSLLEHKPTRVVTVAIANKTARTAWALLSKGESYKAVPAI

SEQ ID NO: 363115 - protein, 341 aa, unidentified
MGDVTIIGLDIAKSVFQAHGADASGGVVFRKKLSRSRLLAFFAAQPRCVVAMEACAGAHHWGRELMKMGHTVRLIPPAYVKPFVKRQKNDEADAEAICEAAQRPTMRFAPVKDRDQQANGVVFRARDLLVRQRTQIMNGIRGHMAEYGYVAPKGVCYVERLLAEIEDPASDLPPAAVASLKVMARTLSALDAEIAVLDREIGKRAKEDPVARRLMTIPGVGPVTAAALTALAPDPAFFRCGRDFSAWLGLTPVQRSTGGKQKLGQITKMGERTLRRLLVIGASAVIKQALLRGAPQGSWLAQMLARKPRMLVAVALANKTGRIVWALLAKGGVYQAPAMAA

SEQ ID NO: 363116 - protein, 524 aa, unidentified
MATKSPSKNRRNAQPHAIHKLRGVIHPRVQAVGPEHFAVVSVACAKARSKMMVADFYGRVLLAPTTVEHNRSAFETALKSVRDVMAQHRIQDAIVAVERTGRYHGPVQRAFRQGGFEVRIVHPFTTKQYRLPADPGNKTDDTDLSAIHRAAVNGFGLLEPEPDPIYVQLQLLARHRRNLVRARVVLQQRMLEHLQSFMPGYSNCVGDIFGSPAALWVARNLGSAAAIVQADLAGLSQQVRQAGLRVYRSTLETIVAWARSAAVAEEPASLHHRIFLELDADQLRKVQSIQAIETDLAELLAQTPYVLLLSIVGINVVSAAEFAGEMGPIERYPNARAITGRAGLFPARYQSDQVDRRDGALVRNANHDLRYAILMIADNLIKCNDYFKILTAGWRLKGKDERSIRVQAAGRFTRIGYQMVAGRMTFQHPCARQRDSILDKLITFSLEHSIVPDQLSRTLNAAVAQLPRTIHREEAAALAEELARVPKSRGTGLRLLETILSAVLAKLEVKLVRSPESGEADPTE

SEQ ID NO: 363117 - protein, 385 aa, unidentified
MMKLDRTDAPATDEYATVYVAIELSKAKWKLGILLPGRGKLSRYTIDGGDLAGLRSRLADARAKAGRDGKPVRILSCYEAGFDGHWLHRWLSQEGVINHEIDPSSIEVSRRARRAKTDRIDLEKMMRAFLAHLRGEPRALSVVHVPSEEEEDRKRRTRERERLLKERTAHTNRIKGLLHAQGVRDAMPMKRGFLAGLSSLRTGDGRALAARLVEEIVREHERLCLVNKQLRELEAKSVAEVRRAAPGSAEAKIVQLIDLRGIGLASSQQLVNEVFYRSFANRRQVGSCFGLTGTPYDSGESRRDQGISKAGNRRARALAIELAWLWVRHQPNSDLTRWFRARVGELKGRIRRINIVALARKLMVALWRYLTTGVVPAGAVLRPGV

SEQ ID NO: 363118 - protein, 331 aa, unidentified
MNYSHFVGLDVGKKTFDASLMSADEKELSHKSFDNTPTGIQSLLDWIAGYHLSLSKLLFCAENMGSYVTELSVSSVSMGFSLALVCPLTIKKSIGLQRGKNDRIDAKRIANYAVLHYRKLELYKLPNKDLVRLRGWIIIRDNLVKQKVSSIKLLETFSQMAKLADVTESISFLEEQLKSIKEKILEVEEDMEQLIAASTSLYTNYLLLRSIKGIGIINAIVLLCVTDNFQRFDNPRKFACYCGVAPFEHTSGISIRGKTQTSSLANKEVKVYLTRAAITAISWDPQMKAYYKRKIAEGKHKASVINAVRAKIIARSFAVIRRQTPFVTLAV

SEQ ID NO: 363119 - protein, 336 aa, unidentified
MKYAAIDLHGNNSVVVVTDEGDRVLVQRRVGNDLAQVMAVLDPYREGLVVAVEATFNWYWLVDGLSLHGYVVRLVHTAAMTPYQGLKHGDDHSDARHLAHLLRLGVLPCAYVYPKQQRAVRDLGRHRMRLVRARTAMILATENVLARETGVSCSGNQVKQMGPDDLQALGLLADVQLAVQANLTLVADLNVQIHALEKRLHEAVRLQPAYQQLDTVPGIGEVLATVIMLETGDIARFEAVGRYASYARCVDSVHLSNGKKKGQGNTKSGNAYLAWAFVEAAQYARRFCPQAKRFYERKRAQVNTALATKALAHKLARACYHMMKRGEPFDAARCFG

SEQ ID NO: 363120 - protein, 398 aa, unidentified
MTESSDYESVQVFIGVDVGKDTHHAVAINRSGKRLFDKALPNDENKLRSLISDLKQHGQILLVVDQPATIGALPVAVARSEGVLVGYLPGLAMRRIADLHAGEAKTDARDAAIIAEAARTLPHALRTLKLADEQIAELSMLCGFDDDLAAQTTQASNRIRGLLTQIHPALERVLGPRLDHPAVLDLLQRYPSPEKLASLGEKKLAAQLCKLAPRLGKRLAADIAQALAEQTVVVPGTNAAAVVLPRLALQLITLRKQRDEVALAVEQRVLAHPLYPVLTSMPGVGVRTAARLLTEVACRAFASVAHLAAYAGLAPVIRRSGSSIRGEHPSRRGNKALKRALFLSAFAALRDPLSRAYYTRKMSQGKRHNQALIALARRRCDVLFAMMHDETFYTPQAS

SEQ ID NO: 363121 - protein, 412 aa, unidentified
MQVLYPRCAGLDVHKASVVACVMLTAASGSVSRETRTFGTMTADLLALGDWLKGHGVTHAAMESTGVYWKPIYNLLEGQLELWVVNAQHMKAVSGRKTDVQDAEWIADLLRHGLLRPSFVPARPQRELRELVRHRTNLVGRRAQAVNELQKCLESTNLKLGNVVSDVTGVSATEMLTALLAGQTDATALAALARGRLKEKKPQLQAALAGTVREHHRLILSQLLADIGWCEEQIAEVSALIAARLQAQQELLDRLDDIPGVNRRVAEIIVAEVGSDVKRFPTAQHLVSWAGLCPGNNESAGKRRSSRIRPGNRSLRAGIIAAAHAGSRKPDSYLSALYHRLAGRRGKKRALVAVGRTILQSVYYLISRGARYRDLGADYFERRDPEGLARRLARRIERLGFAVSWQPQAQAA

SEQ ID NO: 363122 - protein, 356 aa, unidentified
MTTAQKQSCMFVGIDVHKDTHTAVGISPFGEKLFEITVGNYKEDFETLNEKVKEHSDVLSPYIGLEDVRGYGERLAGYLYQKYPVYHVPSILVDRQRQNATHPEKSDSLDALGVAKVMIQSIDTLLPYTISHESEKAKQLKEISIDREDLVLERTRLKNQAHTLLYRIYNTEYEQKFKDPFSLKALRFWRNTKPKCDPFLLRSMKRKVRRLLGIHVEVTDLEKDMEILLRDNYTIQTASGCGVVLASTIVGEIGDINRFHSPGALSKYAGCSPRERSSGKKVRHVKSRSGNRRLNCAFHRMALSQISRMGNDRAQAYFKRKISEGKSKSQALVCLRRQMVNIVWMMMKHKTIYRNA

SEQ ID NO: 363123 - protein, 465 aa, unidentified
MSTLSKRHRARSSQGEIRPFEGMRQVNPYAAGVDIGAHEIVACVPDGHDRQIVRPFGTYTAELHALADWFIDRGMETVAMESTGVYWMPLFEDLEARGLQCCLISAQSIKRVPGRKSDVLDCQWLQTLHSYGLLSASFRPEADCVALRTLLRHRAQRLEHRAPHVRHMQKALLQMNIQLSQALSDVTGTTGLRIIRAIVAGERDPHTLAALRNSRCKKEAEEIALALTGTWREEHLFVLTQALALFDFSTAQLSACDAQIARAFAVIKPRFEPVPAAPMPAGTATPPRRTPHSHSKNAPEVNTRAHILRITGGDLVAVHGLSDSLAQTILAEIGTDMRTWLDDKHFCSWLGLAPKNDLSGGKVLKSRTMKNRNRATQAFRMAAQSVSRSHCAFGAFYRRMKGRLGPAQALVATAHKIARTVYHMLKNRVQYHDIGAAEYNQRFRERELQYLQKKAAKLGYTLAPA

SEQ ID NO: 363124 - protein, 331 aa, unidentified
MNLAGIDVANETFDIQKRCAEKITHRTFSNSKSGHQQAVAWLQRGSRRVRVCLEATGIYHLQLALALDRAPGIELMVLNPKAARRFAEAQMVRGKTDKVDALVLLHYLECMPFKPWSAPSHHRLELQSMAHRLAQLTKEQTRERSRLHAAERAGAHTRVAQHDTRVHIRYLERRYQLLETKAIELMKQYASMAEDLALVDTVPGFAETAAMQVLAEVGVLPDDLQPQQWVAQAGLDPKPDESGTSVYSPRHISKEGNAKLRAALFFPSMSACRCDPNVRAFYEKLLARGKTKRAAQTAVMRKLLHSIWGILKHRQPWDGDKFCRIEKPMIA

SEQ ID NO: 363125 - protein, 323 aa, unidentified
MRKHNTVCAGIDTGKHKLDVALNERPPELQVDNISDGHGTLSAWLRQHRVKRVGIEASGGYEKAVVARLRRDGFVVVVFQPAQVRAYAQFVLQRAKNDKIDARLIAACTAAIKKIHAPPDPRLAPWAEHLTLIEQIEEDLARAKTRLESCREPQFAAHWRAEIKRLNKSLKSELKTLVSAIRQHRDLATRLDLIESVDGVGLRTAVAILVRMPEIGRVMRQQAAALVGLAPYDDDSGDHIGARHIAGGRKRLRRSLYAAALPASQRWNPQLIALYRRLRAKGKGHKVALVACARKLLIYVNTVVERGTPWSKKPPAAAMLTAT

SEQ ID NO: 363126 - protein, 373 aa, unidentified
MKQSTTTYVAMDTHKRTISVALAEGGRRGETRFIGEIPSRPEAVAKMVDRLAKKHGQVAFCYEAGPCGYGLYRQIKVLGHECVVVAPSLIPTRPGDRVKTDRRDAVTQASLFRAGELTPVWVPDDAHEAMRDLSRARQAAVEALRRARQQVLSFLLRQGRVYSGGENWTKKHRLWLATQRFEHPARQIAFEELAQAVDEAKARRDRLAQQMEELLPSWSLAKVVTALQALRGVAMISAITLVAEIGDFKRFANPRQLMAYLGLTPSEHSSGAKMARGAITKAGNTRARRVLVEGAWTYRLPARMGVDILKRNETLPQAIKEIAWKAQGRLCARYRRLAKAGKPTNVVCVAIARELAAFVWAIATNDAMAAVVA

SEQ ID NO: 363127 - protein, 418 aa, unidentified
MSEDGNARPSPRYVGLDIHKHYCVVAAVDREGQVVLQPVRVEHQDLEGWLKKNLRPSDHVVIESTTNAWHVYDLLEPLAERVLVANPIKVKQIAFARVKTDIRDTLILARLLAANLVPVVWVPPQHIRQMRQLLSQRRQMVETHTQILNRMHSTAHRHHLTHERGKRFNEKNTTWQKDESLSQIEQFQLTLEMENRAYIEQQIGRITEKVSKMSHQKPWAESMTYLMQLPGFGVITTMTTLAAIGDIGRFETPKKLASYSGLTPGLEQSGTKNRGKGITKEGRRELRWAMVEAAQMAVKSDPHLKRRFQELQHRMHRNQAIVAIAHHLLELVWYVLTRREPYRHFSEEKIAYKYLSWAWRMPDDARDGLTRQQFARYYLMRLGIGKDLTRIALDPKHPRRLASESELLALRPELQQIE

SEQ ID NO: 363128 - protein, 462 aa, unidentified
MIISHNGPQVSTGSSQIAAFNAMHSSAIGIDVHSTLMVACFQKGEFGSSSFTEEFKESGTSLNAIRSLVIWCSSKNPDIIIMESTGIYWKTLYTELEKSGFPRDHIIVINPRILKPLKGRKTDRSDARNLAGHARMGSFTNSFIPKKDIRELRSLWASFQQIKHQYENNRRSLLNSLADYGCQFANIVSNSRGVTAQMILDAILTGDTGDALKKRIREILDIMSRRPGRKLVAGLDQICEAIESNITPAIRMTLQMRSQQLKIYEEHMKKIFDIIKVMVINSYKDQYELLATIPGAEDMSVIGIICIVGDDLSSFSSIKKFSSWSGLAPGNNISAGVSYSSRITHGNKYFRRCVLAMAQACANQKKNRSCLGNLFQRLRERKGYNKAKVAVAHKIVRIIYVIITRKVKYAENPNDQSLAKFRMDQVKRAISRAKVTEGLCVKSETSNQGKAICASVCMTQLT

SEQ ID NO: 363129 - protein, 352 aa, unidentified
MHARSVVAAAIDGVTGEVWRTRLTPSYDHIRSWISALPGPVAMAYEAGPTGFGLYRALTDAGVRCEVVAPSKLQKPCGDRVKTDARDALHLSRLLRLDEITAVSVPSADQEAARDLVRAREDCRGDLMRARHRLSKLLLRHGIVYSGGAAWTGAHDRWLRTVAAPQLRAPATQMAFDADYDHVLTMQARRGRLDAAIEHMATACEFTPIVRRVSCLRGVNTLTSFALAVEIGDWKRFTGNTIGSFVGLVPSEFSSGLARVQGSITKTGNTHVRRLLVEAAWHHRARYHVGAVMRARWDQAPAAARARGDQGNRRLHGRWIGFLERRKRPTVANVAIARELAGWCWSLAVMDD

SEQ ID NO: 363130 - protein, 357 aa, unidentified
MRFYTKQHQFYCGIDLHARTMYVCILSQDGEIVLHRNMPAGPDALLKAIAPYRDDIVIAVECIFTWYWLADLCAQEGLPFVLGHALYMKAIHGGKAKNDKIDSQKIAVLLRGGMLPQAYVYPAAMRATRDLLRRRMHLMRKRAELLAHIQNTNSQYNLPEIGKKLTHKGNRDGVAERFLDPAVQKSVEVDLALIDHYDRLLRDVELTIVQTAKQHNAQALYRLQSVPGIGKILSLVLLYEIHEITRFPRVQDFVSYCRLVKCAKESAGKRYGTSGKKIGNAYLKWAFSEAAVLFLRNNPQGQKFLARLEKKHGKGKALTILAHKLARAVYYMLTRDTVFEMDRFLNGYGSRVGEPAA

SEQ ID NO: 363131 - protein, 428 aa, unidentified
MAYAIAGIDVHKRMLAVVVSDLAADGEDAFERRQFGSTPAQLRLLADWLSEHQVDEVVMESTAQYWKPVWAALERHWTPRVRARAGAGAMAGTLHLAHARSNRPRRGRKRDFADAERLVKRLVAQELILSFVPAPEQRLWRTVTRTKVQLTRNRVQLQNRLEALLEQAHLKLSSLVSDLLGVSARRMLEALADGATDPGALAALADHRLRATPEQLRDALEACQELSPVYRRLLKMVLEELQLLDSQISRLDQEMAELLCPYQDQVQRLAEVPGLGVDSAQQILAEVGPTAATFPSAGQLASWVGACPGEHESAEVNYSHRSPKGNRQMRRLLNQAANAAVKSKGTIFEILYRRYVPRLGHHQTIGVIAHRLCRLIWKILHQGVRYEERGPALSQKSKRHRTARMIRALRSFGYRVELASAESTVLPA

SEQ ID NO: 363132 - protein, 408 aa, unidentified
MDVIVKRCAGLDVHKRTVVACVRIVSDDEVRREVRTFGTTTGELLELFDWLSDNDCTHVVMESTGVYWKPVWHILESGFELVLANAKHVRNLPGRKTDVSDSIWLADLLAHGLIRGSFVPPLPIQDLRDLTRTRKQLRQEMSRHTLRIQKILEDANIKLSGLVSDILGVSGRAMLQAIIAGESSPEALVAVTNGRLKASHDSLVAAARGTTRDHHRFLLKLHLKQIDEIRNTIASVDAHVETVVRPLREHVERLVTIPGVSLIVALVILAEIGADMSRFPTVQNLLSWAGLCPRSDQSAGKHRSTRLKPGDPWLKTILVQAAWAATRVKGSYLQAQFLRLKARRGPQKAIVAVAASILTATYYMLRDHTTYVDLTADHFHKHDKQKTADRLVRQLNALGFAVKLEAAA

SEQ ID NO: 363133 - protein, 350 aa, unidentified
MWIIGCDFHPRYQQVAAMNQETGEIVERRLSHQTQEAAAFYESLPPGARIGMEASCPAQWFERLLERCGHRLQVGDPATIRASVVRKQKTDARDARQLLQLLLADRFPSIWIPTPAERDARQLLVHRHKLVSWRTQVRNQLSALARSQGVFPGTRFWTQAGRQKLQSVELDRWAAQRRQDLLRLLNDLDAQIAELTRHVEQQAGARSDAVALMQQDGVGPIVSLAFVLTLGTAQRFRRGKQVASYLGLNPSERSSGGKQRFGHISKQGNRMMRWLLVEAAWIAVRKDPALQRVYQRLTFRRGSKIAVVAVARKLAVKLYWRLREFEEKNSAVAGSHAGQLGQRLMHSSTL

SEQ ID NO: 363134 - protein, 409 aa, unidentified
MPERKVYGMIDKETPVLAFDASKGSSHCQGYLSFGEPSSKPIKAAHSRSGMAAAEGISETLERKTGRKPKVVMESTGVYSKPVIRWAELNGLEVYLISPLESAKVRKSRVRPTKTDALDCGVIAEVAYTRGVRKLTAASSLYSQLYSLSRRRAAIVDRLVASKNQYRKSLDCVWPLLDEACDPFSGYAMWAVGRYGHPERLAKAKEGSIVSGLERAKVRTGAISKSAVASKLSAYAKDAISGCPAGGGEVDSLLSALDDVIRDMRALDEITGRLLGLAKELPHFALIASIDGIGDALAALLCAEIGEPSRFNSRNGIVAYAGLDPTILQSGRNDGLHYSITRKGNALLRKCLYLAVENMIITKADNAITRFYSKKKSSGLCHKAAATAACRKLLVTIWGMLRSGSFFER

SEQ ID NO: 363135 - protein, 423 aa, unidentified
MKLSYPVCCGVDVHKTFLVATIITSDFIIPKYKQKRFSTFYSGLLSFKQWLLENNCKDVCMESTGKYWVPVWNVLEGSVHVVIANPKWVSAVKGNKDDKKDSKWIGELFRMGLVPGSYVPSKDIRILREFTRYRSKLVSMRASEKNRFQNAFTVCNLTLDAVVSDMFGKSAASIENYLLSTDSVDPDYCVSLLQGSLKKKASDVVEAIEGFSMTEEQKTRVRIVQGHFADIDKRIAELDETIGNLVSDYEGVISLLCTIPGIDRRLAITILSETGTDMSQFGSSKRLCHWAGLTPGNNESAGKKKSVRISRAGVYLKPALVEAAHAAVKSSQSNSYFRTKYERIMKRRGKKRAIIAIARMMLTCVFAMLQSGEVFNPCDIQKFDMPKELRKRQVLSSAKDAVKLLVSLGVVSEGMISLEKLAS

SEQ ID NO: 363136 - protein, 320 aa, unidentified
MTRIFIGVDVCKEWLDGAVRNASTPPRRFGNDSEGIDQLVAWARDFGPERIIFESTGLYQKKAVGALLAAALPAVVVNARQVRDFAKALGQLAKTDALDAGVLAHFGEVVATTVRPLPAPEIQEFQHLYDRRSQLVRMLAAEKNHHHVGGPAKVMASIDNHIRYLEKQIRALEDRMDKFVESSDAFRAKDEVLQSIPGVGPQVSRTLLAHLPELGQGSRQTISALVGLAPYNDDSGKESRIRHIRGGRGKVRIGLYQAAVVAIRHCPEMKVFYAGLKARGKASKVALVAVARKLLVLANALVRTMRPYETRTNSVCPKNA

SEQ ID NO: 363137 - protein, 347 aa, unidentified
MKNIDVIGVDLAKNVIQISVVSRSNRELKNRSLTRKKFAEFLARQAVSLVAFEACATAHYWARAAKRHGHEVKIIPAKVVTPFRQGHKTDPNDALAVAEAARRPNVKLSPLKSIDQQSLQSIQRSRELLVQNRTALSNHVRGILMEFGIVIPQGFSSLHRHLPEILEDGESELPDMYRSTLHLLWRRLCELRDDVKQLTTEIEGLVKQEGSCKRLLALEGVGPIGAVLLFATLGTGEAFANGRQFSAYLGLTPKQFSSGGKVNLVGISRHVANKRLRAVLIQGARAYVHKLKEPKSSKDRWLKALIERAGTGKASVALANKNVRTAWALLTRGTAYEKHHEHALEAA

SEQ ID NO: 363138 - protein, 355 aa, unidentified
MNDAKYIGMDVHTATISAAVRDSSGNLVMEATLETKAETILEFVHGLRGSLHVSFEEGTCAAWLHDLLKPHVSEVLVCDSRKNALLRVGNKNDREDARKLSELLFLNELHPVYHGETGIRTLKELARSYLTITRDLTRVMNRLKAIYRGWGIACAGQQVYAPRYRAEWLAKITEAGVRRRAEIYYQQFDALAALRQEVRRQLWAESRKHPAMRLLRQIPSIGPIRAALLIALMQTPHRFRTKRQLWAYCGLALRTYDSGEYRFVGGQLKRSKKAVTIRGLNKNHNHDLKNIFKGAATRAAATAGPLQNFYEARIANGMKPPMARLTLARKIAAITLLVWKKGVRFDAEQLKQQAV

SEQ ID NO: 363139 - protein, 348 aa, unidentified
MLHAGLDLSRRRVDYCLLGEGGERVEAGVAPADGDGLCGLARLVELRHGRQPVAAVIESMNGARFVHDVLERCGWDVEVADAQKVKGLAPLACKTDRIDAWVLAELSRRDLVPAIWLPSFGQRGERERARFRLHLVKHRSSLKHRVHAQLMAFGHSCPVSDLFGARGRELLERLDSPEPWRENVLACVALIDDLDRRIDALERELKALGADHRYVPLLITVPGVSWVLGYTIAAEIGDITRFATPKKLCGYSGLCPRVYQSGDTDRRGPLANNGPKYLRWALMVAATNAAKHPLYRQRYQATKKRVGRQRGAKVAQIQLARTLTEAIWQMLTRDQSFAPAGAAFPLAA

SEQ ID NO: 363140 - protein, 316 aa, unidentified
MANLTQSKSVVNVGVDVGKSFLDVCIHEKQIYFQEENTVKGIQSILKRLSYYRIERLVVEATGRYEFALVEAAYLKAIPVCIMKPLSICRYAGAVEQLAKTDKIDAKIIAEFAAVIKPRPTPEKSKNLLAIKDLLARRRQLIEIRTQELNRLQIMGKRLEASCKRIIKVIDKEIDRIETLLTEHIDEETEWSQKRELLISTPGVGNTLVFTLLADLPEIGTLNNKEISALVGVAPMNRDSGAMRGKRKVQGGRATVRTILYMATLSATQCNPVIKSFYRKLVAQGKHKKVAIVACMRKFITILNAMVRDKKEWCHA

SEQ ID NO: 363141 - protein, 386 aa, unidentified
MHHPTTLPVSEQTCSREDCATLFVSLELSRSTWVATSLALGSRKMSKHTLVGGDARKLLDLLARLKSRAEQRIAAPVKVVAIQEVGLDGFWIHRLLEANGVESHVVDPASIAVPRRHRRAKTDAIDGETLLRTLMAWQRGEPRVCAMTVPPSPSEEDCRRVSRERATLLRERIRHTNRIRGLLFGQGITNYNPLHKNRRTGLEELRTGDGRALPAHLKAEILREIDRLELVLRQISEVEAERDEMLRPAQASSPATLLMRLKGIGAEFAGVLYLEGLFRHFENRRQLAAYAGLAPSPWKSGSVDHEQGISKAGNPRLRTTMIELAWMWVRYQPASALSCWFRQRVGSERGRIRRITIVALARKLLVALSRYINHGEIPAGALMKAG

SEQ ID NO: 363142 - protein, 315 aa, unidentified
MSDVPCFVGIDVAKAQLDIAIRPTGERWTVPNDASGVATLVDRVQTLQPTLIVLEATGGLERLVTSALATAGLPVVVVNPRQVRDFARATGQLAKTDALDARALAHFADAIRPKPRTVPDAQTQELRTLLGRRQQLVAMRTMEQNRLAGTSGRLQTDIAAHITWLNARLATLDDDLDTVLRSSPLWRENDDLLRSAPGIGPVCARTLLLELPELGTLTRQKIATLVGVAPLNCDSGTLRGRRMIWGGRARVRTVLYMATLVATRYNPRIKAFYERLLAAGKVKKVALTACMHKFLTILNAMLKHRKSWQDQEVQG

SEQ ID NO: 363143 - protein, 348 aa, unidentified
MPNYNQPHQFYAGVDLHARSMFVHVLSAKGKTVFERDLPAEPDAFLDALKPFRKNLVVGCECMFAWYWLADLCEDQRIPFVLGHALAMKHIHGGKAKSDKIDASKLANMLRGGMFPLAYVYPRAKRQTRDLLRRRSFFVRQRAQLITHIVNTNSQFNLPPFAKKLSYAANRSEEIAERFPDPSTRLMIGADLRLIDAYDAQIATLERHLLQSAKVDDPVTFGFLRTIPGIGPILGLILLYEIDRISRFPEAGNFLSYSRLVRCAHESGGKVKGFGGKKIGNAHLKWAFSEAACLMLRTCLPVKSWMQRQEQKRGKRKALSVLEAKIGRTVYHLWNKQQAFDAKKFLHA

SEQ ID NO: 363144 - protein, 340 aa, unidentified
MHSHFVGLDVHKQVIAYCIKKADGQIVTEGKIKSTRRALTEWLQTVSGPWVGGMEATMFSHWIYAFLKPHAAALYMGHPAKMKAIQAGKKKSDKMDARTIADLLRCDAFPKSFVISPELGRLRQQLRFRQLVVKQQVAFMNRTAGLLMEAGVEYERRRLHGKRYFSELMRESGWVNNEVQPLLRFSREQIQNLGEMDKRLVRLLERHPQLQARVSALRTIDGVGPILALSWALETGTPERFPSIKDAQSYCGLTSAFWESAGRQKRQPLSKQRNKHLQTVLVEVAQLAPMHNEKLKAVYEKHKASGADSNQAALEVARKLVAYLLAVDRAFLRGQLPRTA

SEQ ID NO: 363145 - protein, 347 aa, unidentified
MKILALDLGKYKTVACDYERESGEHRFRAIVTTPAALQQLVKDVKPDRVVIEVCNIAGWVCDLLRGMGVEVQVANTSDDAWRWRKVKKKNDRCDALKAAQLSAVNQLREVHIPIIEVREWRALIAFRQQLVQRRGKVKNHIRDLLVTTGQILPRGAKCWTQLGVARLEALAQPLNEVGMSELWRGELAIELRQLQAMQQEIAVVEEKLDALAKADPRIALLRTIPGVGPRLSEAIVALLDQPERFHHARAVSAYIGMVPKQLDSGETERRGRITKHGSRLVRSLLVEVAWAGLRYNPWVRETYQRISGGKKSRKKIAIVAVGRRLLVRCWAMLRDGTSWRAPVANAA

SEQ ID NO: 363146 - protein, 453 aa, unidentified
MEEEEKISMEIVNPHAAGIDVGSRSHWVATGQKEQDVREFGVFNEDLFAMADWFFEKQIKTIAMESTGTYWQNLFAVLIAKGFHVILCNGKFTKNIKGKKTDIKDCQWIQKLHSLGLLSSSFLPDEKTEQLRTYCRHRANLIHNAASTSKKMQKYLRLLNFRLDVVVNDICGLTGLSIIRAICDGESNPQKLASFRHGNCRKSQEEIAKALQSNGRNDYLFGLQQELEMYDHLQLKIEQCDNKIKQKLDEIIENDDNKRQHYIDSKSYKRINKNTPKNIDINLKSYQMFEGNDLLAIEGMSYSTVLSLMSEVGIEGIKKFPTAKHFASWLRLAPNNKISGGKVLSSKVPKGSNRLKIALRNAANAIGNLKDSTPLRDFFQRISFRKGRVSAISATARKLAVIIWNMVVKNVAYINPEGYLFLDQKRKLGIVKRIKKQIDKFALTNEDLGIATN

SEQ ID NO: 363147 - protein, 492 aa, unidentified
MKTSRKIQSVYRNQNVLIRAVFERAGNAHKVLCVALDYAKRKHLALICDGHGDVLKASFPVANNAEGIAHLVKEITATARRRKIPKDQIFLGGEDEASYVANFTEALRAKGYLVVRVNAYEAKENRENLLASTDTLDLLGIAKTLLSRRARLTGEADSPNPAYHHLREITRCRRSLVRQKTAASNRIHALADQLFPGFLNSSKSALTPFTDASLELMKERFSAPEIARRKSASLGNFLRRHRVQHPDETAARIILLARDALPPAAHRVATLQRTLTATVDLYQCLQRNALELRADAALTLATTPYVMLTSIPGIGFVLAAGLAGELGDPKHLGKLDSLCAYAGIVPRTLQSGGPDSPAVQGHASPRCNRILKDWTVQSAQKIHLYGPPELKDRITRWNANGQHGIFAAARRHLRLVSTLVKNEIPYLAPEGRTRQAAPEQIATAAHATWGVLQRKWRTVSGGLDLILDEAHPLGFWRKVMLELHGIDLPTRP

SEQ ID NO: 363148 - protein, 310 aa, unidentified
MEVVNERCCGLDVHKQTVVACVITPGGRLPHKEVRTFGTMTADLLELSDWLAECQVTHVAMESTGVYWKSIWNLLEDQVELLLVNAHHVKQVLGRKTDVKDCEWLADLLRHGLLRASFVPDRPQRELRELTRYRTSLIRERSAEINRVQKTLEGANIKLGDVASNVLGVSGRQILTALVSGTADPTTLADFARGKLRSKLPQLKRALVGQFGAHQRFLLAQQLAHLDALDELIEQLNTEVEHRLHPFDDALNRLDSIPGVGRRTAETIVAEIGLDMTRFPTAAHLASWAGMCPGNNESARQAQERQDAQG

SEQ ID NO: 363149 - protein, 418 aa, unidentified
MKSMEITAVGIDVSKSKSTVAIRRPGGVIVARPFDISHSNHDLEKLVSILKTTGGDIRVVMEHTSNYWKPIALTLKEAGFYVSVVNAMLIHDFSDNSIRKLKTDRADSLKIANYALTFWNELPPFNDEDETRLVLRERSRMYERLASTATSLRNGLIALADQTFPSIDQAFGHAIKNADGHEKWVDFFSIYWHRDCVLRLSIEKFTESYRKWCLRRNYKFRTNTAHKLYALAQDAVPTLPKNNGTKALVLQACKSLNAVCEAKQSTQEEMNRLASLLPEYEVVMQMEGTGPITGPALMAEIGDVRRFKNKKALVAFAGIDAPPFQSGNFESKSRHVSKRGSPHLRRTVFLVANIILTLSHKDNSVFCFMDKKRAEGKHYYVYTIAGSAKFLRIYYARVSEYSRAQESPAAASCLNGNS

SEQ ID NO: 363150 - protein, 404 aa, unidentified
MKGPIVSIDVSKGKSDYQAFKNLNVKYAGSRSIKHTKEGFDEIVNLVREMEKKLETEVCVVYEATGVYHRVLKKVLEDNNIKQFIINPLLSAKTRKNDSLRCPKTDKLDPKSIAKTYYSHSLHNSHKQETIYHELRELSRYYEDILVHIRKDKVAFRAQLDIVFPGYDTLFDDLYGPVALAVIEKYPHPEMLQKKKINTVSKVIQSKTCHRQAVSDTMADKAIEYSKTIYSGCDKDDIEVLILQRFIKKLNEDMAEAERTIGEMIKLAQELPDFNIIKSIPGIGDNLAARIIAELGDMTRFKKKNELVAFAGLDPRISESGQNDGDHMHITKKGNKRLRCLLYLAVTCSIRLKRDDNSIKDFYIKKKQQSNPMCSKAAKTACASKLVRIIYSMCKTGELYQYNK

SEQ ID NO: 363151 - protein, 331 aa, unidentified
MDEVRRFVGIDVAKAALEVFIGSAGAAFSVANDEAGIRELLRQLTPPDFVILEATGGLETPVASALATSGIAVAIVNPRQVRDFARATGRLAKTDRLDAEVLARFGEAVRPEARPLANEQAQALGALVTRRRQLIEMLTAEKNRRARAPKVLHRSIDEHIRWLEKRLSGLDAELAELIRDTPLWRERDELLRSVPGVGKVLSSTLLAQLPELGMLNRKQIAALAGLAPFNRDSGKLRGSRCIWGGRAQVRRVLYMATVAGLRSNPAIRTFYLRLRANGKHAKPALIACMRKFLVILNAMLHNKTHWQTPAPTFLTSSLSPLLGAVSEHGCC

SEQ ID NO: 363152 - protein, 406 aa, unidentified
MAVMIGVDPHKASHTAVAIDQSEQLLGELQVRSSADQVERLLAWAVKWPQRTWAVEGAGGLGYLLAQQLVSVGETVLDVQPKLGSRVRLLATGNVNKNDPNDARSVAVAALRSKDLRPVATEDHAAVLKLWSKRRRDLGSLRTQVVCRLHSVLCDLVPGGHPKKEMTATQVARALAALEPAGAVQAARYELAMDFLADLRRIDTQMREAKKRLEVAVKASGTTLTEVFGVGPYVAGTVLGYVVDVSRFADRDHFAAYNGTAPIEVSSGGHKVFRLSRRGNRRLNHAVHMAAVTQAAHRHSEGRAYYERKIKEGKTNKEALRCLKRRISDAIFTHLVADAKRKTQSGQAGPGGQRGNGSVSSVAGSHPERQLFGQATPRPVHTIRPTVTSRGAKSQEPIGKKSRKAS

SEQ ID NO: 363153 - protein, 359 aa, unidentified
MPTKFGVVALFPGRPIVDQYVALDVSLQKTAVCVLNASGSVVIEAELPSEPAALTAFIQTHAPRAARVGLESGPTSPWLWHSLKAAGLPVVCMDARHAHAALSVRPSKSDRNDARGLAEMVRMGWYREVQVKSLAAHERMALLGVRRQLVDMRVEIDGQIRGILKTFGMVVGSGNKGAFAQRARMLVQDHPVLSALVDKLIEVRAVAVAKVAALDKEIRRFVRDDPTLRRFMTVPGVGPVTALAFRSTIDEPDRFKRARDVGPYLGLTPRRYQSGETDRQGRISKCGDRFTRTCLYEAANVLLTKVQRWSPLKAWGTRLARRIGSKKARVAIARKIAVILQCIWTDGTEFWWTKEPATA

SEQ ID NO: 363154 - protein, 340 aa, unidentified
MNATTYGLDVAKRVFQMYWVDAQTGEIVNRRFGRDELIRFLAQRPAGQVALEACGSGHWWARKIKALGHEVVLLHAKFIRPFVQTNKTDAADARAIWTAVQQPEMRTVAAKTEDQQAMLSLHRMRALLVKFRTMQVNQLRGLLYEFGATFRAGRVAGLAEIRARMAELADALPEAMLCSLQDQLQRIDALEQDIDRLEQRIGAWQKQEAECRAIAAVPGIGKLTATALVATIGDAKTFKSGREFASFLGLVPRQSGTGGKIRLGSISKRGDPYLRTLLIHGARSVMHHAKEPTAWQREIRARRPANVAAVAAANKMARTAWAILAHGQAYQKDYVSVKPA

SEQ ID NO: 363155 - protein, 324 aa, unidentified
MSSHEIVGIDVAARKLVMIGERVALAEYENTAAGRSKLAKALSRSPRPVRVVLEATGIYFLDLACELAAAGIAVMVVNPKATHHFAEAILQRRKNDPVDAAMLREFGRRMDFVPWQPPRHELFAFRALTREAQALSKAVAAAKNRLHAITATQLAPDTLIRALERQIAQNQALVDELVAAALAETKTNRELARLVARTDSAPGFAVKAAVLVVGELAVLPPMTARQWVAQAGLDVREECSGTSLARRPRLSKRGNKRLREALFYPALTAARCCPLAGAFVERLVAAGKTRLQAIVALMRKLLHGLHAMWRNDEDFDAEKLFAPA

SEQ ID NO: 363156 - protein, 339 aa, unidentified
MLIIGCDFHPGFQQVAIFDNRTGEIQEKRLQHRAEAEQFYCSLAGQEVLVGMEACGHYPWFERLLEELGIELWFGDAAKVRASVVRKQKTDRRDAEHLLTLMRENRFPRIWVPSLEERDVRQLLMHRHNQVQTRTQVKNQLHALALSQGVQRKRKLWTQAGRAELEQLELLPYAAERRKQLLRSLDRLEQEIAELNQRVQAEVAQRAAAVKLQTHPGVGPVTALAMVLTLGPAERFASAKQVGSYFGLIPSEHSSGGRQKLGRVSKQGSSFLRFLLVEAGQSAVRKDAELCRFYRRLAARKHRALAKVAVARKLAMRLYLMLREDWDYAQLCKAVCRQA

SEQ ID NO: 363157 - protein, 353 aa, unidentified
MQYIGCDFHPSFQMIAQLDKKTGELVRRRLGHGEGQGEVQRFYQALPGSWVVGVEATGSTYWFERLLEKLGHQMWMGDAGKIRQQDGRKQKHDKRDARLILRLLLEERFPRIWIPSVAERDLRQLLLHRWHLVRMRARIKNQLQHIALNQGLQKKSKLWTKAGLEQLRKLELEPWARQRRDELLEMLEQMVERIGPLDQAVEQAAAAQPRTSRLQTHPGVGPVIALATVLTMGEVGRFPDSRSWVSYLGLNSSEKSSGEKRWLGAISKQGNPFLRHLLVEGASSAARGDKDLGRVYARLKARKHHGVAKVAVARKLAVRLYWMERTEKSYPEVVRMQGSLSHPVVSSHGRDLE

SEQ ID NO: 363158 - protein, 347 aa, unidentified
MDQQCHYVGLDVSLETTSICVIDDAGAIIWRGKCHSDPDTITAIVRHRAPGAVRVGLETGQLSNWLTLSLRRRGVPVVCMDARHAKAALSLQINKTDANDAFGLAQVVRTGWYREVAVKSMDAHTLRMLLVARSRLVSQRQATANTIRGLLKTFGLVVARGSKGLFPVRVREQIAGNPAVIAIIEPLLAVWHAIRDQVAMLDRQMLARARNDQVARRLMTIPGVGVVIALAYTAVIDDPARFRRSVSVGAYLGLTPRRYQSGEVDTTGHISKCGDSLLRGYLYEAAAVLLCRDARASILKSWGLGLAKRIGMRRAKVAVARKLAVIMHRIWSDQSEYRWTAIPPTAA

SEQ ID NO: 363159 - protein, 335 aa, unidentified
MTIRYFIGVDVSKATLDWAVFDGKTTVFQTQSVNSPAAIRTTVKLMKALPGFTVADSVCCLEHTGIYSTHILSSLYRLRLPIWLESSLQIKKAGGLQRGKSDAIDARRIAEYAFRFQDQMCLWQPPRPVLQKLAALSALRQRLLRVRHQLQQPINEQQGFVEKSLQKQLTKDCQVSLKAINADLANAEKQINELIQSDDRLKELFGWITSVPGVGDAIATEVLVATNEFKAIGDPKKLACHAGVAPFEYRSGTSVRGKTHVSQHARLRLKSLFHLGAMSAIRMKGELQIYYQRKVAEGKNKMLVLNAVRNKLIHRVCSVVHRGQKYDKNYTPVLA

SEQ ID NO: 363160 - protein, 444 aa, unidentified
MDEADSVAGGAGSSEASPGGITPPAPRETAASKQATDLPPVAEAIGTPAWSEPLEVGAQGRSVMRSVGLDLGARHIAYCEVRAGQVVDRVAVTRLEELASRLGNGTAPACVAFEAAREAWHVHDVLTQWGHQPKIVDTTRLKTIGVGQHKRKNDAIDAEHIAMAVDHGRIPEAHVLSPARRELRKQLSIRQALVETRSQYVVTIRGLARAEGTALPSCSTHNFLDRLQATELDGKIRALIAPLVAALEAIEQQLAHVDDELEQVAKTDPLIRLCATVPGVGLIVAATFLSVIDDPKRFKSAHAVSAYLGLVPSESTTGGPAKRRLGSITKQGNPHARAMLVQAAWSILRASPADDPLRMWGARIAKRRGSPIGAVAVARRLAGVLWAMCRDGTFYSPAEQANASSTGVRRRIQDDTAHAAALELAAKKIHRRTKRRPTSEVASM

SEQ ID NO: 363161 - protein, 347 aa, unidentified
MNISRVGVDLAKNVFQLNGVDRHGKTVWKRKLSRDRWLSVLFETVKPGTMIGMEACGGAHHWSRILLSKGYPVKIIPPQYVKPFVKTNKNDANDAHAICEAMVRPGLYPVPVKTIEQQDLQAIHRVRADIMSHRVAKANQIRGLVSEYGLVAPQQFAALRRAIAYWLDDSDNGLTLCFKQLLQGLWDDLCLLEQRLGELDKQIADYAQKDPVAKRLQQMRGVGPLIATALVATIGDGKQYRKGRDMAAALGLTPKQYSSGGKERLLGISKRGDSYLRSLLVHGARSAMYYAKNRQDGFSRWIMNLRSRRHPNVVAVAIANKMARTAWVLMTKQVDYNPNTGMGSARC

SEQ ID NO: 363162 - protein, 353 aa, unidentified
MDNGSRYVGLDVHRDTISVAVCDSRGKLLLERVIPTSAAAVLELLELLRGKLHVAFEEGTSAQWLAGLLQPRVAQVLVCDPRKNDRRGSKNDRIDARELADLLRCGRLSPVFHQDCGLTALQQMARTYLVLTKDQTRVMNRIKAIYRSWAIPCAGQSCYSSKQREAFLSQLPHAAVCGRAQIYYQQMDSLLTLRQRVRQQLLREGRKQPALRLLRQIPYIGPLRATLLVVFIQSPHRFRTKRQLWAYCGLGIETHDSGEYRFRQGQLERKRQPTVMGLNRNHHHLLKYILKSVAARCCSGSGPLRDFAQTLLDQGMRPEMVRLTVARKIAAIVLVLWKKGVSFDAHYLKSQAA

SEQ ID NO: 363163 - protein, 407 aa, unidentified
MELSALYKCVIGLDVHQSQITACALIQQPNGGVRIEQRQFGGFMRDRRELAQWAASLNPDEVVMESTGIYWKSPYAALEAVGIRAKVVNARHVKHVPGRKTDVGDAHWLAMLARAGLLRASFVPPAALRELRLIARQRQKLVGQLASEKNRLHKVLTDSGIRLGVVVSDLHGQSARAMVKAIIAGHAPQQVIKLASRRLKASREEILDALQGELSASHRFVLDELMQHIEEIEARISRFDARLLEGLESERDTLALMQTIPGIDQIGAAMLLVEIGADMDAFGSADRLASWVGVCPGNNESAGKRKSGHTRKGNPYVRRLLCEFAHAASRTTSMFKSKFQALVVRRGYKRAIIAIGHKMLRTLFFMLKRREHYRDCATDYEALSVQRNAPRWIKALTRFGFITPASA

SEQ ID NO: 363164 - protein, 343 aa, unidentified
MQAITTIGFDIAKSVFQVHGVDAEGHLVIRRQLKRRRVIAFFQKMPPCLVGIEACASSHYWSRELQAIGHTVRLMPPAYVRPYVKRQKNDMADAEAICEAVTRANMRFVPTKTPEQQSGLTLDRTRHLFMRQQTSVINAIRAHLAEFGIVAPVGRRGVEELLCVVADPNDKRLPEIVRASVAALASQLLSLKKQILDFDRMIMAWHRSNQTSKRLNCIPGVGPLLATALIASVPDPKAFRSGRNFSAWIGLVPKQRSSGGRERLGSISKQGDRYLRSLFVTGAFAVIRYAKIHGTKHRPWLTALLARRPTKVAAIALANKLARMAWAMMTTGERYNYPASLKV

SEQ ID NO: 363165 - protein, 339 aa, unidentified
MVEVYAGLDVSDKSTHVCVTDGSGVVLWAGACATDPEVIAKTLRAKAPGLVRVILETGPLSAFLFHGLSERGVPAICICARHAKGVLSARVNKSDPHDAEGLAQMARTGWFKAVRIKDEATHMDRACLKIRDQLIDARQALAGQLRGLLKLFGLRLGKVTTPAKRRERLTALFAQKPELEPIMTPLIESLETLEVQIAGASKRLAALAAADPVAARLMTAPGVGPITALVFKTSIEDPSRFARGEDAGAFAGLAPRRNQSGERDYKGRISKAGDPMLRSALYEAANSLLGRVKRPCALQAWGKRLAETKGPKRARVAVARKLAILLHRLWLSETEFRWA

SEQ ID NO: 363166 - protein, 451 aa, unidentified
MSKRQTVKPAPVAAPAPEFAARIGLDWADQKHFWTMLGGDGKKTRGQLDNTPEAIQVWAAELAQRFGGRPVALALEQSRGAVIAVLSKYAHLALFPVHPTSLANYRKSFSPSGAKCDSVDGDLILDYLVKHPEQLRCLRPDTVETRSLQFLTEERRKLVDAHTAVLQSLIHWLKQVFPQMVRWFDDPATPLVADLLLRWPTLQELQKVQPKILRKFFHAHNCRSEERTQERLDQIRDAVPATHDPALLQTGTLSIQNACRILTSMRQGIAEFDQQIAATYQAHPDHFITESLPGAGPALEPRLIAAVGSQRDRFASAYNMVCCFGVAPVTESSGNSLWIHWRWACSKFVRQTFHEWAACSIRTCNWARAYYDRQRAKGNGHHAAVRSLAFKWIRIFFRCWRDRVAYSDQRYEQALRTRAAKSKLPQTDTGVAPTVGWKSCGGFSKLVKVSS

SEQ ID NO: 363167 - protein, 401 aa, unidentified
MTATHSTNRTVSNAPVLYLALDLGLREWKLAFTVGLGQQPRLKTIRARSTMALLEQIKAAKKRFGLPEDAAVLCCYEAGRDGFWLHHFLLAHGVQNQVVDSSSIEVNRRQRRAKSDRLDAVKLVQMLIRWYNGERKVWSVVHVPSVEQEDARQLHREMIKLKAERTAGANSIKGLLAGLGLSAIVDETLPAQLEKLRQWDGAKLPPGLHQRLVREFQRLQLINQQLRELEAERTAKIRDDRTPHVEKVRRLLNLKGIGQNGAWLLVYEFFAWRTIKNRRELGSLAGLTPTPYSSGESRREQGISKAGNRRVRWMMTELAWGWLRYQPQSELSQWYQRRFGRGNKRLRKVGIMALARKLLIALWKYLEGGEAPSKAIVTGWESKPGFKGAKRRQQTANAQTG

SEQ ID NO: 363168 - protein, 368 aa, unidentified
MATKFHGIDRHKDYSTIAVLDRKGEEVDFELRCTDLRAYIRTLGPEDAVVLEAGSGSFYWADQMETEGALCYVIDPHKFRIIRDSWNKTDKQDARNMAWALWVYRVTGKYGMTTVYKPSVTIRELRRLFSMYQLLNRQIRVLKNNIQAVLSENGISLNRERKNRLLSPRHGKKAVEEIELTHASGVSVNSSLEMLWKLEEEKKRLKKEILLTGEPLKESVKLLLTIKGIAPVVALAFLADIGDIERFPTARKMNAYLGLVPRVKESGGKSRHGHITRESRKLTRTLLTQSVYHVSNASPGFRKYYVELTERRGCGRARIALIRKLCGVMRRMLLTGECFRWMDDELFKGKCLVYENELESIKREKKVA

SEQ ID NO: 363169 - protein, 384 aa, unidentified
MPRVVIGVDPHKASNTVVVIDAQEQVLAQQRFPNDRAGYRSMKTFARTHRDRVWAVEGARGVGAGLAQRLVADGEPVLDVPARVSARVRALGGGSGRKTDDADAFAVAVAGLRARDLQVVRPDDAIEILRLLSTRRQEVVAARIATVNRLHDVLCQLIPGGAKRHLSATRARQLLSAVRPRDAVGKARKQLALDYLGELERLDARLNELKKHLTGVLDEHPTSLREINGVGPINAAKILAETGDVRRFPSKAHFASYTGTAPVDVSSGDNNRHRLNRGGNRRLNHALHITAVVQYRMPGPGQDYYRRKRDQGTTHLEALRCLKRRLSDVVYRHLADDQAARSPGGQVGASLRSSAADLIPMASTSEQSLPGLDHDPTPVPAVVS

SEQ ID NO: 363170 - protein, 396 aa, unidentified
MKNVYGSVKAVGVDVHYKFSTVTMRNGDGKVVRRERLEHGDRTALRGKLSRWPKEAPIVMEASFGWAWLADLMVELGLDPQLANCYKLEQMRKARGPAKTNKKDADLLSLLPSEREQWWRVWMSPPEVRDRREWMRYRSSLVRIQTATKNRISALLHRHGVLHEFSDLFGVKGRRFLAELWRDGGTPEAPLPGGARRALGGLLELLGQVRGQLAQVAQELRGQLERSEEARRLDGVPGIGLILAHTLLAEVGQIERFRNHRALASYSLLGPIARDTGEEDGGSPVGRHLGHRGNHTLQWAFLEAAHGAVRRGGKWRRWFDSVTEGGTRDRNRGYIKVARELVKVAYVVWSKRVDYTDNPPPRAGRAPQSPRKRMKKFLSSTRSGTGQPCQPMAVVR

SEQ ID NO: 363171 - protein, 387 aa, unidentified
MTIVVGVDAHKRSHTLVAVDAVGVKLGEKTVPSTTAGHWRALTFVHARFGTDAVWGVEDCRPLTARLERDLLAAGQRVTRVPPHLMSRARASSRTPGKSDPIDALAVARAVLREPDLPVAFHDQASLELKMLVDRREDLVGQRVATINRLLWRVHELDPAQIKPINWHRKKTRQTMGSWLATPTGLLAELARDELADINRLSDAIDELGDRIADRVRAVAPTLLALPGCAELSAAKIVSETACVERFKSEAAFARHIGLAPVPHWSGPVNVQLKPTRRGNRQLSTAIHRIAVVQIRMDCAGRRYFQRRLAEGDTRPRALRALKRRLSRVVFQSLRADRELRVHSTDGEAGMHVARVCSRGPLSSIPSEESGSRVVTPVSHDLSHADW

SEQ ID NO: 363172 - protein, 391 aa, unidentified
MMKPTNNKHTMKKKLLFAGLDVHAKNITVALAEGGGGEARLYGTIPNDLHALERVFAKLRKAHPGVELRVCYEAGPTGFVLARRLAQLRVHGTVVAPSLIPTRSGERIKTDRRDALKLARLHRAGELTAVHVPDANDEAMRDLCRARTDAVADLRSSRAQLKAFLLRNGYRYTGKSAWSEAHRRYLREVVLPHPAQRVVLEDAIRAIGSAGERIGRLEDQMHALLESWPMKPVVAAMMALRGFALVGAMVIVSELGGAWRFDHPRQLMAYLGLVPTENTSDSKRRQGRITKTGNSHARWLLIEAAHHYRLSPKVSRELSVRQQGQSEEIKACAWQAQTRLHKRMRQLCARGKERNKVTVAVARELCGFVWHIFRLMEPRMRPATATRPATA

SEQ ID NO: 363173 - protein, 428 aa, unidentified
MNNEDIIRREQFCQIQSEICGSDDYLVIGLDVAKDKHLAFMGSATGKSLLRKLVFENNLNGFRKLLERSDAVRGQNALCKVVFGLEPTANYHKPLGTHLIRCGCHVVLVTGKAVKNNRELLDGRWDKHDTKDAANIADLVSRGRCLYYDYPSGSINQLRQLLSLRRRLKKEEHSLRMRIRNNLLAQYFPELDRFFSACESETLAIVRWCLDPKTISSLEFDEFFSMVTTAKRGIAQKLRLQKIHRLAVESVGCSMGPAAEFEATLLVDKLKQVRHQLKEIADLMEDFCMEFVEYSCLLTIPGFGPYIAARVLASIANPRRFDSSNQVIKLAGYDLGANRSGKTSNEAVPVISKRGNGELRYALYQAAHVASTRNRDFIRYFTRMLRDRQRERGIKTKMRVKLAVKMLKIAWTIMKKQEAFDPEYLSME

SEQ ID NO: 363174 - protein, 319 aa, unidentified
MNTTTAAHIDRSERHVGIDIGKSMLDVCIFELDVYLQYPNTTEGIRELLKKLSRYNLTRILVEATGGYERGLVEACAEKELPIIIVQPTHVRQFAKAQGIIAKTDKMDSRLIAQFGAVMKPEVRSLNSKKVRYIRDLLSRKRQLNEMRTQELNRQHKAPAILAATHKRLIKVLDKEIESINKLLAKAVNEITEWQRTYEIVNSVPGVGDGVTFTLLGELPELGHLSPRKIAALCGLASFNRDSGIMKGRRRIKCGRAPIRTVLYMAMLSAIQCNPIMKKFYKKLVAQGKHKKVALTACMRKMMTILNAMVRDNCEWQAN

SEQ ID NO: 363175 - protein, 459 aa, unidentified
MDVYYLAGDVSKGYCDFVILNKFKEVVEANFQLDDTPEGHCILIQTVKKIFAKDSGAEVYAGLESTGGYENNWYSTLFNLKNNCAFYVARLNPIGVSHHKKANMTRNGTDKISARAIAEYLIDHNKKIIYNKEDTMASLKKAWSYIAMLNKQCSQLLNQFETGMYTAHPHLLTYCKNEVPEWVLKVVIKYPTSRILSRSHPTTLAKIPFVTLVRAKELIENAKATIGSAQDEVTEFWIKSLAEQILNLRLLINAQTKMMMRFCPLPEIEILTSFVGIGKFSAVGLMLVIENIKRFESSKRLCSFVGIHPVSKQSGDNIFEIRMSKQGSKEARCILFNVAKSAIVHNDMIKGLYQYYQDKGKKKMSAIGILMHKIMRIIYGMLKNNQKYDPKVDEANRKKFIDGLEKNKAKETKPDKNRRLQEMDAQAPISQRQQKKRQAMTVTAITAQSLRKGNNIEEV

SEQ ID NO: 363176 - protein, 345 aa, unidentified
MQIKSIGIDLGKTTFHLIALGMRSQVVIRKKFSRSQLLVYTANLPPSLIGMEAGVGSHFLGRALREQGHEVRLIPAQFVRPFVKSNKNDYRDAEAIAEAVERENMRFVPIKTEDQLDLQALHRVRDRLVARRTSVINQIRAFLLERGISFRKGPASLRQQMPEILENADEKLSTRMRRLLDFLWQEWKGLQVQIESLNRDLEQIASSDPSCVRLQQIPGVGPLVSTAVVSAIGNGAAFKKGREFAAWLGLVPRQWSTGGKAKLLGISKRGNPYLRKMFIHGARAAVLRVKREGSSLGQWMSGLETRTARNVVIVATANKLARISWAVLASGNDYHPRHPALGFSN

SEQ ID NO: 363177 - protein, 348 aa, unidentified
MRRPPVPIVGGLDIHRKQLTFDYLDIDSGQLRRGQLAPADRSHLAAWLRRFDGVDEATFAVEACTGWRYVVEELRRAGMRVQLAEPADTAAARGRKKRAKTDRADSKLLRELACEGRVPQCWIPPSVVLENRALLECYHDLRREHTAWIQRIHATCFHQGTAVLGAISTSDDVQRLRQTAATQLSPAGRVQIAVALAMLETLDTHLDAVRRRLLDVARRLHGAKILAERLYGVGPVTALAMCCWLGGAGRFSSSRQAVRFTGLDITVYSSDGKRSPGHLSRQGPPVLRWCVYEAGKTHARSSAPDHDYYATVKDRVDGKRAAISEARKLVRQAYHILDELGDAAFTTA

SEQ ID NO: 363178 - protein, 343 aa, unidentified
MAHYVGLDVSVRQTSICIVDDVGKVVREARVMSEPEAIIPILTAQHLACRRIGLEAGPLSQWLFNTLASAGLPVICVETRHMKAALAAQINKTDRNDARGIAQMMRAGLYRPVHVKSEPSQEKRTLLAARKLLQGQNRAVENDVRGLLRSFGLKVGPTSAGAFDARVRQLVEGLPRLTAIIRPLLEARAMLRSQFAVLHRMLLDLVRDDPVCRRFMTVPGVGAVVAITFQATVDIPQRFTSSKAVGAHFGLTPRAFSSGETDYVGRISRCGDALMRATLYEAAHTLLTHTQRWSSLKAWGVRVAQRRGLSKATIAVARKLAVILHRMWIEKTEFRWSARPATA

SEQ ID NO: 363179 - protein, 368 aa, unidentified
MQFIGIDLHANKFTCCYRYENSGQDGKKETVTFELSPYGMTEFCRTLTRETYALIEATITTFCFTRLIQPFVKQAIVANTYELKQISLARKNTDKIDADILCRILKMQVLSGEQAISPVVVPPVEIQELRGLFSTCRPYKKQTTQLKNRIHSLLKERLYGFTGEEIFTQKQQKMIRALEKGSAMSFQINELFDTLEYTEARVESLKDKIMEHAEPFMREIQILTSMKGISVFIAIAIIADIIKADRLRNSKAFASYLRSAPKVANSNTTVSIRGTNKKGRKLSSSLITQSLSHMLEASEKPNEWYSRLTQYKKAGSARSDLRRRIFAEIYQMLKKGEYHYGRDAEKHEAKMRQYKDFLEKRKILLETA

SEQ ID NO: 363180 - protein, 387 aa, unidentified
MPQRNDLSRSDTPLEQQSTLIAVVEMSQSSWLVAGIVPGLERHPLKKLAPDEEALLRLLHRWRDEAARAGRAVTRVAVAFEAGRDGFRLARWLRAREVEAHVIHPTSVAVSREHRRAKTDRLDTELLKRAFLGWLRGEPAHCSMAAIPTLEEEDARRPNREREGLVGERTRIVNRIKAALARLGIRGFKPTLRKAPERLAALRTAEGEPLPPNTLAELRRDMARLRLVREQIAEVEAARLERLQQAPEDRPHAMVRLLARVVGVGVETADMLVREVLSRELRDRKALARYAGLTGSPDESGARRREKGLARVGNARVRRGMLQLAWRFLRFQADSRLARWYRARTADARGGTRKAMIVALARKLLIALWRLVTTGEAPEGVALRPAA

SEQ ID NO: 363181 - protein, 431 aa, unidentified
MLNRKIKNEESYQIVNQICAGIDVHRDFVSVTLLCNRSQNDVYCEYREYKTLKQELIKMREWLLSYNCKTIGIESTGKYWHAVHNAVDGLIDVNVYNARNMKNLPGKKTDKADSEWIAKITRHALLMPSFIPEKQIRDARVLSRSRKSLVQQRSRVRQSILGVLDSAGVKLSSVVSDVFGTSGMNLLKLLMSGEPITEKRIRKLVYGPLCNKTEMLIAALDGYVRPMHIYALQEMLELEKELTSKILNIEAALNAFLLDSPEKKEVFERILLIPGFSDRSAMLLLSEIGFDLKTFPAAKNFCSWAGLAPGKHESAGINKSGKIQVRQRYLRALLIEVALASTRCKDTFIQAKYHILKSRIGSNKAVVAIAHCLAKAIYRAIHDKQEYHELGSNYVSLNQYDKDLKRLSRIADRLGKDAVMAFISQQEGNET

SEQ ID NO: 363182 - protein, 464 aa, unidentified
MPLRLGIDIACRAAHQVSLADEQGRFVWTGRRFRTTAHDLARLWAMLLEGTDPAEVLVVMEPTRNAWVPLAAWFRRHGASVVLVPPERSADLRRYYAKHTKSDRLDSQLLARLPMLHPDGLYPEQGIGPGDALKRAAKLHSTLTHRRNQSLARLDALLELLGPAWYAAIGADLANRTPLKFLAAGYADPQVVKRLGRARLARFCYRHSRGAWGEPHADALLAAANQTLELWSGGELDYPDLAEDIAIEARLALQLTEELKDLDERTALLLKQADPTRILTSAPGVATITATAILGRLGDPNRFTSLAGARAFTGLVPILDASGLNGRHGGPTKRGDAVLREALFMAAGQARRIDPTLAAKYHRLMTEAGKHHNSALCHIATTLLTRIIACWRAGQPYLLRDVDGTTVTIDQARAIIAERYLIPKDLRARRRTTTATGTDRRSKESPSAPSTGPPNHNATTPDAA

SEQ ID NO: 363183 - protein, 389 aa, unidentified
MKQIRDKVAGLDVHRDSVVACTRVTMPTGEVEIAKERFPTTQAGLAALTGFLMEAGVNTVAMEATGIYWRTVYYALEGLFEELWLCNAAHVKNVPGRKTDLSDAEWLADVAAHGMVRSSFVPPPDIRELRELTRYRKTQVDARAKEIQRLEKVLQDAGVKLTSVASTVWSVSSRSMIEAMIAGERDSVVLADMAKGKMRNKTDRLEEALESNFGAHHAILCRQVIDHLDFLDRSIATLSAEICERLVPFEPQVALLTSIPGISATTAQVIVAETGADMSRFPTAGHLCAWAGVAPASYESAGKKRPAGTRMGAPWLKRTLIEAARAAVRTKGSYYSALYARIARRRGPNKSRGRRGPLHAGNRLAPAQHGRPLPRPRCRLLRAPSRSGH

SEQ ID NO: 363184 - protein, 378 aa, unidentified
MVVMGIDCGQLQHRYCVVDEAGQVVAEGGFEEKRSSLQELRQRMEGYGRVRVVMEASGSYWQNLRAECAEWGGEALAVNPQRAAQFSRLESPRHKTDKADARALARLGLGDVQGSFGSGPAVTLAHALAGAIEERARVQNRLHSLLVLANPAIVWCRWKLNAPRTLAVLKAYPTSVRLRRARGLARVRFGTRGVVGRRAAETLQQASREALCGAVNEAHGAQVGFLVEQISRWSEEIMRLERELERRLPEAKRLCSVLGVGRRTALIVYACVPFAQLRSAKQAAAFAGLHPHLFQSGQQSYARLSKRGDAVVRTALYRAALPAVVHNPRLAEFYQRLRERDKTAKQALCAVAHKLIRICFALVKTQTTFSLTYAPDLP

SEQ ID NO: 363185 - protein, 350 aa, unidentified
MEYIAFDSHKRYTFASVEEHTGNVLRDARIDHHRGAITEFLSAWKTGTDVAVETTGNWYWIVDEIEAAGMVPRLVHARRAKMMLASVNKTDKLDAHGLNRLQRTGTLPTVWIPPAQIRDLRDLPRTRMVLSRERTRMKNRIHATLAKYGLSIEGASDAFGKRGREEIGKLLGLLPPHSRFSVERLLEQLDVVQDHIQQFEGRMKKVFAANRELELLQTLPGVGSILAVVILLEVGEVGRFADASRLAAYSGTTPRVHGSGDKFRYGQVRSDVNRYLKWAFVEAANVICLTHRRCPSRHVSQLYLRIRQRKGHQKAVGAVARHLAEATYWILKKGEPYREPHRKAVSSTKG

SEQ ID NO: 363186 - protein, 338 aa, unidentified
MKTYAGIDLHSSNNYIGIIDEQDHRVYQKRLPNQLAHIKQALKPFKESMEGVVVESTYNWYWMVDGLKEDGYKLHLANPSAIKQYEGLKHTDDKWDSFWLAHMLRLNILPEGYIYPKEERPVRDILRRRLLFVKHRTSHILSLQSMITRNFGYKISGNDIKKLNGSDADTLFNEPFLVLAAKNNISTIQFLGKIIKDIERPVKSNVKLKPEFEYLLTMPGIGDILGLTIMLEVGDISRFPTVGDYSSYCRCVKSERLSNNKKKGKGNSKNGNKYLSWAYVEAANFAIRSYPECQRFYQRKKATTNGIVAIKALSNKLARASYYVMRDQVAYDMNKLFR

SEQ ID NO: 363187 - protein, 355 aa, unidentified
MTETVYCGVDFHARMQTVAYCDSADGEIQLAQLDHRKDDVRGFYSQFTGQVIVGLEAGGYSSWFETMLEELGHTVWTGHATEIRRRANWRQKNDRRDAELILEIMLKGDFPRVHRHNRESVEVLRMLRYRARLVKVRTMISNNLQAIAMNCGLSERSRMLSRAGQQRLKSARMTPAIKHQSEDLITLLVPINERIARAERWLKQQASTDDRVKLLMTHPGVGVLTALGVVHTLEPFNRFTRQRAVVAYIGLEPMERSSAERKRYIGISKAGSRLLRFLLGEAGHTAVRFDSELKQFYERVGKRRGKPKATVAVARKLLIRCWIMLRDNIDYAEFRSRGVEARLARIHPRPSVPGQ

SEQ ID NO: 363188 - protein, 426 aa, unidentified
MVDDEYRIYVGIDWATEAHQACVLDCTGCILAERSFAHTGEAVAGFTQWLHGVAGGDPSRAAIAIEVPRGAVVETLIEQGFHLYAINPKQLDRFRDRHSVAGAKDDRRDAFVLSDSLRTDRARFRQIRLDDPLVIQLRELSRVDEDLGREINRLTNRLREQLNRFYVQALKLCPSADEPWLWALLERASSPAAGNRLQQKTLERLLRQHRIRRVNAQDVLAALRAPALRVAPGVVEAATEHIALLLPRLRLVHTQRQRCGVRLDALLDKLAAVDGDEGQQREHRDVEILRSLPGVGRVVAATVLAEASGPLAERDYRALRTHAGIAPVTKQSGKRRTVVMRYACNGRLRYALYHWARVAVTCDPASKTYYAALRQRGHSYARALRSVADRLLRILIAMLKSESLFDSTHPRRSPHPAPTPEAPCAA

SEQ ID NO: 363189 - protein, 417 aa, unidentified
MRVNEKIERITPDTLICGIDIGKTKCCARFCDYRGLEVYHKVWFDKTENLDVIGCQITAAMYNENKTDVIISFEPTGHYWLNIDKYFKDCGQETVLMPTYTVKQAKEMHDQNPTKSDPKDALLIARLTSEGKYVKPIERDELYQNIYSGYSIYEDIQKEINRIRNKIHVWNDKYFPEVEKVYKIDSVGIKPIYENQLLPNEIKNMTLENFTELMIKDNSRANKKSIMKLKELCEKSNGICSDAFTKKEIKRLYERFIEMLKELEEYEKELIELASQIDYVEKAVEITGIGYMSMIGIIAETGNLKKYEHAKQVLKMSGLSLKESSSGQKKGKKHISKRGRSKLRRNLKQIGICLVGKNNFFLQLHNYYTTERTNPLTKLVSINAIIRKFMYILMAIVKSGNSFDEEKAIRESCINFS

SEQ ID NO: 363190 - protein, 322 aa, unidentified
MNEYKETFGVDISKDVFDVHGSKTGHNQYKNDEIGFNKFLKELPSDCLVAMEATGYYHYRLAQFLYKNEVVVSVVNPLIIKRFIQMKLAKVKTDKSDAKMICEFALINEIPLYTALTDVQSECLQLFRVLDNFIKHRTATKNKMHGEEVLGIPSKFTYRSLKRNKKHYDSEIKAIEAKILSLVKEDQQQQLTLLTSVPGIGQKTALFLIIVSDGFSKFETASQLCSYVGITPTTRESGSSVRGRAHISKVGNKKLRNLLFLCSFNACKHNKACRELYERIVNKGKSKKLALIAVANKLLKQCFAIAKSGRPYDETYVSVLPK

SEQ ID NO: 363191 - protein, 315 aa, unidentified
MTNLKKRKSLVNVGVDVGKWMLDVCIYEKNTHWQDENTPDGIKRILKRLAHYRIERLVMEATGRYQLGLATAAYDKAIPVCIIKPLSIRKYAGAIEQLAKTDKIDAYVIAEFAAIVQPEPTPKVSKNLRLIKDLLSRRRQIMEMRTKELNRIQVMGKAFEVSCRRIIRCLDNEIARIERKLDKCVQQQSEWSQKKEILMSAPGVGNTLAYTLLADMPELGTMTNKQVAALVGVAPINRDSGRSRGKRRIQGGRACVRTILYMATLSATQCNPIIKHFYQQLVAQGKHKKVAITACMRKFITMLNAMVRDQVTWAY

SEQ ID NO: 363192 - protein, 444 aa, unidentified
MACSGMILIREVADAPVIMGISKPAGLKSPCGEVKIVNPLFVGIDVSSKNNVAYLMKPDGSKHSSFSVQNNLGGAKILSERIVSALGSMQLSDVVIGLEATSIYGDSLVYALREDGSLGRFQRKIHVLNPKQVKKFKEAYPDLPKNDFVDAFVIADHLRFGRIAKEVYMDDYRYQALRTLTRARFDVIQNLTREKQRFANYLFLKCSGMAQDKDIQNTSATTIALMEHFETVDDLANADLDELTAFIAETGRGRFADPNAVAKVIQTAARGSYRLPKTVNDTVNQAMSVSIASMRALKEQVKVLDKAIEQQFEIIPNTLTSIPGIGKVYSAGIIAEIGDIHRFDSQASVAKFAGLVWTQHQSGEFEAEHSRMIKSGNRYLRYYLLEAANSVRRCDSEFRRYYDLKYHEVNKYQHKRALALTARKLVRLVFRLLKDNRLYIPPEG

SEQ ID NO: 363193 - protein, 342 aa, unidentified
MYYIGLDLHKKTISYCVKDAAGCVLQEGKIGSTRHELEAWVRTLPHPRMMAMEATIFTGWIYDYLLPHAEKVKVAHPLMLRAIAAAKKKNDRVDAGKIADCLRCDFLPECHMAPTAIRDRRRVLRYRNLVQRQAVQMKNRISELLMETGVSYNKLRLHRMGYFQQLLSSNDEISDSVLPLLKFCREHIDRSIQLDRTLLRSLEQDPMLSERLQRLRTVPGVGPITALTWVLEVGDTSRFCSIKQAISYCGLCGAEKSSAEKVLRTPISKQRNKHIQRMLVEAARLAPRYSQELALLYERERQRGNANRATLAVARKMVAHMLAVDRRKTDFIPEGKLRPTAV

SEQ ID NO: 363194 - protein, 509 aa, unidentified
MPVDIFASFLAGSPAEHGVFCCAPAMFARAVCPKVTPSPQLAIVNRSGERLESGSVDVSINATCKRSSPMKREAYRSIDVKQVFVESFVADKAGIAAVVGLDVAKSEFMATVRWSDGRFERPWRAKNPEEIPDMIHRLQRLAEGRLLTIAMESTGTYGDAMRQALTDVKLTVHRVSGKAVHDYAEIFDGVPSQHDGKDAAMVAELSAMGKSSPWPYEPLTEFDQELRYLVERMDIQQRIGMLWTGRLESLLARHWPEATRYLELNSETLLQVLVEYGGPAALTADAKAAKRLKAWGGSFLKSEKIERFLQVSASSVGVRQTAVDQRRIQECAQALLLAKHEVQKASKTLEKLAQGNAIIARQAAVVGWATACVLWVYLGNPANYHCAEAYRKAMGLNLKERSSGRYQGQLKITKRGPGAVRRWLYFAAMRLVQHSHVVEWHEVKKGQRAKGGKRALIAVMRKLTLGLYVVGVGEEPFDARRLFSPTVGKRSRSGIRQAKKDEKKQRRGV

SEQ ID NO: 363195 - protein, 403 aa, unidentified
MNNVAGIDVSKGKSMVSVLRPFGEVVAKPFSVGHTGSELKELADYLKSLDGETRVVMEHTGRYYEPVARFLHEEGIFVSAVNPKLIKDYGNNTLRKVKTDKADARKIARYGLDNWVELRQHTPMDTIRMQLKTLNRQQSLYSKTKTMMKNNLIALLDQTYPGVNILFDSPVREDGSQKWVDFATAFWHVDCVRNMSLAAFTERYRKWCKRHSYNFSQSKAIEVHAKAQDLIAMLPKDTLTKTMVRQAIDALNAVSASLERLKAEMRTLAAQLPEYPVVMAMHGVGDSLGPQLMAELGDVTRFTHRNAITAFAGVDPGADQSGTHEAKSNRTSKSGPPELRRALFLVMDCLLKTMPQDDPVYRFMDKKRAEGKPYLVYMTAGANKFLRIYYGRVKEYLASLEGN

SEQ ID NO: 363196 - protein, 356 aa, unidentified
MNYVGVDYHKKYSVVTCLDEEGREVDTRRLDNRPEEFQEFFHELGGPCRVVLEASRTWGVMFDLLEELGEVESVKLAHPLKVRAIAEAKIKTDKIDAHTLAQLLRADLIPAAYIPGKETRGHKEMVRQRVFLIRTRTRLKNRIHVLLDRLHIPLPAVTDLFGKRGTDYLKKLEVAGVDGEILREDLKLLDALNELIKEAEGEIRKLLGKDRRVEWLLTIPGVGPILAVVIALEIDEIERFLNPGKLAAYAGLVPSTYSSGGKTFHGKLLPMCNKWLRWALLEAAWLAIRQSPYCRAYYDARKRHKGSHTGAVALARRLSEIIWHVWKEQRPYEERPLPRPHRLLKTWTAPAALTAT

SEQ ID NO: 363197 - protein, 393 aa, unidentified
MLFVGIDVAKSHHDVAVLDDNGLVVLRHLRILNSRQGFATLHQSLIQLSADTNDDIRIAMEATGHYHLNLLLFLQANAYPTFAYNPFLIKEFARTLTLRKTKTDKADALTIAKKLATDLSSVRFKPDFNMQELKFLTRHRNRLTDTRSKLKTQYIRLLDILFPELAGFIGKTNLHHQYVYDLLTKYPSPAKLSRAHTNALVKLLHNHGNRLDIAQQLKALAKQSIGLSSPANAFELVQTISAIRLYDEQINAIDQEITQIMNSLDEAAIVTSITGISNRLGSVILAEVNNINNFHSPDQLLAFAGLEPSVYQSGQMSATGKMVKRGSTSFRWALFQAAEYASHWSPTIRQYRQKKLGEGKHYYAVMTHVAKKLVRIIYYLLKHHQYYDESKLI

SEQ ID NO: 363198 - protein, 350 aa, unidentified
MIIIGADYHPGFQQIAFVDTDTGELQERRLEHREEAEKFYRDLAAQGTRVRVGMEASGHARWFERLLSELQFELWIGDAAEIRTKRVRKQKTDRQDAELILRLLLEDRFPRVWVPSWENRDLRQLLWHRHRMVQARTRIMNQLQAVALNEGLRAKKRLWRDAGREQLESFRLSPWASRRRHDLLELLDRLTPTIAELSQAIEQEVEKCPEAQRLQTHPGVGALTALAFVLIIGRVDRFPCGKQIASYLGLVPLEDSSGQRRRLGHITKQGNSLLRFLLVEAAQVTVRSDPEWRSKYFHLAMRRGRKIAKVAMARRLAVRLYWMWRKEWDYEQLKHFGSHAGEPGNRDGVR

SEQ ID NO: 363199 - protein, 351 aa, unidentified
MRTSQNSLETIGTIGIEVGKNTFHLVGLDKRGAIVLQRKVTRQKLGRLLTNIPRCLIGMEACSGTHFIARQLTVLGHDVRLIPAQYVKPFLKGHKNDYRDAEAIAEAVQRPTMSFVSIKTPEQMDLLALHRVRSRLVRQRTGLVNQIRGFLLERGITVRQGLMPLRRALPEILSSNSDALSPRMISLIGELIQDWRRLDERIASASTDIEALAKQNESCQRLMSVPGVGPIVSSAVVAAIGNGAGFKQGRDFAAWLGLIPKQESTGDRTILGKISKRGNKYVRTLFVQAAHVVLERRPRSAKQGLWPWIAQASKRLHRNMLAIALANKLARIAWAVLARGHAYQPRITANA

SEQ ID NO: 363200 - protein, 345 aa, unidentified
MDEVSIIGVDLAKQVFQLHGAAADGRVVFRRRVRRAKLLPFFSGQPACEVVMEACGSAHYWAREIGALGHRVRLIAPAYVKPFVKRQKNDAADAEAIVEAAQRPTMRFVTVKSAERQASAMVFKTRDLLVRQRTSLVNALRAHLAEFGLVAAKGMCHVGRLAAVLDDDATLPEPVRRLCGELIASIGELTARIDRLDREVKERARTDELARRLQSIPGIGPVTALALAVLAPPPETFGRGRDLAAWIGLTPRQHSSGGVSRLGKTSKMGQRDLRRLLIIGASAVVRWARRPASADRLAPEGSWLDGMLERKPPMLVTVALANKTARIAWALMARGGVHRAPAAAA

SEQ ID NO: 363201 - protein, 342 aa, unidentified
MGEISTIGLDLAKHVFQVHGVDEQGNAVVRKPLRRGAVLKFFAELAPCTVGIEACSTAHYWAREITALGHAVRLMPPAYVKPYVKRGKNDAADAEGICEAVMRPTMRFVPVKSAEQQANAMIYKVRELLVRQRTQLINALRSHLAEMGIVAAKGVGKLDDLIAIVHDQEDGRLPVPARQALQELAGQIAALDARIEPLQQEIVSQLSSNETARRLTTIPGIGPLIAGALVAMVPDPGGFKSARHFATWLGFAPRQKSSGGKQRLGSISKQGNRYLRSLLILGAANVLRRSSASRSAWLVALRGRRPFKVVAVALAHKIARIVWALMVKGGSYRAAMPAAAQG

SEQ ID NO: 363202 - protein, 333 aa, unidentified
MNTPTDNPRFALGLDVGKAEIHAAVLSAQNASFLAEKVFPNNEGGFHALVAWLATVLPKQAAIHACMEATGSYSQPLAFFLHERVACVSVVNPQCIKAFGQISLRRSKTDPADARLIARFCLKEQPKAWMPPTPNQRCLQALARRLKSLQAQHAAERHRLGQCLDKAVAADIRAHLLWLKNRQTKIEAQIHQIVARDETLRTQAQLLFSIPGIGRKSAALLLAEIHHPSAYASARQLAAHAGLTPRHHQSGVSGSRTTPLCKIGSTRLRLILYFPAIVAIRHHPPARALAQRLRERGKAEMVIVCAVMRKLLHTVFGILKNQLPYNPTLFAQT

SEQ ID NO: 363203 - protein, 369 aa, unidentified
MGKSITDLSPVTTVGLDLAKHVFQVHGIDASGRVVVAKAIRRNKLLEFFASLAPCLVGLEASGSAHHWARELITLGHEARMMPPAYVKPYIRRQKNDASDASAICEAVTRPSMRFVGVRSLMNQAALMRHKAREMLVTQRTQLLNGLRGHLTEVGVIAPQGLRCARELAELIEACDETIPFEVCEALAPLVVQLRNLDEAIAQLDRIIAKLAQKDETARRLMSVPGFGPITASAMAATIQDTSSFAGPREFAAYLGLTPKQNSSGGKPKLGRISKMGNRYLRKLLVVGAHAVLFHRKPHTDPLRMWAKKLIEKKPFKLVAVALANKMARIAFAILRGNPAVTIYAESLASSGRRAEALPRNLPSCGRYG

SEQ ID NO: 363204 - protein, 376 aa, unidentified
MERGSPMLNTTTFVGLDVHARSIKAVALDAMTGEVRSATFGYDAAEVAGWVSSVDPSAKCVYESGVTGFDLQKRLSSMGIDCVVGAVSKMIKPSADRRRKNDRNDAEFLARMLSVGNVVEVWVPDDECEAARDLVRALDDARDDLKRCKQRLSKFLLRHGHAFSETTPSGRRKGNWTAAHWAWIKSISFAEKADDDVLAYYIDATRRAMEDKARLERLVEAEASKPRWKRRVDSVRCLKGIDVMSAADLVFEAGEFSRFKNARSFAAWIGLTPSEHSSGESVRQGGITKAGNKHLRRVLVESAWHYLGCSPHSKDLAKGQAPDPGARRHAAKGVRRLVGRRAAMLERGVHKNKANVATARELACWCWAIGCMVENG

SEQ ID NO: 363205 - protein, 320 aa, unidentified
MNVHIAITAAGVDIGRDYLDFAIAPTGLFKRFPNTDGGVAKLVAAVCKHQVKTLVIEAIGPYSYRLLRALRGVDLSVGVVNPQRIRAWRAAEGKRAKNDRLDAQAIARFAQKMPDVYRPIPDEASLKIKAMSARRRQIVEMIAMEKTRLKQAFDDELLASLRQMIALLEAQRDEVEARLNALLREAGRGDMLALLQTAPGVGPRIAATLAADMPELGHIGRRAAASLAGLAPHIQQSGINRGRASISGGRPCVRTALYMAALVASRSHPRTKAEYKAMRAAGKPAKVAFIAIARKLLVALNQMVAEKKTWTEDQKLQGKD

SEQ ID NO: 363206 - protein, 424 aa, unidentified
MKVTFQTCCGVDVHKSFLVATIIKTTGGIEPSYQKRRFSTFNNSILEFKKWLLENECLYVCMESTGKYWIPVFNLLEDEINVTIANPKWVKAVKGNKDDTKDSKWIGDLFRLGLVRGSYIPCKKIRILREFTRYRYKLVSCRSSEKNRYQNALTVCNVALDSVVSDVFGKSSTSIIDYLLEQSGTSIDHEVIASKLLKRLKAKEDAVIESIEGYQMTDSQKYRMHLVRAHMDYITAAINDVDSEIESLIASDPDYENAVELLCTIPGVKYDSAITIISEIGIDMSQFCSSKRLCCWAGLTPGSNESAGKKKSVRITRAGVYLKPALVQCAHAAVKSDKSPYYKKKYESLVERRGKKRAIIAIARMILTAIFQMLTTGETWNPCDLYKIDMPEALLEKQKQKAIKQAQKLLIREGLLPPTEPIAS

SEQ ID NO: 363207 - protein, 360 aa, unidentified
MTATMTWVGLDVHARSTHAAAINRESGELSRARFGAGADPVVEWLHALPQPIHGCYEAGPTGYALYRAAAAAGLRVDVVAPSKTPRAAADRVKTDRKDAELLVRLLLAGSLSVVAVPPANLEAARDLARAREQVRADLARVRHRVSKLLLRYGRVYDAGGTWTQAHRQWLAGQRFEHVPTELAYLDALAAIDGLLARRAALDERLSLLATEPEHWPTVVRLRCFRGIETLSALVLHLEVGDFGRFQRPGQLAAWLGLVPSLHQSGESETRGPITKTGSGFARRILVEAAWHYLREPRIGVTLGNRHAGQPDHILQIAWRAQHRLHRLHQRLRGRGKPGNVAVVAVARELACFLWAAAVAD

SEQ ID NO: 363208 - protein, 401 aa, unidentified
MISVGVDVSKGKSTICILKPYGEIVCSPFEVQHEEEALEAFADLLAKLDGEIRVVMEATGIYHLPVLTFLHDKGYFVSVINPFAMKKYAKDNSIRGAKTDKLDSMMIANYGIEKWYKLQKYEGDEETYAELKLLGRRYRYYIELHVKALQELTHILDYVMPGIKKMFNSWNEANGKDKLSDFVEKFWHFDLITSMNLEEFTEEYLSWAKEKKYHRSRSKAKAVYELACNGIPTLSSNTPSTKMLVQEAVSVLRAVDSSLALILTRMQLLAKSLPEYSAVREMGGVGDVLAPKLIAEIGDVRRLHSAKALIAWAGIDPPPYESGQFIGSKRKITKRGSSTLRKVGYEVMRVLKSHPAPKDDAVYNYILKKEAEGKSKKHAKIAGLNKFLRIYYARVMEVYQQ

SEQ ID NO: 363209 - protein, 344 aa, unidentified
MSKFNLISIDLAKNVFQVGKFLHQKLQSNKAVSRKELLTILTTSPCCKVVMESCGGAHYWARKARSVGHEVVILDPRFVKAFRVGQKTDANDVIAIAAASFSPNVRPCKSLTQAQQNLQSIERMRALAEKQKRQLANQIRGLLLEFGIVIKQSECAFRQAIPEILEDSDNGLTAGLRQCLAQCYELFKAQSTLKETLNELLTGLVKQDEQCERLLALEGVGPITAVGLLISLSDTTHFTSGRNAAANVGVTPRQHSSGGKVRIGHIAKYRGEITLRSHLFLGARAVISQLKHREPKTIKEQWLKALVERRGVKCAAIALANKTVRTAYAMLKKGTSYEPSLLAN

SEQ ID NO: 363210 - protein, 342 aa, unidentified
MNITTYAIDIAKSVFQLHWVEPETGVIHRKKLQRAKLMEFFARLQPSRIVMEACGGAHHWGRELGKLGHQVELLPPHKVKESASGNKDDARDARAIWVTGTQKDVRRVPVKTVEQQAQLFIHRVRSHWVCLRTATVNQLRSMLYEYGVVAPKGRKKVVDWVGQHRAQIEQQVPLMVVQLMDQQLQALRELDECIAANERTLQQANRADQTVHALLKVPGIGPLGASALKAELGDGSAWKNSREFACCRGLVPRRTGTGGKVRMGGISKRGDPYLRTLLIHGARNLVRAPKPAPWIADMLLRRPFNVVAVAVAHKLARIAWSIVVRGEKFDPERAFGPCKAPA

SEQ ID NO: 363211 - protein, 348 aa, unidentified
MAHFVGLDVSVKETSVCVVDDAGKVILEQKVPTEPSDIIALLSSLGVAFGRIGIEAGPLSQWLVNALTEADLPVICVETRHMKALLTAQQINKTDRNDARGIAQMMRVGLFKPVHVKTLVAQEQRMLLTSRKLLQRKLLDVESDLRGTLRNFGLKVGVVSSFRYEARVRELVEGFPRLAAIVEPLLSVRRVMRQQFAVLHKMLLDTVRGDPVCRRLMTAPGVGAVVALTYRATVDQPQRFLHSRAVGAHVGLTPKRYQSGEIDYDGGVSKCGDALLRTMLYEAAQVLLTHGSKWSWLKAWGVRVAQRRGMRRAIVAVARRLAVVLHRMWVDGSEFRWRKDSAAVPAVA

SEQ ID NO: 363212 - protein, 489 aa, unidentified
MGLDVHKRVVEACLLDQSGKVVGRERFALSRGTLERFATKILRPSDQVALEATTNCWAVADALRPQVAKVVVSNPMAAKAIAQAQIKTNKVDAHVLAQLLRCDFLPEVWPPDEATRRLREMTGRRSALVGQRTMMRNRIHSVLAMRLIEAPLKLFNAEGQEWLAAVELDEQARILVDGDLRQLEFLQREIDKLDEELARRGHASESVKLLMSLPGVDVATAEALLAAWGDVSRFADGDHAASYLGLVPSTKQSAQQCYHGPITKRGNRQARWMLIEAAQHLDKHPGPLGHFFRRLAKRKNRNVAVVAGARKLAMIGYQMLRNNEPYRYALPRSTEAKLARLRVKATGQRRSGGVPRGQKAVATRPGQPGGSRTIRSLDEVCPSEGLPPPQALSRGEERTVAQAGCQALVEQRAHRQIVPRRSASSGSRSPAEPKRQATPSRTRGRASCEGFRRHRVAEQGDEAPPPAPPTLSSVPGRKKTAARKSPPAS

SEQ ID NO: 363213 - protein, 417 aa, unidentified
MALKIVYPVCCGIDVHKSFVVACIVATDGKGVTTYKQRRFSTFTGDLRLLAQWLVDNQCRDVCMESTGKYWISVYNMLESTCKVVLAHPKYVKAIRGKKTDSRDAKSIADIFKHDLISGSFIPPFAIRQLRDLMRYRVKLTSFAVGEKNRAQNCLTVSNIKLDDVFTDVFGKSASAITDQILLHPDGNFDVMPFVDRRCKASTEKIQAAVDGLLCSEQAEKLKIIRSHMDSLELCRTNLESVILSLAEQFRLQMELVMTVPGVQLFSAISIIAEIGVDMSVFPTAKHLCSWAGLVPQNDESAGKKKSTRIARAGAYIKPLLVQCALTVCNSDKHPEIKNRYLALKKRRGHKKAIIAICRMLLTAVYAILKKSEAYNPDLYRKVVSLPANRAFTVEQAVAFVQRHGFIVVDSDGVIAS

SEQ ID NO: 363214 - protein, 339 aa, unidentified
MKYTPVGVDIAKHVIQIHFINEHTGEVVDKQLRRQDFLTFFGNREPCLIGMEACGGSQHWARELTKLGHKVRLLQARFVKAFVMGNKNDVMDARAIWMAVQQPGKEIAVKTEEQQSILVLHRTRMQLVKFRTAQINALHGTLLEFGETIHKGRAAMEREFPEALERMKERLPPYLIMVLENQYNRLNELDSLIEDIEKQLTSVARQNETCKRLLDIPGVGPLIATAAVATMGEASAFKSGREFAAYVGLVPKQTGSGGKVRLLGISKRGDIYLRTLFIHGARAVALVAKEPGPWITELKKRRPASVAIVAMANKLARTVWAITAHDRKYDRNHVSIRPY

SEQ ID NO: 363215 - protein, 367 aa, unidentified
MKKHTTMNKPVSATDVSVCTTVAVDLAKKVFQVAGEDAQGQLAYEQRIKSREAFQVFLQKLPEGVTVLMETGPGAQAWARLLQAQGNPVRILPAQRVAEHRSGAKNDRNDAHAILRAGRDSSIASVPVKSVAALAMQAWHRVRRGYVRRRTAMGNQIRGLLLEQGIALAQGDVGLKQGVTRVLEDARQPLPALLRELIDEMLNEWQRLGERIAALTGRLEACAAADPTAKRLMTVRGIGPITATALLAKQVEPERFANARQFAAYFGIVPDQHSSGQKVRLGKMTKRGDAYVRSLMVVGSHAVLKQLRPDSEHPDDRRLQRWLQRLGRKGAAVRLANRNLRIAWVLLCSEQTYQRKPNACREMEMSH

SEQ ID NO: 363216 - protein, 312 aa, unidentified
MPSALNLGVDVAKDSLQVAEADSLMAATRLSNNGAAIRAWLATLPAGSRIAMEATGRYHQLLADLAHRAGMIVYVVNAYDLRHYARGVGVRGKTDRVDARLIARYLAHEGSHLHPYTPATPAQREIDELLRRRATVVNTRTRLSLSLRGVAHCASDLRSILKRLDSLIAKFDRRLRELARGQAEAEQRVESVLGIGPLVGVALTNTFTRVPLRNANAAVAFVGLDPRAKDSGELIGRRRLSKRGPAELRRLLFNAARSASKTKVWHPLYERYRALVDHRSHGDPRPQTAACGVLDLSPWNYIRSREARSCLT

SEQ ID NO: 363217 - protein, 367 aa, unidentified
MFDYVTAIGLDVRARSISACAFDPMAGEVTRAGFGYDPASVAEWVLGFESPKAVYESGPTGFHLCRALRALGVDCAVGAVSKMHRPAADRGRKNDRRDAEWLARLLACRNVVEAWVPDDRTEAARDLSRALEDARDDLQRAKQRMSKFLLRHGLVFDETTPAGRRRSNWTEAYWRWARSIEFGEADDAAAYEHYMDAVERCAEAKRELERKVEEAAARPEWAPVVDALCLVKGIDVASAFLLAAEAGDFSRFPTAPSFASWCGLAPSERSSGETESRGGITRAGNGHVRRALVEASWHVPMSTRRPKKPRPGHGVAPAVSRHAAKCNRRLQDRRDAMSRSGKRPCVANCATAREMACWVWAIALMVR

SEQ ID NO: 363218 - protein, 319 aa, unidentified
MNNIILGIDISKKTFDVALLNNHKVNTKKFSNDSKGFSTLKQWLVSKSIHDAHACMEATGGYEVSLAEYLYGNHFKVSVVNPACVKGFSMSRLSRVKTDKADCELIAYFCQAIQPDLWQPVPSHVQELQQWVRRLDSLITNKHQETRRLEGACNIISANIRIHIDFLDKQIEEIEELIFSHIKKHQDLNDRNKLLASIPGIGEKTIGVILAFLNVENFNSAKQLAAFVGLNPKPRQSGSSLRGVGRISKTGDANLRKAFYMPALTAMRFNPIIKNFSERLSNTGKSKMVIVIAAMRKLLHIIYGVLKNKTPFNRDIKTI

SEQ ID NO: 363219 - protein, 317 aa, unidentified
MSPKKTHVGIDVSKATLDVAVLPQGSSFRVSNDEAGIDELAARIEDLDPAVVVLEATGGLERPAATALAARGLPVAVVNPRQARDFARATGRLAKTDRLDAAVLARFAEAVRPSPKVLADEEAREFQAILSRRRQIVGMLTAEKNRLGASTSEAVRGRIEAHIRWLEKELSRTDRELDETIKKSPTFRQNEALLKSVPGVGPVLCRTLLAELPELGALSPKELSALVGVAPLNRDSGALRGRRAVWGGRGRVREALYMGALVATRYNPQIKEFYERLVAAGKPKKVALVACMRKLLIILNALMRDRIPWRCSHALNP

SEQ ID NO: 363220 - protein, 340 aa, unidentified
MNVSMIGLDLAKNVFQVHGADTAGAVVFRKQLRRDKLLGFFAGQPACIVAMEACSSAHYWAREIGKLGHTVRLIAPAYVKPFVKRQKNDAADAEAICEAAQRPTMRFVTVKSEEQQASAAVFRARDLLVRQRTQTINALRGHLAEYGLIVAQGPTHVTRLVLHVEDSRSKLPEAARMALAILVDTLKSLDQRIQKLDVEIARRAREDEDARRLVTVPGVGPITATALIALAPEATGFRRGRDFAAWLGLTPLQRSTGGKQKLGETSKMGERTLRRLLIIGASAVVLQARRRGTPESSWLGRMLARKPPMLVTVALANKMARIVWALMAKGGVYKAPAVAA

SEQ ID NO: 363221 - protein, 319 aa, unidentified
MTIERFVGIDISEAQLEVAVRPDGESFRVAHTEEGMGQVVRRMGELGPKLIVMEATGELEMALAGMLAAEGFGLSIVNPRQVREFARATGKLAKTDALDAQVLAHFAEAVRPEVRALPDEQTQQLSALVARRRQLVEMLTAERHRLRRAKKAVRQGLSAHICWLEQALEELDRELADAIKDSPLWRDKDDLLRSVPGIGPVVSITLLSALPELGTLNRKQIAALVGLAPLNQDSGAYRGKRRVWGGRAKVRNSLYMATLAATKANPQIKAMYTRLVSAGKPKKVALVACMRKLLVILNAMLKHGAHWNQQPARHYKMLS

SEQ ID NO: 363222 - protein, 430 aa, unidentified
MDVEDRIRIEEFGQLKKEVRRSARYLIVGIDVAKDKHVAFFGTPTGKTLLKRLIFENNTEGFGKLLTFVDSLKVKNGLDKDVYGLEPTANYHKPLGEYLVKRGLNVVLVSGEAVKKNRVLLDGRWDKHDTKDSANVADLMSQGKFMYYDHPVLPLRDLRNLLSLKRRLKKQEQGLRVRIRNHLLAQYFPELDRYYSQWERGGLRIVRWCLAPKVIAAMRYEQFVQLIAPGNRMSVGQGNRLRSIWEKAAHSIGCEVGVALEFEARMMVEGLNQVREAIGVTDDKVKELCLSFPEYSYLLTIPGFGPDISSKVLAGIGNPFRFNSAKQVLKTAGWDLCASRSGKKSDAAVPVISKKGKADLRYALYQAALIASTRNRYFVTYYTNKLRGREKERGIKTKMKVKLAAKMLVIAWTLMKREEPFNPDYLNLDE

SEQ ID NO: 363223 - protein, 337 aa, unidentified
MKLYCGIDLHSSNNVVAVSDEQDRPLYEKRLNNDLDAILDVLKPFKGELVGCVVESTYNWYWLVDGLMAAGFPVRLAHTGAMAQYAGLKYTNDFSDARYLAHLLRLGILPTGYIYPKEERGLRDLLRRRLLLVRQKTLHHLSLQSLIARHSGQRLTANEIKKLETTQLAAYLDAPILLGGQITHQARCWLDEAITRIERDLQKHIQPREDYQLLQSIPGVGPVLGTTIALETGTIQRFPSPGNYASYARCVKSEKISNGKYKGQGNKKNGNKYLAWAFMEAAHYGAIWSAPIKRYYQRKQAKSHILVAKKAVANKLARACYHMLKRGEVFDVTRAFG

SEQ ID NO: 363224 - protein, 343 aa, unidentified
MNYVGIDLHKKTIVTCVLDQHRRVVARRSLACGDPQAIVAFFRELRPFQAVVEATASYEWLVELIEPLADRIVLANPSQIYEIAHSKRKTDHHDAQVLAEKLAEGKVPRAHRPTPRQREHRTLVRHRQYLKQCATALKVKMRRIASDSNADRKDLFTAAGWASLGKVELRPSDRFVLDQLHAAWQHLEGQRRDLARRLKEFAAAAPPREAEARAKLRTVPGVGPVTIDVVVSELGDVGRFHSAKAVCAYAGLVPGVRQSADRRKGLPITKAGSPLLRWALVEAAWRAVRQGAAWRRVYEGIRKRAGVKKAIVAVARRLLCVLYALLRDGTNYDFLKVGEPRPA

SEQ ID NO: 363225 - protein, 414 aa, unidentified
MDVVVERCAGLDVHRDSVVATVRLPGTGKSRRRREQQTRSFGTTIGQLETLADWLEGFGVTLVGMEATGVYWKPVFYVLERRFECWLLNAQHLHNVPGRKSDVIDSAWCCQLLEHGLVRPSFVPPPEIRRLRDLTRLCVAQVEERTRAIQRLEKVLQDAGIKLSSVASSTYSASARAMLEALLAGVSDPAELAALAKARLRAKIPQLQEALANRFELAHHGVLVAGLLAHIDSLDQTVATLDARIAAATQPHAELVELLCTIPGVNVNTARVLIAECGLDMSVFGSAEHLVSWAAICPGLNASAGRRRSGKTRHGNRWLRKALTEAARAAARSKNTYLASHYWQIRGRRGDAKAIGATRHDILIAYYHIVRDRVPFRELGADWLARRHSVEHRTHRLVRQLEALGHTVTLEAAA

SEQ ID NO: 363226 - protein, 411 aa, unidentified
MQVIYHRCCGLDVHKRSITACRLKWLGSAWDREVRQFGTMTKDLLGLADWLAQEGCTHVAMESTGVYWKPVYNILEGQFELLVVNAQHLKAVPGRKTDVRDAEWIAELLAHGLLRGSFVPPVEVRALRELTRYRSSVVRDRARTINRLQKVLEAANIKLANVVSDIDGVSARQMLEALVAGERDTEQLASLAKGRLKEKREQLVEALSGRLKPHQSFLIAEHLAQVDYLEGAIERLSQQIEERLRPFEQEIGWLDTIPGVSRRTAEVLWAETGGDMSRFASARHLASWAGMCPGNNESAGKRRSGRTRKGSPWLRHCLVEAAHGAAHTKNKYLSSQYHRIGARRGKKKAQVAVGHSILVIAYHLLTRKQPYSDLGANYFEERDRQAVTKRCVTRLQRLGFQVSLEKLPVAA

SEQ ID NO: 363227 - protein, 407 aa, unidentified
MTMWYAGIDWADQHHDAVVIDEAGKRVATTRVAHSAAGLDTLVTFLKEQGDVADHPDHLACIVETNRGLLIAALLDAGLPVYPVNPKTVERHRKPAGAKTDAIDAYLLARTGRSDLSDLRRLTPDSPLIAELKALTRDQDTLIQSQTRLVNQLTACLKAYYPVALELFGKLQQPTTLAFLQAFPTPDQARAATVEQIAAVLKAAGHPTVAAKAARIRGRVDQPHLRADPVVTRTKTRLMLTLAAQLQVLLPEIAAYDEEITRLFRLHSDSRAFASLPRAGTRLAPRLLAEWGDDRGRYTDAASVQSLAGTSPVPFQSGNFAKAHRRYACNKPLRNALQQFAWQSTQKEPWALTYYQRKRRDGKSHAMAVRALANQWVRLIYALWTNHDTYDPAIFHAAQQAHAPRAA

SEQ ID NO: 363228 - protein, 342 aa, unidentified
MAAIGIDTHKATLAACAIDELGRPIGEATFANDPPGHAAFITWARSMAPDATVGIEGSSSFGAPLARSAQLAGLAVREVPPHLSRVERRRTRRPGKSDPGDALAIARVTAREANLPPIRLPDRSTELRLLLEAREDLVGEATRTRNRLHAHLLVLVPGYGGTVANLVAACHRAKVAGLLRGNATVQAELARSLLVRLARLGREIEVLKRRLGARVAGHPLLGLPGAGPITVARLIAEVGDIRRFRSADALAALAGVAPIPASSGQVQRMRLNRGGNRQLNRALYVIALSQSRFHPPAKAYVHRRMEADGKTWREAIRALKRQLVRTVFRLLVEGSEVQLAAA

SEQ ID NO: 363229 - protein, 453 aa, unidentified
MANTSKKTTSVRFHDGLPQIRANAAGIDIGANEIWVDVGNKDTEPVRRFETFTEDLNRTADWLKQCGIETVAMESTGVYWIPVCHILESRGIEVVLVNARHAKNVSGRKTDMLDCQWIRILHSYGLLAASFRPAADIGVLRSYMRHRQMLVEYAAAHIQHMQKAMTQMNLQLHHVISDITGATGMRIIRAIVAGERDRDRLAAMRDIRTKADQNTIAKALEGDYRAEHLFALKQSLELFDNYQKQIDACHQQIAAYLQSLESKADAIEAPPRGKKPKKNRRNQLPFPIQHEAFRMTGVDLTQIDGISETAALELIAEIGVDMNAWRTEKHFASWLALCPNNKISGGKVLRRATRISSSRARDILRLCAQSLLGSKSALGAYCRRMCGRLGPAKAIVATAHKLALLLYRMLRFGREYVDIGQDKYEQQYKERTLKHLTRKARDLGFQLVPVASN

SEQ ID NO: 363230 - protein, 338 aa, unidentified
MVYGAIDLHMRQSQIRIVDEAGVVQRDQRVPTTRERLTQAFLGHGRMRILLETGTESEWVAQALEAAGHEVIVADPNYAPMYGEVTRRIKTDRRDAVALAEANRRGWYRAAHRTSAAQRDTKQILRSRRFLVQARSGAVSLLRSLLRPSGYRLGTGSCDTVPARVARLPLPTALAETLAPLGRQIAALTTEIHAMDARLQTRTASDAIVARLRSVPGIGLIVATTFRAFVDRHERFGHGGQVSAAIGLVPREDSSAERRHRGHITKAGPRELRSLLIQAAWVCWRHGGSGTLRAWADRVAARRGRRIAVVALARRLSRILFALWRDATTFEGRTLATT

SEQ ID NO: 363231 - protein, 391 aa, unidentified
MNKAWVGVDAGKEFHWAHVLDASGRELLSRRVENDEAELRKLIDDALSLAKELIWALDQPGGGAALLLALLWERNQRVFYVPGLTVDRARDAYRGESKTDARDAHVIADQARMRPDLGELEPGEQELAELQLLLARRRDLVTDQGRTITRLREALLSLFPALERALDLNSKGPLTLLTHYQTPTHLKRAGHKRIASYLRNRGVKGSNKLAQKALSAARSQNVSLPAQNVASRIVAELAKDILGLKERIESIEEELQKRFFARPEARILISLPGMGPILGAEFLVCVGDVSAFESADRLAAYAGLVPAARDSGKRVGNNKRMRGGNKILKRVFYQSAFSSLRSTPESRAFYDRKRAEGKRHTQALIALARRRVNVLWAMLRDGTTFESRSAT

SEQ ID NO: 363232 - protein, 343 aa, unidentified
MDYFAGLDVSVKDTSVCIVDDAGKIVREVKVASEPDALLQVLRNPAYCFKRIGLEAGPLSQWLFSALGGANLPVICGETRHMRAVLKAQINKTDRNDARGIAQMMRVGLYRPVHVKTLRSQKLRMLLTHRKLLQSKAIAIENDLRGTLRNFGLKVGIVGRTKFEARIEELVEHVPDLAVLVEPLLVVRRVLREQIAILHRRLLTIVRDDEVCRRLMTIPGVGSVVALTYRATVDVPARFRRSKSVGAVFGLTCSRDQSGERDRPGAISRCGDEMMRSMLYEAAQSMLVRSTRWSWLKAWAMQIAKRRGMKRAIVALARRLAVVMHRLWVDGTEFRWTRDAAVA

SEQ ID NO: 363233 - protein, 393 aa, unidentified
MVYVGIDVAKDKHDCFIANSDGEVLYDVFTIQNDMDGFEDLLFKIKIASKDLNKVKVGLEATGHYNCNLLGFLKSKGLPTIVINPLHTNAYRKSLSLRKTKTDKADARAIASMIMSDVSLKPYSDTLYHNEDLKSLSRYRFDKVSERAKLKQSVSRLVNILFPELEKLVSSLHTKAVYELLSEFPGAHQVASANLKHLTALLSTASKGHFGREKANEIREAARRSISTYLPAKSLELRHTIKLIRELDAEIAEIETEIKKIMDSIDSPILSIPGISYGIGAMIVSEIGDFSRFDSPDKILAYAGCSPTTYQSGQLYSSHAVMEKRGSRYLRWALINAARYVCNWEPTFTAYLEKKRSEGKHYYVALSHAAKKLVRLLYHLETTGEKYIPQTLS

SEQ ID NO: 363234 - protein, 314 aa, unidentified
MTKEAVYVGVDVAKDTLDVADSGSRETRQFTNDHEGIVQAIQYIASLQPAGIILEATGNLEMPLAVKLQSNCLPVVIINPRQVRDFARATGAMAKTDAIDARILALFGLRIKPEVRPLPDKQAREMGSLLARRRQLMEILIAERNRLSRADEDVQSNIKDHIKWLEEALSDINNDLERRIQSSPSWHEKDNLLRSVPGIGKVVSITLLIELPELGQLNRRKVAALVGVAPLNRDSGTMRGKRTVWGGRAALRATLYMAALVATKCNPVIATFYQRLLDAGKVKKAALVACMRKLLTIINAMMRTMTVWNPKLIN

SEQ ID NO: 363235 - protein, 424 aa, unidentified
MNLTQNDRLKQVTSDILIVGVDVGSQTHFCRAFDWRGFELSRRVFKFSNTGMGFLTFLRWTEELMNKTEMKKVIVGCEPTGCYWLTFQKFLQDHDIQLVTVNPFTVNRSMELDDNSPEKSDLKDPKTIALLVKDGRFSTSYLPSGVYAEIREASVCRDQIMKQHVRLSNQIQGWIQKFFPEYLECYVDWDSTSGLMLLREAPLPQDILKIGAGGINQIWRNAKVRAAGIKRAQTLVEAAQNSVGLEAGEAARLEIWVLVNDYILKAEQLKRLDEYLEEKVKEVPNVEKLLAIKGVGMSTVIGFIAEVGDIGRFTDPKQIQKLAGLEIVKKSSGKKKGQPRISKRGRRKLRRTMYESARVLMIWNPVFQDVFLYYRNRTKNPLGGMQAKIAVACKAIRIFYVVLQTGCDFDEEKFRKDIIRPEAA

SEQ ID NO: 363236 - protein, 317 aa, unidentified
MEQVKLSTKIAGIDVSKKKLDVAGHGVDALIQVANDRAGFVELLAWLERLGVERVGLEATGGYERAVVAFLQAKGLEVVIHQPLEVRLFARLKRRRAKNDRIDAVLIAAATAQVDTVKAAADPLLVELAEWMTAYEQATDQLAQLKTYLEQVSLPKLAARYRTQLRRAQAWKADMLREVLKRIRSRPDLARRYGLLMSLPGTGPVVAASLVIRMPELGSLEPGQAAALIGVAPYDFDTGQYKGQRHISGGRARPRRMLYLAALAAKRYDPGLRAFAERLLAAGKPPKVVITAVMRKLIQAANLVLKRGQPWLRTQTA

SEQ ID NO: 363237 - protein, 482 aa, unidentified
MSNNKKQGKTRPPKTQAQLGRRKKQKGMCLADRPCLEPNAAGIDIGAREIFVAVPPDRDERPVRVFDTFTEDLQAMTRWLKACGITTVAMESTGVYWIPLYDILEAHGIRPCLTNARHMKNVPGRRTDWHECQWLQYLHSVGLLRSAFRPKADVCAVRAVIRHRGELVQMAVQHVQHMQKALTQMNLQIQHVISDLTGTTGLAIVDAILAGERDPAVLAQRRDPRIRATAETIQKSLVGNWQPEHLFVLRQSRLLYQTYQQQIAACDQEIEKLLGAFEPRVDPGQKPLPADRKRNRNASKKRNKRGLPATGFDLRTEAYKLFGVDVTQVPGVETSVLPLFSEVGRDLANRWPTAPHFISWLNLCPDNDISGGRVLWRGTRKGQNRAGQIFRMAAYSLHRSPTPLGNYLRRMKAKLGPKAATTATAHKIAVIFYTIVTKQIEYDESIWAARDAQRQKRLENKIRRQAKQLGYQLVPTEQKPAA

SEQ ID NO: 363238 - protein, 350 aa, unidentified
MEQGYHIGIDLHKRFSQVAVLNEKGEVLDNRRVDNDPPLLVQHLSPFPKETPVTLEATIGYEWMSDLLAENGFEVNLANPKKVRLIAEATIKTDKVDAVTLAQLERTNFLPTAYLPPPEVRDTRELLRHRMKLVNLRKGLKNRIHAVLAKRGVLFYPVKDIFGKAGREFLSSLQLPSIYRKEVDGYLSLIDQIDSIIKKREKDIKNQVVKENKEAQLLLTIPGISYFSALLLVSEIGDIKRFPSHKKLASYTGLTGTISESADKTYQGSLKKDSNKYVRWILIEASDHAIKKDPGLFAFYRKIAYKKGNNKARVAVAHKLLISIYFMLKNNQVYQLKKPSGKPLFCHGRQ

SEQ ID NO: 363239 - protein, 340 aa, unidentified
MKFVGVDLHKQTISVCVMAEDVRMRKVEQRRSLRCADVAGIRRFFEQLGGFQVVVEATSSYEWFLLLVEDLADRCVLAHPKKLRVIAESKHKSDKIDAQVLAEFLLLDMIPEAYRPSPRVRQHRVLVRHRDAVQRQITGVKCKLRYKAAFYNADIASLFTVRGLAHLAKIAMSHADRFECQALQDQLQFLQQQLKAVDQELRTFAETAPVAEREARAILASVPEVGPVTTDVILSETGDVRRFRGAKRIVAYAGLDPGIRESAGKGKQLSITKEGSRLLRWALIETAWRLVRKTARWRQLFERLWATTGHKKKAIVGVARRLLCVLFAMLRDGRAYRLAA

SEQ ID NO: 363240 - protein, 339 aa, unidentified
MQVTTVGIDLAKHVFQVHGIAKDGEVVFNRAIRRAQLMQFFSKLEPCLIGMEACGSSHYWARELTKLGHDVRLIPANYVKPYVKRGKSDANDAEAICEAVTRPTMRFVAPKSEEQQAVLFLHRARDLIVRQRTQLSNMLRSLLAEFGVIIQQGTGAAVKYAKGVLEGEKPALPQIAVDVLRQLSHQLVAMHLRFRWYEMRMRLHSKLDKRVMLLRTIPGIGPVTASAIVATVGDAKQFKNGRQFAAWLGLTPLNLSSGGKERLGRITKMGDRYIRHLLVTGMTARLRQMKVTPDRVDPWAIGLLERKPARLATVAMANKTARIVWAVLTKNEYYRPRTA

SEQ ID NO: 363241 - protein, 344 aa, unidentified
MKITTLGIDLAKNVFQIHGVDEFGKAIVKKQLKRDQLAAYLVNFPPCLIGMEACGGAHHWARKLMGFGHTVRLMAPQFVKPYVKTNKNDAADAEAICEAVARPNMRFVPIKDVGQQSVLSLHRVRQGFVSARTAQANQIRGLLAEFGVIVPQGIAHLYTRVPELIEDGSNEMTGSFRLLVQQLLEHLKALDKQVTEMEAQIVQWHKHSQASLKLAAVPGIGPITASALVASLGDAKNFENGRQVSAWLGLVPKQHSSGGKEKLLKISKRGDTYLRTLLIHGARSVLYREQSKADSCSWVKGVATRRNHNIAAVALANKNARIAWALLTREKGFDAKHVSLKVAA

SEQ ID NO: 363242 - protein, 387 aa, unidentified
MYFVGIDVGKSTHEALILDQQGDQYGETLSIPNSRAGITSFSERLAGLEAPVKIALESSGQYWLCLYDQLTAHGYDVRVLNPLQINAYRQTGIRKTKTDTLDAFWIADLLRIHRARPNQVPTALRMQLRELSRFRFNLVDRIGDLKRKVLAVLDRVFPEYERLFSSVFLKSSQRLLREAVSAHEFAAFDLSELTEILRTASRGHFKEAKAQEIIAQAQTSIGVTCLADAARLEMRCLIEQIQFLEDQIAQLDAQLEQLLAQADQYLTTIPGLGPVLAATILGEIGDVHRFPALEQLVAYAGIDPTVHESGQFGATQMHMSKRGSPYLRRALWLGANVARQHDPELQAYYRKKKREGKHHNTVIGALCRKLLARIYVILREERPYVIR

SEQ ID NO: 363243 - protein, 373 aa, unidentified
MKKVIMCGADVHDNTLCLRVAVNKDKPETRVFNNTRHGREALLKHLKLLARKHGADRIVLAYEASSLGFGLYEECVAAGLECFVLAPTKMPQSEHGKKCKTDEEDAQRILEQLRAHILAGNDLACVWIPDAQTRDDREVLRTRLDVAEKLTGAKTQVRSLLKRHGVAKPREVGQAWTKSDRYWLTRLTENESELSAGARVALGSLLRQIASLEAEIQRLDQAVEEVSKTPRYQAASGALVEGLQGVGLLTAMVYLTELGDLSRFRNRKQVGSFLGLAPSSQESGEVKDRKGHITRQGPSRVRKVLCQATWSRVSHDENEERVYQRIVEKNAKRKKIATVACMRRLGVAMWRLGLEAQRKAGVFDQAHRASKAA

SEQ ID NO: 363244 - protein, 425 aa, unidentified
MNYKQNEKINQVKESTLVVGIDIGSTTQYARAFDWRGIELGKVFTFSNSREGFEAFKAWMQRLQDKYRKSDVIVGIEPTGHYWFDLGAYLEDEGILLVMVNPYAVKQTKELDDNSQSKNDRKDPKVIAKLVTEGRYSAPYTPDGVYADLRIMVANRKRLIREMTQIKNRFARWFAIYFPEYTDVFGDYEAQSSMLLLKKVCTPEAIVELGAEKINQIWRDAKLRAVGMKRATTLCETAKRSIGLKKGSSAARYEMKLLLEDYEYKKAQLDAVMEEIEKLCRKIPESEQMLAIKGIGVITVAGFLAEVGDVRRFESPRQIQKLAGLSLRENSSGKHKGQTSISKRGRSKLRAVLFNAAIPLIAKNPEFKSLHEYYTTRANNPLKKKQSVIAISCKLIRVFYAILANGVTYDAQKMLSDIHRQPQAA

SEQ ID NO: 363245 - protein, 366 aa, unidentified
MATNISNHKQEKNHNSSLKNSYVGKQVFVGIDVHKRTYSVVTVVEGMVVKKWRTVASPEKLAQQLARYFPGASIKTAYEAGFSGFVLHRVLETAGIHNIVVNPGSIEVAIHNRVKTDKRDALKLATLLEAGRLKGIRVPSLQQEQQRLLTRTRQQLMEERSAIKNKIRMKCHQMGLIDPDDTREMSHKLVVEMLARTPGPEFSLIIEAYWSIWKSIETQMNKIEQKLKEQAQVDPNETIYRSAPGIGSLSARILSNELGDLRQFTNERQLFSYTGLTPSEFSSGDTVRKGHITRQGNKRVRYILNQAAWRAIKKDRDLKDFFERLAPRTGKKRAIVAVARKLIGRIRAAFKNRQPYQMNPISLESA

SEQ ID NO: 363246 - protein, 321 aa, unidentified
MRYIGIDVSKATLMVAYPQDNKKYKTREFQNTSNGIHTLIATLQADDHCVMEATGNYSYLLLYLLNKAGICTSMENPLKVKNFARTMLSVTKTDKADAQLLSLYGERMKPEPYKIPSEALLLLKQKRAVLRQFKKQLLANNNLKKALEAMPEQDQKAITAIEKVTITLEEQIKTVETELTTLTQAEFNQQMSRLTTIKGIGTTLAAALIITTGGFTYFDNAKQVSRYLGLCPTYQQSGTSIHVKGHINRNGDPYLRAQLYTASWSMIKYNTACRELFTRLKERGKSGKLALVAVMNKSIRQCFAVVKHDTDYQEDFVSKKP

SEQ ID NO: 363247 - protein, 341 aa, unidentified
MSIITVGIDLAKNVFAVHGVNDSGKAALVKPKVQRTDLLPLVAQLPPCLIGMEACSGAHHWARLFRQYGHTVKLMAPKFVAPYRMTGKRGKNDAADAAAICEAVTRPNMLFVPVKEEHQQIILCLHRTRQGFVEERTAAYNRLRGLIAEFGIVLPQKVVCLRREIGAHLEDLPGYANLCVGDLLAHAGELDKKIDEYDRAIAKAAREDARSKRLMKLPGIGPTTASALLASMGSGHDFDSGRQVAAWIGLVPGQYSSGGKARLGRITKAGDSYLRSLLVMGARAVLNSLGGKQDRFSRWARSLQERRGYWRAVIAIAAKNARLAWAVLKYGEDFKLEPGKD

SEQ ID NO: 363248 - protein, 348 aa, unidentified
MDRSYFVGIDLHRAVIQVCVRDERGEICCEQRFRYTGLAQGLEVVAWLGRFRPGRLTVEALGLNRWFVNACREAGWEVLVCDPRKLELKKLGRKTDRRDARELSRRLWLGDLDRMATTYYPSDTEYGHRKLLRVRHHLVQMRQQTVNQLRALLNAYQIEAPSGTLHTAKSRAKLRACQLPTPEMQAAFDALREIFERLHEQIQALSRRIEQIPEAQPDVAVLQETLPQLAAQSAATLFYELAGARRFRGPRAVAAYAGLVPRVSQSADKAHHGPLTKQGNRELRWVLSQWAVRLLARDPLVRAWAARLERRMHKNKIRMALARRLLVGVWVMLTRGEQFDLRRCLALA

SEQ ID NO: 363249 - protein, 400 aa, unidentified
MLLFFEVITMIFVGIDVAKDTHYAAVSDDSGAVLVKPFAFQNNAEGFCLLLKKLSEFDRSKLLIGLESTGIYSENLICFLYESGFRLAVINPIQTATLRKTAIRKTKTDKVDTMLIIKSLMVNSYRLYSQRDADSLKLRTLCRFRQNLKKSKARLKIQLAEYVNLVFPEFGKFFKSGIHIAASYALLKKYSSPKEIAALRTSTLCTLLSKASHGRFGKDTAEALKSLALSSVGVKNPYISIQIAQTIAQIELLEQQIKDLNSAIEEAMESINSVLMTVPGIGAVNAACILGEIGDIKRFSKPCKLLAYAGLDPTVRQSGQFTAKSTRMSKRGSALLRFALINSAWQLTLNDTTFKAYYDLKRSQGLNHYGALGHVAHKLTRVIFKLLTSDTPFNPAKLVA

SEQ ID NO: 363250 - protein, 388 aa, unidentified
MKAQIVDTLPPVAADHDPVRCLLAIELSKKSWIVAITTALSDKISRYTLDGCDWKGLLELMERIRTRVAREVGRPVEMISCYEAGYDGFWLHRLLERHGVRSHVIDPASVQVDRRARRAKTDHIDAKRLLRSLMAYLRGEPKVWSVLRVPSVAEEDERRLHRERDRLIAERGQHVNRIKGLCAIHGIYAYEPMRRDRMLRLEQLHTGDGRELPPRLKAEIARELQRLELILGMLKEIEAERDAIALTENVSAHTNAKKIQNLVKLKAIGAEIATVLTGEVFYRPFNNRLQVASYVGLTPSPFQSGSKCRDQGISKAGNPKARSTMIELAWLWLRHQPDSPLSIWFRERVGTRKGRIRRITIVAVARKLLIALWRYLETGVVPTGAVLN

SEQ ID NO: 363251 - protein, 339 aa, unidentified
MELYSAIDLHSNNSHVAIIDEQHNRVFYRKLGNDTKLIGNTFAPYRKELKGIVIESTLNWYWLADFLMEEGYTVHLANPCGIQKYSGLKHADDKHDAFWLAQMLALKILPEGYIYPKADRPLRDLLRKRAHLVQVRTSLLLSLQNIVMRNYGVKIRSNDLKKLTQDPAAGLLKDQEELALAGKASKETIDFLTRQIQRIEKVVQSKTVLKEPFSKLLTLPGVGDILGMTILLETGPIERFKDVGHYASYCRKVSSRWTSNEKTKGKGNTKNGNRYLSWAFSEASDHARLTHEPSRNFYNRKLNQTNACVAHSALAHKLARAAYFIMRDHVVFKEDKMFR

SEQ ID NO: 363252 - protein, 350 aa, unidentified
MNNVTSLAIDLAKNTFQVHGTDKNGKAIYEKAISRAKLLNFVANLPICNIYMEACGSANYWGREFEKLGHKVKLINPKYVKPYVKRNKNDRNDAEAIAVAARDPDMRFCHIKTIEQQDVQSIHRIRQLLVAQRTGLANQARGLIAEYGIAVPKGVTKIRQKIAEILGENPYDMSALLLQGLAMLYEEFENIDNQITACEKQISELFKKSETCQRLETIPGIGELTATILATVLGNGSNFKNGRHFAAFLGLVPKQHSSGGKERLLGISKGGDTYIRTLLIHGARTVLLWVKNKTDKRSMRLKDLLARKHKNIVAVALANKMARMAWALARYNVEYDPNHKHAISPATALD

SEQ ID NO: 363253 - protein, 365 aa, unidentified
MNATTVAIDLAKDVFELAFSDGTHRVVERKRLSRTKFARAFENYAPLRIVMEACSSAHYWGRRFTRQGHSVRLLPAHDVRPYVRRNKTDRTDAAGLLEADRCGELSSVPVKSAQQQGIQALHRIREHLKSARTATINLVRGTLREFGIVIALGATHVRPAVLAALEDGDNELPMPLRHTLAEQLEQLAALDGQMAVIERRLATFAREDTRSQRYQAAPGVGVLTATALSACVGELDRFHSGRHFASWLGLTPREHSSGGSRRLGRMSKRGDSYLRMLLIQGARASLRSAKIKQQRGQALTVLETWALSVHAARGHNKAAVALANKTARRLWAADHHRRDFDPDWVGSRMQRSDQSEELVDTEKSN

SEQ ID NO: 363254 - protein, 366 aa, unidentified
MDTIYIGVDFHARQQTICYLKTETGELVTCELKHQDKEVVRAFYAQFVGQVIVGLEASGYSPWFERMLEELGCQVWLGHATEIRRRARWRQKNDRRDAELILDLMLHNEFPRLHRPAVQSREVLRMLRYRQKLIKMRTMSKNSLQAIALQAGLAKGSRLFTKAGQQELGTAEMSPVLHWQREHWLQLMEPLNQQLLETMVWFKSQSKDDDRITRLRTHPGIGLLTSLCIVHTLQPVSRFRNTRKVAAYAGFDPIERSSAERKCFLGISKAGSRLLRYLLVEAAQTAVRKDEDLKRFYQRLADRRGRPKAKVAAARKLLIRAYIMMRDEIDYAEFRHRAVAARLARRSQGPANVPEVLIGQPASPEQ

SEQ ID NO: 363255 - protein, 377 aa, unidentified
MSKIRFVGLDVHANTISVAVAEPNGEVRSVGTIPNRLESIRKMVQKLGPPKQLRVCYEAGPTGYVLYWQLTALGVACQVIAPSLIPVKAGDRVKTNRRDAEKLARCHRAGDLTAVWVPTPAHEALRDLVRTREDAREDQQRARQRLGKFLLRHGWKSPEDIKHNWTKKHMAWIKSQVRFEQPALQAAFLDYVHEVEHAADRLERLEKAIDDAIASAPAEIQEVVQALQALRGVGKIVAVSIVAEVGSLSRFSNPRQLMSYSGMVASEYSTGSRIQRGGITKTGNAHLRRVMVEAAWAYQHKPWIGGWLAKRQQGLDEETKNIAWKAQWRLCTRYKKLLAKGKNKPQIVTALGRELLGFVWAIAVRVEARCGEQPCAA

SEQ ID NO: 363256 - protein, 412 aa, unidentified
MQIVYERCAGLDVHKKSVMACLITPTPTGEYRKERQTFSTMTPDLLRLREWLQAQQCSQVAMESTGVFWKPIFNILEGHLGVMVVNAHHIKTVPGRKTDIKDAEWIADLLQHGLLRPSFIPPSWQRIVRELTRSRTSLSQERARVIARLQKGLEDANIKLASVASDLMGQSAQDMLHALLDGEQTPEEMASAARGRMRPKRDLLVQALTGHFQAHHRFLLAEHLKHLAQLQESIDRLSAEIAKHLHPYESQLKRLETLPGVGRRLAEILLAEIGPDMSRFPSAAHLASWAGMCPGNHESGGKRLSGKTRKGSQWLRTALVEAAHAASHCKECYLSAHYHQIAFRRGKKRAAVALGHTLLIIIYHVLAETKEYQELGADYLDQLERRGKEKRLVRQLEKLGFEVALTPLASQG

SEQ ID NO: 363257 - protein, 351 aa, unidentified
MPRKTDTAVVRTIGIDTGKNTLHMVGLDERGAIILREKVSRHRIAARFVNVQSCLVGIEAGMATHYVARELVALGHEVKQVPPAYAKPFRQGHKNDFRDAHAVAEAVQRPSTRCVPIKTDDQLDLQALHRVRSRLIGDRTAVINQLRGFLLEHGIAVRQGHRFLRQQLPQILATRTDVLSPRMVRITGDLVDDWGYLDERIERVTNEIEGLARVDVSCGQLMTVPGIGPIIASAMVAAIGNGAAFAKGRDFAAWLGLIPKQMSTGDRTILGRITKRGNRYLRMLFIQGARAILLHPTSWAKHSFGPWLTAAARRLHCNVLTVALANKLARIALTVLVQGRNYETRIEPVAA

SEQ ID NO: 363258 - protein, 342 aa, unidentified
MDYYAGIDVSLEASSVCVVDASGKIVKEAKVISEPEDLTGWFKTLPFVLARIGLEAGPLSQWLYAGLKKAGFAVELLETRHVRDAFKAMPVKTDRNDARGIAQLMRLGWFRPVHCKSAPAQETRAVLTARKLVQGKLYDVQMSLRGILRGFGLKVGRTTKAGFASRIRELTEHHPALKAIAKALLVVHEVLLRELNGFETQVRKLARGDGRVRLLMTAPGVGVIVGLTYVAAIDDPARFSSSKMVGAHFGMTPKKYQSGETDITGRISKTGDKGVRAVLYEAAHIILTTPVKGGALKSWAAKLAKRAGPQKAKVALARKLAVILHRMLADGASFDAAKAAAA

SEQ ID NO: 363259 - protein, 488 aa, unidentified
MKKQSIYPQQSQALMCLYEQAGPSQKVLVVPMDYAKTEHTVLFCNGNGDMLRKPFGVKNTPEGLTYLLEQVRKTCTYHKIKRTHVYFGGEDCGSYSENFVQGLRARGWLVAGVNAWQAKKQRENLQASTDRLDLIGIARMLISRRGNCAPAQSGAYRNLRTVLRHRRQLVRLVTQERNRMQGLVDRLFPGFLDERKSGLTPFHAPCLRVMEGRFSAAQIRRRKPTTLIDVLARAGAQKPEEKAKQLQTYAATVLQPSPEYVATLQTSLGQHVALYRCLLENLACMERELAVWLAQTQGAFLTTLRGIGLVLAAGVAGEIGDPATQKPVRNLASYAGIVPRVFQSGGSDSSAYEGSVARRCNRILKDYLVQSASHLGLHGVEDLKADHQRRAANGQHADFGLARRYLRIGMHMMRHAHVYLPESLRVGSAFAARRTYYQTLWPYLLDKWKRYDAHKVAFAPDHPLGQWRNVVQGLYNIRLKVESRSESS

SEQ ID NO: 363260 - protein, 335 aa, unidentified
MKNYKMMAGIDVSKLKLDVWLMQHQKDANQEHFIVSNNEKGIKEIIKTIKKQKIELSDCLFCFENTGIYSMPLSYYLSKIKADYWVVNALEINRSKGISRGKNDKNDSKEIAFYAFTHLHKLKLNTLPEKEIAQLKMLFTEREKLIRTIRIMDTTKEAQGFIPDAIIKEVIKMNTKTVLLLNKQLKAVEQKMEEIVKQNEKIKEQCELICSIPGVGKQTAHYLIITTKCFEAFDNWRKLACYAGVAPFDYSSGTSIKGRTKVNHLADKKMKSLLNMCALSIKKNDKEIEMYYQRKVAEGKNPMLVMNNIRCKILSRVFATVNRGTPYVNLQKFAA

SEQ ID NO: 363261 - protein, 371 aa, unidentified
MKQQSKSSKITVGLDLGDRRHRFCALDERGEVVEEGSICNERDSLRKLAGRYHGALGVMEAGAHSPWISRFLEALGWRVVVSNPRKVRAIYQHERKSDRHDALMLARIGRMDLALLYPVRHGTAEAQQDLLRIKLRDSLVRARVAVINSVRFTLKSLGYTVRNPSSARFHKVAMEEVPESVREMITPSVQALAELTARIKMLELEINTLAQMKYPQSAQLQQIPGVGPITALYFVLKIEDPNRFAHVRDVGAYAGLCPRRDQSGESDPQLRISKRGDAYLRRLLVSAAHYILGPFGPQSALRAYGLMLAADGTAQAKKRARVAVARKLAVLLLSLWKSQQPYQPFPGARLNGQQEDRRSGTIALHRMEATD

SEQ ID NO: 363262 - protein, 354 aa, unidentified
MPIIGALDVHRKQITFKWLNTETGETNRGRIVPALRKTVREFFVPFKGLDAHFALEATTGWRFIAEEISRAGLRAHLAEPADTAALRGSKRRAKTDRRDCDHMMDLLLTGRLPESWLPPEHVLEMRTLVRLRKGLVDERCEWQQRIHAQLFHQGLPSIRFMTTEGRGELAAADLSAAGRRVATIGLEVMEQLDQQLLPLDAYLVRFAKLQPGCRALKQRLFGVGTITAVFIWAELGDCVRFSSSDDAVRYSGLDITVYESADKRPPGHLSYQGPEALRWALYESAQSACRRSSPDRVYYEQVKARLNHKRACLSVARKICRRAHHILRSLGDNAFAPVDASVLPSFERPASKTA

SEQ ID NO: 363263 - protein, 443 aa, unidentified
MLDPARLAQRKVLRRRLTMKRTQNEKILQIKNETLVVGIDIGKETHYARAFDNRGIEQGKLLRFSNTAQGYEVLNQWMHKIMQQTKKTEAIVGFEPTGHYWFTLGDYLKKEGYALGIVNPFHVKCTRELDDNSQTKSDRKDPKTIAMLVKDGRFRDVYIPEDVYQELREAVSERERLQEQLNRISNQVIRWLDIRFPEFGSVFKDWSAKTALVTLSNLPTPAKVVSAGAGGVLKLWQEHLKRSSLKKAERLVKAASESIGRVAGREAAEAALLNLLVQYELIAAQKDNIEGLMSELLLRVKNAGTLLEIKGVGMVTAAVIISEIGDIHRFEDPRQILKMAGLSLKENSSGKHKGKTTISKRGRKRLREGLFRVMIPILANNEEFKAMHQRNLTRANNPLKKLQSIVALCGKLVRIIYALLTKGCKYDAGKLTVDMKGSMKAAA

SEQ ID NO: 363264 - protein, 416 aa, unidentified
MKIVRPICCGMDVHKNIIVATIGITNKKTRITEYIQETFSTLNPDLLNLKQWLINHKCFDACMESTGKYWIPIFNILEDEINIYLTHPKYVKAIKGKKTDKKDSKWICDLFKHDLIKFSFIPPKEIRALREISRYRYKLVGMRSSERNRYQNCMTVSNIGIGSVFSDPFGKSAQAIMKEVLESDIIEDEKILKCIHGSCKNKDKILDSIKHCNIETDQRFKMNESMTHMEELQVHIDNCEIEMMKRAAPMFDQFMHITQLPGISTLSAILIISEIGVDMKQFESDKQLTCWAGLAPANNESANKKKSVRISKAGQYLKPLLVQCALGAIKDKEGYFGIKYSRIKKRRGHKKAIIAIARMMLVSIYHMILTGETFNPSDYESFRNPNPPIKQQVLTEESAIEFLKKSGFDVSKLTKP

SEQ ID NO: 363265 - protein, 348 aa, unidentified
MSQILNTVAVFGIDIGKNSFHVVGLDGDGALVLRQKWSRGQVEARLANMSPCLIGMEACVGAHHLSRKLKALGHDARLMPAKYVRPYSKGQKNDFRDAEAIAEAVQRPTMKFVATKTADQLDLQALHRVRGRLVSQRTGIVNQIRAFLLERGVAVRQGLRFLRAELPRILAAPPEVLSPRMIHVIEGLAEDWRRLDERIDCLSGEITALARQDAGCERLVSVPGIGPIISSAMVAAIGTGEAFSKGRDFAAWLGLVPKQLSTGDRTILGKISKRGNRYLRVLFVQAAWVVLIKPQSWERHGLKRWIEAAKKRLHRNVLAIALANKLARIAWSVLAHSRLFEACKLQAV

SEQ ID NO: 363266 - protein, 340 aa, unidentified
MTITVLGIDLAKNVFQLHGVDEQGHVVVRKKLTRPKLLPFVAQLAPCCIGMEACQEAHYGAREMRKLGHDVRLISPQFVTPYRKSHKNDPNDAAAICEAVSRPHMRFVPIKEVEHQDVQALHRARQLLIKQRTALCNQMRGLLSEYGIVVAKGVQRLRASLPSLLEEAENGLTFTSRELFQELYQQLVWLDERIDGMDVKIYQVCTSTEACQRLAAIEGVGPMIATALYAAVPQPHLFHNGRHLAAWLGLVPRQHSTGGKARLLGISKRGDRYLRALLIHGARAVVYRWKDKLNPSPRARWLQQLIARRGINCATVALANKIARVAWVLLSQDVQYQPAR

SEQ ID NO: 363267 - protein, 393 aa, unidentified
MPRKRILVKSIDTSISYQVIGIDLAKHLVSACLITGAGEIFGIDRLTYDDLLKSAERMSPTLFCMEPCPEVHYLAEKLQGYGHHTKVIDGAAVKEYIKTHFGGQKTDLNDAQAIAFLSLDTNLPEITPKNTSNSVLSSIQAVREQFRKEYIQSFVSLKGICQRWGLPISKGVMNKNKVEELVSESKKIPQEVKDWLLELLQSCRELQKRLNKISKYLKEYADNDEICQKIMSVPGIGPITATRLKATIGDIQRFEKPKSIVAYYGLVPKSKATGHNEKKGGITRRGDRVARSLLIEGAGVVLNLAAKGFLRSKPLNKRIEKKRKLKMPWGKLCCALAAKMLRIVRAILIQGTSFNAKIAGVARCSLPKESRNNVMGNNKLSEIPSPNGSVYIH

SEQ ID NO: 363268 - protein, 502 aa, unidentified
MSSQSKIPDRGNESVQERLQHLESHHADRVLAFRQRLAQVGYDRVLILLLDIGKNVHWATALTAAGQELVQPFKLPTTRTGLDRFLALADPLIGSSRFDLVLLGHEPTGVYHEPWARALMDHYAAHLAAQAAPQMDYIFFNPYQVKLARQQTHLRHRKNDPRDLAAMFDLMTRGLGNPAFLPTGVEMLIRNEVGFVRAQSRLLDRLERQLLQQFDRLWPGAVVNVAKFSRAHPGVDKPTPIIQTHPFQRQRIRVLLQHCPNPYHLRALSDQEILDLYRRHAGRAGPALLSMLRTWADNTVLLPEDVCAALAEQVQRLFAQYAYTETMIEDAHGRLESLVPLTPARHISAMPGLSDNDAARYLAILGSASRFLRAAEVWSLSGFDPLTDGSGDTPDRIGHISKRGDPASRNTLYQMGYRAALHYAPVSLTFLDAYDRGKSEIEATIHAAHRVNRICFHLVHNDEPFQNRSTPQMEAEKKRRWQAFKAAKKRRGNRRKRGKRRH

SEQ ID NO: 363269 - protein, 356 aa, unidentified
MPKRARKRTRVVIGGVDTHGRTHHAAVIDQQGRLLGDREFAATSGGYRQLLSWLGRHGQLDAVGVEGTGSYGAGLTRLLLDRGVNVFEVDRPDRRTRRQRGKSDPIDAEAAARAVLAGTATAPAKRRDGIVEAIRALRAARSGAIKARTAAINQLKGLLVTAPASLREALDALPTTALVATCAQLRPDETALAEPVQGVKAALRAVAQRVQQLDQEISLADQRLAKLVGRAAPRLLKLHAIGVDHAGQLLVTAGQRPERLRGEAAFAHLCGAAPIPASSGTTHRHRLHRGGDRDANRALHLAVVVRMRWCSRTRGYAERRTKEGLSKPEIMRCVKRYLAREVYHALVADFEALHAT

SEQ ID NO: 363270 - protein, 367 aa, unidentified
MSKDTTVFVGIDLGDKQSDLCFLDPDGHVIEESRVPTTPSSLKRRFASLPPCPVAMEVGAHSRWVSELLTRLGHEVFVADARQLRLIYKNPRKHDRADAEYLARLARLDPQLLSPIHHRSPQAQADLAVLRARDSLVRARTQLINHARGLVKTTGARLPSSSAHSFHLKAATAVPEELLPALTPILATIASLTERIRAYDRAIEQIAEARYPETSLLRHVKGVGPVTSLAYILTLEDPQRFRKSREVGACLGLVPRRDQSGSQEPQLHITKTGDSYLRRLLVQSAQYLLGPFGPDCDLRRWGLQLAERGGKNAKKRAVIAVARKLAVLLHHLWKNGEIYDPFHLPLPRRRSTEVPRGSAKEVAITPA

SEQ ID NO: 363271 - protein, 340 aa, unidentified
MTQSSTITIDLAKTVFQVAFFNKFGVLKSNEKMTEHKMLSFIVNHPEALICMEACSSAHYYGRKFEGQGHKVKLLPPHIVAKYRAGNKNDANDALAIYEALKRPNIYSVAVKSISQQDLASLLKLRKGYIKQRTQVSNRARGLGAEYGVKLPEGITSLKKRLPDILEDDGNQLTPASRFILADLLEEVHRLDSKIKHATAQLVELAKSISECELLTSLPGVQWITASALYARLGNGSEYKYGRNASASVGLVPSHSGSGGKNKLHGITKRGDKYLRSLITHGARAVVSNIRDKQDKLSCWIRALSSKHHFNKITIAVANKLVRMALAMLKSATPYRADLA

SEQ ID NO: 363272 - protein, 402 aa, unidentified
MPMLSIGIDVSKGKSTVCGMKPGGEIVYTPFEVQHTREGMSELVSLLRSSGEEVRAVLESTGSYHCPVVAALLENGIFVSVVNSLRMKRFCSQSIRKVKTDRIDAMQIALYGLAYWQELQPTKLPEDTYRELQLLARQYYQMTSLLIKAKVDFNAICDQVLPGMQELMSDHAGRHKLSDFVLRYRHTTHILEMGETRFRKDYCKWAEKKGYRNCERMAALIFATAQNGIPVLPNAPSTQIVITEAIRVLHTVEASRDAILTQMQALAKTLPEYSLVREMPCIGDTLAPRLIAEIGDVRRFHSKRALIAYAGIDAPPYQSGKFCANNRHISKRGNRYLRKTGYEVMQSYVMHKPANDPIFTFIEKKRGEGKSGKLAMVAGLNKFLRVYYGKVTELYRSLPAIE

SEQ ID NO: 363273 - protein, 419 aa, unidentified
MPSKKENTSVVSVVHHICCGLDVHKKMIAACLVSSDAGEGERSEVMEFETFTDDLIKLRNWLLEKECSVVAMESTGPYWTPIHNILEGYLQVILVNPRHMKNVPGRKTDISDSRWLAGLLRYGLLKAAFIPPKYQRQWRDLTRMRKNYMETVGHFKRRVHKLFQEANIKIDSALADLFGSTGRNLMKLLVSKESFLTFSEVENCLRGSLREKGRELYRSVNGFFEEHHRMLLTVLLDTIEKLEGQIEELELRIRQVLKTSEELIDRLKEIPGVSDVSAHSVLAELGPTLEAFPTAAALAAWCGICPGNNQSGGKRFSGRSRVRNHHLKTIMVEIAWPAIKKRGSYYKAKYYALKSRIGAKKAIIAVAHRILKAIFYVIKHGVCFKDLGEAYLLERSKASKIRYLSKQASLLGFELKPVT

SEQ ID NO: 363274 - protein, 463 aa, unidentified
MAARKQERMSAQVVEDEGYQLRHERVAGIDVAKDSGMVCLRLPPGPGGVRRRSRTWEAAATVPDIRAVAAELKAAGAELVSMESTSDYWRVWFAVLEEAGLRVQLVNASQARNLPGRPKTDKADAAWIARLTEMGLLRASFVPPAEIRALRQYTRQLVHLTQDRARYWQRLEKLLESALCKLASVASALAGVRSCRDMLEAMIAGERDPQALAGLARGPMRKKHADLVRAFTGMRFGPEHAFAAASDLRAIDFLDAEITGLEARISGHIAQLPAAWGVDADGTTGPGAGAGPDAAVLPAVARLAEVPGVSPGIAAGLIAEIGLDMSRFPTPAHLVSWAGLAPVPHQSGTRKGRGKKGHGSSYARRYAGQAGNGAARTGTFLGERHRRLRSRPGGGGWNKASCAVGRSILIIVWHLLKDPAARFADLGPDHYARHADASRKARGHKRQLEALGYDVILTPRQAA

SEQ ID NO: 363275 - protein, 385 aa, unidentified
MSAHPTPIQAAAQLQANTLFASLELSKARWLVTVSAPGSDKLSRHQVPGGDGQALLELLWRLQAAAARRTGAPVMIIVIQEAGLDGFWIHRLLVQNGITSHVVDPASIAINRRHRRAKTDKIDGVKLLRTLMAWMRGERQVCTMVQPPSPEDEDRRRLARERARLLKERIQHTNRIKGLLSGQGIPDYDPLHRDRRRCLAALTTGDGRPLPERLKAEIGRELDRLEMVVSQLTVVERERDALVARTAEADACAAPAALARLRGGGPELAALLWLEALFRRFDNRRQIAAYAGLTPSPWQSGGIDREQGIAKSGNPRLRRAMIELAWFWVRHQPGSALSRWFVERVGTARGRVRRIAIVALARKLLVALWRYVTQGVVPQGAVLKA

SEQ ID NO: 363276 - protein, 408 aa, unidentified
MNAVGIDVSKGKSMVAALRPMGEVALLPQEFLHTEVGLEQMAYAIVALGEDTRVIMEATGRYHEPIAAALHEYGIYVCVLNPLFIKQSGGGSIRKVKTDKADAMKIAKYGLDNWVELREYTPMDTVRQQLKLCSRQYNLYMKTVVSLQNNLISLTDKTFPGVNELFSSPERADGHQKWVDFVMTFWHCDCICRVSEKAFTDRYQKWCKRKGYHFSTEKALDLYAGSCGHFTTLPKNDNTKLLITTAAQQLLAGKTTLAELRAEMTRLAKQLPEYDTVRAMYGVGETTAAQLMAEIGDVRRFPRRSSIVGFAGVDPAVDQSGKHSAKSVPTTKRGSPHLRKTLYQIVCTYLKRSPADEPVYQFLDKKRAEGKPYFVYMTAAQNKFLRIYYARVKECLEAFDERQDTVQN

SEQ ID NO: 363277 - protein, 346 aa, unidentified
MILIGCDFHPSWQQVCWLNMASGETDNQKLVHASGDAEKFYRRLTVPVRVGIEATGNCQWFLELLGKLGHEVWVGDAAKIRACDPRQQKHDPRDARLLLQLLMENRFPRIWTPSSEEKDLRQLLLHRYKLVRMRVQVKNELQHLAMNKGISKGRRLWSAAGEKALCELPLAPWASRRREDLFKLRSMLNEQIAGLDQAVEKVAEQNDRACLLMTQPGVGPITSMAFVLTMGDVSRFPRGKQVASYLGLIPREYSSGGHQRFGSISKQGNRFMRMLLVEAAQCVVRYDEGFRNEYLHRCHTKPRGVAKVAAARKLAVRLYWMLRTNTAYPEIARVGSSPRVPLAGAS

SEQ ID NO: 363278 - protein, 342 aa, unidentified
MHTTTLGIDIGKRWFHVIGLDTAGIVVRREKLNRAQLYELFATHSPCLIGMETCCGAQHLARLAASHGHDVRLLPAQHVRPFVKSQKNDFNDATAIAEVVRLPSMRAVPLRSLEQIDIQALHRARQRLVEQRTGMTNQIRGLLLDRGLPIPQGLNPLRNAVPEILEDATNGLTPLFRSLLARLLSMWQQTDSAIEELTDEIQSVARASDQCRRLQSIPGVGPLVATALVSAVGNAGTFRSSRDLAAWVGLVPRQHTTGGKPKLLGLSKRGNSHLRRLFVQGARALWVWKEKRNDPLHQWMRRLAQRMHPHKAVCALANKLIRICWALLRNDHMIFRNAAAAA

SEQ ID NO: 363279 - protein, 375 aa, unidentified
MNYNTVYVGMDVHKKSFSLCCYTNEKEQAEYPQKTAPHYSKVLNYLEAMRFHYGDDVLFICGYEAGCLGYTLYHELMDHNVKCSLLAPTTIPQPTSRKKVKTDKRDAALIARCLAHHDYSPVHIPSEKDEQVKEYIRMRNDHKIALKKVKQQISAFCLRHGYRYDATVNQWTQAHLKWLRALKPEGLYRDILMEYLSTYDQLTDKIERMDRRIEELAGEPQYREGVKKLSCFLGIKIQTALSTMVEVGDFKRFSSAQRFAAYLGLVPGERSSSESQNRLGITKAGNSHIRTLLVEAAQSYTRGRVGFKSKALKERQYGNPADVIAYADKANERFRRKYYTMVLTNGQKENVVKTALARELACFIWGMMVGNLTER

SEQ ID NO: 363280 - protein, 322 aa, unidentified
MALKIVYKICCGIDVHKTFVVACIASTDKQVVTSYESHRFSTYTKGLKDLLQWLLARNCKDVCMESTGKYRIPIYNILEKDCSIVLTHPKYVKTIREKKTDRKNDRWIADLFKHDLVAGSFMPPADIRQLRDLMRYRFKLTCSKSSEKNRLQNCLTVSNIQLGNVVSDTFGKSAQAILDKILENPEGTSFDLEPLVFKRLKKKLPELRDAIDGHITPEQAGKLKVIKAHYESLESRKAELEELILALAAPYQQELAILQTAPGISSDFTAIGIISEIGTNMEAFPSAKHLYSWAGLTPTSNESAGKKKSVRVSKPDAISNRF

SEQ ID NO: 363281 - protein, 361 aa, unidentified
MTYYQGLRINSLRGNKLFLMKQSYVIGVDISKSKIDCALLTAEFEVLKEKIVLNSDFKIRAFLFQVLNTFSIDESDILVCCENTGIYNRPLERVCQEMGINLWVEHAVKIKRACTDMRGKTDRKDALRIAEYAIRYQDRKVLYKESSKVVIALNEQIKIRQTLMNHKVAIENQLREVKSHDPESYKILKTGYATVIKSLLKSLELAEQKISELIKQDEKIKKNVELMISIPGIGKQGAINFIIATNNFSTFNSAKHLACYAGVVPFQNQSGTIIKRERVSKMANQTLKKLLHMSAMAAIRCDPELRTYYLRKVQEGKNKMSVLNAVRNKLVHRIMAVITRGINYETKNIVSIKKETVLVAY

SEQ ID NO: 363282 - protein, 418 aa, unidentified
MNTDWTEHAYFAALDWASDHHDVIVLNRHGAVQAEFRFAHTAEGWAEFTAKMQPFTGMPITLETSSGPAVDQLLQRGWAIYPVAPTAAARYRERKVPSGTKTDRHDTWALADALRTDGHAWRPLRPQDEATATLRALCRDEIALIEQRTALVNQLQAALREYYPAALAAFDDWTAPHAWALVLQFPTPGQLQGAGKRKWEKYLHTQHLWRPQTAPERLKLFADAQALPASAAVTATKSLLAVSLAKILVTLQAQLDEYRRRITETFRQHPDHDVFGALPGAKAVLGPRLLAEIGSVREEYPDADALMCQAGVSPVSYQSGKVSKCRLRRACNKVLRATIHLWANSSRLTCAWAQAYYQTKRDEGHSHASALRCLGKRWLKILWRLWQNNEAYDEAKYLAQLQRRGSLTWTKLQPTQTL

SEQ ID NO: 363283 - protein, 522 aa, unidentified
MSKSLSVRSRSSRRRSAPRALPRPNGVIEARVQTVGPERFGIVAVDCAKRSSKWRLYDFYGKELTPVATVEHTAPAFRQAIDALRAAVAKHRLAQVLIAVERTSNYHLFAQRAFRDAGYETRIVHPFASKQFRQIEDPDQKTDEKDLGGIQRATVVGFGLLELPLDETYATLRALVRHRRDLVRKTSVVLNQIREHLQGTLPGFADLFEGSRFWNSPVTMPLARRFASPEAVRQLGADGIAKLLNEEGVRFQQRTIDKIVGWSHQATTPYADAVVRQRILADLDDDRIAKKTVISRLELEIAAHLVRTPYLLLMAIPGINVVSAAEFAGEAGPITDYANPNRLTGRAGLFPTRYQSDEVDRTGHLVRSANRRLRSALLFVADNLLTSNNFFRAQGAVWKVQKIPAGIQRVRVAKRFTRLAYLMVAARKIVPHPCCRDPHYILEKLLDFHLMRGAAPDQLRAALARAAEQIPGEMRAREADALRSSARKFEKARTSQAQTLGSILKEVLADRLSLTVQSPAEV

SEQ ID NO: 363284 - protein, 357 aa, unidentified
MTTQQKQSCLFIGIDVHKDTHTAVGISPYGEKLFEIMVGNYKNDFENLTNKVEKMKGTLSPFFGLEDVRGYGERLAGFLYEKYPVYHVPSILVDRQRQNATHPEKSDSLDALGVAKVMIQSIDTLLPYTISKESEKAKQIKEISIDREDLVLERTRLKNQVHTLLYRIYNTEYEQKFKDPFSIKALRFWSKAKPKCDPYLLKTMKRKIRRLLDIHTEVVDLEKDMDKLLTEGEYTIQTASGCGVVIASTIIGEIGDITRFTSPGALSKYAGCSPRERSSGKKTRHVKSRSGNRRLNCAFHRMALSQISRMGNDMAKTYFKREISEGKSKSQALVCLRRQMVNVVWMMLKHKTIYRNA

SEQ ID NO: 363285 - protein, 360 aa, unidentified
MTMLAEQVDGVIGVDTHRDTLAAAAVSPIGAVLATTDSPASARGYRRLLDFARRQIPGRRCWALEGVGSFGAGLAAFLGQAGEQVVEVLRPKRPTVRDGRKTDMIDAIRAAKEALSTEHLIQPRLRGEREALRVLLVTRHGAVLAATAAINQLKGLIVSAPDDLRSELRKLKGPAQVVRCAQLRDRPTHDVEHRMTARALRSTARRIQALQAEAKDLENEILVLVRQLAPDLLDLLGVGPITSAQILVSWSHPGRFRSEAAFASFAGVSPIPASSGLTNRHRINRSGDRQLNRALHTITLIRMRLDPATKTYVARRIGEGKTSRDAQRCLKRTICRQLFKILERSGQNTGTKPKDLPQAA

SEQ ID NO: 363286 - protein, 410 aa, unidentified
MAGAATGVIIGVDPHKGSHTAVALDGQENVLGQLRVRAAPGQVDQLRRWAAPWPKRTWAVEGARGLGHLLTQQLVGAGESVVDVQPKLAARVRLLDTGQINKNDPNDARSVAVAALRATAPPAVAIEGGTAVLKLWARRYRDLGRLRTQVMCRLHAVLCDLVPGGFSREISAGQAIDVLHRLTVHGPVADARLELAHDLVIDLRRIDAQRREVKRRLTRQVAASTTTVTEIYGVGPIIAATVLGYVGDIARFPSRDHFAAYNGTAPIEASSGNRKIHRLSRRGNRQLNHALHMAAVTQIRNRGTAGRAYYDRKRAEGMTGKCALRALKRKISDAIYHRLVSDTRQQMRSKTKDPGGQPGNDSASSAAGSHPEPPALRKSHSRVAANPTTRRPAPQPAKPARPTKIVPHAS

SEQ ID NO: 363287 - protein, 339 aa, unidentified
METYYSGIDLHSNNSVVVVKEATGKVVCRRRLENDLRKIEQVLSAYRVGLVGVAVESTFNWYWLVDGLMEAGFPVKLANPAAMQQYSGLKYTDDESDAEWLAEMLRLGILPTGYIYPRSERGVRDLLRKRAQMVGQRTANILSVQNIVWRSDGRRLKADEIRALGEQEIEELVRQPEVALAMGASVAVIQCLSEQIKTIEKVVLGRVRLREEFRVLKTAPGIGDILALTIMLETGEISRFESVGNFASYCRCVGSRKISNKKKKGRGNVKNGNRYLAWAFVEAANFALRHSVPIQRFYQRKKSRTNGIVALKAVAHKLARAVYHMLRDGVVFDMNKAFS

SEQ ID NO: 363288 - protein, 402 aa, unidentified
MEKSKKCLRFCGIDMAKQKHVACIIDRNGQYLLRPKSFRNDAAGYQQILNCLKQSGRAKSILTGMEATGHYWYSLHDFLTRQGYAVAVLNPIQTAQQAKQAIRKCKTDKYDAFHIANLLRTGQYKTAVVPGELAMTCRQLTRLKYRIVKQAAMIKQLVNSRLHPVWPEYEGLFSNKFGTTSMKLLQAAPTPRELIAFGYDDLSELIHKASRGRFGPAQTQRILHKAKNSVGMQRGHYGISIGIKLLLEQIKALEPVRKKLDAEIVKLSAKLPQYLFTLPGSTELTVVSLYGEVDPIEAFKKPSQLVAFAGLDPKVFQTGQYDAPRRQVSKRGSPYLRRTLWQMAYRAVCNEGDLRDFWRRKHRQNKHHLVAVTAAANKLCHIVWRIMTDRRDYIPKGYNPKS

SEQ ID NO: 363289 - protein, 423 aa, unidentified
MSKKKQTVAGLGAIYARVCGMDVHKEVVVACVRILDMQDGTVQSTLRRFGTMTADLLELRYWLAQEQVTHVAMESTGVYWQPIFNILEGHFEVWVVNAQHIKKVPGRKTDMKDAEWIAQLLQCGLLKPSFVPDREQRELRDLTRQQTKLVQQRNAVANRIQKVLETANIKLGSVASDVLGVSGRNMIEALIGGERDVSKLADLAEKRLRHKIPQLQRALEGEVREHHRFLLRRLLDQYDFLEKEIARISERLAAIAPPSFRGAVERLDEVAGVAERGAQALLAETGTDMTRFPSHKHFASWAGRCPGNRESAGKRKSGKTPSANRHLDAVLTEIAHAAVRKKDSYFKSQYHRLAGRRGKKRAIGAVKHSILVTIYFMLRDNKSYTDLGPDHFDKLNPQQQIHYHVRKLNELGQNVELSLRPAA

SEQ ID NO: 363290 - protein, 412 aa, unidentified
MERVHERCCGLDVHKETVVACLRTPGERGRRKVEVRTFGTTTPELLTLGDWLIEHRCSHAAMESTGVYWKPVFNLLESVCEVLLVNARHIKMVPGRKTDVKDCEWIAELLELGLLRSSFIPPEPIRDLRDVTRYRKTLIQQRAAESNRVQKLLELANIKLGNVATDVLGASGRAMMDALIAGERDAQTLMRLAKGQLKRKRTALVPALTGRFTHHHAFLLGQLLAHIDELGEHIAQCDRKVDEYLRPFVQEADLLQTIPGVGRRTAEVIIAEIGVEMDRFASAAHLASWAALCPGNNESAGKRRSGKTRKGNQWLRRALVEAAWSASHTRTTYLSSLYSRVARRRGAKKAAVAVAHSTLVAVWHILKHHVPYQDLGPSHFDKLHTERLRRHYLRRLEDLGLKVTVETINEAA

SEQ ID NO: 363291 - protein, 450 aa, unidentified
MSKPKPQVIEDEEHQRVFERVAAIDVAKASGMVCVRLPGRDGRPRASKVWEVPAVTSAVTELGRRLLSDRVQMVTLEATSDYWRIFYYLLEALGLAVQLVSPAQARQLKGRPKTDKHDAMWLARLTEWGMLRPCFVPPAPIRALRDYTRARTDYVRERTRCYQRLEKLLEGALIKLSSVASKLTTESAKDMVRALIAGERDPHVLAGLARTRMKARHDALVEALAGMFDAHHGELAQLELDQVKFLDQNITQLEARIRGTLAAIPEAQGVDADGTTGPAAGTGPDAPVLPAAARLAEIPGISPDLAATIIAETGLDMTRFPTAAHLVSWAGLCPAANQSGPRVRAGKKKHGNAYLRGALGQAALGAARTGTFLGERYRRVARRRGKAKAQVAVARSILTIIWHLLADPAARYTDLGPDYVASRTDRDKKIRNHVRQLQALGLQVTLTPAA

SEQ ID NO: 363292 - protein, 383 aa, unidentified
MDAGGRTTHMSMDNGMDPLPLITGLAMGQNGVSSNHLKRRSGSSMKITTIGLDIAKTIFHLYAVNKMGRYVKKKQLKRHQLLHYLAQLEPCLIVMEACGGANYWAREMRALGHEVKLIAPQYVKPYVKGNKNDYNDAQAIAEAAQRPTMRFVPIKSVEQQDIENLHRQRERIKKARTALVNQIRGLLAEYGIVINKGVPAVRKSLPELVEDAENGLTMRSRELFAELFEELRLLDERFKQSEKQIEASNRGNEVCQRLDEILGVGPITASAAYAAAGDGKDFVNGRHFSAWIGLVPGQHSTGGKPTLLGISKRGNGYLRTLFIHGARAVLRHSASKTDRFSRWAQALLERRGHNKACVAVANKMARIAWVIMAKGETYRPTMS

SEQ ID NO: 363293 - protein, 382 aa, unidentified
MAGTEPHAWGTGLMDDITFVGLDVHKATISVAVAENGRGGEVRHVGVFENRPEILVKLAARLGNGGRRLSFCYEAGPCGYGLHRLLTGYGHECVVVAPSLIPMKAGDRVKTDRRDALMLAKLHRAGELTAIWIPDAAHEAMRDLVRARATAVRVLGKARQHLQGFLLRHERVYRGARAWTLAYRRWLTTVHFEHPAQQIVLQDYIHAVQDAEARRDRLTRQIEELLPNWSMAPVVLALQSMRGVALVVAITVVAEVGDFRRFANPRQLMAYLGLVPSEHSSGNTVRRGGITKAGNILARRVLIEGAWTYRMSARVSRKLHDRLEPLPAAVRDIAWKAQLRLCARYRRLSAAGKPKVVVTTAIAREMVGFIWAIAYIAQPVLA

SEQ ID NO: 363294 - protein, 345 aa, unidentified
MKNTIVGVDLAKDVIQVCVYANKKVQSNTEMTHHEFLEWLFNTSETTVVFEACSTSNYWKQKAAEAGHAAHLISVDLVSKIRQNQKTDKNDALAIVQASLLPDISFIKGKTVEQQQLQSILRLRELAVKQKTATGNQLKALLLEFNIRVSARKGGLGGVIESVLENAENEFSTAFREALYTAWQHHLSIIKSIATYDGCLEELVEQHEDCKRLLKLEGVGVINAVNLYIALGCADLGAFCKGKDASACIGLTPIQHTSGGKVKLGSIGRYVKNSLLRSQLITGAMAVVAQVCKRTAVTSKEVWIQQLVARRGKKIAAVALANKNVRTAFAMLTQGTEYKAEPVAV

SEQ ID NO: 363295 - protein, 407 aa, unidentified
MLKIVHPICCGMDVHKSFVVACIATTNERGVTTYKSKRFSTFTGDLRRCAAWLAENNCKDVCMESTGKYWIPLYNILERTCNIVLAHPKYVKAIRGKKTDKRDAKWIADIFKHDLVTGSFIPPADIRQLRDLVRYRWKLTSFTTGEKNRAQNCLTVSNFKLDDVFSDVFGKAAFAITTRILNNPAEKITDVSNFRTKGMKATDEQVLAAVDGAMCEEQAEKLRIIRSHMDSLHLCKLNLESLILATAEKYLPQLNLVMTAPGIQSFAAIGIISEIGVDMSVFPTSKHLCSWAGLTPQNNESAGKKKTTRISRAGAYIKPLLVQCALCAIRAKQFPEVRNRYLALKKRRGHKKAIIAIARMLLTAIYNMLKKNEPYNRLSTTWQTVPRPTVKFRWKKLFTLSNDKGIW

SEQ ID NO: 363296 - protein, 348 aa, unidentified
MQFYTNLHPFYCGIDLHARMLYVCILDERGEILVHKKIKDSPEQLLNLLAPYIGNIVVGAECMHCWYWLSDFCEHHNIDFILGHALYMKAIHGGKTKNDKIDAYKIAKLMRGGNFPLAYVYPKEKRAIRDLLRRRTHAMRHSAELKAFIKNALSQYNLPVPDKSDLSYTTGRDAMRGYFPNPQVQRSIDMNLRLIEVYDHEVSSIECHVEKLTKHDNGRDYYLLRSLPGVGRVLALTILYEIGSIQRFDSVQKFASYSRLVKCKAESAGKSYGTQGNKIGNAHLKWAFSEAAVLFLKGNPPAQAYLAKLQKRMSKAKALSALAHKLGRCMYFMLKNQTVFDSERFLAG

SEQ ID NO: 363297 - protein, 337 aa, unidentified
MKFCGIDLHSNNSVVVVTDETDRVLVSRRCPNELTPILSLLEPHRAELAGVVVESTFNWYWLVDGLKAAGFEVKLANPVAMKRYDGLKHSDDKDAAAFLAHLLRLGILPTGYIHPPQERALRDLARKRIQLVRTRTQHILAVENIMARQFGHRLSCNEVKGLSATSVDRLGLPTDVALAMKANVAIVQTLQIQINVLEERLLHQACLRPEFSLLKTMPGIGEVLATVIMLETGDIERFADVGNFASYARCVKSAHYSNGKKKGEGNTKNGNAYLIWAFIEAANFARRFSEEAKRFFEKKKAKTNAVVATKALAHKLARASYHILKEKQPFDARRCFA

SEQ ID NO: 363298 - protein, 400 aa, unidentified
MISVGVDVSKGKSTVCILKPYGEVVSSPFEIHHVEKDMEDLDNLLSKLDGEVRIVMEATGIYHLPVVTFLHDKGYFVSIVNPFAMKKYAKDNSIRGAKTDRLDSIMIANYGIEKWFKLQRYEGTEETYAELKLLGRRYRYYMELHVKALQELTHVLDYVLPGIKKMFNSWNEANGKDKLSDFVERFWHFDLITSMSLEKFTEEYIAWAREKKYHRSRSKAEAVYELASSGIPTLSSSTPSTKMLVQEAVSVLRAVDSSLSLILTRMQELAKSLPEYSVVREMGGVGNVLAVKLIAEIGDVRKLHNAKALIAWAGIDPPPYESGQFIGSKRRITKRGSSTLRKVGYEVMRVLKSHSAPKDDAVYNYILKKESEGKSKKHAKIAGLNKFLRIYYARVMEVYQ

SEQ ID NO: 363299 - protein, 321 aa, unidentified
MSASSVVVGIDVAKAHVDVAVLGCPSSIAQRFDNEAEAHSALAAALKPLGVALVVMEATGGYEAALACALQAAGLPVAVVNPRQARDFAKSVGRLAKTDRIDARMLAEFAGVLVRRDDLASFIRPLPDAQQQALAAMVTRRRQLVTMLLSERQRLQLAIALVRPSIEAMIEAIRKQLDDVEAKMASHVQAHYVELDKLLRSASGIGPVASATLIAELPELGRLNRREIAALVGVAPMANDSGNTRGRRRVQGGRFEIRRVLYMATLTAARRNPAIKTFYDRLLAAGKLPKVALVACMRKLLTMLNAMVKTNKPWDKSLHGA

SEQ ID NO: 363300 - protein, 304 aa, unidentified
MNTTVIGLDIAKQIFHVVGLDITGKQIEKKTLRRSKLLEYFANHSPCVIGIEGCASSHYWARELSKLGHQVKLLPAQYVKPYVRGNKNDYNDALAIAEASRIPAMREVRIKTIEQQSIQALHRLRRGAVADRTRLCNQVRGLLAEFGIIMNQGISTLRKGLPEILEDAENELHWIFRDALALKYEQLCQLDTLVNKLTTFIETEAKQHSQIKQLQSIPGFGAIVASTFFSVIGDGKSFSKGRDVSASLGLVPRQHSSGGKNTLLGISKRGDKYLRSLLVHGARDNKNDDTICKTDILKPASSEG

SEQ ID NO: 363301 - protein, 384 aa, unidentified
MRRTQKRGPGPSHLLLTPDHAGNVVGIDPHKQTLTATVVDPRGGIVASEHFRVSGGGHRALEAWARQFGAIARWGVENAAGWGRHTAIFLIGRGYDVRDVCANRTPRSDRARQRGKSDTLDSERIARETLAHSLLPKAFKRSGADQGPDELHQLLSLWHNRRRSILTSRQHLVGEAESLLCELPLELREQLPDSKSVRPRLAALQRRNRRRRYDLPTRLRLQLLDGYYQQIQALDREEKQVVAALEALVRQSGSTLGELCGLCTRSVAELLVETGDARRFTEGGYRRFNGTAPLPASTAEGPGEPLRHRYNPGGNRRINAVLHRMAVTQLRCEPRAQTIYANARANGHTKKEARRVLKRHLSDVVYRRMIRDLAAQSAEPLIAA

SEQ ID NO: 363302 - protein, 352 aa, unidentified
MQHFIGCDVHTRNQVVAWIEEETGEIKKRRLEHEGKEVKEFYAQFPRGTVVGIEATFPAYWFERLLGELGLELWVGDAARIRASEVRYQKTDRRDAEDILDLLRTGRFPRIWVPSLEERDLRQLLVHRMKQVRARTQVKNQLHALAISQGVCRGRKLWSAKGRKELESLALLPWAARRRKELLESLDRLDEQVRELDKAVEEAGRGRPEVALLRTHPGVGMVVGLAFVLTVGPVERFPNSRKLVSYWGMNPRASSSAGHQRLGSISKQGNTMMRWLLVEAAQTAARLDPQLRRTYQRLKKRKTSGVAKVAVARRLVVRLFWMLRTRHNYAQLVHLSGSPSSAVVPPQGGPNL

SEQ ID NO: 363303 - protein, 376 aa, unidentified
MEHTTFIGLDVHKASISVAVAQGMRGGEVRHLGSVPNRPDHIRKLVEKLASAGAQLQFCYEAGPCGYGLHRQLVAMGHDCSVIAPSLIPVKAGDRVKTDRRDAVMLAKLHRAGELTAVWVPDAAHEAMRDLVRARATAMRVAGKARQHLQGFLLRHSRIYPGKKGWTGAYRRWLALVRFTHPAQQIVLQDYIDAVADAEARVERLTEQIADLLPHWSLAPVVEAVQAMRGVGFIVAVTVVAEVGDFGRFDTPRQLMAYLGLTPSEHSSGASVRRGGITKAGSGLARRALIEGAWSYRMQARISLKLLARLEALPKVVRDIAWKGQLRMCQRYRHLIAVGKAKVVAVTAIAREMLGFVWAIARAVTAPPASPDATAA

SEQ ID NO: 363304 - protein, 344 aa, unidentified
MQIAILGIDLGKNSCSVVGLDDGGRVVVRRRMHRASVIRFAGSLTPCVVAMEACCGAHHLGRLLRTQGHEVRLMSPEYIRPYVKAQKNDDRDAEAIAEAATRPTMRFVELKAEEQLDMQTLHRVRDRLVGERTALLNQLRAVLLERGITVPQGRRKLEQHLDAMLGVPECSGVAPRMRSLLHDLRAEWRALDRRIEAFDEEFAVRARTDPDARRLATIPGIGVLNATALVAAIGNGETFARGRDLAAWLGLVPRQATTGGKPRLLGISKRGNKYLRKLLIHGARAAMPFLARSATALGAWLRGLLARAHPNTVVVALANKLARIVWAVLRHGREFERADVVAST

SEQ ID NO: 363305 - protein, 343 aa, unidentified
MTKITTVGLDLAKSVFQVHGSDIDGRPVLRKKLRRDQVLRFFATLEPCLVAMEACGGAHHFARELQALGHDVRLIPPQYVKPFVKTNKNDAADAEAICEAAQRPTMRFAPIKSRDQQAVLLIHRTRDLLVRQRTQLINALRGHLSEFGIVVAQGRRNIDKLIAIIEDEADDRLPALARQTLQTFVEQLRTIDTQIVGLERRLKSWHQGNEASRRLTAIPGVGVISATAIVATVGDASQFTSGRQLAAWLGIVPRQNSSGGKEKLGRISKHGDGYLRRLLVHGARAALRWSRHDKDNRSPWLTGMLARRPTNVVLVAMANKNARIIWAILSRGETYRSEIPATA

SEQ ID NO: 363306 - protein, 318 aa, unidentified
MDERGRPILRENLTRARFEKFLGKVSPTEVVLEACGSSHHWGRFAQERGHTVRLVPPQYVKPFVKRGKNDRNDAEAISEAASRPGMRFVPVRSAEAQAEAMDLSARDLLVRQRTQLVNAIRGHAAEFGVIAAKGIAHIAPLLQKVAETDMPQAAKDTLAQLGRVVAQLDAQLAEIDRRLAERHKANPVSRRLAAVPGVGPVTALTVATTIDPGQFASARHFAAWLGLTPKEHSTGGRQRLGGISRAGNERLRQLLVVGAMAVIRQARPGSKTASPWLLALLERRPRKLAAVALANKMARILWAMMANGTAYRRSPQAA

SEQ ID NO: 363307 - protein, 353 aa, unidentified
MDKITRVGVDLAKNVMQVHAVDDAGRVVVRKAIARERFVSWFANLEPCLIAMEACSAAHYWARKLRALGHDVRLIPPQFVAPYRKGGVHVKNDALDAEATCEAASRPHMRFVPVKSPAQQSVLVLHRMRTGFVEERTALVNRLRGLLAEFGVFLPQGIDKLRKHFVDRVEDGNNDLAGPAREALMHGWTQWQALDEEILWFDRQIAEHATQDPQAQRCMDVCGVGRLTASAAVATVVDARQFKNGRQMAAWLGLVPSQKSSGGKHRLGRITKQGDDYLRTLLHQGARSAVATAHQRNDRLSRWIVQLQARVGYYKTLVAVANKHARILWAVLAKGEQFDPSYAPARTRTAAGA

SEQ ID NO: 363308 - protein, 382 aa, unidentified
MNRIIKIGMDVHSTNYTLCAMEPVLDGEDRIFTNIQVTPDYKNVIQFIDNLKKRLGSSDSYSIECGYEAGCLGYSLYHQLTKAGVKCTILAPTTMLTQQGKRVKTDKRDAAMIAQCLSYGGYHAVHVPTDKDASVKEYLRMRDDHKLALKKIKQQINAFCLRHGYIYDGHKWTLKHLDWLKKLNLSELYRETLNEYMTSYEEQTAKIERFDKRIEELAADSDYHENVRKLSCLLGIQTYTALSLIVETGDFKRFRKGNTYAAFLGLAPGESSSGEKISRTGITKAGNNRLRTLLIEAATGICKGQVGHKSKALCARQAGNPEEVIAYADRGNIRMRSKYKRMIRHEKKRNVAVAAVARELACYIWGIMTNHIEPREEGKKAA

SEQ ID NO: 363309 - protein, 340 aa, unidentified
MNNGLKLLGIDIGKNSFHLIGHDAGGHQVLRKCFNRNRLLQFAAQIEPCTIAMESCGGSHWLARKLASLGHRVKLIAPQHVKPYVTGNKNDFIDAEAICEAASRPRTHYVAAKTVEQQVLSVQHRLRESLVCHRTEAINRVHGFLLEFGIALPATKAAIAKVPELIDNSRSDLPLQLKRIMEHLLEDIRRLDAEIKACDVQIKQQLAQDDAGTRLMTIPGIGPITASALVADMGDASNFKTSRDLSAFLGLVPRQFSTGGRPVLLGISKRGDRRMRTLLVQGSRALMIRIDRREDALGQWVRNLLARKHPNKVACALANKLARIVWAVLRRGGTYNASMI

SEQ ID NO: 363310 - protein, 355 aa, unidentified
MESVKYLGFDVHQSTISVAVVNADGKLVMQSVIATHAATILDFIHGLRGTLHLTFEEGTHSAWLYDLLARRVARVVVCNPRQNALLKAGNKSDTGDARKLAELLRAGLLAPVYHGEGSTRTLQELVRSYAALTEDTTRVMGRVKALYRSQAIACAGKKPYGRRHRREWLSKLSEAGLHRRAERLYEELDALQGLRRAAKRELVLESRKHAAAKLLRTVPLLGAIRAALLIGRVQTPHRFRSKRQFWAYCGLALETRSSADYRFEDGQLVRAKKPVFIRGLNRNHNHDLKNLFKSAATTASALHGPFREFYEGLLAKGMQPAMARLTLARKIAAITLSVWKKGESFDAEQLKPQAA

SEQ ID NO: 363311 - protein, 444 aa, unidentified
MAMQVPQPVAAEEHDVILARVAAVDVAKAAGKVCLRVPDPGDASRRATSVWDVASTTEAIMELGAFLFAAQVQRVVVESTSDYWRPFVYLLEAQGLQVWLVNARHVRQAPGRPKTDKLDAVWLAKLTERGMLRPSFVPPAPIRQLRDLTRARHDLAGDQTRCKQRLEKLLEDALIKLSVVASDLFGVSARMMIEALINGQRDPHVLAGLARGRLKAKHGALVQALHGRFDDHHAQLARLLLQQHDLIQAQITELTRAIEAAITAIEHSHTPPAQPQLDQPPPLPAVARLDEITGIGPEIAHTIIAEVGLDMSVFPTAQHLVSWAKLSPRTRQSGAKTRHGRTGKGNPYLKAALGQAAAATARTDTFLGVRYRRLVARRGKLKALVAVARSILTIVWHLLANPHARFHDLGPDHYTQHIDKQRRTRNLIRQLQVLGYQVNLTQAA

SEQ ID NO: 363312 - protein, 409 aa, unidentified
MRIISKRCLGLDLHKKQITAHLRVQRRSNQLPLGEDLRFGTMPDDLEELRQWIIDQKVTDVVMESTGVYWMHLYELIEDVTAPLVANASHVKKVPGRKTDVGDAQWLAELGAHGLLRPSFIPPREIRDLRAVARYRTRLVATQTAIRNRTIKLLEMAGIKLSSVASDCFGVTGRGILDALAEDKPIDMVKLAKQALRKKIHELERCLGKGLRSALQRRLLKMHLEAYDALEAQIAQTELELTTLAAPHHEAIAALDAIPGINQLGAITVLAEIGVDMSVYRNEAHLTALAGLAPGNAISANTRRRIGVRKGNRHLKRICVQIAWAASRKRGSFLQVRFHRLQHRIGRNKAIVALARQMLVLIYHVLCGKPYTDLGPTFYDERDKARAVNRYAQKLAALGYTVQLVKKPA

SEQ ID NO: 363313 - protein, 327 aa, unidentified
MAYSHFIGVDISKSHLDFAHLCSQQPSFAIEPCSNTQNAIIKALQPLLGSLSKVLVCAEFTGMYSYNLMLACQNLNIDLWLENPAQIKHSTGIQRGKNDPLDARRIAEYAQRFTDRVRLVGVEQKSMEHLRYLISERRLLVADRAKYKAQLGDQQGHMPQELFEQKALRLRRLIASFDEPIAQIEQQIQTCITASSELDTHYKLLQSVPGVGPRLALHMLLATGAFSKITDPRKLCCHAGIAPFAYHSGINTSSRARVSHKADKQLKSLLHLAALSVVARPGELQTYYRRKVEQGKPKMSALNAVRSKLVHRMFSVVKRQQPYSLTY

SEQ ID NO: 363314 - protein, 355 aa, unidentified
MKQGTQLDFTGQEIFVGMDVHKNSWKICIRSEHMELRTFSQTPSVKTLSNHLRQNYPSANYHVVYEAGFCGFGYQREFTEEGINCIIVHPADVPTSDKDKQRKSDTVDCRKLGQTLSKGQLTGIFIPGVEQQDDRGVIRVYQQLVKDQTRFKNRIKSWLAFQGIIIPGDDEHKYWSNNFVQWLKNLSLTPSARINLDILIQGYEQARAMVLTATRQVRVLSKQERYGEIIKLIRSVPGIGEIAALLITIEIGDINRFKTLDNLCDYVGFVPRVHGSGDKETVLGLTNRAHHALREKFIEASWVAVRLDPAMTLAFNTYCKRMKKNRAIIKIAKKLLNRVRYVLKNRKEYVTAVVQ

SEQ ID NO: 363315 - protein, 339 aa, unidentified
MENNKKTYYNQYLAIDWSIVDVEIARMSAQGAKILTRRFAPDIKQIKEYLNSIKGKKIMTIEETTSSHWLYVELLDCVDRIIICDPYRNSLLSEGPKNDKIDARKLCLLLRSGLLKEVYHSLDNDYKIRKLVSAYEALVKAGVRVKNQKSAIYRAEGLRYKKDKIKKQDEILSFIEQQQNASIIHYEQEKEKYKNKFRGIKKKNKLIKMLCGISGIGTIAAVKIYAKVIDAGRFENKYKYWGMCGLVYYKRESGGRNYGRKKPRYSRTLKSVYKIAAMAAIGGKNDIRDYYEVLLKQGYSISEARNQIARYIAKVSYGVMKNKIPYRAYQWRELKKAAA

SEQ ID NO: 363316 - protein, 430 aa, unidentified
MLRNYSTQREKIERITDKTLIIGIDIASHRHYAQALTWRKTEVIKGLFFNNERQEFERFLDWMNRAKEKMEANNIIVAMEPTGHYYFALEEYLEALGIEVVIVNARDVNYMGKTYNNDNSKNDPRDAYLIGYLCSDGRYSVTTRPKEGEYAEIRELTNHRDHLVKRQSGSINELHCIFSQIFPEYKKVKERGISEGLLAVFLELKSLDNIIKAGWEGVYEALKKHKKHQIGRKKAKQIHELARKSIGVKRKVKTTQTVLISLIQEYQFYQNQINTIDEQINELIKGMDAAQRLMEIDGIGPVIAATFLAEVGDIANFKSAKQIQKLAGYAIRTNISGETEGSMRITKMGRKRLKKILYQASLSTIGTNKEIKQIYAYYTQEREKPLKKMKAVTAISCKLIRIFFSLLKYSHHYDGQKMLSDIKRPQGKAV

SEQ ID NO: 363317 - protein, 423 aa, unidentified
MMKLKYSICCGLDVHKNVIVATIVTTNKDGISEYLQNSFSTINSDIQRFHNWLIENNCYHVCMESTGKYWIPIFNYLENDIDVCLTHPKYVKAIKGKKTDKKDSKWIADLYKFDLVRCSFIPPKDFRQLRELSRYRFKLVCMKSSEKNRIQNCMTISNVGIASVLSDPFGKTATEIISYLLEHTADSMDEKAVRKLIKKGAKSKSDEIIEAIKGYTIETDQAKKLELARGHLEYLDDMITQTEVELYVRIKPYYEFVEFVSTMPGMTELSSTIVLAETGVDMDIFDDAKHLCSWCGLSPANNESAGKKKSVRIAKAGDYLKPMMVQCALAAIKSKKQPYFAIKYGRIKKRRGHKKAIIAIARMMMVCIYHMVSEKKPFTPTDYEELMDPQNHVESVVLNENNVFAYLESLGYDSSKLVKRNDN

SEQ ID NO: 363318 - protein, 427 aa, unidentified
MPYRIAGIDVHKRMLTVVVCDVEVRGEYEFERRPCGSTPSHLRSLAAWLVEQEVEEVVMESTAQYWKPVWAILERYWKPLQQGREGARPMSGMLHLAQAQSNRGPRGRKNDFADPERLVKRLVAGELILSFVPSAEQRVWRTVMRTKYQLRCNQVQLQNRLEALLEEAHLKLSSLVSDLLGLSGRRMLTAIAEGETDPAAVAARADYRLRATPEELCDALGACGELHPVYRRLLQRALEEWQRAEAQITQLSQEMATLLAAHQEQVQRLAEVPGLGVDSGQQILAEVGASAATFPSAKALSSWVGVCPGEEESAGVNHNRRSPKGNRYLRHILNQSANAAVKLKGSIFAVLYSRYVVRFGHNHTIAVIAHRLCRLIWKILHQGVRYEERGPAVHQKSMQRRTARMIRQLRDLGYRIELTKPSAPVPA

SEQ ID NO: 363319 - protein, 380 aa, unidentified
MYIGIDAHKLSESICVTDDAGTIVEEYKMENTQENWNGFMNRYGRECTEIAVEASTSGKYVARLLRDNGFKIHLANPNELKMIFRSNKKTDKNDARILARLLRTGDLPESYLPSKEIDELRTAIRYRRSLGEELSIKNKVHAILAMHGIRIEASDIFGKRSLNRILESSDKLPEMDRIILTDLISRFNDLSMRIEKLQDKIASLGNSIEEVKTLMTIPGIDYYTAIAIYSEIGDIKRFPDAEHLSSYTGLVPRVDQSGENAIYGHITKSGPSLLRYFIVNSVHTLIKLSPTFKTIYRKLKKRIGRYRSIIAVARKLAVVIYNMLEKKKEFVEEHAFKALKERKLKNMESRSKRPHGFSRDEMETVIKEVVISSKSNKLLS

SEQ ID NO: 363320 - protein, 367 aa, unidentified
MKKVSTIAARASRNISQPTLIIGFDLGDRNSWYCVLDESGQIQREQRVRTNAKALREVFGEMPRSRIALETGTHSPWISRLLSELGHQVIVANARKVRLIGESRKKDDRLDAQTLARLARIDPGLLCPVKHRSAQAQADLTVIRARAGLVRSRTALVNTARSLAKSYGQRLHGCNVRHMNPEKAESLSPELQAALEPLLNAIESLSERIVEYDDRIENLAQQNYPQVALLKQIKGVGTLIALTFLLTLEDPHRFRKSRDVGCYLGLQPGRRNSGQSEPQMHISKEGDPYLRTLLVQGAQHILGPFGVDCDLRRWGLKLAERGGRNAKKRAIVATARKLAVLLHHLWVSGEVYEPLHNSRRVIVAAAA

SEQ ID NO: 363321 - protein, 410 aa, unidentified
MERQVERCCGLDVHKDTVAACVRIGGGPGQRTQQHVQTFRTTTGDLVVLRDWLAAHAVTHVAMESTGVYWKPVYYALESDFTCLLVNAAHIKQLPGRKTDVKDCAWIAQLLEHGLLRGSFVPPAPIRELRDLTRYRKAVIQDRTRVVNRLHKTLEDAGIKLASVASDVLGISGRAMLEALVQGTTDPAMLAELARGRLRGKLPALRQALAGRFRGHHAFLIGQLLAHLDYLDEAIAILSEQVETVIAPFADALTRLDSIPGINQRTAEVIIAEIGVDMSTFPSAGHLASWAALCPGNHESAGKHQSGKTRKGNRWLRTALIEAAAGASRVKNSALQARFRRVLRHRGPKKAVVAVAHALLRAAYHVLADHAVYRELGADYYDRQHRQRVTRRAIQLLERQGYHVTLEPAA

SEQ ID NO: 363322 - protein, 429 aa, unidentified
MNQVPVAGIDVGKRFSEMAILSPSNQVYARIRINHDAYSNFDRAFELLRKAEKEFAAKPVVVMESTGHYHKILFQALNKNGYEVCVINPIQSDSIKNIRVRKVKNDKVDARKIALLYRFEQLKTTNIPHEDVDCLRSLCRHYYKLSDQLTAYKNRLLGIVDQLFLSFTDVFKDISSCTALAILEKYPTPEDILKADRQELISLIQKTARKNIKWATRKYESLCSKASNFNPLSINSIANVAMLKANIAMIKTLMQSLDEAVEAIHELLDKDASKDMPVLSLTIELLCSIPGIGLLTAATIVAEIGDFSAFPKPDKLVAYFGIDPSVTQSGQFEGTENKMSKRGPRLLRRVVFTTALANVRKKRNGQEHNPILYEFYRKKCLSKPKKVALGAVMHKLVTIIFAVLRDRKPFVLRKPEEHAKMLVAKNSAA

SEQ ID NO: 363323 - protein, 360 aa, unidentified
MSSFQNNSLTFKNQSFYIGIDVHKKQWTICVISMNLLLKKYVSIDPTPDTLLRFMKRRYPDGNYYAVYEAGFSGFWAARELNKIGIHCIVTHPADVPTSQKERLNKSDRVDSNKLARSLSNGDLEAIYIPEKIAEEYRSLNRYRFQTVKDQTRLKNRIKSKLHYFGITMPCQFEERRWSGKFINWLLSIKFDIEFAQFAFNDLIKQLVEARKRLTEILKTMRTMSKEVVSFSSIAPLLLTVPGIGFITTMTLLTEIIDMNRFKTFEKLAAYVGLIPSIQSSDEKEINLGISDRRNKYLRTMLVEAAWKAVKVDPALTIKFANLCRKMNNNKAIVRMAKILLSRIRYVWKNQKPYINAVIA

SEQ ID NO: 363324 - protein, 426 aa, unidentified
MKIVHPICAGLDVHKKEIVATVAITNSQNITTHKQRKFPTFTSDLNLLADWLLSHDCRHVCMESTGKYFIPVYRVLEYRGLKPCVAHPKFLRAIPGKKTDIKDSKWIADLFKHGLVPMSFIPPLEIFELRDLTRYHTKLTNVRTGEKNRIQNSLTVSNIMLSSVVSDTFGKASSAILKYVLDHPEERNIDFTSFMQKNMRAKVEDISKAMDGAFTPEQANKTKIAFKHLDYVNDCLEQLNLAISLLAKRFEPQIELLTTIPGVTSRSAIRIIAEVGNDMSVFPDSKHLCSWAGLTPQNNESAGKKKSTRISRAGVWLKPLLIQCSLAAVKDKSCPYFAYKYQALSKRRGKKKAIIAIARMILTSVYHMLSKNVAFDSNLYQTYYHEQTKRFKNLSIPKLVSFLASQGLSVMTGDGEILAVPLAHTG

SEQ ID NO: 363325 - protein, 468 aa, unidentified
MTADKKLWRNRKERKEWARRLQSEDPGLEVVHPHAAGIDVGNSAHYVAVRPERDPQPVRRVECFTADLRRLADWLQSCGVKTVAMQSTGVYWIPLYEILEERGFEVYLVNARHTRNLPGRKSDVQESQWLLKLHTYGLLNNSFQPPAEIRALRTYWRQRGEHVAGAATCIQRIQKALTQMNLQLANVISDISGLTGQAIVRAIVAGERDPRKLAEFRDPRIQASEEEIAKSLEGNWRPELLFVLQQELEMYDTYQRRIAECDLQLQKHLASFANNVPPRPPEVEPDGKKRKRAKPAKNAPRFDLSCELQRITGVDLTRIDGIDVMIAQTLLSEVGVDMSRWKTEAHFASWLGLCPDNRVSGDKVLRRGTRHVVNRAANALRQAANALIRSRSYLGAQYRRLRTKLGAPKAITAMAHRLARLVYRMLKYGQRYVDKGTEYYEQRYRNQQIQLLRKNATKLGFQITEAQA

SEQ ID NO: 363326 - protein, 332 aa, unidentified
MMAQSEVVVVGIDVAKDKVDACIRSLSQRQTFSSTAEGQRALIRWLRKHRVGKAAMEASGGYEQDWAKALREARIEVRIVDPKRVRSFARSAGRLAKNDPIDAEMIAWFAETFTEAPGQAYDAARERLVKIVNARQGLLDLQTSLKNSGEHSVPDVVQKMQARLLKKIAVEVVKLETAIAAQVKATPHFAELAEIIESVPGLGKITSAGLIATMPELGQVNDNIVAALLGVAPYDDDSGQRRGNRHIKGGRRRARNLFYMPCMGAATRHNPVLKAFYDRLIAKGKEPKVALTACMRKLIVILNTMIARRQKWDANRYKVSDSARLPPSACPA

SEQ ID NO: 363327 - protein, 452 aa, unidentified
MEREEKRLEHFRRLRKEIRGCQDYLVVGIDISKDVHNAVIRTVSGKMHRRLTFHNTREGFENLLLQVDAVKVQHGPTEVVFGMEPTANYHKPLGEFLINRDHQVVLVSPEAANKNRSLLDGRWNKHDGKDCANVADLICQGKFLYYEYPSAELRDLRNLLSLNRKLKKFEQGLRLRMRNHLVAQYFPEMDQYCHWGASEGLALVQWCLDPALMASLSDEELCQRLGSLGRTIAQRKRLSALKEQAASSIGCRFSGSVEFEGQNLVKLLKEVRQRMESTREQIEEVCQKFKEYSCLLSIPGFGPTLSAMVLGAIGNPWRFQNGAQVLKMVGLDLSASSSGKSQGSPVVSKKGKAEIRYALYQAAIVASTRDKHFVRYFTDQLRGREKETGIKTKKRVKLAAKMLMIAWSLMKKQERFDPGYLGAGDQMIAAASNAKMKNGGIPKVQPDAARAL

SEQ ID NO: 363328 - protein, 346 aa, unidentified
MEQSIRCGLDIAKLVFQIHGVNAKSGETVMVKKLARHEVLHFFANKPAMLIGIEACGGAHYWARELSKLGHLVKLMTPQYVAPYRRGGKNDANDAEAICEALARPNMRFVAVKSESQQAVLVMHRMRDQWVRERTSLMNQIRSYLHEFGIVINQGRAALAKVLPLAAESETLPQLFRQSIADLADRLNDLETRITALNKRITAWSKQDRMAKALLELCGVGSVTASAAVATAGDVSLFKNGRQFAAWLGLVPKQNSSGGKTQLGAITKRGDRYLRTLLVQGARTVMLAASRAQNSTQTNPIFEWIYKLQERRPNNVVAVAIAAKQARMLWAIMAKQQRQDTVGLAT

SEQ ID NO: 363329 - protein, 448 aa, unidentified
MKKTKSKLEIMNPNAAGIDVGSAIHYVCVPEGSDEQHIQKFSCFTEDLHNIAKWLKKCEVTTVAMESTGVYWIPLFQVLESYGLEVKLANARHVKNVPGRKSDVQDCQWLQQLHSYGLIEGSFRPDNQMCVLRSYVRQRKNLIENAATHINRMQKVLVQMNIHLHKVISDITGVTGMQIIKAIVEGEKNPKKLAEFRSVNMKNDKATIAKALTGDYREEHLFVLKQEYTAYTFFQEQIIECDKSIENYYKTFETKSDESKELGKEKNKSRRGRPNFTLREKLYRITGIDFTKIPGFDILTVQTIISEVGINHNKWQSEKHFTSWLGLSPANKITGEKVFGTKTRKVINRATNALRMAAYAVGNSKSALGAYCRRLKRRLGAIKAITATARKLACIFYQMLKYGQEYVEKGMSYYETRYKEKIVKNLIKKAQEFGYTLVQQEELINGVS

SEQ ID NO: 363330 - protein, 340 aa, unidentified
MPLYGGIDLHANNSVVVLLNDQDQVIYQKRLPNHLPTILEPLSLHHGEIEGLVVESTYNWYWLVDGLMEAGYRVHLANPAAIQQYSGLKYSDDHSDARWLAHLLRLAVLPEGYIYPKAERAVRDLLRKRAHLVRQHTANVLSVQNIMARHTGARFSVKRIQELTKQELQSLLTEEPQVLAVTSSLAVLDCLKHQIKTLEQTVHKRLNHTPSYEQLLTVAGIGTILAQTIALETGDIRRFPSVGNSASYCRCVDSNKISNGKRKGTGHVKNGNPYLAWAYMEAAQFALRFQPAAQRFYQRKLAQSRNNTVLARKAVAHKLSRACYYLMRELVPFEETKAFG

SEQ ID NO: 363331 - protein, 342 aa, unidentified
MDEYDGRQFVGIDLHRRRSVIVRQSESGEQLSAVRIVNDPIALGLEIERAGPNPEVVLEATYGWYWAVDTLQAVGARVHLAHPLGVKGFRYRRVKNDVRDAADLADLLRMGRLPEAWIAPPATRELRELVRYRAKIVALRSGLKAQVHAVLAKAGVLITVSDLFGVGGRQRLAKVPLGGAYASRVRSLLELIDILDGHEARFAALIADRLDADRGYQAIQQVPGIGPTLAAVFVAEIGDAGRFADPAHLCSWAGLTPRHRESDTVVHRGHIAKQGSKLVRWAAIEAVQRQQTTAKIAADKDRIEARRGKNIAKVAAARKLLTLVYYGLRDGHIRALDRASAA

SEQ ID NO: 363332 - protein, 446 aa, unidentified
MKKSSRMSVIHPHAAGVDIGAEFHVVAVPPDADAAPVRTFQRFTGDLHRMSDWLKTCHITTIAMESTGVYWLPAFEIPEAAGFNVILVNAREAKNVPGRKTDVNDAQWLQKLHSFGLLRASFRPEHDISVLRSYLRQRERLTEYRAAHIQHMQKALMQMNVQLHHAVSDITGVTGLSIVRAIVSGERDPSVLIQYRDVRCKKTPEVLQQALTGNWQPEHLFAPEQSVAFFDFYQEKIRECDDQIETSLLQLSTGTEEPEGVLPSARHRTKQPNQLSFDVRPLLWKITGADLTQIHGFGPYLALKFVAECGTDMNRWPDASHFTSWLCLSPGNKISGGKVLSPKTRRSSSRIAAALRLAATTIGRSDTALGAFYRRLSSRIGKAKAVTATARKLAILFYNALKYGQKYVDPGADYYEERYRNRVLDGLKRRAKSLGYSLQQDPELCV

SEQ ID NO: 363333 - protein, 413 aa, unidentified
MEVLYPRCAGLDVHKTTVVAGVRLVTDGEVAREVRTFGTTTASLLALAEWLAAQGCTHVAMEATGVYWRPVWHILAEGGFALVLANAAQVRNVPGRKADVGDATWLADLLAHGLVRASFVPEPATQALRALLRTRKQLMRERASHTLRLQKTLEDANIKLDGVIADLLGKSGRAMLEALVAGETDPARLAALAHPRLAATPEQLREALRGRVTRQHRFLLRLHLDQIDALDAAVARVDREVEADPDPFRAAVELLTSIPGVGALAAQVIVAEIGTDMGRFPSAGHLLSWAGLRPRNDESAGKRRSARLRKGAPWLKTTLVQCAWAASRKKASYLQAQFHRLRGRRGPKKAVCAVAASILTAAYHMLSDGTAYHDLGPDHFDRRSKEVQARRLVRRLANLGYAVELAPLAPAPA

SEQ ID NO: 363334 - protein, 344 aa, unidentified
MEPMYYIGLDVHKRKISYCVKDSSGQLHSEGSLPATRFDLDRWMKKLPQPWSAAMEATMFTGWIYDHLKPHAAALKVAHPLMLRAIAAAKKKNDRIDANKICDCLRCDFLPECYMASTAIRERRRTLRYCNLLVRQMVQMKIKISTLLMEAGVSYNKQRLHKAGYFRELLATNPHIDEGLRLLLRQCREMVVRLAKTESALIRSLRNEGLLAERVERLMSIPAIGPITALTWALEIGEVQRFSSIKKAVSYCGLCGAQQSSADHVQRTPLSKQRNKHLQTTLIEAAKMAPRNSPELAMIYDKEKQKGNANRATLAVARKLVAYLMAVDRGQRNFQVVEKNCIAA

SEQ ID NO: 363335 - protein, 338 aa, unidentified
MTIVLGLDQHRAQITAEWLDTETGEISCRRIAPADRAGVRRFASRFRGRELEVALEATTGWRFVVEELHAIGARVHLAEPAETAARRGSKKRAKSDRADARHLRELLMVGRLPESWIPPQHLLELRARVRLRHTLVDQRREWQQRMQAVLYHHGVPPRRWLMTSESRAWLARLGLPPAAREQITVALSMIDAHDAQLAPLDQELREYAKRQPGCRALMSHYGIGPLTAITILAELGDTRRFSSSREAVRYAGLDITVHQSDARRAPGRLSRQGPSALRWALFEAAQCARRSRSPDHDYYLETAARLGGNRACLAVARKLLKRSYHTLRDLGEEALQPA

SEQ ID NO: 363336 - protein, 431 aa, unidentified
MSCTDLGHPVPTATRSEDNILFAALELSRKSWLIATSSPGEERISKRVVTAGDGPGLLALLGKLRETAERRLGGAVRVVVIQEAGLDGFWLHRLLVDNGIESHVVDPASIAVDRRKRRRKTDAIDAEGLLRALMAWTRGERRVCSMVRPPSPEDEDRRRLCREREALVTERIRHTNRIKGLLAGQGILDFDPLRPKHRARLDELKTGDGRPLPPCLLAEIRRQLGRLDAVVRDLATVEAERNGLVGLRAMDRPAQSPEEGAEPGGVAEAVTAPVAHGTDPAVAPEEVAPSAASVTAPAEPAALLMKLKGIGPEFAAVLWREALFRSFGNRRQIAAYAGLAPVPWQSGGIDRDQGIAKAGNPRLRKTMIQVAWLWIRHQPGSAISQWFVQRVGTARGRVRRIAIVAVARKLLVALWRYVAQGVVPEGAVLKA

SEQ ID NO: 363337 - protein, 318 aa, unidentified
MSVTEKVHVGIDVCKARLDVALLPRGEALSLTNDEEGIEALTEKLVEASATLVVLEATGGYERPLVAALAASQIAVAVLNPRQARDFAKATGRLAKTDKIYALVLARFAEAIRPTPKAPPEAEALEFQAILARRRQIIGMMVAEKNRLGASTSKKVRSRLEAHIRWLEKELARIDRDLEEVINQSPTFKENEALLRSVPGVGPVLSRTLLAELPELGSLSPRELSALVGVAPLNRDSGIFRGRRSVWGGRAKVREALYMGALIASRHNPHIKTFYERLVASGKPKKVALVACMRKLLTILNAVMRDRTPWRSPHALNS

SEQ ID NO: 363338 - protein, 386 aa, unidentified
MIYIGIDVHKKKCVACLKNEKGRVITELEFENKTSGFSKLLEKVEGKEAKAVMESTGNLWIRLYTALETAGVEVMLSNPSKTRVIAESKMQTDKVSARTLAELLRTGFIAACYVPPAEVRALRHLIRYRTKLVRDLTRIKNRIHSILDKYELPTCECTDQFGKGGLQWLRMILPLLDVEDQFIMGSELDRIVYHQSRIEDVSLRIAAKTVETEDSLKADGTPSEPAIAEDVVTLLTLIGVDYFTAMLFLCEIGDVTRFSSASKLTSWLGLVPSVHQSGNTCYHGKITKKGSRLVRWALIQSAQVAVQKDPHWREKFNRISYRRGKQKAYVAIARELAVTMYHMLMNDEPYRYQREETTNRKLKKLNRLIKKAQTNQGEAPVQCFSS

SEQ ID NO: 363339 - protein, 317 aa, unidentified
MSSEKVFVGIDVGKYHVDIALSDESEVSRFKNDDSGIEEILRLLDARPVALVVMEASGGYERQLLASLLGAGIPAVAVNPRQVRDFAKALGMLEKTDAIDARVLSRFAQSVRPAVRPRPTQELAEVQDWLTRRRRLVEMMVAEKNRSQQARGGVLKSIRSHIDWLKKRIRDSEKELGDMLKNAPEWNAEVEVLDEVKGIGRVMALMLLGAVPELGSLNRKQIAKLVGVAPLCRDSGTLRGQRTCWGGRADVRACLYMAALAATQFNATIKAFYRRLLAAGKPKKVALVACMRKLLTILNARIRDYRAALPVSRTALS

SEQ ID NO: 363340 - protein, 444 aa, unidentified
MKNNLSFINSNAAGIDIGSYSHFVAVPEGRDEEKVKEFKSFTSDLKKLVKWLKKCNIDTVAMESTGIYWIPLYELLEKNGFEVFLVNARHIKNVPGRKTDVLDCQWIQKLHSYGLLQAAFRPNEEIAKLRSYIRQRSVLIDYSSSHIQHMQKALSQMNIQLHNVINDLTGSTGLAIIRDIVAGQKDPVKLSKHRDPRCKNSKEIIYKSLEGNYEEEHVFALKQALELYDIYKEKIEDCNNQIEKLIKSMEGYMSKELISKELLQKGKNVYPFDARQELIRITGVDITKIPGINSQTALLIISEIGIDMSKWKNAKQFVSWLGLCPGNKISGGKRISGKTKPSANKAAAALRLSAYTLHKNSSFLGAFLRRMKTRLGSPKAITATAHKLAVILYTMLKEKKPYEEMGAEYYEKKYQERVVKNLKKQAAKFGFKIVKNEESCKNIT

SEQ ID NO: 363341 - protein, 466 aa, unidentified
MKPFYLGIDVSKGYADFIIINSKKQSVVQGFQLDDTFDGHRSLYNTLGRFLAEHSGSTLFAGMESTGGYENNWYNSLIEFQGSLKIQTARLNPFGVSHNSKADLKKNTTDKISAQNIAEYLVAHSEKVVYQNQDRLAGLRKQWGFIRMLTKQSTQFLNQLNGLIYSANPELLSYCQNGMPGWVLKLLIKYPSAANLKNAHAETVAKIPYVSHQKAQQLIANAKRSVASTKDITTEQLIVATVQQILHLKKIIADQTNRMLCECSIPEIELLKTFTGISDLSAVGLIIEIQTIKRFTGVKKLASFFGVHPVYKISGDGVGGIKMSKQGRKAPRQILYMIALSAIQHNPLIREIYEKHRKEGKHNMAVIGICMHKILRILYGMLKNNKPFNPTIDIANRLRSVRLKKDTPADNKNRRFQKYDQKAPVSRRQKKKRLEREMSQSVCDTHSGITAPVPLANIITNILPQL

SEQ ID NO: 363342 - protein, 328 aa, unidentified
MKVMYERVAGIDVHKDMIKVAVRSPGDKPWTRKTEILTFRTFYGVLRAMARELRRRGVTHVVMEASGVYTEPVYYALCEEDFTEVAVVNPAHAKALKGHKTDARDCARLAELSGCGLLQGSYIPAAGLKEMRDLSRYRMKTVQARTPEIQRLAKALESAGIKLGSVASEITGKGPVAMIEALISGERRGAVMADLARGRARTAGKLADLSMALEGRFTDHHALMRRLHLDRITAPDAAVADLEARIAATAADWQREIGLLKTIPGSGDVVAWAWIAEIGPAPHQWFASHRKLASWVSLAPGSNVSAGKRKHARTGDAGCGVPKLDQST

SEQ ID NO: 363343 - protein, 421 aa, unidentified
MRGVRSIKVKAVKKDTLMVTVDVGMASNMGYCTTADGRDIKPFKFGNTREGLDKLWSIVVVNKKRFRCNEVIVGYESTGPYAEPFVHYLRDKPVTIVQVNPMHTKRVKEINNNSPLKTDEKDPRVIADIVRLGHALSVVVPEGDAAYLRRLNNVRERHIRERTALLNQLQQLVFIIFPEFKLVIKDIKVKTARRILRNYTTPDKIGDLDKDKLGEEMRKQSRGKFGIQHADLLIRLARETIGVKEGVAGVAMDIHHILMQLEVADGFVAEIESEMKITLTRIPYSARILSMKGLGTVTVAGLMGEVGDFTKFRTQSEIMKLAGLDLYEISSGKRKGQRRISKRGRSLLRKILYYAAISTIRKNGIMCSYYIRLIGRGMKRTSALVVIAKKLLRIIHAIVRDDRDYIRDYGSPKRMVIQKAA

SEQ ID NO: 363344 - protein, 342 aa, unidentified
MEKVSIIGLDLAKRSFQAHGALADGGVGFRKKLSREKVLAFFTEQPRCVVAMEACGSAHHWGRAIGDLGHEARLIPPAYVKPFVKRQKNDATDAEAIAEAASRPTMRFVAVKSEEQQARAMLFRTRDLLVRQRTQLINALRGHLSEHGVVAAQGPANVKVLEEAVEDKTTSLPLLVVELARVLLDQIEGLSKTIAKLEKVTAHEATCAETARRLQTMPGVGPITALAIETFAPPMDVFKRGRDFAAWLGLVPRQQSTGGKQVLGRISKMGQRDIRRLLIIGAMTVVRAALRKGAPEGSWLQRMLARKPTMLVAIALANKMARSVWAMLAKGEDFRVPAVAAI

SEQ ID NO: 363345 - protein, 344 aa, unidentified
MDHFAGLDVSVKETSICIVDDTGRIVREVKVASEPEALLPVLTNPAYRFKRIGLEAGPLSQWLFSALAEAGLPVVCVETRHMRAVLKAQINKTDRNDARGMAQMMRVGLYRPVHVKTLRSQKLRMLLTHRKLLQSKAIAIDNDLRGTLRNFGLKVGIAGKVKFEARIKELVENLPDLAALVEPMLIVRRVLREQIGILHRRLLAIVRDDEVCRRLMTVPGVGPVVALTYRATVDVPARFKNSKAVGAVFGLTPSKYQSGEINRSGAISHCGDEMMRVMLYEAAQVMLTRTNKWSWLKAWAMKIARHRGMKKAIVALARRLAVIMHRIWVDGTEFRWTREEAAAA

SEQ ID NO: 363346 - protein, 353 aa, unidentified
MLPLIFVGIDVASDKHDCCILGSDGAVLREFQFSNDRNGFERFLSAVTGCCAKRDLADAKVGLESTGHYSINLTNYLLAKRLSVKIFNPLQVNLLRKAQSLRKTKTDKSDARFLATLLFSDDSKPYSQPLYHISELKALTRNRYRLVQMRSKLKVSISRLVTVLFPELPDAVYSINQKSSYALLLEFPTARSISVAHITRLTNLLSANSHGRYKRDKALEIRELASRSIGLDSRATGFELRQAIRLVQGVQEEIDALDDEIGKMMREIDSPVLSIPGVGYVLGAILLAEIGDIENFDNPAKLLKFAGLEPSVYESGKYKASDTPMVKRGSKYLRWALLQSARLVACRDKTFAA

SEQ ID NO: 363347 - protein, 346 aa, unidentified
MQLTTVSVDLAKTVFQLHAIDQQGKTALRKRLKREQVVPFFANLEPCLVGMEACGGAHYWARKLQALGHTVKLMAPQFVKPYVKSNKNDVADAEAICEAVTRPNMRFVPIKTVEQQAILAVHCARQGFVKARTAQANSIRGLLGEFGVVLPQGIRHIVERLPDILEDHENALPGSLRRQLMQRLMEHFKELDRQVVELEREIQQWHRSNEGSCRLAEIPGVGPLTATALVASVGDAKNFSNGRQMAAWLGLVPRQHSSGGKPTLLGISKRGDGYLRTLLIHGARSMVRVVESKTDPSADWLKGLLARRHTNVAVVAQANKTARIAWALLAHGTKFRPDYTPDVTVA

SEQ ID NO: 363348 - protein, 416 aa, unidentified
MNAVGIDVSSRKSTVAVLRPLGEVVCLPFDVTHDIVGLASLAEKLKTIDGETRVVMEHTGRYYEAVAKALHEAGFFVCAVNPLLIKEYGANSLRRVKTDKADAIKIARYALDNWADLRDFTPMDAIRYDLKTLNRQFQLASKQRTASANNLIALLEQSFPGIRKCFDSPVRSDGTQKWVDFAHSFWHVDCVRKQPFAAFCERYRKWCKRHAYLFKLSNAEEVYALAKRAVVLTPKSKVVKVLVQEAANQLSSISRSVEVYRAEMDRLAAMLPEYPVVMAMYGVGKSYGPQLMAEIGDVRRFERKQALVAFAGIDPMPNQSGDKNVRSNKSSKRGSPYLRKTLFNVIRTYLQCAPQDEPVFQFLNRKRAEGKPFYVYMLAAANKFLRRYYAKLRDYFASLDTLQPVAPIPTILKATL

SEQ ID NO: 363349 - protein, 363 aa, unidentified
MLYLAIDQHRKQLTVNLRDDSGEILVRRQVSTRWDRVREFFAWLQKESEGQGGFVTIVEICGFNQWLLEMLDEYGCRETVLIQPTERSRQKTDHRDANELGELLWVNRHRLLGGQKPQGIRRILPPTSEDAENRQVTELRRRLGAQQTKTVNKIRHILRKHNLEQECPTKGIDTKASKKWLAEMALPTIDRLEMDQLLDQWRLWEAQLEEVRVTIEARQKEHVTAGLVATMPGAGAYTSLALASRIGPIDRFPTPGSLANYWGLTPGCRNSGETDRMGSITKRGSAMARFLLGQMVLHALRKDVYMKNWYKKIKKRRGSKVARVAVMRRLTTILWHMLKHNQPYVCGGPPEVKRVQSLYQQSP

SEQ ID NO: 363350 - protein, 449 aa, unidentified
MALHEEGSCAVAIGIDAAVVANHHIVVRRPQAGHAGEVVDDFTAPPTLAGLDALAKRVSKWPGAVAVAEPTSMTWLPLAVTLGNAGVELALVGNRHSARLRAALAGKNKSDPIDARVLSHAGEFFELGPARIPDAAELALRRAIQRRGKALVEANRALRRVISLARWAFPDVWNACAGSRPTALGVLTRWPRVDLLARARTSSILEVVAQHTRGVSDVERRARAIRDAAGRWTTFWDGHLDVEALGWEVAELVADLAAGEARVERATVQARRYWHQIHGDDPLLLSVPGMGPLTAPTVRAFLGDGGQFESAKQAQAYVGLNPSNWSSGQTASPSRGITKEGPSVLRLAFYQAANVARTRDPQLAEFYKRLMTERGHCHTKANCAVARKLVARTWSTLTTGALYEMRDVDGAPVTRAEGTRLAATYAVDNTVRRRSRAQSAATHRGRLTR

SEQ ID NO: 363351 - protein, 340 aa, unidentified
MNTSTKFFIGIDVSKPHFDVSLMAVINHEKQAIETAHFDNTHAGMKALDKWLKKNKVSFDVNTLLVIENTGIYHRLLWSFCSNKNLPIHIGNAAHIKWSFGIARGKNDIIDSMRLCQYAFKESDTLKSTPALNPILMQLKDLMTARTKLVSQINSIKTYIKELKSVNDKAIQKLLEQAHRKAIEGIEQSIKDIEVQIKKIITENPTLKTNYDLVITVPGIGHLTAVYLICCTNNFAGKISGKQLACYAGVVPFEHTSGISIKGRNRVHPMANKDLKKMLHMCALSAIQYCQEFKTYYNRKKQEGKHSMSVLNAIRNKIALRVVAVVNNQKPYVNNIKIAA

SEQ ID NO: 363352 - protein, 348 aa, unidentified
MHMLADTVELVIGVDTHKDTHTAAVVAAATGALVEQVTVPATPAGYQQLRRLADRQDGRRVWAIEGTGGYGAGLTRFLQANAEQVVELDRPKRAARRHGAKSDPLDATRAAREALGRDQLAQPRAAGHRAALSVRLAARRSAVQAATDAQRQLHALVVAAPDPLRERLRSLTTARLVATCGRLRQQAAWDAETAATAASLRALARRIQLLNAEIVEHTRAISALVRTWRPELLTRCGVGPIVAAIVLCAWSHPGRCPSDAAFAMLGGAAPIPASSGQTVRVRLNRSGDRQLNQALHLVVLTRLRYDPATRAYAQRRRAQGKTNREIRRCLVRYVARQLYRLLEANPGL

SEQ ID NO: 363353 - protein, 386 aa, unidentified
MTQHSHIAASHQLDYERTLILAVEVSGRSWVVAAQVPGLRQKGVKQQLAPRADALMAAVEGYKRRAAAAGMVVERVIVAYESGGSGFWLARWLQQRGVEVYVMQPSSVPVDRRMRRAKSDRIDADMLLRTLLAWLRGEPRVCSMVPVPDEATEDARRPIREREELIRARVALVNRIEAVLTVLGAGEYNPLRRDCRERLGQLRTALNQPLPPHARAQIERLLDRLDLIRQQVADLEAQRDRAVEGETVGQAERMIQHLARVRGIGVQTATVLVHEAFVRRFRNARALGSYAGLTGTPYGSGGTHREQGISKDGNRRLRATLVELAWMWLRYQPGCALSRWFHDRLGGSRGRLRKVMIVALARKLLIALWRYLQDGAVPQGMELKPA

SEQ ID NO: 363354 - protein, 353 aa, unidentified
MAKRSRVEAGMTVGLDLGDKFSHFCVLDASGETLEEGRVATTRKGLLQRFGNLPSSRVALEVGTHSPWIERLLTGIGHEVLVANARKLRLIYHNESKSDRLDAENLARLARVDPKLLHPIRHRDGESQEAMAVLRSRQVLVEARAKLVNHVRGAVKSFGSRIKSCSTASFHRQAADQIPEGLRPALPAVLEVIADLTRKIRRYDQQIERLAEQRYPQTSLLREVPGVGPLTALWFVLTIGDPHRFSRSRRVGAYLGLRPRRGQSGDDDPELQITKTGDPELRRLLVTSAHYILGPFGPDTDLRRWGLALAARGRKSAKKRAVVAVARKLSVLLHALWLNAEEYEPLRNSEAAA

SEQ ID NO: 363355 - protein, 338 aa, unidentified
MKVHVLGIDLAKNVFQLHGVDRKRRPVLVRRVRREQLLKVIGELEPCVIGIEASTGAFYWQRQFEKLGHSVKIMAPQYVKPFVRRQKNDSNDAEAICTAVQQPNMRFVPKKTLEQQDIQALHRARQRLVNHRTALISQMRGLLLDRGIAIAVAATRARRLIPKILAAANDELTEMMRQTIASLYAFMLQIDERIKTFDRKIEAIFKASPVCQRIAKIRGIGPKTSTAMIAAIGNGSDFKNGRHLAAWLGLVPRQHSSGERHLMMGISKRGNQHLRTLLIHGARAVVRTAVRKTDARSMWVNELRERRGYNRATVAVANKNARVIWAVLISGEAYRAAA

SEQ ID NO: 363356 - protein, 340 aa, unidentified
MDHFAGLDVSVKETSVCIVDDAGKIVREVKVASEPEALLEVLRNPAWHFKRIGLEAGPLSQWLYSALAEAGLPVICVETRHMRAVLKAQINKTDRNDARGIAQMMRVGLYRPVHVKTLRSQKLRTHRKLLQSKAIALENDLRSTLRNFGLKVGMVGTVKFDARIKELVENLPDLATLVEPLLIVRRVLHEQLGILHRRLLDIVRNDDVCRRLMTVPGVGPVVALTYRATVDVPARFKNSKAVGASFGLTPSRHQSGESDRPGSISKCGDEMMRVMLYEAAQVMLTRTNKWSWLKAWAMKIARHRGMKKAIVALARRLAVIMHRIWVDRTEFRWTQDVATA

SEQ ID NO: 363357 - protein, 482 aa, unidentified
MKKRNIFQNRSQQLLRLFEKAGNRLKMMCVPIDYAKKDHMVMFCNGYGDILRKPFSVKNTLEGVKYLIDQVMRSCRQRHIKKEYVFFGGEDVNSYAENFANALRTKGFLVANVNAHDAKKQRETLQASTDRIDLMGIATMLLNLRAKCSLAQDGIYRNLRTLVRHRKKLVVMKTEVKNRVHTLVDRLFPGFLNEKNTGINPFSKSSLALMENRFSAQQIRRRQQCTLIKILKRYATPDAQSVAAKLQSYAAQVITTPDEYAATLQLSLQHHIGHYRCLQENIDQLLSEIALLLAQTQAAFLTSIKGVGIVLAAGVSSEIGNPFEQKPLNNLTSYSGIIPRVKQSGGIEGHTHTGRVSKRSNHLLKDYVVQSAFQMGLRGPEPLLQDYKRREAAGQHADFGIGRRFLRMAMCLMRSSQVYLPPKLRSPKTQMHKRAGYYLTMWPLLRDKWKKAHAHKMAFAKDQPLGQWRQMVQELYDIKLKL

SEQ ID NO: 363358 - protein, 351 aa, unidentified
MKIVGAFDVHRRQITFKTLEPASGECSRGRISPAAREPLRQWFEQFAGLDGEFVLEGTTGWRFVVEEIERAGHVALLADPAETAARRGRKRRAKTDDADCDLQLRLLLAGELPEAWIPPAAILELRTRVRLRKTLIDQRTAWLQRLQAQLFHQGVPPGLKPRTAAGRDALARVELSPAGREAVELYLRMLDQLDRELVPIDRALRAFARRQPGCRALTARLYGVGAVTATAILAELGDARRFRSSDDAVRHCGLDVTVWQSDRKRAAGHLSHQGPSVLRWALFEAAQCAARRSSPDHAYYLEVTKRIDHNRACLSVARKLCRRAHHLLRELGDDALAPTDLTQAKLVDAAA

SEQ ID NO: 363359 - protein, 445 aa, unidentified
MHYKRLLTLIDGVSSYLSVGLDVGADFTWMSIALPNGSFVGKPFKIIHSDSRSRDLAVTKIKEAQEMYSLKSRCFLESTGIYHIPLLCFLRDKGFDCSVINPIITKNSTNINIRKLHNDKFDSKKAALVGLNVSLKTSILPDDSVVDLRNLVRDYYYFKDLQSAVALKLTAELKVSFPAYAKVFSKVTTQSSLKLLSSYPLPEDMLAASKDDIVYIIRSTARFGETYALRKYDAIIAAAQDAAVFGRALPSNAVRIRLYINSYQEYQKHLNTLLKALHETVDKLRDTLIYNQICLLQSLRGIGFLSAVVLIAEMGDFSFFSSPKKLYAYFGLDPAVKQSGKLNGDKVHMSKRGSSLARRVLHMVALNNVKVDKGSGTPVNPVVYDYYTRKCSGKKKPVAMGAVMHKICNIIFAMLRDNKPFEVITPEEHCRRFAAEHPDKIRKAA

SEQ ID NO: 363360 - protein, 349 aa, unidentified
MKKIIIGIDISKEKIDASAIDVRNSHLGVLKLDYQAFENRPMGFRRMLVWARHLIKGIVLEEVMFCCETTGGYDRSLCDYLFAKGLDIWRESSLQIKKSCGLRKGKDDRTDSLIIAEYAMRHMDKAVYYVSPSETVRELKALLLYRRKLEQEKTSKKVRVAELKATAAKSKSISFILRDAQKSIRILEKSIRDCEKQILALYDGDEDLKKSYDHLTSIRGIGIVNASAMIAYTNNFKNITTSRKLSSYYGIAPFREQSGTSVNKKAMVKCYSNSMLRAYLTQAAENTIREHGIYHNYYRRLSERGKCHGVALNNVKNKLLHLSVSLIANDMDYEENHEALRTLRKSQST

SEQ ID NO: 363361 - protein, 430 aa, unidentified
MYNKNYISVGIDVGSAFSFMTIVAPDGSVIQKPFKITHNKPDSLEKAVSAIKKAEELHSLESRTFLESTGIYHFPLFCYLVDCGFNVSIINPIITHSANNTSIRKVKNDKVDSIGIAKLGLSGDIPVSQFPAKLVLEIRSLTRKYYDLTDERSAHINKLKGDLHTVFPQYLDIFCDVTGKTSTMILRQYGTPDKILRGHKKTMIEKISKASRKGLSKAAERYEKLCAAATAAKTFGCQIDSIYFNISLTLDLIEKLDSALDSILQRIHQLVTFNKSEKFIQQIKWLDTIKGVGFLTAVTIMCEIGDFSAFRNPKQLFAYFGLDPEVNQSGKFVGTEMHMTKRGSRIARRAVFAVALASIRTKRNGEGINPYLREYYEKKSGQKPKMVALGAVMHKVCNIIFAVLRDEKEFELRSPEEHCRQYQRPALQAA

SEQ ID NO: 363362 - protein, 371 aa, unidentified
MAESSKMLFVGLDVHKDTIAVAYAPAESGTAPVPFGTIGTRQCDIDALIRKLQSKSAQLVFVYEAGPCGYWLYRYLTKKELACFVVAPSLIPRKPGDRVKTDKRDALTLARLARSGDLTPVYVPAVPDEAIRDLARAREDALHDLNAARFRLKALLLRNDIRYTGRANWSAEHLRWLARLVFATPAQQIVFQEYVRTVTERTELLQRLEAELLEQAKPWRLAPVVGALQALRGVQFTVAITAIAELGDLTRFDTPRQLMSYLGLTPSEYSSGERRRLAGITKAGNGHARRVLIEAAKAYRHRAKVSEAIQARQQDLPAAIRDIAWRAQVRLCGRYRRLLARGKHPNTVAAAIARELAAFMWAIAKAQPLPA

SEQ ID NO: 363363 - protein, 343 aa, unidentified
MQDVTLIGIDTAKNIFHLHAVNKHGKEIYQRKLTRCKLLDFLAQQPICTIAIESCSGSYYWARSFKKLGHSVKIISARHVNKFANSRNKNDFNDAKAIVKAASDPDINEVAHKSISQQEIQVIHVMRDGLIRSRTAAINRLRALLAEFGIVLPQGREKLMSQLPSVLEQENNELTQMLRQIINDQYEAIKKMNEEIKKYDQRIKNCVNRCENSKRLQNIPSVGPIISTALSYMIADPKIYKNGRQCAASLGLTPKEHSSGGKQRLGRISCEGNNYLRKILVQGAQAVLRRSKIFTTEPLLKWAYHLKTRRGNNIAAIALANKVVRIAWALLVNQANYAYKRSI

SEQ ID NO: 363364 - protein, 425 aa, unidentified
MSEKIVVGIDVSKAFSDICILSPNNDIIKRLKISNDINGMKSLIYVLEKVEDEYEDRAVIIMEATAHYHQILANFFRKHNYEVIVINPIQSGALKNINIRKIKSDKTDAYNIALLYRIKNYNETITHSDTVNSIKKLCRQHKELTDEIVEHINRLIAFLDISFPDFKKVFTDLQGKTPLSLLEKYPTIQEVLSPENKQDIIQLIKENSHKSNSYAEAKYEKLVKAAEKSIEVCIVSLSSAVLIQTTVRVIFSLQEALKAIDDEIKRLSLLDEKFHKEIVLLQSIPGVGEYTACVVLSELGDISNFSKPKELVAFFGLDPGVSQSGTYNRKNNKISKRGSPHVRSILHMLAKSNVYPNRNREYLNPVMRAYFEKKIAEKPYKVVMCAIMRKMVQIIFAVLRNQKSFELRTPEEHQKLIREKSKLVA

SEQ ID NO: 363365 - protein, 447 aa, unidentified
MAQRNRVFAKSGLTLTHPNAAGIDIGSASHFCAVPPDRDDEPVREFKSFTADLERLADWLDACGVDTVAMESTGVYWIPLFELLERRGFTVLLVNARHVKNVSGRKSDVLDCQWLQQLMSFGLLSGAFRPADEVCVLRALTRQRAMILRSQARFVQHMQKALTQMNIQLANVISDVVGETGQKILRAINAGERDGLKLAQLKNSRIHASADEIAASLQGNWRAEHLFALKQALDAFDFCVTQLGQCDAEIDAQLQRLHAHDGDPAKGKKRGRARNAPKFDLRRQLFQMCGVDLTRIDGIDVTTALVVVSETGTDMSRFPSDKHFASWLGLCPGTKITGGKVMSGKTKRCANRAAQALRLAAAALRSSQSALGAYYRRLCARMDKGKAVTAAAHKLARLIYAMLSKGEEYTDAGQDYFEERYRERVLRNLTERAKKLGMQIIPAAQPA

SEQ ID NO: 363366 - protein, 362 aa, unidentified
MFRPHTLYIRIRIVRKVSEPAFAMKDQDVTDVIRRKQQTAMRYIGIDVSKATFVVAYSSDKGGEIRTFNNTTTGIKQFIGALPKDGSIHCVMEATGNYSALLLYMLNVAGITVSMENPLKVKNFAKAMLSTIKTDKSDARLITLYGEKMNPRPFKVQGEAILRLRQKRTVIRQLTKQITAMSNLRGSLACLPVPDKGATHTVDETIKFLEKKRDRLQSELTDLVEVEFSRQLALLTTIKGIGITLATALIITTGGFTYFQNAKQVSRYLGICPTYEQSGTSVNIRGHINRNGDVYTRGLLYVAAWTASRFNTKCGETYTRLRQNGKPGKLAMIAVANKLVRQAFAVVTHDKEYVDGFVSNRP

SEQ ID NO: 363367 - protein, 398 aa, unidentified
MRIIGLDVHRTFAEVVLLEGGKSRSAGRVSLTAGGVAAFAQTVTPTDHVVLEATCNTHALVRALRPHVKRVAIANPLRTRLIAEAKIKTDKVDATALVQLYAAGFLPEVWMPDAQTEQLRRQVARRASIVQHRTRLKNRIHAILHRNLLPRCPMSDLFGLGGREWLAAQVMPADERDTVDSLARSLDQAAEELATLDHALAQTALAHEAALRLFTVPGVDATVALSLVAAVGDITRFRSPQKLVSYLGLNPRVRQSGLHPAYHGSISKHGRAQARGMLVEAAWVAAKSPGPLRAFFLRIRARRGEQIAAVATARKLAVLTWHLLTKAEDYTWARPALLEKKRRSLELRAGLPARHGQRGRAHAYNLKEVRQRDRAIGEQAERAYQQLVAHWQPRRRRK

SEQ ID NO: 363368 - protein, 450 aa, unidentified
MPRKRNRASQLPVIEPNAAGIDVGATQVFVAVPADRDPESIRSFETFTIDLERLADWLQQCRIQTVAMESTGVYWIPLFQILEKRNIAVCLVNARHIKNVPGRKTDVEDCQWIQHLHSVGLLRGSFRPDDEICALRSLWRHRENLIQLATVHLQHMQKALDQMNLQIHHVISDLVGTTGLAIVDAILAGERNPHELAKLRDWRVKASEDTIAKSLVGDYREEHLYVLRQSLECYRTYQKMIHELDVKVKHRMGRLPPRVDPTLKPLAKERNPRKTPRRTEPLDLRLELYRAFGVDLTQIPGINALTAQALLTEVGTTFARFPTAAAFCSWLRLCPEPKVSGGQVLSSKTRPTKNRAALALRLAAQALHKSQTFLGDYFRRMKARLGPPKAITAVAHKLARIVYHMITRQQEYDTTIFQEQERRVQDRKHNRLSAQARELGFQLVPVEVVP

SEQ ID NO: 363369 - protein, 318 aa, unidentified
MLNESFVGIDVSKDWLDVGWEPAERSERLAHDEVAIVGLCERLVQERPCLIVLEATGGLETHLASALGAAGLSVAVVNPRQVRDYARACGRLAKTDRIDALVLAAFARAIRPQVRAPKDDETLELGALLARRRQLIDMRVQEKLRLERASPVQRDSIKEHIAWLTERIARLDTDLTHRLHTSTLWRDKEDLLKAIPGVGTITRVTLIALLPELGKLNRREIAALVGVAPFNRDSGQHRGERVIWGGRAQVRRVLYMASVSAIRSNPVIRAFYERLRAQGKPGKVALVACMRKLLTIMNAMLKHNTPWNPSALDLEHSC

SEQ ID NO: 363370 - protein, 304 aa, unidentified
MNGIGIDVSKRRLDIGTTDGQTLQVCNNRSGFSELDVWLKKRPVSQIVLEATGGYEQTVLDFLHKAGHPVIRANALRARRLAQGLGKVAKTDRLDALVLAQMAALVELPSYQPLEPWQRKLREFVRARRQTMQALTVARQQQEMVTDRELRRQMQGNIIRLQTLVERLGKQISEQVAQQPQLAVLKSMKGVGPALQAVLASYLPELGQISGKAIASLVGVAPISHDSGAMRGRRSIHGGRAEIRQVLYMAAMSAMRHEPRLRDFYRSLRARGKEGKVAIVAVMRKMLVILNARVRDAQGGSIPA

SEQ ID NO: 363371 - protein, 346 aa, unidentified
MEQYVGLDVSLKMTAICIVDRTGKIEREGMVASDPAAIAAFVRLHAPHVARVGLETGATSTWLWTELNKMELPVICIDARHAKAALKMQINKSDRNDAVGIARIMQCGWYKEVRVKGLDSHAIKAVLVSRALLVKIKRDLENQIRGLLKNLGLVIGRAKMNMFVVRAAELIEDRPELAAAVEPLLKAREAVEKQIADLDRKVMLLARNDVQVRRFMTAPGIGAITALCYLATIDDPTRFKRSRSVGAYVGLTSRRYASGEVDWTGRISKCGDPMLRSYLYEAAGVLLTRVAKWSVLKAWGMRVAKRSGLRKAKVAVARKLAVILHRMWIDGTEFKWSSKEVATQPA

SEQ ID NO: 363372 - protein, 324 aa, unidentified
MNKYNEIFGVDISKDVFDVYGSKSGHNQFKNAASGFMFFLKNLPKKSLVVMEATGYYHYSLAQFLFKQGVLVSVVNPLSVKRFIQMKLAKVKTDKSDAKAICEYGQINQVPLYSALSDVQSECLQLFRLLDSYLKKRTMTKNKLHGEDVLGIPSKHVYRSLKRNRKHLDTEIASIETKLLSLVKQDQQAQLTLLKSIPGLGVKTALFLIVITDGFTKFETAAQLCSYVGITPTIRQSGSSVRGRSSISKVGNKKLRNLLFLCSFSACKHNKSCREIYERIVNKGKSKKLALIAVSNKLLKQAFAIAKSGNPYDETFVSVLMANC

SEQ ID NO: 363373 - protein, 502 aa, unidentified
MNNSAAGENIAGGRPASARSRSLEGNRKTVNCRLPGEPEALAATSNRTTPLEGCNISSVDSRAKGRKKQKTKRAAMNSPEQGPGSWLEKRGFGGLDWASQKHSVVVVDPRGKVIEDFEIEHSALGWKKFREIMQPYGAIPFAIETSQGAAVEQLLEAGMEVYPLNPKSAQSYRERKAPSGVKNDRLDAWSFADACRIDGHGWKALRPEDALVKELRLLCRDEVVLIEQRTSFINQLRHALAEYYPTALEAFKDWNSVGAWMFVQRFPTPQLLKQAGKRQWEKFLHSRHLWRTESGPHRMELFAHATELSGSVAMANAKSNLALSLVSMLFALEKQLGIYRQRIEELFQRHPDHDLFGSLPGAGPKIAPRLLSEIGDDRDRFGEEPQALQCLAGTAPVTRQTGKPRCKPPRWPVHQRWACDKHLRHAMHLFAEQTLTRCFWAEIYYRHHRQKGRSHADSLRRLAQRWLKIIFRMWMDRKPYDAMLHNQNQLKHGSWVLQINPT

SEQ ID NO: 363374 - protein, 337 aa, unidentified
MANKQRIVVGIDVSMDKLSYSIYDGKLHTTNEIPYTKESINRHLVRKFKDVDNLLFVMEATGIYHTKLVAQLKEFKVAVVNPLVIKHYSKLKLGRTKSDLFDARVIAEYGYKEDTTLYTPPSKEIVELRLLLKAVEDLLKQRGEIASQIHSLKRRADTLSYIIDSYIRHKEFITKEIDELKAKIESILVESFSNSYKLLKSIGGIAMMGAATIIATFDSFKSFGSAKEAASFVGIAPTVYESGVSVRRKGSISKRGSSLARGQLFMNSLSAIRVNSRLKEYYNSLLARGKSKKASLIAVAHKIVRVAFALLKHNRAFTLDYTPQKPVVVTLNNKESA

SEQ ID NO: 363375 - protein, 325 aa, unidentified
MDIVGIDISKAKFDAALLVGERVRHGAFSNTEAGFEQFLAWLARHRPDPAAPMHACMEATGNWGLDLAAFLHGRGVRVSVVNPARVRAYGASELARNKTDRLDAALIARFCRAHVPSAWTPPAAGLRELRELVRRCDALKAARVQEMNRRAAGFASPAVAASIKAHIDWLDEQIEAVMGEVRRLIASDPALSKNLALVRSITGIGEVSAVVLLAELPNIADFSPKALAAFAGLSPSEHSSGSSVRRPGKISRVGSRRLRGLLYMCALSAKRANKALADFVQRMADAGKPPKVILVAVARKLLVYAHAVVRTQKPFQPLPDAPSSI

SEQ ID NO: 363376 - protein, 348 aa, unidentified
MAMLADSVDLVIGVDTHKATHTAALVGPTGVVLDTLTCPTDRSGLDRLLRFGRRHPIDRRLWVLEGTGCYGAGLTAFLMAAGETVAEIDRPRRPVRRHGAKSDPLDAVRAAREALGRDHLGMPRRRGEREALRVLLVTREAVAGERRRALNQLHALIVSAPDELRAGLRSVHGAGLVRRCAALREIAGRTAEAAATVRVIRLTARRIGQATVVASDLAAEIGTLVRSMAPELLTGPGIGPLTAGWLLVAWSHPGRVRSEAAFAMLAGVAPIPASSGQTVRHRLNRSGDRTLNRTLHTIVQSRLRFDPKTQAYAARRRVEGRTDREIARCLKRFVARSLYRALERTVEG

SEQ ID NO: 363377 - protein, 468 aa, unidentified
METAKKLWQNRKEKKEWTRRLQSEDPGLEVVHPQAAGIDVGNGAHYVAVRPDRDPQPVRRFECFTADLYRLADWLKSCGVNTVAMQSTGVYWVPLYDILEERGFEVYLANARHTKNLPGRKSDVQESQWLLKLHTYGLLNNSFHPPSSIRTLRTYWRQRAVHVEGAATCILRMQKALTQMNLQLANVISDLSGVTGQKIVRAIVAGERDAHQLAKLRDARIQASQEENAKSLEGNWRPELVFVLQQEVDLYDTYQQRIAECDQQLQKHLATFANNTNPGQPPSPKGEIKKKKKKPTQNAPTFDLSHELERISGVDLTRIDGIEVMVAQTVLSEVGLDMSRWKTEAHFSSWLGLCPDNRISGDRVLRRGTRRVINRAATALRMAATTLIRSQSYLGAQYRRLRTKLGAPKAITAMAHRLARLVYRMLKYGQQYVDKGAEHYEQRNRQQQINFLKKKAAQFGLQVIATHP

SEQ ID NO: 363378 - protein, 359 aa, unidentified
MTTTAAKAPTAAGPILAIDLGKYKCVACVYRAADAYTFGAIDTSVTEVERLIRRTRPAVVVIEACSLAGWVHDLCGRLGVRCAVANTGAEAWKYKHAKRKTDRDDALRLAQLYALGQLPEVVVPAKAVREWRALIAHRQALVTQRVAAQNRVRAILVGQGLPAPRGAKAWTAAGLAGIAQLARPLADCAPDELWRGMLDLALTAYRQAGDLVAAAEARLDQLGKASPGVRLLDTVPGLGPRTAEAVVAHLGDPKRFRSGKQVGAFGGLVPRQYQSGEDDRRGRISKRGPAVLRKLLVQCAWAMLRYNPWARAVFDRLSRGKARKKQAVVALARKVLVRCWAMLRDGVPWRPDPAPAAAA

SEQ ID NO: 363379 - protein, 418 aa, unidentified
MSEDRSHLGQDDIAVGVDLGSQGHQVVILASDGRRLTSFRVAHSQAGLAELMRRATPARWHARRSVYAFEATGHLWEAVAHVLRQHGLPYVVVNPLATFRVREARQMGRDKRDVTDAEQIAHLLRTGLITRTQLEPEAYLVLRRAWGAFLRLRRERARLKTLVSHQLYGAFPELLGVWSDVFAPGALAVLRVGLTPFEIAALPFGDFVAQVSAARRGRRVWRFKVAQVHAYAQGTVALPHGAVPMMRELRRVTARVDLLTDQMAELEAEIRALLPTLEEALHLMTMPGVGWTTVAGLIAEIGAIDKYRHGRQLVKLAGLNPSHHESGTMRGRTMLSRRGRAGLRTVVYLATLAALQHNPRLRAHYDRLRQREVRPLETMPAMVACMNKWLLYAFAVMKRRQAFQVDHVWQSHTLAAAS

SEQ ID NO: 363380 - protein, 332 aa, unidentified
MSPTKEADMELYAGIDLHSNNSVVSVLDEQDRTVYAKRLPNDLGAILAALRACAGTLRGVAVESTFNWYWLVDGLQAAGFTVHLVNTAAVRQYDGLKHGGDFSDARHLAHLLRLGILPVGYIYPREERAVRDLLRKRSQLVRQRTSQILSIENLMARNLGARVGGNEVKRWDAKCIDAMELLDEQKQALKANLVVMNCIDGEVVQLERRILAKVKLRKDFKALKTVSGIGEILALTIALETGDIGRFAGPGNFASYARMVWTAAVNPTARRRVKEMPSAATSTWRGHSSRRRTSRCATTRRSSAGTRRSAPAACPSWPSRRWRTSWRGPATT

SEQ ID NO: 363381 - protein, 316 aa, unidentified
MTEAGGFVGIDVAKAELEVVVRPSGARWTVTNNASGLAQLQERLQAAAPSLIVLEATGGYEVAVVAALATAALPVVVLNARQVRDFARATGRLAKTDAIDAGVLAHFAEVVRPPVRPLPDAMTQDLQAWLTRRRQLVDMLLAEEQRRSRAPRAIQRQIDQHVRWLRAQLGAVEKDVAQTLRESPVWREKEDLLRSVPGVGPILTTTLLGDVPELGQLNRKQIAALIGVAPLNRDSGTYRGRRAVWGGRARVRATLYMATLTAARYNPLIRAFYERLVAAGKPKKVALTACMRKLLTILNAMIARRTAWKPPAAVTA

SEQ ID NO: 363382 - protein, 352 aa, unidentified
MDRYVGLDAHPTSCTFGVMGPSGKRLKSMVVETNGAALVEAVKGIPGRVHLCLEEGSQSAWLHELLSPHVSELVVAVAPESKGAKDDLRDAWARADELRTGSIRTRVYKAPLHLAALRNAVRGYGFAVRDAVRAMNRLRSVFLSRGVVVNDGVYNPKGRARWLGKLTPPHRRLAEWLGRQLDQLVPLREQAEEWLLEEAKTHPIIRTLATAPGMGPIRTAQMVAITANPHRFRTRRQYWSYCGFAIVTRSSSDWVQGKDGRWERSQVLQTRGLTRKRHPLLKSVFKGAATTVITQLPDHPLHRDYERMLAAGIKPNLAKLTLARKIAATVLSMWKHQEVYDPQRHTRVSGKA

SEQ ID NO: 363383 - protein, 359 aa, unidentified
MLSVSIGVDLHKHQFTCYFLKENVGSYEKFSTDNAGIKQFKLFVKTIKSEGYHVKIAVESTGNTRYFKNELEKLGLRVIVVNTLRFKIVNESVNKTDKRDAKTIAEFLQKDMLPEVCLSSEKSEQLKRLLNTRKILVDSRVKLKNQLHGIFLSMGIKTRSGQLNSKKGRNNLLMEVKNETYRMIILTIIDSINSLSEQVKIIESKLEELTVNDRAIKILQSIPGTGKINSATVRAYIDDIKRFSHYNKLSSYCGLVPRVKCSDQKEYYGHITKRGPVELRTAIIQMVLGLIRSKQEYNSRLMIMYRNIKKYKNSGKALVATARKLTKVIWTLLSNNEEYNSSKQTVFESNNLVKISDVA

SEQ ID NO: 363384 - protein, 336 aa, unidentified
MDHPTLPYTHIIGIDAASQKFDVSWLKDRNKHTYRSKVLENNPAGCLKLLEWIRKNITTNLTTVHIIMEATGVYHELLAYFLHDQGVAVSIVNPAYIHSYAQSLGAVHKTDKGDSQIIARFGAERNPAIWQPEPKSVRELKAKLNRLDALKADLQREDNRLHVAQISGVPDEVMLSIHQIRQALTQSIADLEHDMDDHINRHPDLKNDVALLQTIPCVGRETSMRMAVLYRSKQFTKASQMAAFLGLVPRKRESGQYKGKVTLSKRGNNAMRALLYFPAINACRFNPDIKLLRERMLARGKVKMQTVGAAMRKLVHICFGVLKHQSVYEARVAEPV

SEQ ID NO: 363385 - protein, 345 aa, unidentified
MEITTIGLDIAKRVFQAHGADALGEAVLRRKLHRAEVLSFFAALPPCLVGIEACSTAHHWAREIRAFGHEVRLMPASYVKPYVKRSKTDAADAEAICEAVTRPTMRFVPIKTAEQQAVLMLHRTRDLLVRQRTMLVNALRGHMAELGVIAPQGIGRVGDLVAALLGEDEGRLPALARQALRGLAAELEALGKRVKEVEVSILAWHKDNDASRRLATIPGIGPITASAIVATVTNPSLFHSARQFAAWIGLVPKQNSSGGKERQVGISKQGDRYLRRLLVLGATAIIRRSRAKITAATAWLRGLLDRRPARLASVAQANKTARIAWAVLARGETYRAPAAVQAAAA

SEQ ID NO: 363386 - protein, 355 aa, unidentified
MNQEKYIGMDVHQATISVAVMDAGGKLIMECLLETKAATIVEFLRGLHGTLSLTFEEGTSAAWLHDLLKPHVSRLVVCDPRKNALLKDGNKSDRIDARKLAELLRGNQLHAVYHGEHGVRTLKELGRSYLTITQDVTRVMNRVKAVYHSWAIPCAGTTVYAPRHRAEWLAKIAEPGVRARAERLYQQLDLLQPVRMEARRELLAESHKHAAVKLLRQIPSIGPIRSALLVALLQTPHRFRTKRQLRAYSGFAVETHDSGEYRSVRGKLQRNRERMTVRGLNDNHNRDLKNLFKSAAISASTRPGPLRDFYVARVEKGMRPTMARLTLARKIAAISLTIWKKGVEFDAQQLQRQAA

SEQ ID NO: 363387 - protein, 387 aa, unidentified
MTVLTVNNPPAATHGETVRCLFAIELSGMSWVIAFNTPLSEKISRRTLIGCKWKRLLELIEEVRARVSRETGRAVEVISCYEAGYDGFWLHRQLSTHGIRNYVIDPASLQVDRRARRVKTDRIDTERLLRSLMAYLRGEPKVWSVVRVPSVAEEDARRLHRERDRLVSERVQHVNRIKGLCALQGIYDYNPLRPQAMAGLEQLRTTQGGALPPRLKSEIKRELQRLELVVEMIATLEAERNAIVEDEASTHINAKKIHNLHKLKAIGPEFAAVLVGEIFHRDFNNRRQLASYVGFAPSPFQSGNVAHDQGISKAGNRKGRTTGIELAWLWLRYQPDSDLSVWFRTRVGTTKGRIRRIAIVALARKLLVALWRYLETGVVPRGAVLKG

SEQ ID NO: 363388 - protein, 344 aa, unidentified
MTYYTGIDVSLRSVSICVVNDKGEVCLEAKVAAEIDAIVDRLRRFSSEVKSVGFEAGTLTQYLTYGLQAAGFEVICLEARQVSVTLAAMRNKTDRNDARGLAQILRTGWYSRVHVKSLQSHQVRALLASRKAILKKCDDLENELRGLLKVFGIRLPSRVGHGSFDAELRETVSSDEMLACALVPLLDARTVLYKTYLKLDNAVKGLVRVDPICRRLMSIPGVGPVTALTFKAAVDDPSRFKSSRTVAAHFGLTPRRFQSGEVDNPGHISRAGDADVRSALYIAAHSLLTRNAQWSTLKAWGVRLAKTRGHRRAVIAVARKMAVILHRMWVDGSEFRWGPEAASA

SEQ ID NO: 363389 - protein, 385 aa, unidentified
MAPPRRPEIVIGLDVGKSSHWACVATRDGEVLASKPVANRENALDSLFAEFPGALVVVDQARNIGALALSRARAAGMPSAYLPGLAAHEAARLFGGDAKTDERDAMVIAKTALGIPDALLPVPHPDPAIAAARALAAQRDFLTRESTRSKNRLRSILLESCPEFESLVDLSDVSELRLMAALGGPWSVADAGRRRAAALARGARRGKVDALVGSVGSSARPDAAAIAAEDRAVRFLARRIAENAAELQAATAEISALLERDETYRCLLTVPGIGPKTASELAISVNIDDFPNHDRLASYCGLAPRNRQSGTSVSSVSASRQGNKRLKNLLIFSCNCLARTDGRWGEYYARCRDRGMPHGKALKAVARKRLKVIYAVMRDKVPYVA

SEQ ID NO: 363390 - protein, 356 aa, unidentified
MTKIAHFEPARVIVGVDTHKDEHVAVAIDQLGVRLGEHRIPTTPAGYRNLDRWAGGLGGVVAFGVEGTGSYGAGLSRFLAQCDRRVIEVSRPDRSLRRRLGKSDSIDAESAARSVLAGTATGTPKSGAGNVEMIRALSIARGSAVKARKQASNQINSLVVTAHAGLRDLLIGLSTGRLVKRCSSFRPGKVTTPVSAAKFTLRSLARRCQNLTAEVRMLDAELKRLTEETAPGLTGAYCIGPNTAAALLITAGDNPERMKSEAAFAALCGVSPVPASSGKTTRYRLNRGGDRRANAALHQIVIVRLRHDARTRAYMERRTKEGKGKMEVIRCLKRSVAREVFKILRNLEQQKRKNTA

SEQ ID NO: 363391 - protein, 403 aa, unidentified
MNSVGIDISKGRSTIAVMRPFGEVVISPFEVRHTGSELSKLAKQLKSLDGETRVVMEATGNYHASVAKLLHNAGLYVSVINAKLVHGYGNNELRRVKTDRKDAVKLANYGLDRWLTLPRYIPEEDTRLLLKNCYRQYRQYSKVQTVLKNNLISLLDKVFPNANRLFSSPIRGDGSEKWVDFVAEFWHCRCASEKSERAFTSKYLRWCRKHGYNFREAKAHTIYAEASGHIGVMPKSETTKLLVKQAVSQLRATSTALAALKQEMQSLASVLPEYPVVMDLFDVGPTLGPQLIAEIGDVRRFYSKKALVAYAGLDAPPNDSGDVTGRHKSMSKIGASSLRRTLFLVMSVYLQTAPLDEPVCQFMDRKRAEGKLYRVYMMASANKFLRIYYATVKAYLESLEHTA

SEQ ID NO: 363392 - protein, 400 aa, unidentified
MAQPVWAGVDAGKADHYCVVIDADGASLLSRRVTNDEAALLELIDMVTSLADSGEITWAIDLNAGGAALLITLLIAAEQRLLYIPGRTVHHASGGYRGDGKTDAKDAAVIADQARMRRDLQPLRPGDDIAIELRILTSRRSDLVADRTRAINRLRAQLLEYFPALERAFDYSKSKAALILLTGYQTPDGLRRAGAARVAAFLRKRKARNADAVATGAIEAANAQYTVVPGQQLAAGVVARLAEEVMALDTEIGDTDAMIEERFRGHRHAEIILSMPGFGVILGAEFIAATGGDLSAFPSVDRLAGVSGLAPVPRDSGRITGNLKRPRRYDRRLLRACYLSALVSIRTDPASRTYYDRKRAEGKRHTQAVLALARRRLNVLWAMLRDHTTYQPTAPNTAAA

SEQ ID NO: 363393 - protein, 316 aa, unidentified
MSKIICGVDVASDFLQARIGREGAEGRFSNTKDGIAELAAFCRQHQVELVAMEASGGYEKLPFALLWAQELMVAILNPRAVRHFAEGMGLLEKTDRIDAGMIAWFAEVKHVAPMQPHSAEQQRLKALVVRLRQLTELHAAQRNQQLLVEDAFVRKSFTGLLGVVKSQMRELEKAIADLIAADPLWQKLNECFRSIKGVAKRTVARLMAEMPEIGTLSNKAISKLAGLAPLARDSGKREGKRVVRGGRRGIRAILFVVSLVVRRYNPDFAAFHQRLTAAGKAKKVVRIALAHKLLVRLNAKAREVRRELAATAVLPV

SEQ ID NO: 363394 - protein, 323 aa, unidentified
MEVVYPCCCGLDVHKKSITACVLWAEAKGKSRKEKKRFGTFTHDLLQLADWLEQCGVTHVAMESTGVYWKPVWNILAERFEVLLVNAQHIKAVPGRKTDQKDSEWIADLLQHGLLRGSFVPPQPTRELRDLTRYRVSLVQEINRIANRIQKVLEDANIKLASVATDALGASGRAILEAMLAGEQDSARLADMSKGLLRNKIPELKLALEGRMTEHHRFLLRQLFEHLRFTESKRSEIEQEIDKRMLPFEDKVTRLCTIPGVDRVTAWGMLAEIGLDMNQFPSSGHLASWACLCPGNFESAGKRLSGKMRKGNVSLRRCLSQAA

SEQ ID NO: 363395 - protein, 387 aa, unidentified
MPEPNSLNRSLVALEQDSTLVAVIDMGQSSWLVAGIVPGVERHPLKKLEVDEAALLRLLERWRGEAAKAGRTVTRIAVAYEAGRDGFWLARWLRARGIEAHVIHPTSVAVSREHRRAKTDRLDTELLKRAFLGWLRGERGHCSMAAVPSLEAEDAKRPTREHEGLVGERTRVINRIKASLARLGVRGFKPTLRGAAERLKRLRTPEGVGLPPNTLTELQRDIARLSFVREQIKQLENARAERLERAPGEGGNAMVRLLARVVGVGLETADMLVHEVLSRDLRDRRAVARYAGLTGSPDESGTTRREQGLAKAGNARVRRGMIQLAWRFLLHQKGSALAQWYRARTADARPGTRKTLIVALARKLLVGLWRLVTTGELPEGIVLHPTA

SEQ ID NO: 363396 - protein, 386 aa, unidentified
MQTPNDLNQSRIILKQDSTLIAVIEMSLSSWLVAGIVPGVERQPLKKLAVDESALLKLLNRWREEAEKAGRKIERIAVAFEAGRDGFWLARWLRARGIEAHVIHASSVAVSREHRRAKTDRLDTELLKRAFLGWLRGERDHCKMVAIPTIENEDAKRPNRERESLAGEQTRIVNRMKAALSRLGIRGFNPKLKKAAERLKDLRTPEDQPIPPNTLAELRRDMERRRLVSDQIRQIEHARLERIEHAPSDGPHAMVRLLARVIGVGIETADMLVQEVLSRNMRDRRAVARYAGLTGSPDESGTKRREKGLARSGNARVRRGMIQLAWRFLMFQKGSALAQWFRARTENAHGTRKTMIVALARKLLIALWRLVREGVVPDGIVLRPAQ

SEQ ID NO: 363397 - protein, 400 aa, unidentified
MRVVFGIDVSKASSEVAILVNGEKVHGYTISNDAIGFARLLGDLRTVHKPEIIFEAIGVYSRRLQSFLDEHGYAYTRLNPLEAKKQLDSLRVRKTNQIDAEKLAQSQFVLNRKPTYVQEEVYQNLRDLSRFYQNLTEDIVRAKNRLHKVLQVTFPELENILSTPTGEQYWNLVITFPCKDFVLDLSKNELSKSIRQSTSKRISDKRVAYLAEKLTALANQSYCAVKKTSPILEEVHYYAKELLRLSEQRQAVLDQMVELAQPLPEYDILLSIPGIAETTATSIIGELGDIRRFQSANQINAFIGIDLRHYESGNFLAKEHITKRGNPYARKILFKCIHNIASVSHTNPCHIADFYEKRKRQSQTTSTKPHTIASIHRLIRTMYYLIMHNKLYDYASTQNR

SEQ ID NO: 363398 - protein, 399 aa, unidentified
MQETTQHDAVDVGRGRHHAVALDRNGKRLYNKALPNDEVKLRALIAELKTHRRLLFVVDQPSTIGALPVAVARAEGVLVAYLPGLAMRRIADLHAGETKTDARDAAIIAEAARSMPHTLRSLRLADEQLAELTMLRGFDDDLAAQVTQTSNRIRGLLTQIHPALERVLGPRLDHPAVLDLLERYPSPSALAAANEKTLANRLTKLAPRMGKNWAAEIVQALNEQAVIVPGTQAATIVMPRLAQQLAALRKQRDEIAAEVERLVLAHPFWPVLTSMPGVGVRTAARRLTEAAPKAFATAAHLAAYAGLAPVTRRSGSSIRGEHPSRRGNKVLKRALFLSAFAALRDPVSRAYSSRKIQQGKRHNQALIALARRRCDVLFAMLRDGTIYPTIYPPKSAPNA

SEQ ID NO: 363399 - protein, 370 aa, unidentified
MNHVTSIGLDVHARSVTAAAFDPMTGEITARRFGNDPSEIAGWILGFEAPKAVYESGVTGFHLCRELRALGVDCVIGAVSKMQKPASNKQVKNDRADAQFLARLLSTHNVTEVFVPDTETEAMQDLTRALEDAREDLIRGKQRLTKFLLRHGWVFGGTREDGSRVGYWTKAHWRWIREVELGDMASQETLDYYISEVRHLEGQKTELEKLISIHAGGTRWKPRVDALCCLKGIDAMTATSLVVEAGVFSRFDSASAFAAWLGLVPSEHSSGETEHRGRITRAGNKHARKLLVEASWHYVNALPTRKAPRPGTEVPLHIENHAARGTKRLVERRRELHRRGKKPVIANCATARELACWVWAIGRMCEGTLD

SEQ ID NO: 363400 - protein, 357 aa, unidentified
MIFVGIDVAKDKHDCFICNSDGEVLFNAFTIQNTIEGFNFLYQRIESVSKDFNKVKVGLEATGHYSYNLLGYLLDKGLTTFVINPLHTNLFRKSLSLRKTKTDKIDAHTIAMMLMSNVDLKSYSDILYHNEELKSLTRYRFYKVSERAKLKTTVSRLVNILFPELEKLVPSLHIKSVYTMLSEFPSAHHIAEAHLTKLTNLLHTASRGRYGKDTAIGFREAAKNSIGSDMPAKSLELKHTIKLIQELTAEIEEIEAEIKHIMDNINTPILSIPGISYTMGAMIVAEIGDFSKFSSPDKILAYSGMSPSTYQSGQITNSYSHMEKRGSRYLRYALYNAAKYVCHWDETFKNYLAQTVE

SEQ ID NO: 363401 - protein, 342 aa, unidentified
MDAHARNHVLAILAATGQQIDSAGFPTTKAGMARAIAWAARRTDGDLAALWVIECTATYGAQLAHAVTEVGYQILEAPRMNARGHRGVGKSDPLDARRIAEATLPLEADQLRRPRTGDGERAALRVLVAARDHMTGERTATVNALIALVRAVDLGVEARRPLSNQQIVEISRWRTRDEPLAAMTARAEAVRLAKRVVALDEELSANHKTMDTLVRSTSAAGLLDKIGIGPVTAVVCLAAWSHHGRIRSEAAFACLAGVNPIPASSGNTIRHRLNRGGDRRLNRALHMATITRMIHDPTTRDYVERRRSEGRTTKEIRRCLKRYLARQIYRHLNAASTQPRPS

SEQ ID NO: 363402 - protein, 345 aa, unidentified
MAQVTTLGVDIAKNGACVHGIDTQGHVIVKKRLARQKVLPFVAQLPPCLMGMEASGGAHYWAREFTKLGHTVKLMSPQFVKPYVQSQKNDPNDAAGICEAVARPRMRGVPVKSVAQQDIQALHRIRERQIKARTALINQIRGLLTAYGIVIPQRASQVRHKLPFVLEDAENGLTATARAWLSALAEELKALDQRIATTDTQLEEVFKNDDACQRLAQLAGIGPLTATALVAAVGDATEFKHGRQFAAWLGLVPRQHSTGGKTVLLGMTKRGNCYLRTLLIHGARAVLRVVDRKTDPWSRWLQGVKARRGMNCASVAQANKTARVAWALLARGERYRPPASPRLAA

SEQ ID NO: 363403 - protein, 355 aa, unidentified
MSQEKYIGMDVHQATISVAVMDARGKQLMECLLETKADTILEFIQGLRGTLALTFEEGTSATWLHDLLKPHVSRLVVCDPRKNALLKDGNKNDRVDARKLAELLRTNQVKPVYHEKHGTRALKEVGRSYLTVTKDVTRVMNRIKSVYRSWAIPCAGTSVYTRCHRAEWLAKLVEPGVRTRAGRLYQQLDSLQPLRQAARRELLLESRKHAAVKLLRQIPAIGPIRSALLVALLQTPHRFRTKRQLWAYSGFAVEVHDSGEYRWVRGKLQRNRERITVRGLNDNHNKDVKSLFKSAAISASTRPGPLHDFYVTRVESGMRPTMARLTLARKIAAITLTMWKKGVNFDPKQLQRQAA

SEQ ID NO: 363404 - protein, 397 aa, unidentified
MIAVGIDVSKSKSTVAILNADGTQLVRPFNMAHTLPEMNSFVERLRALEGPVIILMEYTGHYHYPVLKKLQAEGFPVCLINPYQMKKYGDVEIHKAKTDKKDAVRIATYALEKAYKLSPYSAMDQKYEDLRFLLRQYGQRIADVSRLKTQLLDHLDQTMPGITALLSLKSRTPEKCMLLLFIKRFKSFDEVCRIGKTRFFSAYATLVKKTADRFAAAKALAIFELALNSITTRGDDPYIWSVQAQCVDLLAAAQNAADAIILQMQNIAETIPEYKVLRAMHGVGDRLGPIILAEIGDVRRFHSAKALNSYAGNDASPYQSGQFESRNRHISKRGSPALRKACFEVMQALKLTKPQDDPVYLFILKKEQEGKPHNVAKMAGVNKFLRIFYARAMDLYR

SEQ ID NO: 363405 - protein, 333 aa, unidentified
MSEVWCGIDGSKKKMDCGLTGPKGYRTCCVGNDGKGYETLERWAVKTAEEGVEVRFCLESTGDYNTACALWLTERGYRVSVVNPAFVKYHAMGKGRLNKTDKADARSIAEYATDNRPEPWEMADPVRRDLLRLVRRREQLLKMAVMETNRRECPDAIGPECTASIDRVRRFLDEEIAGTESRMRELVAGDEGLSRALELIVTVPGLSEGSAVVILSEMPDVDRAACAKEWAAAAGGHATRHESGQMPAGSRMSRGGRIRVRRALWMPALVAKSRAPQLKRLYDRLRERGRTHRQALVACVRKLLMIVYGILRSGNPYSSSAGQAKPSPDLANT

SEQ ID NO: 363406 - protein, 344 aa, unidentified
MDHYAGIDVSLEYSSVCVVDASGKVVRETKVVSEPEALIGWFGSLGLELARIGLEAGPLSQWLYAAMKQAGLAVELLETRHVYEAFKSMPVKSDRNDARKIAQLMRLGWFRPVHCKSITAQEIRAMLTARKLVQSKLLDVENSLRGILRGFGLKVGNTTRTSFAGRIDELVKAHPNLQTIAQALLRARAVLLAEFSGFEKRVRTISRLHDQARLLMSTPAVGPIVSLTFACAIDDPCRFSSSKQAGPHFGLTPKKYQSGETDYTGRISRHGDASVREALYEAAHIMLTKPIKHCSELKSWAMRIARRAGVNKAKVALARKLAVIMLRMLKDNVPFNPAAKATRA

SEQ ID NO: 363407 - protein, 415 aa, unidentified
MAMSVLYTRCAGLDVHKETVVACLMLTASSGKITREVRTFATTTLGLQTMAQWLASQQVTHIAMESTGIYWRPVFNILEGRFEVILVNAQHMKAVPGHKTDVKDSEWLADLLRHGLLSASFIPPKPIRDLRDLVRHRKTLVRQRAQAINRVQKVLETANIKLSSVASDVLGKSGRDMLDAMLAGIGDAEALAGLARGRLRAKLPALREALSGRVEATHRLLLRQLLDVIDFLQGQIDAISTDIDALLLPHKQQLSRLMQIPGIGPLAAAAILAEMGTDMTCFPSAKHLASWAGVAPGNKQSGGKRLKAHTNKGNTHLRAVLAEVVWVISHTRDNYLSAQYHRLAHRLGKKRAIVAVSHSLVTIIYHMLQENEDYHELGFHYFQTLDTTRQRDTAVRRLQALGYKVSLEEITEVRA

SEQ ID NO: 363408 - protein, 355 aa, unidentified
MESTKFVGMDVHKDAITIAVMNSAGKVIMESIIETKAVTILQFIQGLRGDLHVTFEEGTWATWLYDLLKPHVTKVVVCNPRKSALLTDGSKGDKIDARKLAELLRGGYLKPVYHGDHGLRTLKELSRSYLTISKDLTRVMNRIKALYRGWAIPCGGTQVYALCHRSVWLSKIPEAGVRSRAEHFYEQLDALQGLRKQVRRDLLAESRKHNATKLLRQIPSIGPIRAAELVALIQTPHRFRTKRQLWNYSGLGLETHDSAQYRYVDGQLQRSRKPQQLRGLNQDHNHDLKKIFKGAATMASISAGPFHGFYEALLAKGTKPTMARLTLARKIAAITLIVWKKGVNFDAKHLKQQAA

SEQ ID NO: 363409 - protein, 361 aa, unidentified
MNAVGIDVSKGKSTVAALRPMGEVALLPQEFLHTEVGLEQMAYAIIALGEDTRVVMEATGRYHEPIAAALHEYGIYVCVLNPLYIKQSGGGSIRKVKTDKADAMKIAKYGLDNWVDLREYTPMDTVRQQLKLCSRQYNLYIKTVVSLQNNLISLTDKTFPSVNELFSSPERADGHQKWVDFVMTFWHCDCICRVSEKAFTERYQKWCKRKGYHFSVEKALDIYASSCGHFTTLPKNENTKLLIVTAAQQLLAGKTTLAALRAEMTRLASQLPEYETVRAMYGVGETTAAQLMAEIGDVRRFPRRSSIVGFAGVDPGVDESGKHSAKSVPTTKRGSPHLRKTLYQHISQKSAARRACVPVSR

SEQ ID NO: 363410 - protein, 368 aa, unidentified
MYYSKTVVGLDVHKDSIVAAVLPPSADRIALTTKIENSPAALKAFVQRLRPHGPLAFVYEAGPCGYHVHRDLVAQGQECVVIAPGLTPQRPGDKVKTDRRDAEKLAQLHRAGQLTAVSVPTREDEADRDLVRAREDVLAERLQSRHRLSKFLLRHGLVWRETKAWGVRHRAWLRALRFELESETRTFEAYLRGMEEVEARLEALEREVLALAEKGAWRAVVANLRCLKGVDTLSALTLAVEVRDFRRFPSAREFMGYTGLVSRECSSAESVRRGRITKVGNAHVRRVMVEAAWAYSQSDRTGPALTKRREGGSVEALSTARRAQERLCGKFRKMTGRGKPRQKAVTAIARELAGFVWHIGRLSQEARG

SEQ ID NO: 363411 - protein, 339 aa, unidentified
MTNYIGLDHHRKFTQVAVVDDQDVVILEMRMANTEQSVDELLKRLNGRTEAVVEAGPSWGWIYDTFQRLGVAIVLANPLQVRVIAETRCKTDRRDALALARLLRAGWIPKVYVGDPESRAQKQLWRERVWMVRMQTRLKNRLRRLLDHHHVSVPDYSDLFGVSGRKFLETLQLPGQAQKILQTELALLGVYQKQIHQVQSWAQTSTADKPEVQFLKSLPGFGEVLAPIASLEIGEVSRFPDAASLCAYCGLVPSVSSSGGMTYRGGIRGSGNHWLKWVFIEATWSAIRVMPELRMRFDRLKDRRGSKIAIVACARRLCEIAFVLLKQKRVFEVRPLVYA

SEQ ID NO: 363412 - protein, 421 aa, unidentified
MEVVAPHCAGLDVHRSMIAACALLSDERGRARQVKSQFVTTRAGLEHLVRWLRGLGVRDVGMESTGVYWMPVFAVLEAAGGFELLVLNPEHAKGIKGRKSDMKDAEWLANLVRHGLVRGSFVPPKPIRELRDLTRYRRTLVENQGSERRRLIKLLEAADIKLAGVVSDIFGVSGRAILRALIEGGHSAVEMSKLARGHLRKKRGQLIDALAGELAEHQRQILAMQLARVEADEADIAALDRLIGERLAPYAPQMALLITIPGVDWVVAATVIAEIGIDMSVFPSDRHLAAWGGTCPGNNESAGKRKPIGARKGNPYLKTALCNAAIAASRKRGSFFKAKYHKLKSRRGGGRAALAIAHKLLVCIYHMLSGNASYRELGEDYFDLRDTQRAARRYVRRLQDLGFSVILEASCQPQAEPANAL

SEQ ID NO: 363413 - protein, 405 aa, unidentified
MSDMITNHADIDVFIGIDVGKHNHHAVALDRDGKQVLSKALPQNETKLRALLDRLRKHGTLLVVVDQPATIGALPVAVAQAESITVAYLPGLAMRKAADLYPGQAKTDARDAFVIADTARTMPHTLRTVDRESDVLANLKVLAGTDEDLAHDITRAINRLRSLLLQIHPALERVFKGTVLTRTIVLDLLIRYRGPAGLRAAGKSGVKRWAKNHTRKDPSALIDAIFDALAEQTVTVPGSEASESVVPRHAARIKALKAERKEIEAEAEELADSLPLLQVLTSMPGVGVKTASQILLAAGDFSAFKSAGHLAAYAGIAPVTRRSGTSIRGEFPSRAGNKRLKNALFHSAWVASCHDSLSKAYYDRKRAEGKRHNAAVMCLARRRLNVLFAMVKAGAFYETRTPVAA

SEQ ID NO: 363414 - protein, 317 aa, unidentified
MSKSFIGIDVSKNNLDVHVLPEAVSLSYRYETKPMKALIKKLKTYAPELVVLEATGGYEITIGIALADAGLPVAIVNPRQVRDYARALGILAKTDKIDAYVIARFAQDVKPEARGQMTFKEMELKSLVARRQQLVEMLSAETCRLSRITVPRVKKGIQEVIQVLEAQIKAIDEDLDNEIKKNPTWNQKLEVITSFTGVGKHTANTLVFGLPELGTLNRQEIAALVGVAPFNRDSGMLRGKRTISGGRANIRKALHMPTLAAATRWNKDMMVFYQRLVSRGKKHKVAMTACMRKLLITLNAMVKNNEPYHPKFREVPA

SEQ ID NO: 363415 - protein, 383 aa, unidentified
MGWSGRAPAPRQYAMLARGSEDKEHAMSQHSNNCAIAVIGIDIGKNSFHVVGHDQRGAIVLRQKWSRGQVEARLANLSPCLIGMEACVGAHHLSRKLQLLGHNARLMPAKYVRPYSKGQKNDFRDAEAIAEAVQRPTMKFVATKTADQLDLQALHRVRERLVSQRTGIINQIRAFLLERGIAVRQGLRFLRAELPGILATQTDVLSPRMLRILEDLSADWRRLDARIDSLSGEIETLAHQDQHCERLMTVPGIGPIISSAMVAAIGTGDVFSKGRDFGAWLGLVPKQISTGDRTILGSISKRGNRYLRVLFVQAAWVVLVKLGPKHWESYGLKSWIEAAKKRLHHNVLAIALANKLARIAWAVLNKGRAFACDKTDAMASRAA

SEQ ID NO: 363416 - protein, 274 aa, unidentified
MIVIGIDPHKQTHTAAAVESGSGELRGERTVKARREGHERLLVWARALGSERLWAVEDCRHVSIALERFLLASGERVVRVLPKLMAGARKGARSYGKSDAIDALAVARAALREPSLPVARLAGAEREIRLLADHRDDLVQERTRIQQCLRWHLHELEPELELPAGCLDRRVWLERLGRRLARSERSVQVRICRELVARCGELSRRAAELERELARLVSAQAPTLLELPGCGVLTAARLVGETAGAERFTGEAQLAMHAGAAPLPPRAAAGSVTV

SEQ ID NO: 363417 - protein, 476 aa, unidentified
MSRISPKVKHQQRRSGKGGTEQPLREIRDDVAGIDVGAIENYFACRPQADGSPNVRSFPTDTQSLEESADWLAAEGVHSVAMESTGIYWIALYQVLIRRGFEVNLVDARAVRGVPGRKSDVIDCQWLRQLHACGLLKGCFLPDDQTAALRSLQRMRQTLRRSQDDWIRRVQKQLDLMNIRVHRAVSDITGVTGMAIIRAILGGERDPQALAALRDRRCHKDEAAIARELTGDWREEHLQNLALAMATYDHFTAQIAQVDRNIDKLLTRIHAIREAAGKPVAAVVPPHASAEKGKRLIKRGEEPLRQALARTFGIDLTQIEAIGPEAAACVFMELGPDIPVRFPTEKQFVAYLRLAPRLGISGGHPLPRKGKPPRRGSLPLKRILLMAAGTLRDSQTALGDYYRKTAYRKGNGVASFATAAKLAQRLYRALAHGIEYATGGDERWHRTELERRRARLVRQAATLGLTVVPATAAVMV

SEQ ID NO: 363418 - protein, 354 aa, unidentified
MLIIGCDYHPSFQQIAFVDTETGEVKEQRLVHRAEAEKFYRDLAAQARQVRVGMEASGHARWFERLMAELQFELWMGDAAEIRRKRGRKQKTDRQDAQHILSLLLKNDFPSIWVPSWENRDLRQLLWHRHRMVQARTRIMNQLQAVALNEGLLCRKKLWRERGRQQLEAFRLAPWASRRRHDLLELLDRLNPTITELSQAIEREVEKCPAAQQLMTHPGVGPLTALAFVLIIGDASRFQCGKQVASYLGLVPLEDSSGNRRRLGHITKQGSSMLRFLLVEAAQVTVRSLPGWRSKYAHLMMRRGRKTAKVAMARRLAIRLYWMMRQGWDYQQWSKFGSHAGQPAHRDGVQSNIE

SEQ ID NO: 363419 - protein, 403 aa, unidentified
MNNVAGIDVSKGKSMVSVLRPFGEVVAKPFSIGHTGSELKELADYLKSLDGETRVVMEHTGRYYEPVARFLHEEGVFVSAVNPKLIKDYGNNTLRKVKTDKADARKIARYGLDNWAELRQHTPMDTIRMQLKTLNRQQSLYAKTKTMMKNNLIALLDQTYPGVNALFDSPVREDGSQKWVDFATTFWHVDCVRNMSLTAFAERYRKWCKRHGYNFSQSKAVEVHAGAQDLIAMLPRDALTKTMVRQAIDALNAISASMERLKAEMQALAAQLPEYPVVMAMHGVGDSLGPQLVAELGDVTRFTHRNAITAFAGVDPGADQSGTHEAKSTRVSKSGAPELRRALFLVMDCLLKTQPQDDPVYRFMDKKRAEGKPYLVYMTAGANKFLRIYYGRVKEYLASLEEN

SEQ ID NO: 363420 - protein, 342 aa, unidentified
MKSTTIAVDVAKEVLEVAVSVRPGQVSEQRRLSRSAFLKFCTDQPPATVLLEACGSAHYWGRRLQSLGHRVVLLPPHATRPYVFRNKTDRTDTRGLLEAYRNEDIHAVPVKSVSQQALTALHRLRSTWLATRTARINTVRGLLREFGCTIPLGAQHVLARVPALLADADSGLPDALRPALAETCTEIRDIEDRIRVVEAQLQALADQIPVVARLRSIPGVGLITATALVAFVGDVQRFPSGRHLASYLGLTPRERSSGLIRRLGAISKRGDVYLRMLLIHGARAVLWAAKKRRTPDRLRAWALQLQTLRGHNKAAVALANKLARVVWAVWKHDVDFREVPAA

SEQ ID NO: 363421 - protein, 360 aa, unidentified
MNALKVNLGIDAAKDNCECNLSKLTAQLDVKVIASKIFLNTDHGLKELLKWLIKNAPAECSQLHVVIEASGVYHERFALGLQDAGYCVSVVLPNKAKKYMESLGLKSKNDRIDAKGLARMGCEQKLEEWSPLSPFYQKLRTYTRLHEDIQQKKTETTNQLHALKHSAVQMKDAIKVLERLVKVFDEELFKTKKLIEDQIAGNAEVKERMDKVCDIKGVGTLTVATVVAEANGFNLIKNIPQLISYAGYDVVEDQSGKRTGKTKISKKGNAHIRRILHMPALNMMTYKVGAMPALFERTLDKHGIKMKSYVALQRKLLVLIYTLWKNNKAFDENYHKDTSARVQEAEASSRLSLEEAGKAA

SEQ ID NO: 363422 - protein, 354 aa, unidentified
MSQKLEITIAVVGIDIGKNSFHVVGHDERGAIVLRQKWSRGQVEARFANMPPCLVGMEACVGAHHLSRKLNSLGRNARLMPAKYVRPYSKGQKNDFRDAEAIAEAVQRPTMKFVATKTTDQLDLQALHRVRERLVSQRTGIINQIRAFLLERGIAVRQGQRFLRAELPRILATPPDVLSPRMMRIIEDLAGDWRRLDERVEDLSNEIEAIARQDAGCERLMSVPGIGPIISSAMVAAIGAGDVFTKGRDFAAWLGLVPKQISTGDRTILGKISKRGNRYLRVLFVQAAWVVLIKPQSWERHGLKSWIEAAKKRLHRNVLAIALANKLARIAWSVLAHGRDFAAQKMDQAANQSA

SEQ ID NO: 363423 - protein, 479 aa, unidentified
MSGPAGSFVTTGVQVISNMLCEQIKEAPRVQELRLGIDLACRESHRAALADETGKILWSNRRLFTTSVDLQSLWTAVRAAGDVPVLVVMEPTRNAWVPVAAWLRARGADVRMVPPEQSADLRKYYNKHTKTDRLDCELLARLPLLHPDGLVATPGLGPAEALRRSVAHRQSLVARRTAGLQRLDALLGPAWTDVLGTDFGKAALTVLERYADPDALFRLGRARLTQVLIRASRGQWRQDKADELLDAAAQTRLLWAGGGLVFAELADDIAVEARLVRQLGAEIDQLDDRITTHYQDADPTGVVASAPGVGPVLAPLLLGRLGDAKRFRDLAAVRNYTGLVPKVNQSGTSDHTGGLTKAGDPLLREALFMAADHARKVDPTLAARYWRLRAADKHHNSALCTLAAVLVTRIAACWRNDQQYILRDLNGNPITETQGRAQCADLKPTPTAKAGTGRRNKESHSAPSTGPSTKQATKLRKSA

SEQ ID NO: 363424 - protein, 428 aa, unidentified
MQIIQKRIERITPTTIIVGIDTAKETHWAQITEHRGVALVKPFKVHNSIDGFENLLLRVEKLVKKHGCDKVIIGMEPSGHYWRALGWYLKLHESRPELVGVNPYHTKQAKELDDNSQTKSDPKDALTIAHLIRNGNYFDTYLPEDEYAELRQLNTERQRLMKQISRANNVLIAQLDEFFPEYATVWGSVTCATSLELLKSYAFPSDITAAPREKLLEDIRTASNGTEGAKLMGEMIRAAGRSVGVKEGKRAVRLRILNLVDELIYFQKKKDAIEAELESVMETLQLGKVLQSMLGVGPVISAAFMGEVGDISRFDNWKQVRSLAGLNLVEDSSGQHKGKTKVSKRGRPYLRHMLFLAGECGCRCNPEMRGFYRCLRDRKKNPLNPQQAFVATGLKIMRILFHMAKTGESYDPSKALGSVRLQQIESLG

SEQ ID NO: 363425 - protein, 330 aa, unidentified
MNGKTLGIDISKDKFDVYLISATRRRSRQEERGMHRVFQNNEKGFGDLLMWLEENGVDDVHACMEATSTYGDALAMFLHDKGFTVSVVNPFQIKSYRDSELRLTKTDRSDAAVIARFCRSHRPAAWKPLKAENRKLRDLTNRLEDLEKMLYQEKNRLKRPGLDVDVRASIEEMIGILENKIKELQDQMKNHVSSSDKLKKNKDLLCTIPGIGEKTAMMLMGMIGDFNRFDNCRKIVAWAGLAPSIHQSGTSVRGKPFLPKRCMNKVKRLLYMPTLASMRYNPLVRELCDRLKAKGKKGMQIVMAAMQKLLRIAYGVQKHGLPFYELYCEH

SEQ ID NO: 363426 - protein, 416 aa, unidentified
MLFIGDDWAEDHHDVELVDDNGRRLARARLAEGLEGITRLHALVAEHGSAAWGDLPPEEVAAQVVVGIETDRGPWVTALRAAGYQVFAINPLSAARYRQRHSTSGAKSDAGDAHVLAEIVRLDRDHHRAVAGDSDLADAVKLLARAHQTAVWERTRHVLRLRSTLREYFPAAIEAFEDLAAQDALKFLERAPDPGRAAKLSRSQLVVLLRAARRHHVEAKADVLLVVLRAPALRQQPTLEGAYASVAAGQVGIITALNEQIAQLQKVVAEHFGRHPAADTYLSQPGFGVVLAARALGEFGDDSTRFTDAKARKNYSGQSPITRASGKKTVVLARYAGNRRLGTALHLQAFAALGASPGARAYYDALRGRNIGHHAALRQLANRLVGILHGCLKTGTAYSEEIAWQAHQKEVPAAAA

SEQ ID NO: 363427 - protein, 384 aa, unidentified
MVAVSRLTTKNGDKHMKKHKHYVGLDVHKDTIAVAIAEAGRGGEVRSYGTITNTLVAFRRLVEKIGDETIELHVAYEAGPTGFVLYRWMKKHGIDCIVVAPSKTPQSPGPRQKTDRRDAVQLARLHRAGELTAIHVPDETDEAIRDLTRARADAVADLTRAKNRLKGFLLRNGYRCSVKANWSDAHMRYLRELRLPMPIHKSVLEECLLGVTQALERIIRLEALIEVEAPRWRFFPAVQALTCLRGFKLTAATVFIAEIGDVKRFDHPRRLMGFLGLVPRENTTGQTRRLGSITKAGNAHARWILIEAVHHAFHSPKVSAQLALRQIGQPEPYKALAWKVQSRLHKRGWHLLRRGVMKQKVLVALARELAGFVWALLSQVPLTA

SEQ ID NO: 363428 - protein, 404 aa, unidentified
MWYAGIDWANDHHDILVIDEQGRQVGSLRVDHTPQGMSRLTTFLEQIVGAESKEQMACIIETTHGLLIAHLLEAGWPVYPVNPRTVDRRRAASGAKTDTIDAYRLPKTGRADLADLHRLTPDSEQIAELKLLTRDQDALIQMQTRLVNQLTACLKTYYPVALELFAKLPQKSTLRFLQTYPTPQAAMAASAEQIQQVLRQAKHSNPIPVAATIFERLHQPHLQADAVTTRTKSRLMGALVSQLLPLIEQIAQYEKEIKTLFLTHEDHEIFASLPRAGKRLAPRRLPEIGDDRTRYQDASSLQALGGTSPVLFQSGMYSKAHRRLGCIKPLRNALHQFAWQTTQSEPWAMQYYQRKRTEGKSHTVAVRALANVWVRIIFAMWVHHRCYEAITFETAQQQHARPAA

SEQ ID NO: 363429 - protein, 364 aa, unidentified
MKLTTLWAGLDVHKESISVAVFEGSATQGRPVVTVPNDPAHIRKLFSRLKKEGEVRACYEAGSCGYEVYRQLAAMDIPCDVVAPGLIPVRVGDRVKTDRRDAEKLARLLRAGELTSIRVPTEAEEALRDLMRCREDAREDVLRQRHHVLKFLLRHGRTFRDTKHWTLAHWKWLRAQRFDEPLAQVVFTEYLSTLEKTLARVAVLDQEIAKQAEKEPYKPLVGRLRCLRGIDTLSAMALIAEICDFTRFEHPRELMAYLGLVPSERSSGGKQRRGSITKTGNAHARRIFVEAAWHYRHAAARSATMKARWKDQPPSVVDHAYKAQERLHRRYVRLTSRGKPAQVAVVAVARELCGFVWAVARAAT

SEQ ID NO: 363430 - protein, 345 aa, unidentified
MNKFTPISPATVFCGIDVSASSLAVALILVDHSVTQREFANCASGHKALVGWLSKCNAKVRVSLEATGIYSLDLALALDAEAYIELAVLNPKLVNRFAQTLRRSKTDAADAVVLAEYCQRMPFTPWQRPGVNHLRLRTIGRYIESLVVELARVKNRLRTAEGTATTPRAVLGDLKQAQTTLSRRIAKMRREAEKLVQAEASLRQRFALLVSIPGIAKISALHILSELVLLAPAMTVRQWVAYSGLDPVHHVSGTSVHKPSRISRAGNRHLRRALYMPALAAVRCDPHLRAFHQALRERHKTSLQALMAVERKLLHAIYGIFKNGMPFDGKRLFPNLLLELESIAG

SEQ ID NO: 363431 - protein, 351 aa, unidentified
MIIIGVDYHPSDQYIAFVDTETGEYGERQLKHSDREAEKFYRELAARGVSVRVGMEATGYSRWFERLLAELGIEVWIGDAAEIKTKRVRKQKTDREDARLMLRLMRENNFPRIWVPSPENRDLRQLLWHRHRLVQMRTRIMNQLQALAMNEGQRRKKKLWSEQGRAQLEKLPLATWASRRRKDLLELLDRMNPTVEELTRAIDQEVKKWPEVLRLMTHPGVGPLTALAFVLIIGTPKRFKCGKQIGSYVGLIPSEDSSAGHQRLGHITKQGSSLLRFLLGEAAPAAARWDSDWRRRYVHLAMRRQRNIAKVAMARRLAVRMYWMWRNGWEYAEWVKFGSHAGQLGTRHGVN

SEQ ID NO: 363432 - protein, 312 aa, unidentified
MNDKITSVYAGLDIAKASLQLHLQSKSYDLPNTSQGHVQLIKRLAAIPGGHVICEATGGYERAAVAALHAATIPVSVLNPARVRQFARASGELAKTDPIDATMLTAFGQAFTPQPTAARTASEIKMAALVTRRVQLLELRVTEAQRADTCADLDLRKLFTPWLAQMEKQITKIEALIEALLKTQEPLADQVRRLDDIMGVGRITAVMVLATMPELGQLNRRQAAALAGLCPYNRDSGQWAGKRCISGGRAQVRRALYMAALSASRSNHLLKPFYDRLMAAGKPAKVALTAVMRKLIVLMNHLLKNPNFSLAH

SEQ ID NO: 363433 - protein, 379 aa, unidentified
MAAIWAGIDAGKTPHHCVAIDESGRRLLSRRVANDETEVLELLADVLALGDEVARGMDLADGGAALAIAILLNHDQPVHYISGQAIHRASESYRGEGKTDAKDAAVIADQVRVRRDLHPIRVGDETVIDLKILTGRRMDLVADRTRTVNRLRAQLTGIFPGLERALDLTNTGPLTLLTGYQKPAAIRRLGAKRLKTWLRNRKVRSADQLAEAAVEAAERQHTSPPGEKLTAQLVHTLAREAMALNQQVAELDKAIEARFRDHHTFEVITSMPGLGIILGAEFLAATGGDMSVFGTPDRLAGFGGVAPVPRDSGKISGNIHRPQRYNRRLQRVFYTSALFSIRKCEESRLFYDRKRAEGKRHTQAVLALVRRRVNVLWAL

SEQ ID NO: 363434 - protein, 404 aa, unidentified
MKGPIVSIDVSKGKSDYQAFKDLNVKYTGSRSIKHNKEGFDEIVNLVREMEKKLETEVCVVYEATGVYHRVLKKVLEDNNIKQFIINPLLSAKTRKNDSLRSPKTDKLDPKSIAKTYYSHSLHNSHKQETIYHELRELSRYYEDILVHIRKDKVAFRAQLDIVFPGYDTLYDDLYGPVALAVIEKYPHPEMLQKKKINTVSKVIQSKTCHRQAMSDTMADKAIEYSKTIYSGCDKDDIEVLILQRFIKKLNEDMAEAERTIGEMIKLAQELPDFNIIKSIPGIGDNLAARIIAELGDMTRFKKKNELVAFAGLDPRISESGQNDGDHMHITKKGNKRLRCLLYLAVTCSIRLKRDDNSIKDFYIKKKQQSNPMCSKAAKTACASKLVRIIYSMCKTGELYQYNK

SEQ ID NO: 363435 - protein, 347 aa, unidentified
MSILAERVDVVIGVDTHTDSHTAALLTKAGALLAELTVTADDAGAATLLAWVAGRAEGQRRAWVVDGARSHGVGVSRYLLGAGEAVYDAARIPGAARRRGGKSDQLDAVQVARIALTATKVSIPRGDGDREALRILHTARRHYTDTRTATVNLLKSLILTAEDRLRAHLRTLNTDQQVRHLRHLDPATGLDTADRIRREHLHALATQIAVLDQALADNLKQLRTLVHAMCPALLDQPGVGPVSAAIALTAWSHKGRLRNEAAFAALAGVNPIPASSGRTVRHRLNRGGDRTLNAAAHTIATSRRMHHQHTRDYVARRTAEGKTPKEINRCLKRYIARQLFRIMQATA

SEQ ID NO: 363436 - protein, 408 aa, unidentified
MRLFVGDDWAEDHHDVEIQDESGHRLAKARVSEGVAGMARLHAMIATQIGETDPDTVEVLVGIETDRGPWVNALVAAGYQVFGVNPLQAKAYRKRLGVSGAKSDPADAHLLADMVRIDAHQLRQVAGDSAAAEAVKVITRTHKTLIWERTRHTLRLRHALRDYFPAALEAFTDLDAPDTLELLTLAPDPASAAALTITRISGVLKRARRHGIPDKAAKIHAALRTTQLGQPAVVTAAYAASVRALAAVLSTLNEQIKTLQGQVEAHFGAHPAAEVITSQPGLGTILGARVLAEFGDDPDRYASAKKRKNYAGTSPITVASGKRKVALARVVHKDRLIDALITQAAIAISKSPGARAYYNKQRARGSAYNTALRQLANRLVGILHGCLKTGTLYNEATAWPNHAQPLAT

SEQ ID NO: 363437 - protein, 357 aa, unidentified
MAQIKQLDFRGTTIYCGVDVHKKNWRVNIQDSEFELEDFSQDANAALLHKHLNRKYPGARFKVCYEAGFCGFSAQRYLSNNGIECWVINAADVATTDKEKRQKNDKIDARKLCEHLQTKKAKSVYIPQTSWEHGRSLVRARSRIVGNQTRSKNRIWQLLHFSGLTLPKNYEAGQYWSKNFIKALQALDCGSDALKTTLELYIKDYQQTRNLLLDATRAIRKLCAESPYKKLILLLRSIPSIGEINAAIMLFELQDVKRFKHLDHLCSYADLVPDTSDSGDTKVTKGITSRTNHFLRAALIESSWAAIRKDPALLMKYKAYCKKMDKNKAVIRIAKHLLARINYVLKNEKEYVTGVVA

SEQ ID NO: 363438 - protein, 318 aa, unidentified
MTQHNLVLAAGIDVSQRFLDVGLAPSGKTFRVPNAAEGIAAIVERLAQEGVGRVVLEAIGPYAQRLVSALAMAGFEVGLINPRRIKAFREFEGRRAKSDRLDARLIARFALAMTDAIRSLPTPEQLVLKALSTRRRQLTEMIAMEKTRLKQAIEPMLLASHRSAIQSLAAECASIESELARRVAEDPVLACTFEILTSIPGIGERVATALITELPEIGRTDRKAIASLAGLAPHISQSGNTPPRATISGGRPCVRSALYMAALVASRHNPQMQLAYQALRNQGKPAKLALIAIARKLLVTANAMVKSKTRYTPQILDR

SEQ ID NO: 363439 - protein, 343 aa, unidentified
MEQYVGLDVSQEQTSVCVIDGGGKVIWEGKCASTPEAIAATIRTRAPEAVRIGLESGPLSAWHWHELRKLGLPVVCLDARHVKAALALQLNKSDRNDARGLAQIVRTGWYREVAVKSVDSHLVRSLLITRAQLVRMRVDLANQIRGVLKPFGLIAGKGGGRAFAERVRALVAGGPLQEVAGALLAAWQAIGEQIAVLGRRLVAVARQNEAARRLMTAPGVGVLVALAYVSVVDTPERFARSSSVGAYIGLTPRRYQSGEEDYTGHISRCGDKLLRTYLYEAAGIILHRVPRWSVLKAWGTRLARRIGTRKATVAVARKLSVILHRMLRDGSEFRWSAKEVHAA

SEQ ID NO: 363440 - protein, 342 aa, unidentified
MKITTIGIDLAKTTLSVHGVDDNGKVVLRKSMSRSKLLEFMANREPCLVGMEACGGAHDLARRLIAMGHRARLMAARFVQPYRKSQKNDGNDAEAICEAVARPNMRFVPVKSAEQQALLSVHRVRLQLIETRTSLINQLRGLLAEFGILMPKGRYQLRTHATPALEHPDLPELARTVLKELNTRIQALDIEILSQDRRIEAYARDNVLAQRLIAICGIGPISASAIVASVGDAKLFKNGRQFCAWLGLVPRQYSTGGKARLGRITKRGDVYLRTLLVHGARSALNVLAKRTDRLSTWIQSLSARRGYKKAIVALAAKNARIAWAVLATGKPYEPRGCAQAAQ

SEQ ID NO: 363441 - protein, 429 aa, unidentified
MNYNTQNAKIASITEKTLIVGIDVGSETHYARAFSWRNYEYSKKPFAFNNDEAGFAAFKAWMEDMADKHGKEAVIPGMEPTGHYWLNLGAYLQEQGMKPVHVNPHHVKKSKELDDNNPNKNDRKDPKTIAGLVNEGRFSYPYIPTGIYAEIRNLSNLRIQTQEELTRIKNRIARWFSIYFPEIKDVYKNPDAVSGMMVIKKAPLPCDIKELGVDGVNQVWRDAKLKGAGLKRARILVSAAEHSIGSTEAPGSARIEIRNLLNDYEVYKNRIDDLMREIEAKLSEIPYIDKLMEINGIGLKTVSCFIAEVGDIRRFNNPKQLQKLAGYAIVADSSGKHNGESRISHRGRKRLRYALYEAAISVIGKNKEFREIHDYYRTRKQNPLKKMQSVIAIACKLIRIFYTILTKGVDYDGQKMLSDIVRPETIMAA

SEQ ID NO: 363442 - protein, 377 aa, unidentified
MSKIRFVGLDVHAETIAVAVAESGEEVRWLGIIPNREDSIRRLVKKLGPAEQLRACYEAGPTGYVVYWQLTQLSVKCEVVAPTLVPVKAGDRVKTDRRDAEKLARSYRSGDLTPVWVPDAQHEALRDLVRAREAAKKDQLRARHRLSKFLLRHGKRRPAGMKAWTQRHMRWVKSDVRFEQQGQEVTLLDYVNEVDHGGARVERLERAIDEAVKSAPERMLAVIEALQALRGIAQISAVTILAELGNVSRFPAPRQLMGYSGIVASEHSSGERSRRGGITKTGNAHLRRVVIEAAWAYRHRPRVGQMLHKRQKKLSEEVKEIAWKAQHRLYARYRKLSARGKNKQQVITAIGRELLGFIWAIGMKVEAEIWEPKGCVV

SEQ ID NO: 363443 - protein, 385 aa, unidentified
MRGKTFIPTDYDVFAGLDVDKRSISVTFTNHQGFIRSLRMPYNVEHLSNYVRKHFTDQKVAFAYEAGPTGYGLYDGLEAQAYPCLIASPSMIPKAPGQRVKTNRLDSRGLSENLRGGQLKSIHVPSAVYRELRHLTQLRDTFVSEVVGMKLRVKSLLLFEGIAFPPAPAGSQWSFMVRAKLRKLPCSGTVRFKLDQLLDSLEFSEKQVLKTTKEIRRFCQNDAELAQSIKYMMTICGIGWIVASQLLARIGDWHELKNVRQLGGFLGLVPTENSTGDKTDRGSITHSGDGRLRSKLIQAAWSAIRQDGELREFYRSVCRTHPRDRAARVAIVAVARKLTTRIAAVLMQQRPYVVREKVHSAPLTKEETVPQGTTRRQAEPGEQNS

SEQ ID NO: 363444 - protein, 360 aa, unidentified
MKKLTTIAVDLAKSVVEVAVSEVPGRVSLRKRLSRGGLVAFLANYPPAVVLMEACGSAHHWGREIVKMGHEVRLLPPAKSAKYRIGNKTDRTDTDALLEANRNERILPVPVKTIAQQTLASVHRLRVGWMGTRTARLNALRGVMRELGVAIPVGAKVVLPGVADAMARGQIPEDLHPLLQASMAEIRQLEENVKACERTLARIARSIPAAKVLQEVPGIGLLGSTALIPAVGDPNRFRSGRKMSAFFGIVPREHSSGSRRRLGSITKKGNTYVRTLVIHGGRSVLLAAHRRKNPDRLHRWALEVERRQGANRAAVAVANKILRIAWAVWTRGIPYDGSLTSPSPKPSVTNLTTPQSTGAF

SEQ ID NO: 363445 - protein, 344 aa, unidentified
MDHFAGLDVSVKETSICIVDDAGKIVREVKVASEPEALLAVLKNPAYHFKRIGLEAGPLSQWLFSALAEAGLPVICVETRHMQAVLKAQINKTDRNDARGIAQMMRAGLYRPVHVKTIRSQKLRMLLTHRKLLQSKAIAIENDLRGTLRNFGLKVGMVGKVKFEARIKELVENLPDLAALVEPMLIVRRTLREQIVILHRRLLAIVRDDEVCRRLMTTPGVGPVVALTYRATVDVPARFRKSKAVGAVFGLTCAKYQSGEVDRNGRISRCGDEMMRVMLYEAAQSMLHSKKWSWLKAWAMQVARRRGMKKAIVALARRLAVIMHRIWVDGTEFRWTRERATAAA

SEQ ID NO: 363446 - protein, 341 aa, unidentified
MKNLFIGVDFSKEKVDVAIIFADGLTETAARVFNEFKTTVSGYKQLVKWVEQNSCGIDSSLWLFCGENTGDYSKGLCNFLYGKGYDMWLENAKSIKDASGLRRLKSDRADASMIAEYAMRNYDKAIMYEPLSESLAQLRELFLYRQMVVRHRCSFQVRRGEKRLTMEKSPIKTMISQSGRHIVSELNKEVEKIDKRIAELIKSDEELTEVFTIVTSVPGIGTQNAVCLMVYTDNFRRFNYDSRKISCYYGIAPFGKDSGTSVHSDPHVHYMANRQIKAMLTQAALAAVNFNPVMARYYMRLVERGKKKQVALNNVKNKLVHLVTAMVRNRQIFTPEYKISA

SEQ ID NO: 363447 - protein, 344 aa, unidentified
MDYYAGLDVSLRSCALCIVDAKGTVLLERELPCEVSDIAVCLASFPHPIERVGFEAGTMSQHLFHGLKAEGFDVVCMEARQVNAALSAMRNKTDRTDARGIAQVLRTGWFSPVHMKSREAHGVRALLSTRKALLKKTMDLANEVRGLLKIFGIRLPMTVKHGSFDGVVRPLIEMDDVLAHALVPLLDARVVLYQHFLELDRRVKRAASHDEICLRMMTVPGVGPIASLTFKAAVDDPTRFKRSRTVGAHFGLTPRRYQSGEHDNPGRISKAGDRDVRATLYAAANALLMRTMAGSQIKSWGMRLIRTKGRRRAVVAVARKLAVLLHRMWIDGTEFRQDQVGGTA

SEQ ID NO: 363448 - protein, 335 aa, unidentified
MKQPPKVLAGLDVGATELVVAILRDGQRESPCTLPNTPAGHRRLLKLLTRRKATARVCLEATGVYSLRLALTLQRAERLEAMVVNPRAIKDFQRARLTRAKTDRLDALGILEFLQRMEFVAWRPPTDAVLALQQLGRRLVQLRGELTREEARLHAIAYTPDRDGLIAADLAANIRHLKKRIKALQQAAAELAAREPELASQLERLCSVPGIGKVSALRLLGELLVLPRELKAKQWVAHAGLDPRPRQSGTKDAPRHISRTGNRHLRLALFMPALVAIQRSPQIQATYEALLARGKKKKVAIIAIMRRMLHAIWGMLHHQQDFNPQLFHAAPLPNS

SEQ ID NO: 363449 - protein, 370 aa, unidentified
MSVRRILAKTIDTDLEYEAIGIDLAKNCVSAALLTTDGEVVCIDRLDYSELEKSAQALSSTTFAMEPCTEMNYLVQKLEAWGHRCLVIGGKNVQNYVENHFSGQKTDLNDAQALAFLAQDTQLRTIKAKDVEQQKYASLTTLREQYIKQYRQTIVSLKGICQAWGLNISKGISGKARLKDLIENHAAFPEELKESLVDMVTHAQTTQKVLNKITKTLEVLAKNDKVCQLIQTIPGLGTICSCRLRATIGDIKRFKNPKDFPAYYGLVPRSIATGHNEKKGKITHRGDRTMRSLMVQGAGCVIRLATCGKLKSKQLTKWILKKQKEKMPWGKLVCAVAAKLLRIVRAILISSKPYNPKIAGVAKCSLSKGS

SEQ ID NO: 363450 - protein, 427 aa, unidentified
MRFYTTPHRYYCGIDLHARRMYICVLDAEGKILVHRNGPATPEHLLATIAAYREDVVVAVECIFTWYWVADLCAQEGIPFVLGHALYMKAIHGGKAKNDKIDAHKIAVLLRGGMLPMAYVYPRAMRATRDLLRRRCHFMRKRAELITHIQNTASQCLLPRFGKKIAYHGNRTDLAEHFTDPEVRKSIETNLALLDHYDRLLTDLELHLTRSAKVHDVNAFYRLRSVPGIGKILALVLLYEIHDIHRFPRVQDFASYCRLVKCAKESDGKHYGYSGAKIGNAHLKWAFSEAAVLCLRGNPAAQRYVARLAHKHGKAKALTILAHKLARAVYFMLSRGHAFDATKFFSGSAASGQAVGTPAGAPDTTSDAASPVRRAVGLDDAARPGAPRPVREGGRYLTTPEIAPSTEELSLAVDDGGMSMLSMLREP

SEQ ID NO: 363451 - protein, 334 aa, unidentified
MENIALIGIDLGKNSFHIHCQNRRGKAVYRKKFTRPKLIEFLATCPATTIAMEACGGSHFMARKLEELGHSPKLISPQFVRPFVKSNKNDFVDAEAICEAASRPSMRFVQPRTESQQAMRALHRVRESLVQDKVKTTNQMHAFLLEFGISVPRGAAVISRLSTILEDNSLPLYLSQLLLKLQQHYHYLVEQIKDLESQLKRKLDEDEVGQRLLSIPCVGTLTASTISTEIGDGKQYASSRDFAAATGLVPRQYSTGGRTTLLGISKRGNKKIRTLLVQCARVFIQKLEHQSGKLADWVRDLLCRKSNFVVTCALANKLARIAWALTARQQTYVA

SEQ ID NO: 363452 - protein, 404 aa, unidentified
MITCGVDPSRESFSVSFVENMIEFDYKKYENSPRGFEQFIKSIKPLKNTPKVCIEGYGDFAKQLAIYLKTKKVSVYEINPKMSTRLKESMTEHKTDHIDAFSCSLFPYFRNDLKELTLDMRIEGLRNLCRLYIKVSKQVTQLKNQLHAALNQNFGPLYKKFFRKLNNTSINFYIQYGSYEEIEKASVEEIHKTLKEGGSCMYKGRYGKKRAEEIKEIVKELNYHPLLEFGRIQSEVIKAYAKMLLIVEEQKKKIKESIVKYIKKFFPDYKKYFVGIKGMSELQFAQLISEVRDINKFRNDAHLASYCGQSPRTYQSASSNKTRTKRNYNRYLAHLIHMVTCENIKKGERFYEEYTRMQIKYSKKLRAMKNIKRKIVRLLYYKLKDYMSYLNHDKGIKRVMLNVA

SEQ ID NO: 363453 - protein, 448 aa, unidentified
MSGGGKLTRGDRRRNERLGRLRSLVRRDFAVLGVDLAAGKQAAAVCDHDSRVLARRMFTGDAWVIEEILDWAAPIAAGAGFAGIVLGCEPTGHRWKPLLDRARARGIELVCVNPMLVHRGREEEDFTRDRSDFKDATIIAKRVSELRCYVPYQLEGHWCRLRHLGARRDHQLVAATAARQCLRDLLECAWPAVLRVAARPLEAIAWRAAMSVSTTPEVIAAMSYNAFADAVGVELGRWGGTRRNHRVLRAIHAAAREPGGVLGERAAACERAEFALADWHRALEQLTEVETRMLACLDALELDELATTVPGVSPVGVAAILAQTGDPDRYDSARTWVKHAGLCPRDNESGTFAGTTTISRRGRPALRTAAWRAVWAALHHNPVYRARYEHLTTRTNNPLRDGQARTAIAAALLRQLFIVLTRRVAWDPDIAAGRAHELATAKVAPRAA

SEQ ID NO: 363454 - protein, 415 aa, unidentified
MSLKIVYKICCGIDVHKTFVVACIASTNDKGVTSYESHRFSTYTSGLKTLLQWLLKRNCKYVCMESTGKYWIPVYNILENDCSIVLAHPKYVKAIRGKKTDKKDAKWIADLFKHDLVAGSFMPPADIRQLRDLMRYRFKLTCFQSSEKNRLQNCLTVSNIQLGNVVSDTFGKSAQAILDKLLENPADTSFDLEPLVYKSLKKKLPQLRDAINGYITPEQVGKLKVIKAHYESLESRKAELEELILAIAAPYQQELAILKTAPGIRSDFTAIGIISEIGTNMEAFPSAKHLCSWAGLTPTNNESAGKKKSVRVSKAGCYIKPLLVQCANAVVTSKKHPEIRNRYLRLKKRRGHKKAIIAIARMLLTALYHMLKNGENYNAELYRKYDLTPVDREITVEQAIIIARNQGYKIKSATA

SEQ ID NO: 363455 - protein, 368 aa, unidentified
MKKASTVTAKQSRNISQQKLTIGLDLGDRNSWYCVVDEAGQIQLEQRVRTSAKALQEVFGAMPRSRIALEIGTHSPWISRLLSEWGHEVIVANARKVRLIGESRKKDDRLDAQALARLARIDPELLYPVKHRSAQAQADLAVIRARAGLVRARTGLVNTARGLAKSYGQRLRGCNVRNMNAEKAESLSPELQTVLAPLLAAIESLSERIVEYNERIESLAQESYPQVALLKQIKGVGTLIALTFLLTLEDPHRFRKSRDVGGYLGLQPGRRKSGQSEPQMHISKEGDPYLRTLLVQGAQHILGPFGIDCDLRRWGLKLAERGGRNGKKRAIVATARKLAVLLHHLWVSGEVYEPLHNSSGMTVAAAAA

SEQ ID NO: 363456 - protein, 386 aa, unidentified
MSQTIAALIPAAVDYEKTLVLAIELSNKSWVLAAQVPGLPHTKASRTVDPAEALLAAIAGYRARAAAAGRSIERMIAVYEAGWSGFWLARWLVRHGVEVHVIQPSSVPVDRRMRRAKSDGIDAELLLRTLLAWLRGEPRVCSMVPVPDEADEDARRCVRERTELISERVGLTNRIGAVLATLGVSDYNPLLRNRNRRLAELRTGLGEPLPRNAHAKIERLLARLELVLAQIAELERERDAVVETEASDKASKMIQQLASLRGIGIQSATVLVREAFVRCFANGKALGSYAGLASSPFSSGAIEREQGIGKAGNRRVRTVMVELAWLWTRYQPDAAQVCWFRERVGSTGRRVRKIMVVALARKLLIALWRFVTEGVVPEGAVLKPAA

SEQ ID NO: 363457 - protein, 375 aa, unidentified
MNNNNTLYVGLDVHKESITVAYAINSEPVELMGKIGTSPTDIQNLCKRLRSKSSQVSIVYEAGPCGYGLYRRLVKSGFDCMVCAPSLIPKKTGERVKTDRRDAIRLVRSLRAGDLSAVYVPGIEDEAFRDLARAWASARDDLRHARQRLKSFLLVHGVHYVGRADWGPAHRRWLSKYSFESPWRQLAFDEHRRTIEDRQAQCERLESALKEAVTEWRLYPVVEALQAMRGIQFITAVGLISELGDLTRFEHPRQLMSWFGITPSEYSSGGSRHQGSITKAGNSYARKLLVEAAWSYRHPARISPAIQKRQENLPRPVIDRAWDAQLRLCKRYRKLQAKGKNVNITIVAVARELAGFIWDMGRIAMSVAQQPQCHK

SEQ ID NO: 363458 - protein, 409 aa, unidentified
MENHNHKVYVGIDVHRREHIVAIMPVVLLHQTRPNWKGAKILTIKNERSDFERLDAAIREHVQYPEEAAIAVDHTGGHYSEPLVYYLQSKRYTVCHLETKAVKGAREHLLDEENKSDTIDATGAAYLLYLRDVHGLSFGISLVAPELGSKASTLRSLILQRQQYVKMATQFTNRLHQFLLAVFPEAEAKHFTKLLRVASLYPTPKDILASQGLKGVKYLSSMDRDVIMALATQTVGVPAELYRGLIQNLSQQRNEAIAKREEITGLISEEVINHLYGPILLSFPKFGAIAAASVIGVVNDINRWPDKRKLKKALGVYSTLKESGTSSTKGREGKEGSRETRRALCQVVFRYIQSRSPDNDFKDYYLRQVARGKPKLKAVVSTMGKLAEIIYHCLKTEEFYQNQGKYRLD

SEQ ID NO: 363459 - protein, 347 aa, unidentified
MRFYTTQHPFYCGIDLHARTMYVCILSQSGEVLVHRNMKTDPDTFLHVVAPYRQGLVVAVECLFTWYWLADLCADEGIPFVLGHALYMKAIHGGKAKNDKIDSQKIAALLRGGMLPQAYVYPARMRATRDLLRRRMHLAHKRAELLAHVQNTNSQYNLPAIGKKIAYKANREGVAERFADPAVQKSIEVDLALITYYDELLRDVELTIVKTARHHDANTLHLLQTVPGIGKILSLVLLYEIHDVHRFPRVQDFVSYCRLVKCARESAGKRYGTSGTKIGNAHLKWAFSEAAVLFLRDHPAAQKYLARLEKKHEKGKALTIRAQKLARAVYHMLTRQVAFDREMFFQR

SEQ ID NO: 363460 - protein, 385 aa, unidentified
MQRNDLSRSLVAFDQNSTVVAVVELSLESWVVSGVVPGVKRQPLKKLPADRERLLALLERWRDEAIKAGHAISRIAVAFEAGRDGFWLARWLRARGIEAYVIHASSIAMPREHRRAKTDRLDTEALMRAFLGWLRGEARHCRMAAIPTLEQEDAKRPTREHESLVAERTRLVNRMKATLIRLGIRTFNVKLRKAAEGLAALRTPEGEPVPPNTLAELRRDLERLVLIRRHIQAIEQARLQRLEAAPAQGTHPMILMLAKILGLGIETADMLVHEVLARGLRDQRAVGRYGGLTGSPDESGSKRREQGLAKAGNARVRRGMLQLAWRWLMFQKDSALTQWYRARTANGRGDTRKTMIVALARKLLIALWRYVTTGEVPAGVVLKAA

SEQ ID NO: 363461 - protein, 353 aa, unidentified
MFIDELKNIIIDTTLIEHNKNEFDNLFNSIKNYSNLIVVMESTSIYHLPVENYFRSKGIDTVVMNPKLVKQFKDTLNKSKTDKLDCFKIARCYLGTIDNFYYKNDEYFMYNPLARQYWSLFEGQTRLKNRYKQLIEIVFPEFNLVFNDLYDDLALNFIHDFPHSILFVNTRFDDKYQFVSFLGIDSVTSQSGISAYHGAISKTGCKFGRTILFNVVTIILQISAHANTSNSIYLFFRKKQSEGKHHYKCIIACETKLYKIIYKLCSSNCLYENTSSTRRPPWRNTARTLPMCGRTRRLSWPRAPTGGCRALPVRTCGMSARRTRGMSRRRSTARPTASVRASAGGCTARCWRF

SEQ ID NO: 363462 - protein, 343 aa, unidentified
MQAITTVGLDIAKSVFQVHGVDATGKVLIRRQLKRRHVLPFFERLAACVVGMEACATSHHWSRQLRALGHTVRLMPPAYVKPYVKRQKNDAADAEAICEAVTRANMRFVETKTPEQQACLMLHRTRYLFIRQQTSVINAIRAHMAEFGIVARVGRTGVAELLAVAGDPRDRRLPEVARTCVAALGVQLRMLKAQILEFDRRIGAWHRSNQTSQQLDQIPGIGPALATALVASVPDPKAFRSGRNFSAWIGLVPKQHSSGGKDRLGSISKQGDRYLRGLFTAGALAVIRYAKLHGTEHRPWLTALLARRPTKVAAIALANKLARMAWAVMAKGERYKEPAALAA

SEQ ID NO: 363463 - protein, 348 aa, unidentified
MLADELDFVIGVDSHRDAHALAFVSARTGALLAEAELPASAPGYRRALALAEWLAPAGRLWAIEGTGSDGAGLTRFLAGRGERVLEIERRAREPRRAGAKSDRIDALRAARAALAHARLAVPRAAGQREPLRALLSTREGAVGARRAALNQLRALLVTAPEPLRARLRGLSEARLLAACTRLRPATSRHPGQRGLAIALRACARRVRSTSAEAGELKRELELLVGELAPQLLAEEAVGPICAAQLVVSWSHAGRFASEAGFARHAGAAPIPASSGQVVRSRLDRGGDRQLNRALHTILVARHKRHAPTIAYIERRRSKGKSVREALRCLKRFLARHLFRVLEAGPLAT

SEQ ID NO: 363464 - protein, 400 aa, unidentified
MDDIDDVGVFLGLDVGKSSHHGHGLTPAGKKVFDKQLPNSEPKLRAVFDKLAAKFGTVLVIVDQPASIGALPLTVARDAGCKVAYLPGLSMRRIADLYPGEAKTDAKDAAVIADAARTMPHTLRSLELTDEITAELTVLVGFDQDLAAEATRTSNRIRGLLTQFHPSLERVLGPRLDHPAVTWLLERHGSPAALRKAGRRKLVEVIRPKAPRMAQRLIDEVFDALDEQTVVVPGTGTLDLVIPSLARSLATVHEQRRALEAQIGQLLEAHPLSAVLTSIPGVAVRTAATLLVTVGDGTSFPTAAHLASYAGLAPTTKSSGTSIHGEHAPRGGNRQLKRAMFLSAFAALHDPASRTYYDRCRARGKTHTQALLRLARQRINVLFAMLRDGTFYEPRTPRLA

SEQ ID NO: 363465 - protein, 371 aa, unidentified
MKSIIYIGMDVHKKTYSLCALLKETGEIIGETKIPADVSLIIKFIENAKKSVDSDDVQIKTGYEAGCLGYSLYWQLAAKGIECDILAPSTMHRSAKNKVVKNDRRDAKNIAANLANGTYKSVYVPTDEDVEIKEYIRMMHDFKIELKKVKQHINAFLLRFGHHYPGKSKWIPAHIKWLKELELSDMYREILDEYLSQLEILSEKIERFKYRLEELSQKETYNEKIGQLRCIKGIDTTAAMTMHAETSDFDRFPTANAFASYCGLTPGEDSSGDSYHRLGITKQGNSMIRTTLVEAAQVLVRGTIGKKGKKVKSKQKDQDVKVIDYADKAVVRLQKKYHRMIFRGVKRNIAITAVARERACFVWGIETGHIS

SEQ ID NO: 363466 - protein, 414 aa, unidentified
MSDVIYERCAGIDVHKKMIVVALRIGIKVQIRQFGTLTHELKEMTSWLMENECQMAAMESSGSYWKPLYNIFELEGLPAMVVNAHHMKAVPGRKTDVKDAEWIAKLLSQGLLRASFIPDREQREMRELTRFRKNQMEERARNLNRLQKMLEGANIKLSGFVSEIDGKSATKFLELIIGNPDFTAQDVKSRMHGSLKASAEELFLSLEGIITPLQRELFGHVMKIIREQTTQIEYTDSLIQSHTKEVYSEAAKALTSIPGIGMVSAQQIVAEIGYDMRRFPTAAHLCNWAGICPGNNESAGKRKNGKTNYANKTLKSTLTQCAQSAKKSKKSFFCAQYQRIVVRRGKNRATVAVAHSMLIAIYHVLKGAAFIDLGAEYYMKFNKEKKINSYVKQLAKLGVIIPDDDLRSYMQGVA

SEQ ID NO: 363467 - protein, 421 aa, unidentified
MGKLIERCAGIDIGKRFLVCCVMTGAAHEEPRSETRRFDTTVPGLKRLRNWVNEERVTDVVMESTGSYWIPVFNLLEGHVTVVLANPEEVKNRKGHKTDRKDAGHLADLLRHNHVKSSYIPAEPVRQLRDLTRRRVQLTQDATRERNRVQKLLEQVNVKIGSVLTDVFGVSGLHMLLALLDGRAAPEEIAGLARGSAKRKTPQLIEALEGNRMSDHVRFLIRGCLRHLACLEEEVEELDAEILRRMQLSTFQKAFTLLQTIPGVGQLSAATILAETGPDLDSFPTIEQMASWAGLCPGNRESGGIQKGPQTTHGNPYLCTALVQCAWAATRKRDSVFRSRFQRLAPRRGEKRAIIAVAHHMLIILYYMLKRGVPFLGAEHAPKQRRRERRAHHHLRCLRRLGFSVEIRLSSESTPPDTISR

SEQ ID NO: 363468 - protein, 412 aa, unidentified
MVLLLQMALPVSTLVVAIDPGKVANRVWLSTDEDGLVVEPLSLSVLRPGLDELDRLVRAHVGVGSPVFAIEATGALHRAWVAELSRRFPGSVRVFAPSETAAARAQVGSRRFKTDDRDCAALTYLARQGYGRSVSSDEHEALLGSVRARRALVGDRKVAQQRLHDQVNALCPGLSAPPGHGRKLDLFGVTGQAVLDCLIAFDARPVAARSLIARAPGRLTAANAAFWAARWKDCLPPPVDVAARVERLERSVARWRALSADIAMIDTDIAVLLAQTEGQVLTTLPGVKTARAAAFAAFSMPIARFPTAERLYCATGLAPSAYQSSTIEQRRGISRQGLPEHRDALMNMAWGLSMYCEPFIQRAEELTKRGMKPMQTRVALARHVCRLAHAMMTRQDEFDEQRYRQNRHQAGR

SEQ ID NO: 363469 - protein, 382 aa, unidentified
MEMLHRCCAGLDVHKKSVVAWIRRITDDGRLEEKVCYFGTTTAELLALADWLAAAGARQVAMETTGVSWKPVFNLLEPHFEVMLVNPQHLKKVPGRKTDVSDSQWIAELLQHGLLRPSFIPPPEIRQLRDLTRPRSQLVRHRATACNRIQKVLEDANIKLAAVAADILGVSGRAMLWALVEGVEDPAVLAELARGRMRSKLPALREALQGRVLDHHRFQRRERLGQVNERDERIARLSGRIARVLAPHAAELERLQTIPGVDIRAAEGILAEIGVDMSRFATAGPLCRWAGMAPGNNPSAGKRKGGRTTTGSRWLRSVLVQAAWAASPTQATILGATYRRWFKRRGRKRALVALGHKILVLIHTMLSDGTEYEERLGPEEAA

SEQ ID NO: 363470 - protein, 457 aa, unidentified
MSQRKRKPRKSKINVNRLPRHLRHININAAGIDIGSDRHLVAVPEGRDDVSVRQFGAFTSDLNDIADWLEKCGVTTVAMESTGVYWIPLFELLEQRGFEVKLVDARHVKNVSGRKSDVLDCQWLQQLHTYGLLQGAFRPPDEICILRSYVRQKEMLTQASSMHIQHMQKGLQQMNLLLHNVVSDITGVTGMKIIKAILAGERDPNVLALNRQEGCRNSKETIAKSLVGNFRDDHMFALKQAVELYEIYQAKIAECEQALIKHLGTQPNVTDDQPPDSAKPVRARERIRADVDVREKLFKITGVDLFAIPGLAADTLLILASEVGFDMRPWKSDKHFTSWLGLCPGTKISGGKALDRRTKRTANRGAQAFRMAAASLARTQTALGAFYRRIRSRTDGRRAITATAHKIARIYYSMLTKGTSYVEAGQQAYEQMYKERRINAIKKQALSLGYQLQPCAS

SEQ ID NO: 363471 - protein, 338 aa, unidentified
MYRIVLFVGLDYHDVWIQVCVMDAEGRVLLNRRCVNDWRAIVAMVEQVRPGAMIQVAIEACSGAANLADELIEHTHWSVDVAHPGYVARMKRNPDKHDFGDARMLADLERVGYVPRVWLAPEAVRELRRLVRYRQQRVDEARDARLRIRALLREHRVRSPYRAWSRGWLAWLREEVEVPEQSRWIIGQHLASIERLQQALREVEKRLAEATREDTLVERLLEQPGIGPVTAWTIRAEIGRFDRFRTGKQLARFCAVTPRNASSGCRQADAGLIEAGSRQLRGVLIEAAHRLARYHPRWSALAASLRARGKSGSLVAAAIANRWVRWLYHQMQAEPVAA

SEQ ID NO: 363472 - protein, 280 aa, unidentified
MLAVGVDTHKESLAACAVDEVGRPVAEGSFSNDVKGHRALRGWLNRFPQPRRVGLEGAANFGALLARALLDAGEDVREVPSILTRRERRRTGRPGKSDPTDALAIARVVARDEHLPPALPGGANQDLKLLVDYRDQLISERTRVQNRLHADLMILVPGYRARVRRLTTKGQREQAARLLRAVPGVRAHLALRRLGRLEEIGAEVAVLTERIESAIQQRDTHLTSIVGVGAITAAKLLGETGDARRFRSMAGFAMACGAAPIPASSGQTNRHRLNRGETGS

SEQ ID NO: 363473 - protein, 343 aa, unidentified
MKNTIVGVDLAKDVIQVCIYTNKKVRSNIEMTPPEFIEFLANYTSLTIVFEACGTSNYWKQKAISLGHDARLISAKLVSVVRQNQKTDKNDALAIIQAALLPDVTFISGKSIEQQQLQSIMRLRELCVKQKTAAGNQLTSLLLEFNIKVSSRNNGLKGAVESTLEDAENGFSFEFRKALSEAWQLYLSVIKSIHTYDECLECAIEGHTDCKKLRQIEGVGTLNAINLYIALGCADLGVFNKGKDASACIGLTPIQYSSGGVTKLGSIGKYVKSSVLRSQLITGAMSAVNHATRRKAKTKKDQWIQEMVERRGKKCTAVALANKTVRTAFAMLTQNTEYKAELI

SEQ ID NO: 363474 - protein, 356 aa, unidentified
MTIVAHAHPFVIGVDTHARNHALVILAAATGEVIDAEQFPATAAGLGRAMSWVGRRTGADLDALWVIEGVGTYGARLARAAAEAGYQVVEAARMNARANRGVGKSDPLDARRIAAAVLPLETADLRYPRRDDGERAALRVLVAARDHMTRERTATINALIALLRAVDLGIDARRPLNGNQIAEIAHWRTRRTEDLATATARAEAIRLAKRVVGLDEELAANHSRMEHVVRMTPAAGLLEKTGIGPVTAAIAITAWSHPGRVRSEAAFACLAGVNPIPASSGNTTRHRLNRGGDRRLNRALHMATITRMRSDPATRAYVERRRAEGRSTKEIRRCLKRYLARQIFRYLNTSAAVTPA

SEQ ID NO: 363475 - protein, 323 aa, unidentified
MNHKVGNDNTVARFIGIDVSKQWLDVACLPERETRRFGNDCAGLEQLCAWIVPLAPELIVMEATGGFETNVATALAARGLALAVVNPKHVRDFARAFGILAKTDRIDALVLAAFAQKVHPPVRPLPDEERRELIDLVDRRRQLVTMRAEEKTRLTQATPAARQDIKEHIEWLNERLRRLDIDLTAKLRSSSLWKTKEQILTSAPGVGRVTVATLVARLPELGTLNRRAIAALTGVAPFARDSGQHRGRRMIWGGRADVRNVLYMATVTAARINPVIRSFYLRLKQAGKPPKVALTACMRKLLTILNTMVRNNQPWQIPPTQTI

SEQ ID NO: 363476 - protein, 419 aa, unidentified
MNYVGFDWASRAHDVTVLDEAGGVLDRWAFPHSETGWVTTLDRLARHGSAAEVPVIIERTCGLIVDRLLAAGHPVVPVHPTAFYAARPRWGASGAKSDPGDSYKLADYLRTDGHRLRRLTPTDPGLHELQALVRLRDDQVRARTAATNQLTAILDNYWPGPKQLFMSLASQIALAFLTDYPTPTSAAHLGEARMAAFCRRHAYRGGKSPAELLSRLRAAPVAPVGLPPATLAAMVTAQVTLLKTLQTVISDVERLIAVRVVAHPRSNLFENLPGVGMINLAQLLAEVGPILDRVDSAEQAATECGAAPVTRSSGQTRGVYFRWAANTRARKAITSFAHNARMQDDWAAALYADARARGKRNPHATRIVARAWLRVIWACWTSGQPYNLDRHHSSRFLHRCHPAGAQARSRWSPPPEERS

SEQ ID NO: 363477 - protein, 377 aa, unidentified
MNALGDINCLMKTQNTVPIVPNITPVVPSGFTLGLDLGDRAHHVCVLDAAGNIVREASLPNTRPALAQLLAEFPRATVALEAGTHSPWISRHLTGLGATVLVANPRKLHAISRSERKCDRRDAQMLARLARVDPALLHPIQHGTAQAQHDLLGLKLRDALVRTRVNLINAVRFTLKSLGHSVRNPSSESFHKTVLADIPADCLPVVQPLLAVLAQITAEIKGMERDLVQRSKKDYPATQRLQQITGVGPLTALCFVLKIGDPQRFSRGRDVGAYLGLCPRRDQSGGTDKQLRISKCGDGLLRRLLVSAAHYVLGPFGPACALREHGQRLTGTGSGREKKRAVVAVARKLAVLLLSLWKHGTDYEPRVTTSALVLTPA

SEQ ID NO: 363478 - protein, 417 aa, unidentified
MQVIYQRCAGLDIHKKTVVACRRDGKKRQEINTFGTTTPELLEMVDWLLEWKCTHVAMESTGDYWKPVYNLLEGNLEVLLVNAQHVKYVPGRKTDVKDAEWLADLLQHGLLKASFIPPAPQRVLRDLTRYRSNLVQERASVVNRVQKLLESANIKLSSVATDILGVSGRAMLDAIVTGHTAPETMAQLAKGRLRNKIPQLEKALIGIVLDHHRFLLAKQLAHIDFLDEQIASISAEIDGQIHKMGQSQKPKALNTEQAVELLDTIPGVDKTTAEVIVAELGTDMSRFRTSSHAASWAGLSPGNHQSGGKHYSGRTRKGNRALRSGLVQAAWAASRTRDTYLSAQYRRLASRRGNKRAIVAVAHSILVIAYHILDRQQPYQELGANYFDERRKESVLHRLMKRINNLGYQVSLEPTVA

SEQ ID NO: 363479 - protein, 355 aa, unidentified
MSQEKYIGMDVHQATISVAVMDAHGKLIMECLLETKAATIVEFIGGLHGTLSLTFEEGTSAAWLHDLLKPHVSRLVVCDPRKNALLKDGNKSDRIDARKLAELLRGDQLHPVYHGEHGVRTLKELGRSYLTITQDVTRVMNRIKALYRSWAIPCAGATVYSPRHRAEWLAKIAEPGVRVRAERLYQQLDLLQPVRLEARRELLAEGHKHSAVKLLRQIPSIGPIRSALLVALLQTPHRFRTKRQLWAYSGFAVQTHDSGEYRSVRGKLQRNRERMTVRGLNDNHNRDLKNLFKSAAISASTRPGPLRDFFVARVEKGMRPTMARLTLARKLAAISLTVWKKGVEFDPHQLQRQAA

SEQ ID NO: 363480 - protein, 320 aa, unidentified
MQSPSAVFNIGVDVAKAEIMVASAEGNFVTRKIANQRAALIGFLKLLPAASRIGIESTGSYHELLADLAHQRGFVVYVLNPKDTHHYAKAMGLRGKTDRVDAELIARMVEREHEKLHPWIPPTPQQREIDRLLKRRATLTGLRVSLTLSMTGVRGFGSDLKALRLRFDQLIARIDARVKELVEARPERKQDYLRLRKINGVGLVVGTTLVNTLERVPLRSADAFVAFTGLDPRPMESGQYRGRRRLSKRGPSELRRLLYLAAMAAAKTKTWKPLYEHYRAKGLSSTATLVVLARRIARTAWSIYNHKTEFDPKRLTSALT

SEQ ID NO: 363481 - protein, 320 aa, unidentified
MIPAAAVIGIDVSRDWLDGFCASSGHRIRLPNTAEGHVELLTQIQNLPQPVRVGFEATGGQEWVLWSTLVAAGVDAVQLPPAQIKAFALSRGTRAKTDRIDAELIARFMLFRPEAGRKLPGENLRSLRTLTTRRAQLVEMRKRLSAQIAARRKQQVPADLEGMDANLLAVLDAQVDDLEQRIKGVIGQEATSAAKARPLLSIPGIGPVSAAMLIAEMPELGRMTSGEAAAMTGLAPIPHDSGSMRGKRAIAGGRRALRHGLFQAALAAACHNPVLKPVAQALNIRGKPHKLIVVAIARRLLTIANAILKTGVPWQTQPDR

SEQ ID NO: 363482 - protein, 390 aa, unidentified
MRCKKGDRHMKKNSIAKLQVTKSQLRRKAAKQRLTVGLDLGDRTSRYCILDEAGEKAGENQLPTSRAGMDAVFAKMAPSRVALEVGTHSPWVSRQLAGMGHEVMVANPRKVRLISQSVKKNDRMDAEQLARLARVDPKLLSPIRHRGAEVQADLAVIRARAGLVESRTGLINTARGLVKPMGERLKKCDADQVREALGEGLSEEAQNVIGPLLKSVEEITKQIQVYEQKIEEIEKRYPETKVLKQVSGVGRLVALTFVLTVEDAERFEHSRDIGPYLGLTRKQRDSGESQPELGISKAGDELLRWLLVQAAHCILRRGAPESDLREWGLRKVQAVGGKKGGKTRKKKAAVGVARKLAVLLHRLWVTGEVYDPQYNRKARETAKGKRKAAA

SEQ ID NO: 363483 - protein, 355 aa, unidentified
MDNLRYIGLDVHRDTISAAVLNREGQLLMQSVLPTRAPALLDFLHGIRGTLHVTFEEGVHSAWLYDLLQRRVAGVLVCDPRKTRLLKSGNKGDLIDARKLAELLRNNSLSPVYHGGMSALEVQQRTRCYTMLTEDTTRIMSRLKAIYRSQAVHYHGRSIYRPDQRESYLAQLPTPGLRLRAELLYKELDAVHRLRLRAKREMLAECRKHPAIKSLRSVPFLGKVRTAVLIGRVQTPHRFRTKRQFWSYCGLALETHDSAQYHVVHGQVERKPRSVQVRGLNWNHSHELKDVFKSAATMAAHKDGIFREFYNGLLGKGMRPEMARLTLARKLAAITLKIWKEGGTFNAEYIKPQAA

SEQ ID NO: 363484 - protein, 415 aa, unidentified
MTEQFRYYVGLDWARESHRVRVLDMQGKRVAERDVSHRGADLLELCSWLVVRTGAQAAEIAVAIERPRGPVVEILLEHGFAVFAINPKQLDRFRDRFSVAGAKDDSRDAHVMADSLRTDQHAFRRLAVDDPLIIQLREWLRIYDELTRQRTRLANRVREQLWRYYPQAAELTDDVAADWFLDVWQRVPSPAAAARATQKTIAAILQKHRIRRLNGSEALSILQQQPLVVAAGTVEAATAHIGSMAAQLRLLNRQIKEAEQRLDELCAAIETSPPGQICEQRDVAILRSFPGLGRITMAALLGEALEPLRRREYQALRSLSGSAPVSRRSGKSWIVLRRHACNNRLRNAVYHWSRVAIQHDAVSRQRYHALRQRGHGHSRAIRGVGDRLLYVLCTLLKRQTLYDPSDRNSEVTIAA

SEQ ID NO: 363485 - protein, 357 aa, unidentified
MQNKNTEVDFSNQKFFLGIDVHKKNWKITIRTSQMELKTFSMNPQPGELANYLQRNYPNGEFRSVYETGFCGYWIDKQLRQLGVQNIIVNAADVPSKGKERVNKDDIIDSKKLARELENGTINGIFIPDDYYEGIRSLCRLRYSVTKEQTRIKIRIKSLLTYYGKEFPENYELKNWSGKFINFLEGIEFNQVTSKQTLNHLVEELKDKKQRLAKIIRDLRDSTDTAGLGNKIKQLMSIPGVSFITAITFYTEIMDMRRFKRLDELCSFVGLVPSTYSSGDRERVLGLSNRQNKYLRNLLFESSWVAVRNDPALTIKFGELIQKMAKQKAIIRIAKKLLNRMRHVWLNDVEYVKAVVK

SEQ ID NO: 363486 - protein, 343 aa, unidentified
MQTITTIGFDIAKSVFQVHGVDAAGQVVIRRQLKRRHVPAFFEKLPPCLVGIEACASSHHWSRELQALGHTVRLMPPAYVKPYVKRQKNDMADAEAICEAVTRANMRFVPTKTPEQQSCLMLHRTRHMFIRQQTAVINSIRAHLAEFGIVAPVGRKGVTELLHIVANPNDKRVPEVARACLAALGNQLLRLKEQILAFDRLIMAWYRSNQTSKRLHYIPGVGPMLATALVASVADPRTFRSGRNFSVWIGLVPKQHSSGGKDRLGSISKQGDRYLRSLFVAGALAVIRYAKIHGTGHRPWLTALLTRRPTKVAAIALANKIARMAWAMMARGERYKQPAALAR

SEQ ID NO: 363487 - protein, 368 aa, unidentified
MKQEVCAGIDLHSNNVMIGIVDENGRRLKHQKLGCDLEQIEGFLQPWKERLRSVAVESTYNWYWLVDGLRRRGYPTHLANPARMEQYSGIKHADDKNDAFFLAELQRLDILPTGYIYDPALRPVRDLLRRRQSLVRQRTALLLSFKSLYARTTGEAMPLRKVKMMEPDESKTLYEHPANSLIASLQKEHIDKLSQSIALIEKNVLSCARELPCYENLLSLPGVGRILGMTIRLEVGDISRFKTSGHFASYCRTVDSRRLSNDKKKGENNRKCGNRYLAWAFVEAANYAKRHHDHCRQWFDRKAAKTNTIIATKALACKLAKAAWYLMSEGSNYDPKRMCPQVRMKNEKLKIVRTAVSQDKGLAKSPRL

SEQ ID NO: 363488 - protein, 347 aa, unidentified
MNFYHSTHRHYCGIDLHARSLYVCIIDQQGEVLLHKEIKARPELLLATLEPFRDDLVVGVECMHCWYWISDLCEEHGIHFILGHALYMKAIHGGKTKNDRIDSFKIAMLMRGGNFPLAYVYPKEMRATRDLLRRRTRIVRHGAMLKAHAVNTLGQYNLPPSKANLNNPGGRSQLTAAFTDPDVQRNIDLDLAIVDCYQHELKKLEWHLEQQAKQHNPASLNVLKTIPGVGRILALTILYEVGDIQRFESVQKFASYARLVKCKAESAGKVYGTQGNKIGNAHLKWAFSEAAVLFIRNNDRAKRYVEKLQKRMNKPKALSALAHKLGRAVYFMLKDKRVFDEQRFLRG

SEQ ID NO: 363489 - protein, 397 aa, unidentified
MSEFSGEMLLETASSTEGLHPALAEDGRCYARYVGLDVHKDTLAVAVAHPGRGTAQYRGEIAHTPKALHKLVERLSQEAGGEQMLFCYEAGPCGYGIYRLLLGLGQHCEVVAPPRSERLKTDRRDAMKLARKLRAGELTRVWVPDVEQEAMRDFSRCRADFKGQQKKVRQQLNAFVLRHGHHWPRGKSRWTQAHRQWLEQLSFPHPWEEEVLREYLEAERAASERSQAIETRLLEEILPQWSLAPVVDSLVALRGIDRVAAVTLLSELGDISRFDSPTQLMGYLGLVPSVHDSGPRRGRRGAITRAGNAHARRILVESAWSYRFPARQTAHLARKAKNASKEAKVIAWRAQRRLCGRYRALIAAGKNQKVVCVAIARELIGFLWDIVCREMPKLRAA

SEQ ID NO: 363490 - protein, 333 aa, unidentified
MVEGTEGSHHKEGSKKMSKDSMVCAGIDTGKHKLDIAVEGSAERLQIDNSAESHPALSAWLRRCGVERIGIEASGGYEQAVVSTLRAAGSHVIVFQPVQVRAYAKFVLQHAKNDGIDAALIARCTAAATDIHEPTDVRLAPLAQHLTMIEQLTADVAQLKTRREACRNQRIQAFWKQEIDRLKRLLQTELKQLVLAIREHRDLADRLDLIASVDGVGLRTAVAILVRMPEIGRVSREQAAALAGLAPYDDDSGLRRGPRHIKGGRQRLRQSLYAATLPAVFYWNAQLKAVYKRLIAAGKTHKLALVACARKLLIFVNTVVARGTPWTSPPATT

SEQ ID NO: 363491 - protein, 443 aa, unidentified
MSHKANTHLKGERGQAFADQIRNIPPERILCVSLDIGKYFHVVMIHNALGEIVTPTFEIDIFQSGFTALCAAIDEASARCRAKVVLTGLEPTGHYFENLARHLRARPQPVTLVNSYAVKQNRSQQMMRREKTDEIDVAAVGDLLRRGEGTAYRPASGPYLQLQQLDRTRIAKLKMQTMLKNQILGHLDRIFPGLVLQGEEALDRYTPLFATSFWRCQTLQHLVRLCPDPCRLVALSPSELVALFHGHHYRLGKQNAAKIIAYAQKTLLPDPELSTIRSDLLQADLTLLEHLQLQIDHLEQRLGELLAPLPAAAWAKLKGLSVVQAASLAAAMGDPAHYTYAAQIFRRAGLVSGRNDSGNRQRKGKGQGVLKVGDVYLRRALMTATESLILHQPALHTYYTTLKKTKHPGVARVATARRAMGILWATLRDQRSTLLILKKGKTM

SEQ ID NO: 363492 - protein, 320 aa, unidentified
MAEELKWVGIDVSGSELAVGVYPSQETSVFAYAADGMAALIAFLEGLNPQLVVLEATGGIEARAAAELYAAGLPVCVVNPRQTRNFAKSLGVLAKTDAIDALVLARYAEAVKPQVRRLPDEKEQAIKDIVARRRQLIDMLVQEKNRLTRAHGRIRTGIVKHIDWLKKRIEDLDEELGDAVTDSPLWSERSGILRSVPGVGKVLCATLIADLPELGALNRRQIAALAGVAPFNRDSGVSNGQRRVWGGRHGVRRMLYMAVVASLKANPVMKAFYARLRAQGKKPKVAIVACMRKMLVILNTMVRRGQHWDSGMAAKCLCGA

SEQ ID NO: 363493 - protein, 349 aa, unidentified
MCEMYFDPKETGMKYCGIDLHSNNCVVIISDEEDRIVFNKRLPNDLGQIRAVLEVHREGLAGVVIESTYNWYWLVDGLMDVGYRVHLAHPSAIKKYEGLKHSGDFADAGYLAQLLRLGLLAEGYIYPREERGARDLARKRMQLVRYRTAQILSIENILIRQTGARIKGEAVKRLTAEQVDELGFAPDVALAVEANRAVSQALGQQIEALERRLKERMSLRAGYRLLKTVPGIGETLATTIMLETGCIDRFAQVGNFSSYCRCVDSLRESNGKKKGEGNTKNGNKYLGWAFVEAANFALRYCPQAKSFYDRKKSKTNRVLAIKALAHKLARACYHMLRDQKPFDVSRCFG

SEQ ID NO: 363494 - protein, 345 aa, unidentified
MKITMTGIDLAKALFQVHGVDKHGKVGLRKQLKRKDVLSFFANLEPCLIGMEACGSAHYWARKLSALGHTVRLMAPQFVKPYVKTNKSDRNDAEAICEAVARPNMRFMAVKTAEMQAALALHRARQGFVKARTAQANQIRGLLAEFGIVIAKGIGHIAKRLPEILEDGENALPGMMRELLQRLGANLQDMDKQVRELERQIVLWHRENEASRKLEAIAGIGALGASAMVATLGDAKSFKNARQVPAWLGMVPRHEGTGGNVQLGRISKRGDVYLRTLLIHGARAVITAVERKPDHADEWLKKLLARRNKNVATVALAAKNARIAWALLAHERSYQHDYVATRKAA

SEQ ID NO: 363495 - protein, 392 aa, unidentified
MLFVGIDIAKRNHEASVIAQDGRVVRKAMRFANSQAGYNKFMDMVRSLSEPVVFGMEATGHYWLTLYTHLRNDGFTVHVINPIQSDALRGMYIRKTKTDSVDSVIIADVIRFGRYCETSVEPGDLQAMRELCRQRFYIIDMASDLKRKVIALLDQVFPEYEKLFSDSFGVSSMELLSQYTTPEEMLSVSSQQLAEVLEKASRGRLGAEKAVEIQDAARNSFGIVMASSSFSLIIRQYIEQIRSLESSVDIFDAEIARLLSGFDTQLTTITGIGPTLAAVILSEIGGDIRRFSSPAKLAAYAGVDPTVKQSGDFSGTRMKMSKRGSPYLRRAIWLASTVAAFKDPAIHALYERKRAEGKDHMTVIGHICRKMISIIFAVLRDNTPYVPAGISD

SEQ ID NO: 363496 - protein, 337 aa, unidentified
MDKTLIPVGIDVSKLSLEARVFLPERSAGLFTRVANRDEGLTQLQHWFLHQGYTRVHACLEATSTYSDLVAHFLYEQGHHVSLVNPARVAAFRTSEGIRTKTDRHDALVLARFCAQKRPDLWCPTPAPIQQLQVLLAHLDDVLNMRQQERNRLENLRLDATTRQSIHEHIQWLHTQIQQTLQRAGALLEQTSTLAEPCAHLDSIPGIAQLTAMRLYSVYFDQQRFNRAPKLVAQAGLCAAQEISGTSVHRRASISKVGNAQIRKWLYMPALSVMRSDVDFLRWVGELKARGKSNKVIIVAIMRKLLHIVHGVLKSNQDYDPCKAFPSHYAKEELPAA

SEQ ID NO: 363497 - protein, 344 aa, unidentified
MNEFITIGVDLAKNVFQVHGVDAEGTVVARRQLRRAQVLPFFKNQPPCLVGMEACATSHHWARQLIELGHEVKLMPPHYVKPYVKRSKNDAADAAAICEAVTRPTMRFVSVKSAEQQSVLMLHRTRDLLVRQRTMLINAIRAHMAEFGIVAPVGVPQVKKLLSIIADTDDARLAPVARTCLESLARQFLSLHEEISAAEKHIHVWHRSNEVSRRLETIPGIGPIIASALTASITDPEVFKNGRELAAWIGLTPRQNSTGGKQRLGKISKQGDQYLRWLLVAGAMSVILHAKRRGTTNLPWLADIIARKPTKVAAVALANKTARIVWALLKHGGTYQRPVTVPAV

SEQ ID NO: 363498 - protein, 366 aa, unidentified
MENISTIVGLDVHKDTLVAAVLKPNADMVSEQFTIENNPENVRRVLDRFVPRKPVTFVYEAGPCGYELQRQMEGAGFKCVVISPSHTPVRPGDRVKTDRRDAIKLARLYRAGELTEIRIPSREEEAARDMVRVREDILQDQLRARHRLLKFLLRQGRVWRESKAWTLTHRAWVSAQRYDQPYLQETHDSYLRNLNDIEAHLASLTKRVLDLAEEKQYRRLVTCLCGLRGIDTLSAVTLAVEAQEFGRFENARHFMGYAGLGICEDSSGPRVRRFGLTKKGNAHIRRILGEAAWSYRSNGAGKPLLERRRRCPDEIQRMAKEAQERLHRKFWKMVKRGKPTQVAVMAVARELAGFVWAIATASMKTV

SEQ ID NO: 363499 - protein, 347 aa, unidentified
MRFYNRQHQHYCGIDLHVKTMYVCILDPAGQVVVHRNVASTPAAFLETVAPYRADLAVAAECMFTWYWLADLCAAEGITFVLGHALAMKAIHGGKAKNDKIDSHKIAVLLRGGMLPQAYVYPAAMRSTRDLLRRRLHLVRKRGELLAHIQNTRAQYNLPAFEKRLAYAANREGLLAHFPDPSVRKSMEVDVALIDQYDTLVTDLELTIVREAKRHDGNAFHRLRSVPGIGKVLALTILYEIHDVTRFDRVQEFASYARLIKCRKESAGKKLGTSGAKMGNVHLKWAFSEAAVTFLRHNREGQRLLARLEKQHGKGKALSILAHKIGRAVYYMLSRETVFSMEKFLAA

SEQ ID NO: 363500 - protein, 337 aa, unidentified
MKYCGIDLGTESTSVCVVTASGEVVKEKTVATNGAEIRKALKGFGKLHCVVEAAPLAEWLCVEVEKGRHSIDILDPRQAKAVTAGKKKTDKLDARKLAQLCRTGWYVRVHRKSGRAREMRSYLTARQQIVKMKVAATSTILGLFRAHGINVKRCEGAMFVMRVQAALKTAAPMLAEAIVPLLALWRQAREYEREMYKELGKKVKKEGNEFKLLMSVPSVGPATAAAFVATIDNPKRFPSSENVASYLGLTPSVYQSGKTEYRGRITKLGDKLLRWHLVEAAHNLLSRSRSVCRLRQWGLQLVEKKGYAKAKVAVARKLACLLYHLWLTGEEFNPAAA

SEQ ID NO: 363501 - protein, 356 aa, unidentified
MDEYIAFDSHRRYTLAEREEVESGRVWQERIEHRPGAIGEYLRSCRPGGAVAVEALGSWYWIVQEIEQAGFRALLVHPRKAKLMMGMLNKTDKLDVHGFNRLQRNRTLPTVWIAPGRLRDLRELTRTRMVMARQRARLKNRLGSALAKYGLAVEEWSDPYGTGARPTLEALLGRLPEQTAWTSRRVLEQLDFVQGQIVAHEQRLAACLEQTPAMRLQRTVPGFGPILSSVVVLEMGDPGRFADAEHFASYAGTTPRVHASGDKRRYGKLRPDVNRYLKWAFVEAGNAIVRHHHSAPDRHVSRLYARLKLRQGGAKAVGALARHLAEATYHVQNGRQPYRDPALRRVRKEGLSASMP

SEQ ID NO: 363502 - protein, 342 aa, unidentified
MQNMMIGVDLAKNVFQVHVASRAGEVQCRKKLSRKQFSAFMAQQEPSLIIFEACGSAHYWAREMEALDHEVRLIAPQYVRPFVKRQKNDAADAEAIVIAARQPEMRFVEPKTIEQQSRAAVFRGRERLVRQRTADVNALRALLYEHGHVFPAGIRHLNRMTALIEEETSGLPILIREECKDLQAQIAEKTARITERTAKLKTLAAQSDKARRLQTMPGVGPLTAVAVEAFGPDMAQFKTGRDFAAWLGLVPRQHSSGGKERLGRMTKTDQADIRRLLIIGAMSRLTWLGRRAIPEGSWLSRMLARKPKMLVAIALANKMARQIWAMLTKNENYRDPALAVAA

SEQ ID NO: 363503 - protein, 318 aa, unidentified
MDKDVYVGIDVSKTELVVAVRPSSESFTLAYHRAGLKQLVGRLGELKPKLVVVEATGGLQRQVVGALWTGGIAVAAVNPSWVRSYARGGGLLAKTDRIDARLLALFAQREQPVPRPPLDAETQALQELATRRDQLLEMRVAEQQRLKRSSAQVRKELRQHIAYLEGRITQIDDDIDKTVRRSEAWRRKSEVLRSFPGVGKVFCTTVLAKLPELGTLSGKAAAALVGIAPFPDDSGGRRGRRVIRGGRYPVRSKLYMCALSAIRCNPVLKQFYERLRARGKLEKVALVAVMRRIIVILNAMLKTNTIWRQASAAALEEN

SEQ ID NO: 363504 - protein, 335 aa, unidentified
MMIAVGVDTHKHQHLAVAVDALGQLLAEITITTTLAGYRELLAWITGLEGEIRVGIEGAGSYGSGLCEYLQDNGIIVFEVERPRHRERRTGKSDRLDALLAAKKVLADDGLSTPRGHGKHVALQMLLVAYRSVISERSRLYNQLQALNVGAPATLRERIGPAKNGAKLAQRLTGMRTRPNASPQENTTLQVLRDIANRTRALDVQAAAYTRQIDALTRELAPTLIDTPGVGPITAGKLITFNPARFTSEAAFARANGTAPQPASSGKTVRHRLSRGGDRQINTAIYTIALSRSVHHAPSRTYIQRRIKEGKTKREPMRSLSHDLCNKLSNTLLTT

SEQ ID NO: 363505 - protein, 390 aa, unidentified
MAPGDKIIRRPFDVKHTKEELQPLVDEIRVQAKYDEIKVVMESTGVYHLSIAYFLQQNGIFVSVVNALKVANFNKAENFRHTKTDSIDSTNIARYGIAYWAKLPQFDLNGDKYFLLKRLCDAYLNFSEERSRILLQLQSQLEQTMPGIFDLFGGFDINSGKDKLLDFLERYCHIEDIIAKPEAEFIASYCGWAKEKGYRSNESKAATIYAQAKNGIPSIPNNPIVRETIMWYVGLLRRADEALMASLTRMEDIAKDLPEYELVGEMGGVGRVTRVALIAQIGDVRRFKNKHSLICFAGLTPSIHESGKFRASQNHIVKKGPARLRKVLYQVMMSLVMHKIPKDDAVYRFIKKKEAEGKYKKVAKVAGMAKFLRIYYGRVMHLYRDLGLAA

SEQ ID NO: 363506 - protein, 385 aa, unidentified
MLVADRPHAPAAIRIDLGAIFVSMELSKSTWLMTSLSPGLSEKMSKHTVRAGDIAGLMERFGQLRAKARKRTGQEFGVIVIQEAGLDGFWIHRVLEREGIESHVVDPASIATSRRRRQAKTDKIDGEALVRALLAYKRGEPRVCAMVRPPSVEEEDRRRVCRERKVLIMERTCHINRIKGLLFTQGITGYEPMRRDRRDRLKDLRTGDGRPLAYHVKGQILREIERLELIIDQIKAVEVERDALLKEETADTPDAMLMHLKGIGPEFAAVLASEGLFRHFDNRRQLAAYAGLAPTPWQSGSISREQGVSKAGNPRLRSTMVELSWLWLRHQPDTTLARWFQERVERNGGRLRKPMIVALARKILIALWKYATAGVIIEGARMKTA

SEQ ID NO: 363507 - protein, 451 aa, unidentified
MTRDVQEIDADGEAELVERVAAIDVAKASGMVCTRVPHASVAGRRLTRVWEVRSTTNAILALADELVDQGIERVVVESTSDYWRPFVYLLEARGLSVWLVNAREVKQVPGRPKTDKLDAVWLAKLNERGMLRPSFVPPAEIRRLRDYTRLRFDLVGERSRHVQRLEKLLEDALIKLSTVATDIMGVSGRAMIDALIAGERDPHVLAELARGRMRVKRAALAEALTGRFDEHHAELAQMLLDQIDALSAKVEALTFRIDQLIAEIPAAQAPVDTGPGGQRGDPHSYPLAVVARLDEIAGIGVRAAQVIVAEVGLDMTQFPTPGHLISWAKLCPRTIQSGPRSRSGKTGKGNPYLKGVLGEAATAAAKTDTFLGERYRRLVRRRGKLKALVAVARSILVIVWHLLADPAARYQDLGADFYTNRVNKNRKTRQLVHQLQALGHHVTLQPIAMAA

SEQ ID NO: 363508 - protein, 339 aa, unidentified
MNKVSTVGLDIAKKVFQVHGVDAAGVVKVRRSLRRSQVVMWFAKLAPCLIGLEACATSHYWGRELRKLGHEVRLIPPAYAKAYVRRNKNDAADAAAICEAVSRPGMRFVAIKTEAQQAIGGVHKVRALLLKQRIMLINHLRGLMAEFGLVVATGPQHVGELLAILADPEERGLVEPLRGALLGMTEVLRGLERRIEAIDRQVVAWGRSNTTYRHLITIPGYGPILASAVAALVIDPTTFCSGRDFSASLGLVPRQEGTGGKVKLGPISKRGNGYLRRLLVNGAMSVLGSKRARQDPWIAKLLASKPRKLAAVAVANKLARIGWAIMMRQEDFRTQPAAA

SEQ ID NO: 363509 - protein, 338 aa, unidentified
METYAGIDLHSSNSFVGVINGEDKRLYGKRHSNRLEEILSALDRFKESLKAVVVESTFNWYWLVDGLQEHGYPVHLANPSAIKQYEGLKHTDDKWDSFWLAHMYRLGILPEGYIYPKEHRAVRDLLRRRLLFVRQRTAQILSLQSMISRNLGFKMSNNEIKKLKAKDIEDLFDCHNLVYMATSSWATIEFLKHVIKGIEKQVKRQVKLRKEFAMLNTIPGIGTILALTIMLEVGDIARFPKVGDYSSYSRCVDSKRISNGKKKGENNKKNGNKYLAWAYVEAANFSRRYCVNAQRFYQSKAAKSKPVVAIKALSNKLSRASYYIMRDRVAFDENKLFC

SEQ ID NO: 363510 - protein, 427 aa, unidentified
MQDATYQPTLCVGADVHLDEIVLRAVDKALGHEVLAAFRVTNNLPGAQSLVATVAQAATEKGYRRIEIGWEATGMLWIPFHRHLTTNPLLQAFDLELACFNPKLVAKFKDGLVLRSPKNDDRDAFDIAARLRFGELPVSYVPDDFWQGLRRLTRYRYRLSQALSQEKMRFQSYAFLKCSDWKRGSTFSDIFGATSIALLTECTNAELLQMSQDQLVDLIAHRGRGRFDDPAATARAVRQSLRTSYPIDPLMDEMVTSALAASWEHIRYLNRSMKHLDRLITRHIDPVPNPLITVKGLGPVITAGILAEIVDILRFPEHKHLAQFMGLTWHQRSTGNFVSQDTRLTKVGNVYLRYYFIQGANLLRQHALEYKAYYWRKYQEVSKHQHKRALVLTARKLVRLVHALLTKNEPYVRPRMSVRNQEDDVIQ

SEQ ID NO: 363511 - protein, 353 aa, unidentified
MPFVAGVDCHKDSHSIVFLDGTGKVVRELTISTTEAGFESAVSAAREIGDVTWGLEGTGSYGRSFARVLLDAGMAVFEVPGVLTKRHRKSASHHGKSDRNDARAIAEAVLRESGRLPQYRELEEQEALRLRYDQRDRLVRERTMSINRLRHGALRLALKVSNQLRSESSLAALGAAFDAIEKPGMVEQALIDEMRFNLGTVARLDGQIARLEKIMAPFVLRLAPEILELQGVSTIVAAGLIGHAGDLRNLRDSDAFAMRSATAPVSWSSGRSEAVRLNTGGNRQLNRLLHIIALIQVRTPGHLGRAHYERKRSEGKSTRAAMRSLKRRLATVVYYRLRTCQARIEAQSVLLAA

SEQ ID NO: 363512 - protein, 339 aa, unidentified
MELYSGMDLHSSNTVIGIIDEKRKHLIDRKLPNDPELIRSFLKPYKPELKGIVVESTYNWYWLADLLQEEGYRVHLSHPVANEQYNGLKHSDDKHEAFWLAELLSLGILKEGYIYPRQVRSLRDVLRKRAHLVRVRTALIVSLQHMISRNCAVKVKTGDIKRLTADLISPCLEKEEALLLAGNTSKEVIDCLTRQIDKIERWALKRLCREGVFIRLVTLPGVGDILGMTILLETGPVSRFRAVGNYASYCRKVSSQWTSNDKVKGRGNIKNGNKYLAWAFSEAAEHARRTDEACRRFYDRKLRQTNTKVAHNALAHKLARAAYYIMKDHVSYQEEKMFS

SEQ ID NO: 363513 - protein, 263 aa, unidentified
MQVSTIGVDLAKNVFQVHGVDSAGKVVITRQLRRKQVIDFFSKIPACLVGMEACGTAHHWAREVSKLGHIVRLMPPSYVKGYVKRSKNDAADAAAICEAVTRPSMRFVPIKSADQQALLMLHRTRDLLIRQRTQLINALRAHLAEFGLVASTGREGLAQLAAIITDGSNREALPSAMKQALQAIVDQLAALELQIGTLDRAIHAHHRANDMSCRLETVPGIGVIGATAIASTVTDPNDFKSGRDFAAWIGLVPRQHSTGARSD

SEQ ID NO: 363514 - protein, 417 aa, unidentified
MNTMTMQPFAAFVGIDWADTKHDVCIQSANSSRREFAVIPHKVEEIDEWAKSLHRRFSGPIAIAVELSKGPIVYALQKYDYFVIFPINPSTLAKYREAFQPSRAKDDPTDAELALDLILRHPERFEPLQPQSVEIRELTELVEQRRRLVSDRVRLTNRLRSTLKLYYPQTLDWFNRIDTKLFCGFIERWPTLMQVKRARITTLTTFFRAGNTRNPALLETRLASIRSSQHLTLDEAVIAPNRLRVLMLVGMLRVILDAIKSYDQTIAELAPEHDDYCLFSSLPGAGPSLAPRLLVAFGEQRSRFKNAAELQKYSGIAPVTERSGTKHWVHWRWRCPNFVRQTFVEWAAQTINKSYWAGEYYRQQREKGSAHQSALRALAFKWIRILYRCWQTRTPYDEATYLKALQRRGSPLVAKAV

SEQ ID NO: 363515 - protein, 432 aa, unidentified
MDHATSLTPAIVAWIGLDWADQKHDVCLQAVGSTDVEHTVVEQKPEALHAWVAELHRRFPHGPVALALEQSRGSLFYALMNYEFLRLYPIPPKALADYRRALYPSGGKDDPTDAQLLLEFLRKHPERFRPWVADDVETSQLALLNEHRRSLVDDRTALTNRLTALLKGYFPEALRWAEDLRRPLAWDFLAQFPSLERAQRASRLEVLKLYRVHTRRSPEQLEALCDEIRTARPLTTDRAILESSVLMVEILVEQLRALAAGIERVDKQLGNLFAAHPDRPIFQSFPGAGKALAPRLLAAWGSDRKRFATAANMQCFAGPAPVTVRSGKSKWVHRRFAGPTFLGQTFHEFAAQSRLKSPWAQAYYQQMRDKGVDHHPAVRALAFKWVRIMFRCWQDRAPYNEARYQQALKRRGSPVATTLSRLAIPPARACEN

SEQ ID NO: 363516 - protein, 351 aa, unidentified
MTVYVGMDVHRKRSQIAVLDAAGDEQRNRNVPNDPVKLVPILGVLPPGTPVAFEAAYGWGWLVELLEELELEPHLVHPSRCKAIASARLKNDKVDARTLAQLLRADLLPEAWVAPPEIRDLRALLRHRASLVRLATGLKNRVHAVLADRGITPPSSLWATPGRAWLAALELPPTPRAIIQDCCGVLDALATPIARLEGEIAALAKPDPRVQALMALPGVGKLTAMTLLAEIGDIGRFPTARKLCAWAGLTPQVRNSDRKVRHGHITKQGSPWVRWILQEAAQTAKRSPLFADTYGQLARRRGTNIATVAVARRLLARSFHILTRLEAAPAPEKTRPGALASLHEPATRPLS

SEQ ID NO: 363517 - protein, 340 aa, unidentified
MGEISIVGVDLAKQVLQVHGAAADGQVLFRKKLSRAQFAKFMASLPPCVVAMEACATAHYWGRELSRLGHEVRLIPPIYVKPFVKRQKNDAADAEAVAEAAQRPTMRTVAVKTADQQARAMLFRTRDLLVGQRTRLVNALRGHLAEHGIIIGQGVGNIARFAACLDQDTLPDLVRDLGRLYLDQIAQISDEIDKLDKRIATAARENSTARRLQTMPGIGPVCALAIASFAPEMREFRRGRDFAAWLGLVPRQHSSGGKQKLGRTSKMGQRDIRRLLIIGAMSVVHWRGRHGGRPGSWLSRMLARKPRKLVAIALANKMARMVWAMLAGETDYRDPTGAIC

SEQ ID NO: 363518 - protein, 347 aa, unidentified
MTTIAEARPVVTGGVDTHLDVHVAAVVTAVGGVLGTEQFPTTAAGYRHLLNWMGTFGQLERVGVEGTGTYGVSLAKYLRTQQVTVVEVMRPKRQVRRRHGKNDVVDAIAAARAVLSGEANATPKTHDGPVEALRTLKVLQRSATKARTQALNQLRALLVTAPDEMRARLRDLPQRELLATCAAFRVDDTLAAVTRFGLRELAQRALYLADKLQQVKLRLHRITEQVAPELTKVKGVGPDVASTLLLAAGDNPQRLVSERSFASLCGVSPVQASSGKTRRHRLNRGGDRQANAALWRIALVRLNCDQRSKDYLAKRVSDGKSKTEAIRCLKRYIAREVFAALPVPTTT

SEQ ID NO: 363519 - protein, 391 aa, unidentified
MIFVGIDVAKDTHYAAVSDDSGAVLVKPFAFQNNAEGFCLLLKKLSEFDRSEVLIGLESTGIYSENLICFLYESDFRLAVINPIQTATLRKTAIRKTKTDKVDTMLIIKSLMVNSYRLYSQRDADSLKLKTLCRFRQNLKKSKARLKIQLAGYVNLVFPEFGKFFKSGIHIAASYALLKKYSSPKEIAALRTSTLCTLLSKASHGRFGKDTAEALKSLALSSVGVKNPYISIQIAQTIAQIELLEQQIKDLNSAIEEAMESINSVLMTVPGIGAVNAACILGEIGDIKRFSKPCKLLAYAGLDPTVRQSEQFTAKSTRMSKRGSALLRFALINSAWQLTLNDTTFKAYYDLKRSQGLNHYGALGHVAHKLTRVIFKLLTSDTPFIPAKLVA

SEQ ID NO: 363520 - protein, 453 aa, unidentified
MAKKQRKNCKKVKMLHTIKPNAAGIDIGATEIYIAVPHERDPEPVRHFDTFTADLHKAAKWLEACGIDSIAMESTGVYWIPVFQILESYGFEVVLVNARHVKNVPGRKTDVQDCQWLQYLHSVGLLRGSYRPPQKICAIRSLLRHRDGLVRTSASHIQHIQKALTQMNLQIHNVISDITGVTGLSILDAILSGERDPKKLAALKNKRIKASKATIEKSLEGDYLPEHVFTLKQSLLIYRHYQQMIAECDQEIENHLNNIDSRIDVDKNPPPPPTSLYRGGKGNEPCFDLRTHMYRILGTDLTQIEGISAVTAHVFFSEVGNDVSKFSNAGNFASWLSLCPGNKISGGKVLSSRTLPGSNRLSQALRMSAMSLWHSQSYLGNYYRRKRARDGAPSAITDTAHKLARIIYHLVKTGKQFDESIFNAQEEAHQKRVFRGLESKAKRMGFQLVPCQQ

SEQ ID NO: 363521 - protein, 477 aa, unidentified
MKSTAKQLSDLQAIPLLKQESLYIGIDIGKVRHVAGFVSLTLLERHQRFEACPALAFENSRDGFHALAERIRTLAPFEHCFTLLEKTGHYHKALVQYLQELDIPVYVMHVQERPKAMMKTDKRDALGLANTLYNQLALGIQVSDKTQLVRRDVPPTPAAAQLKGFIRHRYELVHEATQRKNKLIAICDEMFPEFTRILHDPNGPTALALRERFPTPAACATASLSALQEVRGKARCISDARLLELQRLATESIGTKDIVRQRGLVLEQTQLTRELRLLQEHIAQLESEITTIVSQARAGRILQSLGIGPIQTATVIAAIGSIENFPNAGCLKSYFGWSPTVIQSGSSIDYTGQTRGGTRTMKQMMFLIVSNLINRDTEWAKLYDRLVKTKCPYDERTGQRKGKLRVIGRVAGQLIETMYALLKTDAEVLSKVLPQTTPPEPILYDPEKHRQHREGHYQPLKVAARRPVLTLLPHSSE

SEQ ID NO: 363522 - protein, 367 aa, unidentified
MAEYLIVGADVHEEYVMTKWCIDQGDVSKNSFRMTEAGQSKMIGMLHKTAKKSKVKTIVVAYEACCLGFGLHDRLTEASIECHVLAPTKIERSNKQHRDKTDEKDALRILEILRGHLLAGNSLPDIWIPDHQTRQDRAIIRQRFSLSEQCSSVKTKIRMILKRSQVRKPKKIGKNWTKAYRKWLRDICDMEAGVLQYGDMLVLESLLRQLKGLEDEVELQDHNIKSLSETPRYQEACAKLCQIKGVGLLTAMVFLTEFGDMSRFSNRRQIGAFLGLAPSSYETGENCDRKGHITKQGSALVRKVLSQAAWCISRDDPFYDRVLKKNPKKKKIALVGLMRRTAIKMWHIALDVQKETGCFVVCTGEST

SEQ ID NO: 363523 - protein, 344 aa, unidentified
MAIVGALDIHRQQITFDWVDRDSGEAGRGRISPADRVGFRKWLGQFGDKPIELVVEGCTGWRFVAEECQAAGVTVHVADPAEAAGPRNRKMRAKTDRIDARMLREQLEKGEVHDSWIAPRHVLEIREKVRLYLDLSQEKEAWQKRIHATFFHQGVPKPDGKLLRGDRVQRGLADPDLSPAGEQAVDVALRMIAAIDADLVPLRAELTAFGRRHPGPKGLSREYGLGALLATAVWEELGDTRRFAASKQAVRHSGLDISIYDSDGKTRGRPRITRQGQPVLRWALYEGAVHASKKTSPDHLYYVRLSHQIGRGRAKLAVARKLARRCHHRLRALGDQAWIDLATV

SEQ ID NO: 363524 - protein, 322 aa, unidentified
MKYIGIDVSKATFVVAYSSDKGGEIRIFNNTTTGIKQFIGALPKDGSIHCVMEATGNYSALLLYMLNVARITVSMENPLKIKNFARAMLSTVKTDKIDARLIALYGEKMNPQPFKIQGEAILRLRQKRTVIRQLTKQITAMSNLRGSLACLPVPDKGATHTVDETIEFLEKRRDRLQSELTDLVEVEFSRQLALLTTIKGIGITLATALIITTGGFTYFQNAKQVSRYLGICPTYEQSGTSVNIRGHINRNGDAYTRGLLYVAAWTASRFNTKCGETYTRLRQNGKPGKLAMIAVANKLVRQAFAVVTHDKEYVDGFVSNRP

SEQ ID NO: 363525 - protein, 349 aa, unidentified
MKNFSIGIDVSKEKFDLTVKKVYYGTKQPEFLHYDVYENNPTGFRKMIKALEKVTGRADKSEWLFCLETTGAYELHLCNYLYAKGYDVWRESALQIKLSNGIAKSKNDQVDSERIADYAIRYMDKMVIYEPEDEKLRTLKSLFLFRERLVKEKRSKQTSSQEIKCTHVMNDEMRWMQTRSQQDIARLNKEIKECEDHIRTLIASCEEIEKNYQHVMSIKGMGIVTTTALIVYTHNFERITSARKASSYCGLAPFYAQSGSSIYYEKNVSNYSNPQLKGYLTQAAFIATRYNEDIANYYNRLRASGKPTGICVNNVRNKLLRITFSLVQNDCNYEENHEWKRSQSLKKAA

SEQ ID NO: 363526 - protein, 362 aa, unidentified
MQQSTTIIAFDQHAATTVAAVLLPSQRTPALHSLTSDSATLLKFVERVRRHGPVRCCYEAGPCGFELQRTLTARDIPCDVIAPALIPRRAGDRIKTDRRDAGQLAVLYRAGALTAIHIPTEQEEAARDLLRCREDIRADLLRARHRLSKFLLRHGRRFTGTKKAWSKRHDAWLRTQTWSIAALDQTHAAYLRAVDEAIARLRSVEQDLRALLTLEPLRPRVERLRCFRGMDDLTALTIAAELGDARRFASAPRAMAFVGLVPSEHSSGTKRARGAITKTGNAHLRRVLVEAAWHYRHKPFLGAALRRRQQGALDGIVAQAWTAQQRLYRRYHRLAGRGKPHHQVITAVARELTGFVWAALIH

SEQ ID NO: 363527 - protein, 414 aa, unidentified
MDTLVERCAGLDIGKADLKACVRTPGKNARRVREIRTFATTTVGLLQLRDWLTGHQVTVVGMEATGDYWKPVYYLLEDTFEVQLLNARHMRNVPGRKTDVADSAWIAQLIEHGLVRPSFVPPPPIRRLRDLTRYRTAVVQERTREIQRLEKVLEDAGIKLSTVASHTLGKSSRAMIEALIAGERDPQVLADLALARMRNKIPQLRQALLGRFTDHHAFVCRTMLERIDTAENTINKLTERIEQEIAPFHQTVTRLMTIPGVSARIAQILVAETGADMTRFATAAHLASWAGMCPGHHESAGKHHGGATRKGDSWLRGALGEAATAAARTKNTYLQARYRRIAARRGTKRAVVAVGHTILTSAWHMITVEIDYADLGADYYQRHQDRRAATIRLVGKLTQLGYRVTLDDAATVAT

SEQ ID NO: 363528 - protein, 345 aa, unidentified
MLTDELAYVIGVDTHRDEHTLAIVEARTQRVCAGLVVEANRSGYRRALRHAARRAPGSRTWAIEGTGSYGAGLARFLGERGEEVREIERPKRSGGRRGKSDAIDAERAARELLAGGAGSQPRSNAEAQALRALLVTRESAVRQCTASLNELRALVISAPGELRERLHRLTERKLLEACSRLRPSADEERTAYALALRTLARRISGLREEAAVLEGEIERRVRALAPQLLSQPGVGPISAACLVSAWSYRGRLRSEAAFARLAGAAPIPASSGQTVRHRLDRGGDRRLNRALHTILLSRRRLDPATRAYVARRLAEGRSEREAVRCLKRYLARSLFRLLENPPVTT

SEQ ID NO: 363529 - protein, 348 aa, unidentified
MMIIGCDLHTRYQQIAMLETETGELVERRLEHENGEARAFYAALVGAVRVGIEATGHTHWFEAMLAELGHELWMGDAAKIRAAVVRKQKTDARDAAHLLDLLCSDRFPKIWRPSPAERDLRQLVWHRQKLVWMREAVKNQMHALAMGEGVCRKKKLFTAKGRQELEGLALGPWASYRRQELLRMFDELQASVARLDQAVEQAAKSQALAVRLMTHPGVGPVTSLAFVLIIGPVERFAGSRKVVSYLGLNPQEHSSGGKQRLGSISKQGNPMLRSLLVEAGHTAARFDPQLRRVYQRLKFRRGASVAKVAVARKLAVRMYWMLRSTADYAQLVRMQGSPRGTLVETAHR

SEQ ID NO: 363530 - protein, 343 aa, unidentified
MQVVTTVGFDIAKSVFQVHGIDTAGQVVIRRQLKRRYVLAFFEKLPPCLVGIEACASSHHWSRELKTLGHTVRLMPPAYVKPYVKRQKNDATDAEAICEAVTRANMRFVATKTPEQQSGLTLHRTRHLFIRQQTAVINVIRAHLAEFGIVAPVGRKGVEELLNVVTDASDKRLPVVARMCLAALGAQLRRLKEQILEFDRMIMAWHRSHETSRRLAAIPGVGPILATALVASVADPKAFRSGRNFSAWIGLVPKQHSSGGKDRLGSISKQGDRYLRSLFMAGALAVIRYAKIHGAKHRPWLTALLARRPIKIAAIALANKMARMVWAMMARGERYKEPIALAA

SEQ ID NO: 363531 - protein, 430 aa, unidentified
MNCNTQNAKIKSITEKTLIVGIDVGSETHYARAFDWRNIEFSKKPFAFSNDEAGFASFKAWLEDIKEKFGKTIVLPGMEPTGHYWFNLGAFLQDNGMKPVHVNPHHVHKSKELDDNNPSKDPKTIAALVNEGRFNYPYIPTGVYAEIRSLYGLQVMTQEALIRVKNRIARWLSIYFPEYKDVYRSCDAISGVMVLKVCPLPADIVMLGADGVNKIWRDAKLRAAGMKRARPLVEAAKHSVGSTESPEAAKYEMELLLGDYEVYTKRLEELTEKIEVKLEEIPYVDKLLEIKGVGKKTVSGLIAEIGDISRFDNPKQIQKLAGYAIVACSSGKHKGESHISYRGRKRLRYVLYEAAISLIGQNAEFKEIHRYYLTRQNNPLKKMESVIAVACKALRVFYAILTKGVSYDGKFMLESIRYPENQVLGNRIAA

SEQ ID NO: 363532 - protein, 472 aa, unidentified
MKSKSSRKPNPVDPVAEEIPDAEHELVIERVAAIDVAKASGKVCVRLPGQTGRRFSRVWDVPARTGAVSELAEQLIESGVEKVTVESTSDYWRIWYYLLEAAGLDVQLVNARDVKNVPGRPKTDKLDAVWLAKLTEKGLLRPSFVPPAEIRQLRDYTRLRVDLTRERTRYWQRLEKLLEDALIKISAVASTLDTLSTRDMIEALIAGERDPGRLADLARGKMKAKRSELIAALDGRFDDHHRELARMLLDQIDTLTAQIATLTSRIEQLLAAMPDTRSRGDGGTGGDPDRPSTGHGVEPETAARFTDATLLTPVERLDEITGIGELNAQVVLAEVGLDMTRFPTPAHLVSWAKLCPRTIQSGPVTRGGKTGRGNPYLKGALGEAAAAAARTDTFLGERYRRIVKRRGKLKALVAVARAILVVIWHLLANPEARFRDLGPDYHTQRIHTERKLRNHIAQLTAMGYRVTLEPAA

SEQ ID NO: 363533 - protein, 307 aa, unidentified
MKNTIIGVDLALKAIQVCVYANNKVQSNTEMTPKQFSAYLSTFLPSTVVFEACGGSNYWSQLANTYEHKALLISPRLVKVVRQNQKTDKNDALAIIQASLLPDINFVSSKTNHQQQVQSMLKFREQCIKQRTALKNQLMGLLREFNILSGRSLSSLISTIESLLEDGDNGFSMPFRKMLRTSLDLYLTLCDAIDCYDDMLNAWVDSTPECKKRLKIEGIGKLNAIHPYVGLSTDELGQFKAGKDAAACIGLTPLQHSSGGKVKLGSIGKRKNTSLRSLLITGAMSVVRQVVKREPKTKKRGLVKSLN

SEQ ID NO: 363534 - protein, 320 aa, unidentified
MKRHWKPERVVGVDVSKTELECFVLPTEERIQSSQAPEEVERLADRIAALKPDLVVIEATGGYEQPLLNALLARAVPVNRVNPRRVRHFAKAMGFAAKNDPIDAEMNAQLGATGNLRPMRFPEQAVQRLEEWVQRRQQLLELITMERNRLESIADRGLKALVRRHIASLVREQKQVEGRIAEHIQASPELAAKEARLQTMKAVGPVTAAVLLSKLPELGTLTRRKVAAIAGLAPYDDDSGKHHGRRYIRNGRVEVRCALYMAALVGTRSNPILMSLYQRLLAQGKPKKVALVVCMRKLLVILNAMLRDEADWRQTRPAAA

SEQ ID NO: 363535 - protein, 429 aa, unidentified
MNYTQNEKIAQVTETTLVLGIDVGSEFHYARAFDWRGHEYSKKAFEFSNTQEGFTKFTAWMHHIKDAHGKETLLPGMEPTGHYWFNLGKYLMDNEINPVLVNPHHVKKSKELDDNSPSKNDRKDPRTIARLINEGRYSYPYLPEGVYADLRVASNLRFQLTSELTRAANRIQRWFSVYFPEYRDLYGRFDAISSMMLLKQAALPEDIIALGAEKINQIWREAKLRAVGIKRAKTLMEAATRSIGSREGLIAARMEIVILLDDYESKQARLEKVMDLIEELCKQIPITGKFLEIKGIGIKTVSGFLAEVGDISRFDNPKQLQKLAGLAIAENSSGKHKGETKISKRGRKRLRYLLFEASLSLVAKNPEFKRLHHYYTTRDVNPLKKMQSLIAIACKLIRVFYAILTKNVAYDPAKMLSDIRYPTRYAVAA

SEQ ID NO: 363536 - protein, 389 aa, unidentified
MPKFDDLSRSLVALDQDSTLIAVIELSRASWLVGAVVPGLEREPMKKLVPDADGLLGLLCRWRDEAVAAGRPIARICVAYEAGRDGFWLARWLRARGIEAHVIHASSVAVSREHRRAKTDRLDVELLKRAFLGWLRGERDHCKMAAIPTLELEDARRPSRERETLVGERTRIINRMKSTLVRLGIRYFRPNLRKAPERLGALRTPEGVAIPANTLAELQRDMARLQLVKEQIKEIEQMRLTRLAQPPADAPHAMLVLLARVIGVGIETADMLVNEVFVRNLRDRRAVARYAGLTGAPDESGARRREKGLARAGNARVPHGTSPWAKGPRGMLQLAWRFLMFQKGSVLAEWFQRRAADRRPGTRKTMIVALARKLLIAPCSGQGQACGAW

SEQ ID NO: 363537 - protein, 371 aa, unidentified
MSMMHHRYVGLDVHRATIAVATADVDQPPTSYGKIPNDPAAVRKLMQKLGGPDVRLRVAYEAGPTGYVLYRQLTALGIDCIVVAPSLMPTQRGDKVKTDRRDALKLARLLRSGDLTPVWVPDQEHEALRNLVRARADAKADEVRAKHRLSKLLLRHGARPPVGVRNWCKRYVQWLRQLEFKELADRIVFADYLAEVTAATERVKRLEGALRQCAQTTPQKAVIDALQAFRGIGFLSAVTLVAEAGNLRRFPTATQFMAYTGAVPRESSSGAHQHRGRITKTGNRALRHILGEAAHHARHAPNLTDEVKRRQKHVPQSIIDLAWRAQLRLHARYRHLCVRLGPPKAIMAVARELAGFVWAVGQLAPEASNAA

SEQ ID NO: 363538 - protein, 324 aa, unidentified
MTDSSSSVSLFVGIDVALDELDLARSDSDKLLTVANDAGGIAQIVGMLRSASPTTIVVEATGGLERRLLDALLDAGLPVALVNPAHVRYLAKGLGILAKTDAIDARVLAEFARLASPRLAQKRSANQSELDALVTCRRQLILIRTEQTNRRRTTFSKSAIKSIDAVLKTLAKQIASLDKQIRKLIESDDDLDHLDKILRTAPGVGPVLSSTLVVDLPELGKVDRREINALVGVAPFNHDSGRLKGKRAIRGGRASIRSVLYMATVTAIRSNPIIRSFWAKLLKAGKLKMVALVACMRKLLGLLHAMIRDNLTWHELSVVKALDL

SEQ ID NO: 363539 - protein, 350 aa, unidentified
MTAPNTPPTSTPAAAVPAAAAAAPAEQVCFGIDVAKDKLDLGRSDARAVRTFANDKAGVAALVAHLRAAVPPDRLGTTAIEATGGYEQLVLDALIDAGLPVARVQPGRVRSMAGALNQHAKTDCADARLLAEFARLIQPRLAQRQAAARVELHALVTCRRQLLHIRTEESNRRGTTTSKAALKAIDAVLATLDKQVQSLDRQIRALIDADDDMREADRILQTVPGVSDRIAAVLLAELQELGNTDRRRIASLAGVAPFDNQSGERTGEKHIRGGRATVRNGLYMAALTAARCNPVIKPFYQRLRAKGYKAKYALTACMRKLLGLLNAMLRDGLTWDQLAVNAAKPATPTT

SEQ ID NO: 363540 - protein, 402 aa, unidentified
MNSVGIDISKGRSTIAVMRPFGEIVISPFEVRHTDSELSELARLLKSLDGETRVVMESTGNYHTPVAWLLHDAGLYVSVVNAMLVHDYGNNSLRRAKTDKKDAVKLANYGLDHWLTLPRYVPEEDTRLLLKNCYRQYQQYSKVQTMLKNNLISLLDAIFPEVNRLFNSSPRADGSEKWVDFVSTFWHCQCVSTLSLKSFSARYLKWCRKHGYYFSQEKAFEIHSKAQSCIGVMPRNETTKLLVQQAIAQLKATSAALAALKQEMQSLAASLPEYPVVMEMFGVGSTLGPQLMAEIGDVRRFHSKKALVAFAGIDAPPCQSGKMDIHSRSISKRGSAALRRTLFLVMGVYLQSAPLDEPVYQFMDKKRSEGKPYKVYMMASANKFLRIYYASVTAYLNTLARI

SEQ ID NO: 363541 - protein, 345 aa, unidentified
MQSMYYIGLDVHKKTISYCVKDGSGMVHAEGAIPATRWDLDRWMKMLPQPWTAAMEATIFTGWIYDHLKPHAAALKVAHPLMLRAIAAAKKKNDRIDANKIADCLRCDFLPECYMASTEIRERRRTLRYRNLLVHQVVQLKNKISGLLMEAGVSYNKQKLHKVGYFKELLATNPDINEGLRPLLRLCRETLVRLQKTESALVRSLQRDSLLAERVRRLMTIPAVGPITALTWVLEVGDVKRFSSIKKAISYCGLCGAEKSSADTVKRTPISKQRNKHLQSVLVEAAKMAPRLSPELALIYDREKQKGNANRATLAVARKLVAYLVAIDRCQRDFLVVEKENCAAA

SEQ ID NO: 363542 - protein, 365 aa, unidentified
MNTITIGVDLAKSVFSVCEVDGAGHVLRRQDLKREAFALWLVQVPAGTVVAMEACSGAHYWARRCLEHGLQPRLIAAQFVKPFRKSQVSKNDRNDAEAIATAARQGNMRFVPVKDVDQQARLAWHRVREGYKTESLAIGNRLRGLLAEFGIVVTLGDAALRRALADLDKQTALPGEFKELIRGLEAHWAQVRLAFDACDARIDVHARADERCVRLRAIIGVGPITADAIVASVGAAQAFRNGRQLAAWLGLVPTQHSSGGHARLGEVSCRGDAYLRTLLIQGARSSLQRAKAVSVEKSTPEQIWIRQLSCRMCFGKVLVAIANKHARQLWAMLAHKENYDADAWLKHPMVQRPAGKHAITVAAMA

SEQ ID NO: 363543 - protein, 400 aa, unidentified
MVLVGLDWASTAHAVCVLDSTGTVRWRGSVPHSAEGLAELVRRLRQFGPPETVHVALERPSGVLIDTLMDAGIQVVPIHPNVVKASRARYSAAPAKSDEGDSYLLADLLRTDGHRFRPLRPLADETRALRALVRGRDDLVGQRVALANQLRALLERFWPGAAVIFADVDSSIALAFLARYPTPQSAERLGERRLTQFLRRHAYCGRRPAAELLGRLRGAPVGQAGDAECDASGELVRALVTVLVPLVAQIQQLSAAIAAALADHPDGPLIQSLPRSGQVNAAQLLAELGDDRARFLTAEQLTAEAGTAPVTRASGKHRAVVFRWACNKRLRQAITTLADNSRHASPWAAAVYARARARGCDHPHAIRILARAWLRVIWRCWQDRQPYDVTRHRAATLSAA

SEQ ID NO: 363544 - protein, 455 aa, unidentified
MAKQKRQTKMKVQVNALEHINPHAAGIDVGAEEVYVAVPPDGDSESVRAFPTFTADLRRLAEWLNACRIETVAMEATGVYWIPLYEILEAEGFEVCLVNARHLKNVSGRKTDVLDCQWIQQLHTYGLLNPSFRPPEQIVAIRSLVRHREMLVRYRSAHIQHMQKALTLMNVRLTNVLSDITGVTGLKIIWAILAGERNPKQLAQLRDERCKKSQAEIAKSLEGHYKREHLFALKQAVELYDFYDQQLKACDAELEAMYQEFDPPEDPGTPPPKPHTQKRRKNQAYFDLAPALYRLSGVDLTQIDGVDELTVQKVLSEIGTDMSKWPTVKHFTSWLRLCPNNKITGGKVIQSGVQPTKNRASVALRIAAASLKTSDSALGAYFRRMRARLGTPAAITATAHKLARIIYFMLKNRLPYHDFGSDYYEQQYRTRMLRNLNRRAAKLGFRLEPAVQGVS

SEQ ID NO: 363545 - protein, 333 aa, unidentified
MNNVGIDVSHKELVIVVSVKGKARKAKTFENTPSGHHAIIQLLSKLKGESRVCLEATGIYHFDLAVALSRAEGIEVMVINPKASHNFAKVLMKRSKTDAVDAEILAIYCERMPFEAWQRPADEYIALKAISRRIATLTKLKTQTKNQLHALNATAETPALVIEHIEELIEVLDKQIQVHRDSALELIYRHDELAEAYALITGIKGIAQASAVQMLGELMILPQDMSAKQWVAYAGLDPRQFESGSSVAKKSRISKAGNKFVRQALYMPALVATRHEPHVKGYYAHMINDNGLKKIQAVCAVMRKLLHAIHGMLKAKKEFDGTRFYTFPVEARS

SEQ ID NO: 363546 - protein, 362 aa, unidentified
MTSMPTMSPPSRVVIGVDTHKHVHVAAVLDERGALLATATFNADRGGYRALIDWSVRLGTPLRFGIEGTGSYGRGLASAVRRNGHVVVEVARPNRQDRHRRGKSDLLDAENAARAVLAGQAEAIPKADDGTVEMIRHIKVAKDAAVKARTVATQSLKAVLITAPAELRETLQPLSDTALLRRCAALRPGELTSVTAAAKHSLRAIAQRWHSLNDEIIGHQRLLGTLVDQLAPQLTAAIGIGPDNASELLLTLGDNAERLRSEAAFAKICGACPIPASSGKTVRYRLNRGGHRRANAALHRIVIVRMKYHEPTRAYVTRRIAEGKTKPETMRCLKRHIACEIWARTKHLRQQPNAPQTTTCHL

SEQ ID NO: 363547 - protein, 367 aa, unidentified
MVGACAGSGTKEQFTFYQQSKQSKMTNSQTKDISLKSQPHLAAGIDVGSEKLVLVIRKNGKPFDPQKYTNTRADHARMVKKLSKLPGIIVCIEATGIYHFDLAIALHDAGVKVMVINPKASHNFAKVLMKNSKTDDVDANTLAVYAERMDFVAWTRPSNEKIALRCFSRRINALTNQKAAAKNHLHALSATEETPNAVVLDVKSAIAQLEKRIDRLTTEALALIGIHPELGRVLELLTGIKGIANTSAIALMGELLLLPPDLSHREWVKFAGLDPMAFDSGKSVHKKTRISKAGNSHIRAALYMPAMSAIQHDRYVKAYFQHLIEMGKLPLQGYCAVMRKLLHAIHGMLKHDKPFDNARFYAIPAGA

SEQ ID NO: 363548 - protein, 492 aa, unidentified
MEVIHERVAGLDVHKNSVVACLRSHSGKSAARECRSFGTTTDELLALLEWLTTSGCQAVAMEATGVYWMPIYKILGDGDFPVLVANAAHIKAVPGRKTDMNDAMWIADLAAFGLIKASFVPGEYVHELRTLMRTRKQLVREQTSHVQRIQKTLTEANIRLDSVISDIMGLNGRRMIEAMIGGQRDPRKLAALADKRLKATAKELYDALHGRLTDHHRFLLKLHLKQWDALDVSVQTIDREVDARLGKIQAARPTVDTQPAANAEAVEAKPIKVKRTKTKTAKTEEVKTEEVKAEEVKTEEVKTEEAKAEEVKTEEVKTEEVKANDNGVSKLVDLLSTIPGVSRVSALTILSEIGPDMSRFPTAGQLVAWAGMCPSQNESAGKKKGSRLRKGAPWLKTMLVQCAWAAKRAKSSYYRAQFYRLQARRGPQKAICAVAASILTAIYHMINNGSPHKDLGIDYFDRRTPETKAKRLAAQLGKLGYQVTLTQAAQAA

SEQ ID NO: 363549 - protein, 581 aa, unidentified
MSTSLCIGVGIDTARYGHRVSFLRPDRQPAAPPLTVLENQDGYRALQQRLQQLYQQHPRVHFQVRIDAAGQYAANLESFLRGLDLPLTLSIGEPKRNKDYQKAHFAKRTTDDTESQAMARFAVVEQPQATPPATSQMLLLREVAGRLQAQVKQTTQAVNRLQNLLARVFPELAALTDNLAARWVLHLLKLYPTAHRVAQARLASLQKIPYLPKDKAPALQQAAQRSVGSLGGDVAAALVRDLVIQVRHSQQAEHKTRALLAAAFADLPASGHLQVITIPGIGAATAAILVAKIADMDRFATPDHLVGYFGIFPEENRSGVDKFGRPLPPGTLPMSRKGNALVRAYLWNAARVGIRFNPALRALYRRLKAKGKRGDVALGHCMRKLLHLVFAVWKTNRPFDEHHFPWERSSDTDLSMTTAAEPAAAPQPCANDKAVGHKREVPAEKVVTTADSSVESAPASVNPVAPPAARPRVDFAFLRQQVTLEQALRHLGLFDQLRGRGPQRRASCPLHGPSTASERTLSVHLGKNIFQCFQPECAAHGNVLDFWAAVHKLPLYEAALHLAETFGLARNREEEPVKGTR

SEQ ID NO: 363550 - protein, 425 aa, unidentified
MHSKWNNKINQVTENTLVVGMDIAKRIHYACFVDERGRVIEKAFAVHQSKEGFENLYEKIRQMMKEAKKTEVIIGIEPTGHYWMNLAYFLDQYGIPLVMVNPMHVKRSKELDDNLPTKNDKKDALVIARLLKDGRFSYPRILKEVEAELRIGSTLRSKLTEDLASIKNRIIRWLDRYFPEFTQVFPSFGKMALTALERTPMPQDIRGKTAEELVFFYRQVGGMRAPQLPKAKLLIEKASNSIGLTEGQKMAKHEIATLLRQFRLLETEIEAVNDQVTELAKTTMEYDLLASVPGLGDATIVDLLSEVGSFSLYENPRQLIKLAGLTLRENSSGQHKGQKHISKRGRKRLRHILFKVIVPLIRHNLAFKQLHEYYTTRNQNPLRGKQSMVVLCGKLLKILHGICKKKVYFNEQLMMKDLYCLGEAA

SEQ ID NO: 363551 - protein, 315 aa, unidentified
MSQPILVGVDIAKDTFEVAWAGAALTQSFPNDEAGHAAFVQSLSTQEVALVVLEATGGYEQDCALALASAGLAVSVINPRQARDFARATGKLAKTDRLDAIALAEFAALLHSQGHVPRPLATEQQRELTALVVRRRQIIAMLVAERQRLSVAHTRAKPSIHAVIKMLTRQLEDLDRDMGQQVRRHHADLGKLLQSVKGVGPTTTATLIAELPELGLLNRKQIAALVGVAPLNRDSGTLRGQRHIYGGRPTVRRVLFVAALVATRFNPAIRTCYQRMLAAGKPKKVALVACMRKLLLVLNAIARTRQPWNPSTDQL

SEQ ID NO: 363552 - protein, 332 aa, unidentified
MHSDNNVTVLIDEKDEVVYRKRLPNDLRLILEQLSAYQSRVEGIVVESTYNWYWLVDGLMEQGYKVHLANTAAIQQYNGLKYTDDDSDARWLAHLLRLGVLPVGYIYPRADRPVRDLLRKRSQLVRQRTTNLLSIQNLMTRNTGSSLSAKQIKGLDVQQVDELLPEGDLALAVKANLAVMLSADEQSEILERTVIQRVQLRPQFRFLKTVPGIGEILALTIMLETGDIRRFPSVGNFASYCRCVDSRKISNRKKKGQGNTKNGNKYLAWAFVEAANFAIRYNSGIKSFYQRKKAKSKGVVALKAVAHKLCRASYYIMRDQVPFNITKAFGQK

SEQ ID NO: 363553 - protein, 269 aa, unidentified
MKIIRVGVDIAKSVFHCHGVDRFEATQWQGAYRRDRWVNALCKRVPVGSEIGMEACASSHYWGRELQKRGYKVKLVAAQFVKPYVKSNKNDRVDAEAICEAMSRPNMRFVSIKSVQQQDTQASHRIREELVCQRTAKANQIRGLVGEYGVIAPVGIGQLRKAIPVWLEDAENEHTEQFRVLLCGLAEDLRHLDDRIQVLSTFIEQHVKQDPVACRLLELRGVGPLVASALMSALGDGKQFSKGRDFAASLGLTPRQHSTGGKDRLLGIS

SEQ ID NO: 363554 - protein, 344 aa, unidentified
MKNTTIAIDLAKSIFEVGVSDRPGHVVANHRLSRDEIVRFMANQQQTTVVMEACGSAHYWGRTFQSFGHDVKLLPPLYVRPYVQRSKTDRADVKGMLEAWRNTDIRPVPVKTESQQQLTALHRIRAGWMAARTTRINSARGLLREFGIVFPLGAAALAGRVQELIEDADSALSMPLRQLLHEMVLEIGELESRVKLIHRQLEAIAAQTPVVERLLTVPGIGLLTATAFVGFIGDASRFPSGRHFAAYLGLTPSEHSSGLRRRLGRISKHGDVYLRTLLIHGARAVLMAAQRQSNPRGLHLWGLQLQRRIGNNKSAVAIANKMARIVWAVWKSGEPFHSRLQDVT

SEQ ID NO: 363555 - protein, 407 aa, unidentified
MEQKVCGIDVHRDTLVTTILDNTGHKQTQTFQNSLIDMEQLKNHLRTHNCQNVVMESTGSYWTTLYTILEDAGFKPVLANAHQVKAIPGRKTDQRDSEWLAYLLRSDLIRPSYVPTRPIRELRELARTRVRYVESRTQYKNRCQKLLSKNNLRLSSVLSDIFGKAGKEILEGLMKGKTVEEILKTTQNEHLKKRKVEILDAAKGALSETDMFLLKQMSRTIEALTIQIKELEARMAGLVDKRALEVICSVPGVGALSGATILAELGDVSRFGNGGQVASWCGFAPFVSQSAGMTKIGGITKRGSRWLRRVMVEVAHVAVRMDCRFKDMFWRIVSKKCKNVAYVAVARKMLTVIWHLLLNDEVFVEEGFSKKASVVVGRSVSIGSRGLSLGDVVGVLGCVVKMVSDDG

SEQ ID NO: 363556 - protein, 367 aa, unidentified
MKKNIVHHAEVSAAAITDQEVKTPRLTIKLGVDIHQTRYVVVVQEDHATPKPARGFAPAEFVPWVEGLRARGHTVFVVYEACGFGFGLCRQLTAAGATCYVIAPQRLDERGERVKTDARDAAALCQRLSRYVDGNTKELAVIRVPSVAEEQLRTIHRQREALVRARTKLQAQGRALLVNHSQPAPARWWRQRGWDALASWLPAWLGTRLAVLRPVLAVLDAQIAQLTGELEAAAPADRPLGQGKLTSVVITREVCDWARFKNRRQVSSYTGLCPGEYSSGAKRVTGSVTKHGNPRLRAALVELAWRLVRFQPEYPPVQKRLPILARGAQATGAARKKAIVAVARQLAVDLWRLHTGRVTAVQLGLRC

SEQ ID NO: 363557 - protein, 370 aa, unidentified
MSNATTFVGLDVHARSVKACAFVPETGETIRKSFGYEPGEIASWVSSLPQPARCVYESGVTGFHLCRELNAMGVACVIGAVSKMHKPAADRGRKTDRRDAQFLAVQLALGVVTEVHVPDAECEGARDLARALADARDDAVRAKQRLSKFLLRHGLVYDERNAAGQRRNRWTGDFWAWVGRIDLGDGAAMATLDHYCVRVREADAAKAALEAKVKTLAQQPRWKPTCDALKCLKGIDAVTAVSIACEADGFARFATASGFAAWVGLVPSEHSSGESRFRGGITKAGNKHLRKLLVEAAWHYKGASRSPKDLAKGQVVDAATRRHANAGVRRLVDRRRSMDDAGKQSSVANVAVARELACWCWAVGRMAEGA

SEQ ID NO: 363558 - protein, 342 aa, unidentified
MKEVSIVGLDLAKRVFQVHAAGSDGSVVLRRKLSRSHVLAFFTELPRCIVAMEACATAHYWAREIGKLGHDVRLIPPAYVKPFVKRQKNDAADAEAIVEAATRPSMRFVASKTESQQACSMIFRTRDLFVRQRTQLINALRAHLAEHGVIAPQGTANLPLLTQIIEEDRSGLELIVVETARLYLEQIEALSSRIIGLEKALKSEAKRSENTARLMSMPGMGPITAMAIEAFAPTMTTFRKSRDFAAWLGLVPRQHSSGGKQVLGRTSKMGQRDIRRLLIIGAMTVIRWACRKAPPENSWLARMLARKPRMLVAIALANKMARTIWAMMTKNEIYRNSSPAAA

SEQ ID NO: 363559 - protein, 392 aa, unidentified
MYIIGIDIGKNHHEASIVSPEGKQIGHSLRFATTHKGADSLMSFIFNNIGNSSCIFGMEATGHYWYPIYSFLKARGYTIYVINPIQSDSLRKMYIRQTKNDSIDSFLIAEVIRFGQFTTTSMADENILAMRQLCRYRDSVISSRTEIKLRISTIMEQIFPEYEKQFSSLWLSTSMGILEKYLTPENIENAPIDELFEIIKDKSHNKLTMKKAISIREAAADTFGIKIAQDAFSFQLKQLIDRMNFLDKQIEALDCQILEYYEKFDCYLHTIPGIGMIGAATILAEIGDISRFKNSSSLIAFAGIDPTVRQSGEFNSTHNHMSKRGSPYLRHAIFLAATTCSFHNSPLNAYYKKKRDQGKHHLTATGAVARKLTTVIYAVLRDSKPYEPKKFC

SEQ ID NO: 363560 - protein, 334 aa, unidentified
MTAIVTETLLAFDVGARTHEFVHETAGKLEQGQLQNDISAVRSFLARLLKDGRRLRVIMEATGIYFLDLALVAHELDAEVVVINPKAGHHFAKGLGLRSKTDAIDARMLLEFLRRMPLTRWEPPARECLQLRQIGRYLVQLTDESTAAKNRLHALESTEETPRFLREDLRRSIRSLEGRLERIRAQAIELIGRSESLNAAFQALNSMVGMGDKSAVAVLGELCVLPRSLSGRACTSHAGLDVRHHQSGTSVNKPGRISKHGNKYLRRALYMPALSAGTHDPHAAVFKQRLQARGKKGLQINTAIMRKMLTAAWAIVRDPTPYDGARLYATIEMP

SEQ ID NO: 363561 - protein, 347 aa, unidentified
MYYVGVDLHKESSWFYVMDESGKRVMSENVSNSPDVLNEFFQRISSPFYLAVEATYNWYFFVDIAEKYADEVYLANSYELKAFAKRHKKTDKIDAHLIADVLRKGYLPTVTIPGKHIRSIKEYLHYRMNLVSDRSRYISRLKSVLDKLGLPSSGDFTTYKRLNLISVEGLSEYYQKVICGYIENIRYLNRQIYQTEKMLEKIGEFDPDIRNLKTIPGIGDFSGALIKSEIIDINRFRSFNRLCAYAGLAPRVSKSSHKIFRGPLNKNRRKALQWILIEVAHHCIKGLSEKKKKYERIAKRKSRNTAKVCLARDLLKIVYHVLKEKRPFYLHKEEQIRSVAASALCGV

SEQ ID NO: 363562 - protein, 411 aa, unidentified
MDVFCGIDWAEDHHDIALVDRDGGLLARLRITDNAAGLAALLELLAEHGDSPDDPVPVAIETPRGLLTACLRVTGRKVYPVNPMAVARYRDRYSVAGGKSDKGDSLTLANVLRTDMHAHRPLPADTELAQAIAVLARAQQDAVWDRTTAHNKLRSHLREYFPGLLAAFAAARGGIMRPEARAVLAAAPTPAAAAALTLAQLRALLKKAGRSRGIDDEAHRLRTAFRTEQMRQPLLVEQAMGRQALALLRQLDAACVNADDLEQAAVESFNQHPDAEIITSFPGIGALTGARVLAETGDDRSRFKDAKGLKAYAGAAPITRASGKHKSVTRRHVKNNRLASAGYTWAFSALTASPGARAHYDRRRDDGDRHAAAQRNLFGRLLGCLHHCLITGQHYDETTAFPVQAAPPAAA

SEQ ID NO: 363563 - protein, 452 aa, unidentified
MQTNLGKAKILSLECIELNAAGIDVGATEIYVAVPPERDPQPVRSFPTFTTDLRQMAAWLVRCGITTVAMESTGVYWIPPHEILEEAGIRVCLVNSKHVKHVPGRKTDVQDCQWLQYLHSVGLLHASFRPDEKICAIRAVSRHRASLIECASAHVQHMHKALTQMNLQIHHVLSDITGLSGMAIIEAIVAGERDAVKLAALCHGSVRSKPEIVVKSLVGNYRSEHLFTLNQSLASYRHYQQLMADCDREIERLMRSVNGKIDPPQKEPMPPPDPRFLKRRKNQFHFEMAPELTRIFGVDLTAIPGISALTAHTLLAEIGPNLSRFPNVAAFVSWLALCPANKKSGGKVLSSKTRQTNSRASCALRIAAQTLARSRTRLGNFYRSIRSRLGGPQAITATAHKLARIVYHLLTTGQAYDEGVFVLEDQKQAKRQEKRLRKQAKTLGFQLVPIVA

SEQ ID NO: 363564 - protein, 406 aa, unidentified
MIYVGIDVSKDKHDCYIVNSDGVVLADVFSVENNLDGFDLLLQRLKSVAPDLLNVKVGLEATGHYSYNILGFLLDKGLATFVLNPLHTNLFRKSTSLRRTKTDRVDARTIAAMMSSGIVLKSYTAISYHNEELKSLSRYRFDKVCQRAKLKQSVSRLVTILFPELENLVPTLHIASVYALLAELPGAKQVASCHLTHLTNLLSAASKGHYDRSKAVVLRNAARRSIGSPMPAKSLELQHTIRLIRELDAEINEIEAAIKQFMDQIASPILTIPGISYRMGAMILAEIGDFSRFDSPDKILAYAGLSPSTYQSGKLDNAYAHMEKRGSRYLRYALYNAAKYVCHWDASFCAYLAKKRAEGKHYNVALSHAAKKLVRLIFALQRSGQPYCPTAYPRCSLRSLSASIST

SEQ ID NO: 363565 - protein, 424 aa, unidentified
MQTDGANQQQYAASIGFDWGDQQHAIALQAAGSGRVETQTIKQTPESLHDWVLSLRNRFGGRNVIIAIEQSRGAVINALLGRDFVHVMRVPPKSLARYREAFYPSGAKDDIPDASLLLEWARDHRDKVKVWTPDKPETRALQKLTEFRRDTVGRRIVITNMLTQSLKEYFPQALSWAGELNTPMACDFLEKWPTLVKLQKTKPAQIRKFYQEHGCRRTEVIQQRLEEIRSARPLTQDSAVISTSITVLETLIPQLRCLIDAIDRIESQIHVLFNKHEDRDIFDSFPGAGPVMAPRLLAAMGSDRSRYNAALEVQQHSGIAPVMERSGNSTWVHRRFACPKFFRQTFHEFAGLSIRYSSWACAYYKMQIDKGKGHHAAVRALAYKWIRIIYRCWQNRVPYNEEIYLEALRRKNAPLLEFLDQAAA

SEQ ID NO: 363566 - protein, 417 aa, unidentified
MIRKVMEVIHPSVAGLDVHKKTVMACRRRLIAEGQVESEVEQFGTSTMQLGRLAEWLAEWGTTHVAMEATGVLWVPIWNVLEGRFELLLANARHLKKVPGRKRDVSDAEWIAQLMQCGLLRASFVPSREVRHWRVLTRQRMKLIDQHTGVVNRLHKVLQQGNIKLSSVATDVMGVSGRAMIRAMIEGESDPEALAGLAKGRLKAKRDELVESLEGRLTDQRRWVLKELWGQLEFLEKEIGRYDDQVKERMSPHEKALEQLMTIDLIERRSAENLLAEIGPDMSVFPSDDHLVSWGGLCPGSDESAGKNRSGKTPKGNRWLRRALLEPAWCAARRKDGYLGALYRGIAMRRGEKRAAVAVARTILQAAWHVLKEGVEYKELGGDHFARLRGEQTKNNLIKRLEKLGYEVDLKPKQVTD

SEQ ID NO: 363567 - protein, 313 aa, unidentified
MSQNNTPILYVGLDVAKSSLQLHLAGQFHCLDNNSKGHAKLLKLLREHPSVHVICEATGGYEQPPVRVLQTAAIAVSIIEAGRVRHFAKAKGLRAKTDPIDAAVLTQYGQTFQPDATPMATASQRQLAEWTTRRTQLVELKVIETNRAEHYTDPFTQKQSRQLLKCLEKQIVQCEEQIAQLIAADPSLSGKANRLETIRGVGPATSATMLAHMPELGQLSREAAAALAGVAPYNQDSGNQASPRHIGGGRKTVRCALYMAALSAVRHEPILKEFYQRLLAKGKKPLIALTAVMRKLIVLMNRLLKNNEFQLAS

SEQ ID NO: 363568 - protein, 422 aa, unidentified
MVLKGVPMALKIVYQICCGIDVHKTFVVACIASTNKQGVTTYKRHRFSTFTQGLKELLQWLLDNHCKDVCMESTGKYWIPIYNVLEKDCNIVLAHPKYVKAIRGKKTDKKDAKWIADLFKHDLVAGSFMPPADIRQLRDLMRYRFKLTCFMSSEKNRLQNCLTVSNIQLASVVSDTFGKSSQRILDKILENPDDTSFDIEPLIHGSMKKKLPELELAIDGFITPEQAGKLKVIKKHFEDLESRKAELEKLILALASPYQQELDLILTAPSFKNKFTAIGIISEIGVSMEAFPSAKHLCSWAGLTPTNNESAGKKKSVRVSKAGCYIKPLLVQCANSVVKSEKHPEIRNRYLRLRKRRGHKKAIIAIARMLLTALYNMLKNKEPYNAELYRKSDALPVNREITIEQAILIAQFQGYKIKSAAE

SEQ ID NO: 363569 - protein, 374 aa, unidentified
MDEDSKLYVGLDVHKDSIAIGVAEAGRNAGRVVGQIPHDLARLLKTLARLGDCDEMHVVYEAGPTGYALQRSLSARGYRCEVIAPSLIPRRPGVRVKTDRRDCLLLAELARAGQLRAVWVPDPGDEAMRDLSRAREDALKARLQARQQLRAFLLRHGVRYSGKSAWTKTFHRWLGDLSFEDANRQIAFTEYVLAVQVADQRLQRVSESLVQAVSGWRFAPVVAALRALRGIDVVCAIGLMVEIGDIARFDHPRKLMAYLGLVPCEHSSGDRVRRGAITRSGNSHARRLLTEAAWNYRFKPRITRCSMRRQQDLSAPIQAIAWKAQVRLTGRYARLQARGVQPNKVCVAVARELTGFVWAIAQASSPACSNPVAC

SEQ ID NO: 363570 - protein, 415 aa, unidentified
MSSPLFVGIDVGSESNVVCCLTRDDEKRPVSRFTVTNNRPGILEFQDRITKLAQQLQSEEILFGLEHTGCYSTHAAMYLQRHLDFGVPRKVYVFNPSLIREFKKSHYLSAPKNDRVDAWFIAAKLRTGLLPHPFIWSEPLMALQRLTRARYHLMQDLTRESNFLMTNLFLKFSDYSLTGPFRRNKLSATSLAVIEEFESVEELAEMPLERLIDFLVEHGKNRFDNPEVVAQALQKAARSSYRLPQSMSDSVNLAMASSIRMIRTAQEQLKALRKGIEDHLATIPQTLDSIPGIGPIFASGIVAELDVSQFRSHAEAAKYTGLAWTVNQSGKFTANRTRLILSGNRYLKYYMVEAANSVRVHDPVFAEYYAKKKAEPKEFAEGRALALTARKLMRVVFYLLKTNRLYTPEVIRQEA

SEQ ID NO: 363571 - protein, 343 aa, unidentified
MKLHVVGIDLGKTVFHLVGLDSTGKVVIRKKCSRTQLLAFTANLQVQLIGMESCSGSHFLGRALREQGHEVRLMPAQYVKPYVQTNKSDFLDAEAIAEAVQRPRMRFVPIKTEEQLDLQALHRVRERWVMRRTAVVNQIRSLLLERGLTLPKGRSYVDRQLPRILEDGELRLSGSFRVLLAQLKLELEQLSARIEEMDRVIQKTAKENEDCQRLTEIPGIGPVTATALIAAVGNASAFQKGRNLAAWMGIVPGEYSTGGKQKLLGISKRGNKYLRTLFIQGARSVVQQRHKQSPGLSHWLAQLLGRTHQNVVIVALANKLVRMAWAVLCKNERYRAPVLAVTA

SEQ ID NO: 363572 - protein, 371 aa, unidentified
MEQSSKTLFVGLDVHKDSIAVAYAPEDRGAEVVSLGPIGTRQCDIDKLIRRLESKAATVVFTYEAGPCGYGLYRYLTGKGLACHVVAPSLIPRKAGDRVKTDRRDAMTLARLMRSGDLSAIYVPGIEDEALRDLSRGRDDAMQDLKRSKRRLKSFLLRQDIRYEGRANWNAGHLRWLSEVVCPTPPQQIVFQEYVRAVNEQHERVQRVEHELHEAVQGWRLYPMVQAIQALRGVELTSAVIVMTELGDLTRFDNPRQLMSYLGLTPSEYSSGARRQQGGITKAGNSHARRALVEGAWAYRYPAKVSRHLQLRLETLPAEVQAISWKAQVRLCKRYRQLTARGKHVNQVVVAIAREMAAFAWAIARLVPLAS

SEQ ID NO: 363573 - protein, 318 aa, unidentified
MESTGTYVGVDVSSDTLDIAAHPRQQVKNFRNDDAGISGAVTCLKRLAPVLVVMEATGGLETSLAAALGTVGIPVAVVNPRQVRDYARSMGKLAKTDTIDAQVMADFAAAVHPEPRPLADSQTQQLKDILTRRSQLNEMITAEKNRLYRARRPVSDHIKAHIAWLEQELDDMNSNLNHFIQESPIWREKDNLLRSVPGVGPILSSTLLAELPELGTLNRRQIAALAGVAPLNHDSGKFRGKRTVWGGRAKVRAVLYMATLVATRRNAVIQCFYERLIAAGKAKKAAITACMRKLLTIMNAMMKHRTPWHYISNQAVIS

SEQ ID NO: 363574 - protein, 320 aa, unidentified
MRNAVGLDISKLTFDATAIVGNAEYSAKFDNDSKGLDQFSDRLKSLGCQNLHICMEATGNYYEEVADYFAQYYSVYVVNLLKISKYAESRFKRTKTDKQDAKLIAQYCRSAKESELVKRQKPTDEQYRLSRMTAAYAQIKSECAAMKNRHHAAKDEEAAKAYAQIIKAMNEQLEVLKEKIKEQTEKPNCKEGVKRLETIPAIGRMTAAVLFHHLTSSKFETSNKFAAFAGLSPQQKESGTSVRGKGKLTKFGNRKLRAVLFMPAMVAYRIRAFPDFIKRLEEKKKPKKVIIAALMRKLAVIAYHVHKKGGDYDPSRYKSA

SEQ ID NO: 363575 - protein, 339 aa, unidentified
MYYGAIDLHKNNSVLGIINADGQRLYVRKIPNDLDLIKKALGPFAENLEGIVVESTYNWYWLVDGLQDAGYRMHLANPTAIQQYRGIKHTDDVTDAWWLAELLRTKQLKEGFVYPRAERAVRDLLRKRAHLVKQRTQNILSIQNLTSRNTGGRLNANQAKQLTEEAVQKCYEKEEERALAINCSLRVIQTLKREITLIEKQVKSKLKLSQPYQVLQSVPGIGELLAMVIMLEAGDMSRFPSVGDFSSYCRCVNSVRLSNGKKKGSGNRKNGNKYLSWAFMEAAHYAIRYYPVIRKFYQRKSAQKGMIVAQMAVAHKLARASYYVLRDQVPFEESKSFVH

SEQ ID NO: 363576 - protein, 343 aa, unidentified
MDTVTVMGCDPHLDTISVSVMDLMGRELAAVTVSNDRHGWCETAELAHQMGVTKVGIEGASGYGVNLSRVMSGIGFEVLEIPTRLTARHRRIDGAGKTDPGDARTIARTVTVGEGHRWADTPSLETIRLLVSRRDQLIKTQTGDINYLRSVLADIAPHLAATLGRVRSQRRLNELANLELDDPTPYQQQALQLIADTAHDCIQRLEQIRRIETELDTILPPVGRQMIDQIPGCGLITATQILAQLAGTTRTETDARFAAWSGIAPLDASSGRQQRHRLNTGGNRQLNRAIHTIVTTQARHHGQAHHYITRRISEGKTRKEAIRAAKRHVARNVWKLLRNHQLT

SEQ ID NO: 363577 - protein, 385 aa, unidentified
MKTTNTAPHDSVTTHPHDGAIFISLEMGRANWLVTALLPGSEKMSRHEVPGGDAAELFALTARLKGKVAKRTGPDIPVIAIQEAGTDGFWLHRMMLKEGIESYVVDATSIAVARKFRRTKTDAVDGMVLLRTLLAYKRGEPRVCSMVVTPSVEEEDRRRLSRERRNLVRERIRHSNRIKGFLIGHGIRGFNPLRLDRYERLEELRMPNGGELPPRIKTEIKRELDRLELVQRQIKDVCKERDSFMSAEAPASPAKTLVALKGIGEEIAATLWMEGLYRRFDNRRQLASYAGLAPSPWQSGDMQREQGISKSGNPRLRTCMVELCWLWLRHQPDSAVSKWFQERVRGDSGRIRRVMICALARKLLIALWRYVSTGELPEGAKLKAA

SEQ ID NO: 363578 - protein, 341 aa, unidentified
MNFIGLDIHKKTISYCVKDAAGEVLAEGTILSTRQSLDVWMRTLCEPWTVAMEATMFTGWIYDYLLPHAAAVKVAHPLMLRAIAAAKKKNDRIDACKIADCLRCNFLPECYMASTEIRERRRTLRYRKLLVRQNVQWRNKVSQMLMESGVVYNKQKLHKVGYFKELMTTNPDIGEGLRPLLTICRETIVRIGKTEGALVRSLARDPLLSDRVQRLMTIPAVGPITALTWVLEVDDVARFGSVKQAISYCGLCGAERSSADMVKRMPISKQRNKHLQSVLVEAAKLGPRLSPDLALVYETEKQKGHANRATIAVARKLVAYLLAVDRSGREFVVAGERREAA

SEQ ID NO: 363579 - protein, 349 aa, unidentified
MKIIGCDFHPGYQQIAMVETETGEFTQMRLSHSNNGEEARKFYAGLAGPVRVGLEASGQSQWFERLLAELGQELWIGDAGKIRASSDRKQKTDRRDAELILQLLLEERFPRIWVPTPAERDVRQLLLHRAKLVRVRTQVKNPLQALALNQGVQRKRKLWSAVGRQQLENLPLLPWASRRRTELLKLLDELDGSIVALDGAVCEEAHRRPAVRRLMTHPGVGPVTALAFVLTLGPAERFRRGKQVGSYFGLIPSEHSSGGKQRLGHISKQGSSFVRGLLVEAAQSAVRFEPQLRREYQRLAQRRCRALAKVAIARKLAVRLYWMLRADLDYARLIQGSHAEQPESFCGRG

SEQ ID NO: 363580 - protein, 319 aa, unidentified
MHCIGVDVSKQDLVAYDGQQQRVFPNDRGLTDFRRFVRQTKNAFIVFEPTSTYSRRLESFCRMAQIPCCQLNPRVVPHLRQVGKGRSKTDSTDAELLYRYGVERGHRETTQLTRDALADSIQAWLGMYRVTQKSRVAYQNMREALSHDPGIPASLLKELDEEIHALKVKEKAKIREAEKLITDHEDARRSFENLLSVPGIGPITALTLLVVFRRYPGTNRNRIVALVGFDPIQFQSGTSVHRNSRISKRGNREVRRRLFEATLAAARYNPGVRAIYKRLKAQGKPDKVARIAAARKLLLIAHAIFKSGDPFRTAAQLEG

SEQ ID NO: 363581 - protein, 337 aa, unidentified
MSLQLSSLCVLDSAGKVIREAKVASEPEALVAFLRALELPIARIGLEAGPLSQWLYDGLHKAGFEAVLLETRHVKAALSAMAVKTDRRDARGIAQLLRMGWYRPVHRKSVPSQEVRALLAARKQLQIKVMDLEQTLRGLLRGFGLKVGDVSRGKLAARIRELAAGHPMLERIVEPLLTARETMWHEFAKLHREVLVIVKADQVCRRLMTVPGVGAVISLTYRAAVDDPGRFAKSKSVGAFFGLTPKRYQSGETDVTGGITRIGDASVRTALHDAANVLLSRVTRFSTLKRWAMAVAQRRGMRRAKVALARKLATVLHRIWADGTDFVWGKDPTAAAA

SEQ ID NO: 363582 - protein, 364 aa, unidentified
MKKIRYVGLDVHKADICIAYARVGEEVCHYGTIPNTSAALASAVRKLTSSGDTLSFAYEAGPGGYGIYRQIQASGHSCMVAAPALIPRKPGDRIKTDKRDAAMLARLHRAGELTAVHVPDADDEAVRDLFRARCDAKQMEKIARQNLLSFLLRIGQHYSGNRHWTKMHWRWLEALSLSYAAQQLALQEYIDTIKQCQGRVVRYDQMLQQCAEEWKRAPDVRKLQVLRGVSFFTAVGIVAELGDLRRFHSAKQLMAYAGLVPSEHSSGSAIRRGAITKAGNRHVRWLLVESAWSYRLKARKSAYLLKRQREVSSEVADLSWKAQVRLCGRYQRLLHKGKPKGKIVVSIARELAGFIWALGRLGNE

SEQ ID NO: 363583 - protein, 356 aa, unidentified
MEKITRVGVDLAKNVMQVHAVDAAERVVVRKAIARERFVIWFANLEPCLVAMEACSAAHYWARKLRTLGHEVRLIPPQFAAPYRKGGPHVKNDAQDAEAICEAASRPQMRFVPIKSTAQQSVLVLHRMRTGFVEERTALVNRLRGLLAEFGVFLAQGICTLHQHVVDRIEDGSNELAGPARQALMRGWAQCQALDQEIAWLDKQIAEHAGHDPQAQRCMDVCGVGPLTASAAVATVVDARQFKNGRQMAAWIGTVPRQNSSGGKQRLGSITKQGNDYLRTLLFQGARSAVLTAHRRDDRLSRWIAQLQARVGYYKTLVAVANKHARILWAVLAKGEKFDPSHVCIAPRALICATNS

SEQ ID NO: 363584 - protein, 342 aa, unidentified
MNIVYVGVDLGSSNFHQVAVNEAGASKVNREFATSEANLIKAFADQRGEIHVHLEAGELAPWAISIIRPLVSRVVCSHPQSNAWIAKDADKSDRIDAFKLADLLRVNRFKEVHYPQQQSRRDFKTLVQHYDELTQQQARLKTKIKARLRMQGVIVRGEGLFSSKGRKAVLAAVKSVAVRTAIKQLYAVLDQSIESQTEARLLMRRAAQAFPEIRILQTAPGVGPIGACRFSAYIHTPSRFSSTRKLWKYCRLSVSHRSSNGKPLRRPRLDRNGCGRLKDVTRKAFEAALRTQRDNGFKRAYLRALETTHDKTHARLTVQRKIVSTLRAMWLNQTPYRDELMR

SEQ ID NO: 363585 - protein, 351 aa, unidentified
MKSMTYVGLDVHKKTIAYCVKTQSGQLVKEGEIVARRAELGAWASSLRRPWTGALEATLFTGWIYDFLKPHAAALKVAHPAMLKAIAASKKKNDRIDAKKIADLLRCDLLPECYMAPTEVRELRRVLRYRNLIVREATRMKNKISGLLMEVGETYDKKKLHGRKYFAQLTAGLEETPDSVQHLLRLSRSNLDLFDGLQKGLLQELGQDEQLAARVERLKQIRGVGDVLALTWALEVGEVTRFTSIRQAVSYCGLCAAQDSSAGQEHRGPISKQRNKHLQCMLIEAAKLAPRYNPQLHAVHERELARGNKNRATLAVARKLVAYLLAADKSDRPFEPKATGVKPGVAGMPRP

SEQ ID NO: 363586 - protein, 309 aa, unidentified
MEAIAVGIDVSKDRLDVHVHPTGTVLNFSRDGAGIEALTGALGAVAPQCVAVEATGGFETVVVAGLAAAGLPVVVVNPAQVRAFASALGRRAKTDPIDAAVIAQFAAATRPPVRPLPDAATQALADLVARRRQIIQMIVAEAQREKRAAPRTRRSIVRLLKTLRRELSEIDADIDETVRGSPVWCEKEELLATVPGVGAVTARTMLAELPELGHLGRRQIAALAGLAPFTRQSGKWRGKSFIGGGRASVRSALFMAAMTAMRRNPLLRAFHQRLRAAGKPKMVAMIAVARKLLTILNAILRDKIAWQNA

SEQ ID NO: 363587 - protein, 458 aa, unidentified
MTKQGGRPAASEPALPILDANAAGLDIGSAEIWVCVPADRDPTPVRRFGTYTPDLQQLADWLVACRVTSVAMEATGVYWLPAFEVLEARGLQVSLINPHQLKHVPGRKSDIQDCQWIQRLHSYGLLSGSFQPEADMRALRSYLRQRSTLLEHRAAHIQHMQKALLQMNLQLPQVVHDITGQTGLAIIRAIVAGERDPQRLAQHRQPGCAQSAATIAKALTGNYRAEHIFALKQALTLYDTYTQQVRECDAEIERQLQDLTADADDELPPPAQRSKPASRSKNGPSYDARGLLYKLTGVDLCAIPGLGPTTVQQILFEIGGSVAAWPTVKQFCSWLALAPHHEISGGKVLRRQVRKTGNRGGQAFRMAAQTLLRSPNNPLGAYSRRMRARHGPERAIIATAHKLARIFYHMLKHRMPFDPQQVTDDEQRSRQRKLTYLQREAAKYGLALTTINPTLSPT

SEQ ID NO: 363588 - protein, 409 aa, unidentified
METVFARVAGLDVHKNSVSGCVRCAEGGGRARKEARTFGTMTRDLLKLRDWLAEHKVTHVAMESTGVYWKPIYNILEGEFEVLLVNARHVKNVPGRKTDVKDCEWLAQLLQCGLLKGSFIPARNQREWRDLTRTRAQLVRQKAAVANRVQKVLEDANMKLASVASDVLGVSGRAMLEAMIAGREDAKALAQLARGRLREKIPQLELALEGRMSDHHRFLLRALLDQLAHLEGQIELFDRRIEQMNSPFVLAVEAVAAMPGFDRTSAQAVIAEIGTDMNVFPSADHLSSWCGICPGNHESAGKRQSGKTRKGNAWLRSILTQSAWAATHKKGSYFRAQYRRLVGRRGKKRALIAVAHSLLVVIYHLLHTGRSFEDLGMDYLDRRDVEKIARHHIKRLESLGYTVTKKNAA

SEQ ID NO: 363589 - protein, 375 aa, unidentified
MKEKLRYLGLDVHAETIAVAVAESDGEVRSLGTIPNRAESIRKLIKKLGPLDKLRACYEAGPTGYVVYWQLTELGIECEVVAPTLVPVKAGDRVKTDRRDAEKLARCYRSGDLTAVWIPDEGSEALRDLVRAREAAKQDQLRARHRLGKFLLRSGQRPPSGVKPWTRAYLIWVAQLRFTQIAQESTRLDYLHEVEHMRERVARLEQAITEALKLASPELQQVVNDLQALRGIADISAVTIAAELGQVSRFASARQLMGYCGVVPSEDSSGKRTRRGGITKTGNAHMRRIVVEAAWSYRRPPAIWYGLRRRQESISEEAKEIAWKAQHRLHKRYVKLGAAGKDQRKIATAVARELLGFIWAIGTRAETIVRQQAAV

SEQ ID NO: 363590 - protein, 378 aa, unidentified
MRNVALDLGTTKTSYCEVFQDEVVKRATVSSVESLQCLLGPKQPPARVAIEACREAWYVYDLMTSWGNDVLLVDTTRSKQLGIGQHGRKTDKIDAKTLALAVERGGIPAAHVLSPHRRELRRWLGVRRALVEARAHLVTTLRGFAREQGVKLPSCHVEKFPANVRRRKLPPSLHSLLEPGLRTLETIEPQLQDIESELAKLCAVEPVVQLLATAPGVALIVAASFVSVIDEAQRFHQAHEVESYLGLVPSENSSGGHRRLGAISKKGNGYLRTLLVQAAWSLWRTADRADPLRQWTDAVAKRRGKCVAVVALARRLTGVLWAMWRDGTVYDPETLAGNQARGVRRQAQTLEYQAAALERAARKRSFKRSKPIQEVTTL

SEQ ID NO: 363591 - protein, 341 aa, unidentified
MKKFIRTSIDLGKSYFQVHALESEGGQSISRKMKRSKMREFYEQIEPCRVGMEACGSGHYWARELVAMGHEVVLIPPAYIKPYVKRGKNDAVDAAAICEAMSRPGMRFVPIKSADQQAVLMLHKTREMFVKQRTMSVNALRGHLAEFGIIVAKGIGRVDELLALAQSDAELPQIAKSAVAGLAQHLEGLDQSIEAVGDEIARAHKKNPTSRLLDEIPGIGVLIASVIASSVPDPSVFKTGRDFAAWLGLTPKQNSSGGKEKLGSITKQGNRYIRKMLVVGATSVMRVSGKRKGALADWINALQAKKPKRVAAVALANKLARICWAIMSTGEGFRVDTYLKA

SEQ ID NO: 363592 - protein, 351 aa, unidentified
MKSITIGMDLGDKNNTVCVLDSQGNIVHKEHIENTEESILKCMKKLSNATVAIEAGTHSPWISRLLTGIGQTVLVGNPRKLRSIWQSEKKDDMRDAEMLARIARFDPDLLYPIQHKSKEAQADMSLLHTREALIKQRSSLINHIRGTVKSFGTRIADCSTESFHKQALSQIPEELQSTLCHVLKIIETLTQQIKIFDKKIEVISQERYPETELLREIKGVGPITALAYILTLKDPHKFARSRQVGSYIGLVPRRDQSGETDKQLHITKAGSPYLRKLLVNCAQYILGHFGEDCDLRRFGLRIASRGGKNAKRRAVVAVARKLSVLMHRLWKYGEIYDPLYMDNLKKIKKAA

SEQ ID NO: 363593 - protein, 321 aa, unidentified
MPVNECYVGIDVSKKWLDCGVWPSCEQFTEPNSPEGIARVLERVSALGPKLVAAEATGGLELPVITALAQAAREVAIVNPRRVREFARALGKDAKTDRIDAGMIARYVEVARPVRYRPPSPQRQTLAALVTRRRQLIDLATSERGRLASLPAQSEVRTMTQKHIDWLLVERGVLDARLLKEMSESPEQKEKYTLLRSVPGVGPVTASTLMASLPELGQLNRKQIAALVGVAPFNCDSAHRSYGARVIWGGRADVRSVLYMAALVGSKFNPVLKATYERLIGRGKVKKVALTACIRKLLLILNQITKTGEPWRLPRKPEVKP

SEQ ID NO: 363594 - protein, 412 aa, unidentified
MSVVQFTQVLLRGCGMDIHKKVVVATVQGEGICKETRSFDTFTRSLTQLREWLVSLGITHVAMESTGVYWKPIYNVFEGFIPHIWIVNARHIKNVPGHKTDKNDSEWICQLLMAGLLKPSFIPPKAQRELRDLTRYRRKLIQFVSANKNRIIRILEDGNIKLSSVLRDTSGATAVKLIDMLCDGKQITLSDIESVCHGRCQHTKEEMLEACTGCLDEHKVYMLGKIRECNASLKEDILDFDKRIKDVLSSYHDAIERMCEIPGIQNCVCEDLVAEIGLDMSNFPTSAHLCSWAGMCPGNNESAGKKKSGRTNHGDKQVKETLVEAAWAASRAKGTFFMERFNRLAPRKGSKKALIAVGHSLLKCIHYVLSTGGRYKELGDNYVPNKKEQKRKEYLKKELQKLGYSVKLSKED

SEQ ID NO: 363595 - protein, 401 aa, unidentified
MQVTRIGMDIAKQIFDLHRVDRRGKVTLRKTLRRERVLEFFAQLKPCEVGMEACAGAHYWHREISRLGHTVRLLSAHKVKPYVDGNKNNRHDAAAICEAMSRPSMRFVQPKTTAQQDLQTLHRARALLVRDLTALSNQVRGLLHEYGIVMRKGAAALRRVVPELLTGDDERITAVLKAVVAEQFERFKYLTLRIDRYDRQIGELCKQDQRCQRLLKVPGIGPLSATALVAAIGNGHEFKNGRHFSAYLGLVPGHSNTGDKTVMLPITKRGNRYLRTLLIHGGRSAVYAARRRSDPRSSWLNRLREISCHNVAAVALANKNARVAWAMLRYGEDYRASRAHRQSADLAAARSARPANRALAFAPHRARPAGQRREHFSAPPSVQTKGGAKNAKAESKKARQD

SEQ ID NO: 363596 - protein, 372 aa, unidentified
MNYNTVYVGMDVHKESFTLCSCKYEDEKASHYQRTPASYKNVLRYLAFLRTIYGEYTRFVCGYEAGCLGYSLYHQLENFNVECVILAPTTMLEQRSKRRIKTDKRDAEIIARSLAQHNYSPVHIPTETDNQTKEFIRMRDDHKAELKKIKQQILSFCLRQGYQYDGSGNWTAKHVKWLRSLEPAGLYKEILDEYLLTYTILTDKLNRLDQRIEELASKEEYKESVSKLTCFLGIKTHTALSVIVEVGDFQRFVSARKFAGYLGLVPGQHSSGDDRNGLGITKAGNTHVRRLLVESAQSYTRGKIGYKSRVLRSRQAGNSPQVINYADRANERLRRRYYKMVLKDGKKYNIAKTAIARELACFIWGMMTDNIY

SEQ ID NO: 363597 - protein, 419 aa, unidentified
MSNRVAKHLASIPPGTLLAGVDLSLDDLVVVVLNATANRLDRFRSDNHAAGYADFRQRLQRTVEKQGASGVWVGMEPTNYYWKQLGYDLEQHQIPFRLVNALTVKRHREGDQLDRSKDDWRDAFTIADLLRQGKFTETRLPHGVYAELHTGYIAYQRLRRDRGRQATLLVNAVRQLFPEFEQVFKDVTGATARAVIGAGLVPHLIDTHAENTFVASVRSQFSGQRLNVRPVRQLYALAAQSYGCTEATHALRQMAQQHVQMIELLDAQAEQLLQTLLTLFETLPEAPYLLSIQGLTAPSALGLVAYTGDLTQYPHGSALIKLAGTQPTPNTSGRKTYSATPFSHQGRSGLRTVLYFIALRLITQNDALHYHYQRLTTRAEEPLPKMQAIGACMNKLLWYAWHVVKRREMYDPHRWQTLN

SEQ ID NO: 363598 - protein, 370 aa, unidentified
MLNTTTFVGLDVHARSIKAVALDAMTGEVRSATFGYDAAEVAGWVSSVDPSAKCVYESGVTGFDLQKRLSSMGIDCVVGAVSKMIKPPADRKRKNDRNDAEFLARMLSVGNVVEVWVPDDGCEAARDLSRALDDAREDLKRCKQRLSKFLLRHGYVFSETTPTGRRKGNWTAAHWAWIKSISFPEKADNDVLAYYVDAVRQAMEDKARLERLVEAEASKPRWKRRVDSVRCLKGIDVTSAADLVFEAGEFSRFKSARSFAAWLGLTPSEHSSGESVRQGGITKAGNKHLRRVLVESAWHYLGCSPRSKDLAKGQVPDPAARRHAAKGVRRLVERRRAMLERGVHKNKANVATARELACWCWAVGRMIENG

SEQ ID NO: 363599 - protein, 356 aa, unidentified
MSAKTSDVDDLMVLYPCCAGLDVHKKTVVACIITTGERGKVSRQVRTFATTTVHLLELSDWLAEHEVSHVAMESTGVYWRPIFNILEATCEVILVNAQHMKAIPGRKTDILDSQWIATLLRHGLLKASFIPPRPIRDLRDLVRYRKSLVYARNQEVNRLHKLLETANIKLGSVASDILGKSGRDMLASLRQGVTDHTLLAELARGKLRGKLPELREALEGRVQAHHRLLLGHLLDHIEFLEQRVQTLEGELEPYLNPYQAEIALLVSIPGVAETTAATILGEIGAEMSAFPSAKHLASWAGVAPGNRQSGGKRLKAHTTKGNARLRAALAEVVWAISHTKDNYLRFVLISDKKREL

SEQ ID NO: 363600 - protein, 463 aa, unidentified
MQENRDTNSKPDNEAGIEGLPVIRPNVAGIDLGSEIHWVCAPNVNRTSVEVETFGATTPELERMAEWLKERKIESVAMESTGVYWIAPHEVLERHGLEVVLVNTRELARVPGRKKSDRVDCRWSQRLHSCGLLSGSFRPSEAVCRLRTLVRDKANLIAEAADWLRRMQKSLDQMNVRVHRAVSDLDGVTGMRMVRAIVGGERDARQLAKLRDRRCGKSEEQIAEQLTGHWREDHLFSLSQALKMYDAIQERIADYEQEILRQLGEMERAECRGQQPPKLNNPQKAKTIQKRGQEPLREALYRISGVDLTGIDAIGVETVQVVLSEYGPDLSKFPTEDQFVSHVMLAPHKPMSGGKAVKKKKRGSASTRVAAALRMAALSLRHSQTALGAYYRQIARRIDGDVAVFATARKLASLIYRLLRWGQPYVDEGAAAAEKRYQEARIQRLAAQAKDVGFHLTPNLSTT

SEQ ID NO: 363601 - protein, 336 aa, unidentified
MYSGIDLHSNNSVVAIIDDADRIVAQKRLPNDITKIVGFLARWQDDLAGVVVESTYNWYWLVDGLQDAGLHVHLANTAAIKQYDGLKHSGDETDAQHLAHLLRLGILPTGTILPREHRVVRDLARKRMQLVNCRTTHVLAVENIMARQLGERMTSNQIKQLTADTIDSLPLAADVGLAIKANVAVIATLQSQIEVLEKRLQERVKPQPQYGLLTSVPGIGQTLATVIFLETGPIDRFADVGNFASYARCVDSVHTSNRKKKGEGNVKNGNRYLAWAFVEAANFARRFCPEAKRFHERKKARTNNIVATKALAHKLARASYHILKEGKPFDATRCFA

SEQ ID NO: 363602 - protein, 343 aa, unidentified
MQTVTTIGLDIAKSVFQVHGINAEGNVILRRQLKRRYVLAFFQKLPPCLVGIEACASSHHWSRELQALGHTVRLMPPAYVKPYVKRHKNDAIDAEAICEAVTRPNMRFVATKTREQQSCLTLHRTRHLFIRQQTSVINAIRAHLAEFGIVAPVGRNGVEELLTVVADASDKRLLDVVRACVAALGTQLRTLKAQILQFDRLIMAWHRSNQASRRLDDIPGVGPILATALVATVADPRAFRSGRNFSAWIGIVPKQHSSGGKDRLGSISKRGDRYLRGLFVAGALAVIRYAKIQGTKRRPWLTALLARRPTKVAAIALANKIARMAWAMMAKGERYKEPVALAA

SEQ ID NO: 363603 - protein, 360 aa, unidentified
MNNQSLSNHQTIVGGVDTHKDLHFVAIVDAYDRVLSSNSFPTTRQGYKSMLDWMQSFGEVKRIGIECTGTYGVGLLRYLQQFDIEILEVTAPDKTIRRKRGKDDTIDAENAAHAAFAGIRTVTPKTRDGMVESLRVLKMCRKTAIAARRIALQMIQMNIISAPEAIRESLRTMTRMQLIRTLAAWRPDLSGYRDISTAYKIALKSLARRYLELHDEIADLDVMISVIVDELAPELITGKAIGYESAAQLLITIGDNPERLKSEASFAALCGVNPIPASSGRVNRHRLNRGGDRAANSALHIIAIGRLRIDARTKEYVEKRLTQGHTKLEALRCVKRYIAREIYYTVRKRNNLINSAQIAA

SEQ ID NO: 363604 - protein, 400 aa, unidentified
MLFAGWDWATTSHAITIVDASGSVVDRWTVHHTEADLDAALSRLASHAPPVELAVAIEATNGLVVDRLLTAGHRVIPVHATAFHAARPRWSAAGAKSDPGDSYKLADYLRTDGHRLRHLQPPDAVTRELQALVRLRADHLAAKTAASNQLWALLEAHWPGARAVWFRLASPIALDFLAAYPTPQAAAELTQTDIAAFCRQHAYRGGKSAAELLRRLRTAPAAPIGLHPGVLAQLVGAKVRLLRTLLAGITDLDQAINKHLGKHPKARLLAGLPYVGRISLAQLLAEVGPILDHASSVDQAAAEAGATPVTRASGKTSTVRFRMAANRNARQALHIFADNARHGSPWAAKLYADARARGKRHPQAIRILGRAWLRVIWACWHTNTPYDPAKHRAEQRLAAA

SEQ ID NO: 363605 - protein, 427 aa, unidentified
MNYTQNQKISQITPSTLIIGVDIAKDKHVARAQDDRGYEFGKRLIFENRIHGFQKLLDWVTKHQEENQKTHVIFGVEPTGHFWMSLAYYLTAKGYDFVLVNPMHVKKSKELDDNSPTKNDTKDARVIGQLIKDGRYSVPNLLEGIYAELREGVKLREQLVKQLMIVDGRIQNNIQRYFPELFDVFSAWDGKAAICTLRNFPFPSDIKEMTPEEVLETWKITIKRGVGIKRATKLVEAANKSIGIEVGLNFARRELSSLLDQYELYQEQLQELDQEIESVLENVPGAKEMIAIKGLGVITVATFFAEVGDISQYSHPQQLVNLGGLSLKEHSSGKYKGQTKISKRGRKRLRKALFQAVRPLVAHNPTFKALHHYYTKRPNRPLKKMQSLIAICCKLLRVLFVIGQRQCEFDGNKLLQGIPQTETLQAA

SEQ ID NO: 363606 - protein, 359 aa, unidentified
MFAGIDTHKDSLAVAVVDQVGLPVARADEPNTRSGFVRIGELLAKHHVTRVGIEGSGHYGRCVAAFLALDWDQAGVGVFEVPTLMTSRERGARPGKGKTDPIDAVAIARITMREPDLPPVRLAVGDAADLRALLDYRDDLVTERGDLVNRVHMDLHGMFPGYHHQIPDLVSKTHLEAAQLLLADDPRVRAEVTRRRLARIVAIDVEAAALKHRIAGLVVDTGSSLTGIYGVGPIVAARFLAEVVDINRYPNRNAFASANGTAPLSASSGRTQRHRFNPGGNRRLNRCLYTIAITQIRADTEGRAYYLRKREAGKTKREALRCLKRRLSDIVYSAMRRDADGVDAASAARARPTANRPAA

SEQ ID NO: 363607 - protein, 399 aa, unidentified
MGPHLRVGVDVGAKSHHVGIADREGRILENFVIPHSQEGFARFFARVEKHSAKLGVPVVVAMEGLHGWSRPLDQMILERGYRLYNVNNLKLARLGEIFPGGAKTDALDVGKILELWHLQDHLPVAKDVLQEVPEVPPENQKLKRLTRRRRQLVVEKVRVVNRMHSDLLAVCPELLAITGDPSNLWFLRFVASRDDLRELRQMVREEVLAIRGIGKKYAGVIAQWQKKARFSAEAEHVGPMIVADARRLLEVLQEIATLEEAIEGLVASSPLAQRIDSIPGFGAISSGQLAGEIGAMERFDSERSLALYLGMCPLDHQSGESKGSKRPRQVNRRGKATMMTAVARHMDSVPQSRAYYKKRAEGKNHNQAVRALGRQLVRVMWAMLTQDRDYALREDSCPG

SEQ ID NO: 363608 - protein, 350 aa, unidentified
MIIIGVDFHPEYQAIASVDTDTGEYQEKCLAHPKEAEEFYRSLSCVGRVVRVGMEASGHGRWFERLLEGLGVELWRGDAEVIRAKRGRKQKTDREDARHILKLLLKDDFPRIWVPNWENRDLRQLLWHRHRMVQARTRVMNQLQAVALNEGLRCKKRLFRADGRQQLESFQLAPWASRRRRELLELLDRLNPTIAELSQAVEREAEKCPEAQRLMTHPGVGALTALAFVLIIGETERFQCGKQIAAYLGLVPLEKSSGNRRRLGHITKQGSSIVRFLLVEAAQVTVRSLPEWRSKYIHLMMRRGRKTAKVAMARKLAVRLYWMWRKGWDYEQWKKFGSYVGQPVHRYGVQ

SEQ ID NO: 363609 - protein, 341 aa, unidentified
MKDMMIGVDLAKSVFVLHGASMTGQVKFRKKLLRSQFLKFMADQSPAVMVMESCGSAHYWARQMELGHKVRLIAPQYVRPFVKRQKNDAADAEAIVIAAQRPEMRFAEPKSELQQAKAVLFRARERLVHQRTELVNALRAVLYEYGHTIPQGIVHLKRIEALLDESNSDLPSLVREECRDLLAQIGDKTVRIEAKMKKIKEVAAETDPTRRLQTMPGVGPITALAVEAFAPAMASFKRGRDFAAWLGLVPRQHSTGGKERLGRVSKAGQVDIRQLLIIGAMSRLTWLGRKAIPEGSWLARMLGRKPKMLVGIALANKMARAIWAMLTKKEDYRDPALATAA

SEQ ID NO: 363610 - protein, 350 aa, unidentified
MKHFIGIDVASEVCAVTAMSNSGQVVLQCMAKTEANELKTAVKSVSKPRIVVFEECCQAAWLYSIFEPLCEDIIVCNPKKNKDLSGHSKSDKSDSYNLAERARGGHLSRVWHGCEELHILRERLKLYEQLTKESTSLKNKIKAVFRGRGITVGDGIYTADKRVELVKSLPFDAQRERVLCSGELLDEVSKRREKAKLALVEAARKHPRFDRLMEIPQIGEISAASIIATVGSAERFRTRKQFWSYCGFAVVTHETGQFAIDDFGRIKQKDRKIRTRGLVRQYNRQLKYIFKNAAVKLCSQDWMEQYEKLRSNGVSVENAKLTIARKISAVALKILKTGEHYDEKLVFSSK

SEQ ID NO: 363611 - protein, 352 aa, unidentified
MRQAKHADFSGQNIYAGLDVHRKSWKVSIYTEAFEHKTFTQPPNPRKLVSYLQRVFPNGHYHAVYEAGFSGFWTYDALTKMGVNCTVVHPGDVPTTDKDRRRKTDARDSRKLAKQLRSGVLEPIHIPSILERDNRGLLRQRKTVSRDAARAKVRIKHFLHFHGIEIPLRYCNTYWSANFLEWIRQCKLDNDTGRSTLLSLLRQYEYHRKEIAQIYREIRNLSRSPVYADNVNYLMTLPGIGRLSAMIWLTELGNIHRFKSFDKLCSYVGLVPLQHSSGETDHTGGLEHRGNKILRTLLIENAWVAVRSDPDLLTVYHQLIKRMKGQMAIIRIARKLLARIRYVLLNQCELQK

SEQ ID NO: 363612 - protein, 365 aa, unidentified
MKKSSKQRVKKNRGAVYASVGLDVSDRKSCWVGLDEEGKVSGRDQVGTRGPELEAWGMSIAPTLIAIEAGPHSPWISRLLSKCGHEVIVGNPAKIPSISRSRSKSDWRDAEQLARLARFDRSMLHEIRHRSEEAQKDLQIIRSRHATVQARSKLINHVRATVKAHGQYIQRCSSDAFVSRTREGLGAELLEIVSPVLEAIDRLSEAIHTYDGRIEQLARTRYPDTQWLTQIKGVGTLTALAYMLVLGDAARFRSSRMVGPYLGLTPARDQSGDADPQKGISKQGDRLMRALLIQSGHYILGPFGVDSDLRRHGEAIAARGGKNAKKRAAVAVSRKLSVLLHHLWVTHQEYVPLFNQSKTALVAAA

SEQ ID NO: 363613 - protein, 365 aa, unidentified
MNVIHYIGLDVHKKSISYCIKTADGRIVQEGKLAATRPALHEWAKAQSVPWHGAMEATLFSAWIYDTLKPYAERLVMGHPARMKAITAGKKKSDSIDARTIADLLRCDLLPTCYVMAPEMRDLRRLLRYRNMVVQQSVRMQNKMAGLLMESGTAFVKDKLHGKKYFSELIKSLEEVPESVKDLLRMSRGSMEMFESTQKQIIKRLLSEPALEQRVERLMSIRGVGPITALTWTLEVADPQRFSSIGDAVSYCGLTSAFRSSAGKEQRGPISKQRNAWLQTVLIEAAKLAPRWNPQLATLHAHQLGLGHANRATLQVARKLVAYLLAVDKSGQPFQVHTPPPPESAKAKNKTRRCNKKAAALPAVA

SEQ ID NO: 363614 - protein, 390 aa, unidentified
MNTDGARLASRRLPEGLAGIRGFHELVATHAEEPGHVVVGIETDRGLWVEALTAAGYQVYAVNPLAVARYRDRHHVSGAKSDAGDAKLLADLVRTDRHNHRMVAGDTPIAEAVKVLARGHQNLIWARIRQTNALRSALREYYPAALEAFDDLSDRDALAILGRAPTPAEAAHLILSKIRSALKAAGRQRNLDTRAQQIAALLRTEQLTAPAAVTAAFGATTRAAVGIIVELNCQIAELETELAAHFEKHPDADIYLSLPGLGVVLGARVLGEFGDDPNRYTDAKSRKNYAGTSPLTVASGKKRAVLARHVRNRRLYDAIDQWAFCALSTSPGARSYYDHRRAAGDLHHQALRALGNRLVGILHGCLRHRTIYNEHKAWAHRQTTHDTQAA

SEQ ID NO: 363615 - protein, 343 aa, unidentified
MQTVTTIGLDIAKSVFQVHGVDAVGQVVIRRQLKRRHVLAFFQKLPPCLVGIEACASSHHWSRELQALGHTVRLMPPAYVKPYVKRQKNDATDAEAICEAVGRANMRFVPTKSPEQQSGLVLHRTRHLFIRQQTSVINAIRAHCAEFGIVAPVGRRGVEELLQVVADTGDKRVPEIARACLSALGAQLRRLKEQILEFDRLITAWHRSSEMSRRLDDCPGVGPALATALVSTVADPKVFRSGRNFSAWIGLVPKQHSSGGKDRLGSISKQGDRYLRGLFVAGALAVIRYAKIHGTKHRPWLTALLARRPTKVAAIALANKIARMAWAMMAKGERYKEPVALAA

SEQ ID NO: 363616 - protein, 410 aa, unidentified
MEVLHPRCCGLDVHKDTVVACVRLGIDGKTVKEVRTFSTTTADLMALSQWLDENKCTHIAMESTGVYWKPVWHILADGEFELVLANAAHIKGVPGRKSDVKDADWVSDLLAHGLIRASFVPDSPTQEMRTLMRTRKQLSREKARHILRIQKTLEDANIKLDSVISDLMGVSGRKMIEALIAGQRDPAKLARLADPRVKASQETLRQALRGRVTRQHRFLLRLHLDQIDGLDAAIAKIDREVEAAIAPFRTAVEQISSVPGVKKLAALQIISEIGTDMSRFPNDANLVSWACICPRSDESAGKRRSTRIRKGSPWLKTALVQSAHSAVRMKGTYFQALFHRIRSRRGVKKAIVAVAASILTAIYHMLKDGTMFQDLGPDHFDRRTKEQQKNRLVKRLAELGYAVEVAPLPT

SEQ ID NO: 363617 - protein, 321 aa, unidentified
MNKNTEIFGIDISKDVFDVYSHQKGHQSFKNDAQGFKSFLKVITKDALVVMEATGYYHYLFAQFLHKKKVQVSVVNPLSVKRFIQMKLAKVKTDKSDAKAICEYGHMNEVPLYTGLTDVQAECLQLFRLLDNYLKKRTQTKNKLHGEEVLGIPSKYVYGSLKRDLKHLDKEIKGIEARLLELVKQDQQHQLTLLKSIPGMGMKTALFLIVVTDGFSKFETASQLCSYVGITPTIRESGSSVRGRSRISKVGNKKLRNLLFLCAFSACKHNKACREIYERIVNKGKSKKLALIAVANKLLKQAFAIAKSGRPYDENFVSKLA

SEQ ID NO: 363618 - protein, 365 aa, unidentified
MLYLGIDQHKRQLTVNVRGEDGKVVLKRQVSTQWEKVRAFFADLAEKAGPEGGFWAIVEVCGMNGWLLEMLAEYGCGEIVVTQPTSRSKQKTDRRDASQLSHGLWVHREQLAGGGHPSGLRRVEPATAQQAEDRQLTTLRAMLTKKRTAVLNGIHKILRKHNREQECPTKVFQTKKVRRWLAEMELPRMDRLELDLLLPQWELFDQQLEVVEAKIAERAEADQQAKLLESMPGMGHYSAVAIASRIGDIERFRRPGSLANYFGLTPGCRNSGEATNRLGSITKRGSKLVRYLLGQAVVKVLRFDAGMRDWYKRIKRRRGSKIARVAVMRRMVTILWHMLKKKQRYHYELLLKKHQEFVAFEGSTG

SEQ ID NO: 363619 - protein, 336 aa, unidentified
MKKYIGLDAHSSTCSFCVMDEAGKIIDTAQIVTNGRLLVDYLRSISGIKELTFEECELSSWLHEILRKEVNKVLVCNPVENRQYKKAKTDKLDAMNLAKLLRGDFLKEVYHDGSDKEKLRDLMSGYQDLVEDAVRIKNRYKSLFRKEGKRRSGKALYRDENFLEELDREDFKFIGKHCFDLLGSMEKSRISYVKEIKKLSKKHKEIRYLKTLTGISDIHAAKIVAQVIDPHRFSTKYKYYSYCGLVRHRQISGGKIYGDKKIWGNRVLKCVYKMAAESVLRGNSKLRKYYDHLRDKGTGHKNAKNAVARKIAAISLAMLKKGEKYREEMITNDLVK

SEQ ID NO: 363620 - protein, 408 aa, unidentified
MQVTFGIDVSKSTSTVCELIGESKNELTITNNRPGFIQLLHELAAFSKHPQIIFEATGVYSRRLQAFLEDYGYEYVILNPLKAKKEMDMGLRHNKTDKTDAYHLALIQRLYHHPINQLQSQTYKQLNALSRFYDQLTADLVMAKNRLHQALQSTFPEIENLFSSAKGKNYWQIVVRYPHCDLVRREDKKQLINWLMSLKGIAFKHALRTADKLIELAYQAYPVVSCSSIEVEQVQYYAHRLLNLSDQRENLIARMVKLAKSLPNHDLENLESIPGFAQTTAVRVLAELGDLRRFSNPNKINAFIGIDPGRYQSGEMDSNLSITKHGNAVARKLLYRAIGQIDNAAKTNPCHIADYYESKKLSSQTKGFKKIAIASIHKLIRTIYALIINDQPYDYNVATHNQKDFSRN

SEQ ID NO: 363621 - protein, 367 aa, unidentified
MKEQENKRNKITIGLDLGDRRHRFCVLGEKGEVLEEGSVGNNRAALSELGGRYPEALVVMEAGCHSPWVSRHLEQAGCEVVVSNPRKTRAIYQHERKSDRRDALMLARIARMEPALLYPVRHGSEEAQQELLRIKLRDSVVRARVALINSLRFTLKSLGYSIANPSTERFHKVIQSALPQSVAQVIAPSVQALEELTLRIKLLEREISDQARSKYPDTAWLEQIPGVGPITALYFVLKIEDPARFKRARDVGAFLGLCPRRDQSGENDPQLRISKRGDAYLRRLLVSSAQYILGPFAPPSALRQYGLALASGATARAKKRAVVAVARKLAVLLLTLWKNKSSYEAFPQRSSREKMRTNDLERLRCIA

SEQ ID NO: 363622 - protein, 389 aa, unidentified
MYFIGIDISKYKHDCCIISAADQKVVSKVTIKNNKAGFNELLTIIHSLANPADIRIGFESTAHYALNLELFLENSLLTFMEVNPVLISEYKKSKTLRRTKTDSVDCESIARWLMTVEYKPHSKGFYHAYSLKSLTRLRDKLIRQRSFYLIKITNVLDHTFPEFKPFFNERLSKTALYLLENYGSAEKMARMNSASYEKLRSLSRGKFSPQQFLRLKELAANTVGVNNSIFDVELNSLLSLYKSLVKEINTIEKEINKLIEEVHPHYMSVPGIGPLSAAVIYSEYGDISNFTNPGQMLAFAGIEPGINESGTESHGGKMVKRGSSQLRYTLINCCLPLIRFDMTFATYYAKKRGEGKPHRVAITHVAKKLIRVIYALERQDIDFNAQKLR

SEQ ID NO: 363623 - protein, 332 aa, unidentified
MWYAGIDLHRRTAVVAMVDDAMNRVRPRTFQCSRPREIVEFISKHRPFRAVIEASCAYRWLHDMLAPHGEVVLAHPLLLKSVWNTRAKTDKRDAEELADLLRSDRIPRAYIPPERYQGLRDLTRERARLVWGRTEAENALHSILWRANLESPFASLSGKAALAWLESVELPAYVAPMRDERVERVRYFERATAGLDADLARVAEGFPETAALTDIHGIGLYSALLIIAEIGEPDRFTNPGQVAAYAGLTPRVRQSGDSDRRGRISKDGSRWLRWILGQAAMKVTRRDEALRRFYERVRRRAGKMRARTAVARKLAEISWKRLVSWQRRDPTT

SEQ ID NO: 363624 - protein, 349 aa, unidentified
MNILAIDLGKYKSVFCMYETVTNNHKFGTVKTSPQDIHDLITEKNPDRIVFEIGTAAGWITDIARTLSKEVEVANTTHDAWRWKNIKRKTDRDDALKLAQLSAMQQLPNVYIPQKDVREKRAFIQYRQKLIGRRTQIKNTIRAILQRQGIAMPIGKNAWTKDNAKWLRSIARPLGKINNPDDLWKGQLHTELKQLSDINTAIERVQAKLDKIGKTDTQVQRLQTVAGVGPRAAEAIVAFIDDPNRFKNAKQVGNYVGFTPRRYQSSDVDIYGKISKQGNKLLRSLLIEISWTALRYNPWARDMYNRLLRGDKKRKKAAIVALARKILVRCWAMMRDRTDWNQNISKVAA

SEQ ID NO: 363625 - protein, 350 aa, unidentified
MHSTTAPLASIGIDIGKEVFHIVGLETDGKIAFRRKIKRLALVESFKKMAPCVVGMEACLSAHFVSRVLRQLGHEPRIIPAIYVKPFVKGQKNDYNDAEAIAEASLRPNLRSVREKTQDQLDLQACHRVRSRLVSRRTATINQIRAFLIEQGIAVRTGATALRNSLPAILKNREDEISPRMRGLIAGLYEDWICLDERIETIAGEIEKIGEKEANCRRLMSVPGIGPLISTAVVAAIGTGEAFERGRDFGAWLGLVPRQYSTGGRSILGRISKRGSKYLRTLFIQAANVILMRPHNWERFSFGTWLSNAAPRLHRNKLATALANKLARIAWSILHNQKIFDAPHHEVMAI

SEQ ID NO: 363626 - protein, 337 aa, unidentified
MKHCGIDLHSNNSVVIVSDEEDRIVFNQRLPNDLGQIRAALEPHRTDLAGVVIESTYNWYWLVDGLMDAGYRVHLAHPSAIKKYEGLKHSGDFADAAYLAQLLRLGLLAEGYIYPREERGARDLARKRMQLVRYRTAQILSIENILIRQTGGRMKGEAVKRLTAEQVEAFGFAPDVALAMEANRAVSQALGQQIEALERRLKERVRLRPEYHLLKTVPGIGETLATTIMLETGCIGRFAQVGNFSSYCRCVDSLRESNGKKKGEGNTKNGNKYLAWAFVEAANFAVRYCPQAKSFYDRKKSKTNRVLAIKALAHKLARACYHMLRDQKPFDVSRCFG

SEQ ID NO: 363627 - protein, 361 aa, unidentified
MKNTTHYLIAEVPRRRTRADLTIGIDLGDVWSHYCTLNEDGEVVDRGRFRTTPKAIQKWFTDVPHARVAMEAGVHSIWISEQLQELGHDVIVANVRELRAISHSDRKSDQVDAEKLARYARLDPNILWPISHRTIEQQEALTVIRARDLLVRLRTSAVNAVRGLTKACGHRMPASSTRCFAQRSLAVMPPGLHQALGPVLQQIAEMTLKIKQYDRQIQQMTQTEYPDTQALMKVDGVGHITALTFVLTLGSKQRFERSRDVGCYLGLRPRRSQSGERDPQLGITKAGNAYLRSLLIECANHILRPHGRDSALRQWGLHLAARGGKQAKSKAVVALARKLAVLLHRLWTTQELYMPFYEAAA

SEQ ID NO: 363628 - protein, 401 aa, unidentified
MNPHLCVGIDVGCRTHRVGIACPDGSILEEFNISHSQVGFEKLFRHIEKHRQELSLPVAVAMEGFNGHARPLDRLVQGKGYRLYNVNNLKLARFKEVFPGAAKTDAIDARKILQLFVLKDHLPIAKSALQEVVATPAVNDKLKRLTRRRKRLVLEKARVLNRMQSDLQAVCPELLAATPDADNLWFLRFLTYRKDLQQLARLRRNTVLQIRGVGQKYARLIEEWQKKAHFSSEVEYVGPMIIADAKRNLELHRQIHALDDALQALAQESEIARHLASIGGFGKTSVAELAGEIGTVKRFASEGSLALYLGMSPLTQQSGQTAKARYPRQVNRCAKAAMMTAVAHHARWVPESKAYYDRKRAEGKHHNQAVRALGRHLVRVIWAMLRDGRDYEIREDIHPTT

SEQ ID NO: 363629 - protein, 355 aa, unidentified
MSVGLDVHARSVVGAALDGVTGEVHRRRLTPDSGEILSWVQSLPGPVRVAYEAGPTGFGLARFLTAAGVPCLVAAPSKLQRPTGDRVKTDARDALHLARLLKLGEIVEVTVPSVAQESARDLVRAREDARADLMRTRHRLSKLLLRQGIVYSDGQPWTGRHDLWLRGQTFPETGRRVAFDSAYEAMLFTVARRDRLDAAITELAMNSEFTDVVHRLGCLRGVSTLTGFGLAVEIGDWHRFTGATIGAYLGLVPTEHSSGGSRSQGSITKTGNTHARRLLVEAAWHHRRDYRSPGATMRTRWEQAPPAARARGHDGNRRLHHRWQVFNERKKKPVIANVAIARELAGWCWSLAVLQ

SEQ ID NO: 363630 - protein, 422 aa, unidentified
MRAVGLDVHLDFCEVAIVEGGEVRSAGRIETKPEQIELFAGSLGPADRVALEVTGNAWEIARILEPHVAQVVVVSPSDTGIRQARAKTDRLDARTLARLLAAGSLDAVWMPDQRTWVMRRRLARRDQLVRARTRTKNEIHAVLMRRLIGRAPVSDLFGVKGRRWLAGLELPLEERETVDGAIRQIEFLDAEIAEVERLIALDALTSPEIRRLMSVPGVNVIVAATFLAAIGDIGRFQSPRKLVGYLGLDPRVRQSGSGPATHGRISKQGSVRARHVLVEASWSTVRQPGPTRAFYQRVRARRGHQVAVVAAARKLACLFWCLLTREEDYAYQQPSLTKKKLRRLELTAGAPSQKGANTGLWAANAAMRDAERELASQAEVAYQRTVRDWHTVQAAKAGASATPGRASQQPSKGKAARQTTSP

SEQ ID NO: 363631 - protein, 388 aa, unidentified
MTQTPVPQPTYTAADFDRTLILALEVSEKSWVVAAQVPGLPGSKPRRTLSPTAEALLEAVETYRARAARAGRIVDRVVLVYEAGYSGFWLARWLARHAVDTFVIQPSSVPVDRRARRAKSDGIDAELLLRTLLAWLRGEPRVCSMVPIPTEADEDARRCVRERQDLLGERVAIANGIASILATLGARGYDPMRRDRRQRLEGVRTALGDPLPPQARARIGRMLDRLELVLTQIAALERQRDAVLDEAAPGEAERMIQRLVRLRGIGVQSATLLVREAFVRPFANGKALGAYAGLSPTPYSSGGTEREQGIGRAGNARLRTVLVELAWIWQRYQPGSAIVGWFRDRLGGAARRLRKVMVVALARKLLIALWRFATQGVIPEGAALEPAA

SEQ ID NO: 363632 - protein, 364 aa, unidentified
MKRKVYVGMDVHKETIRIAYLTSNSKEILKEQQIKHNEVQIKKFIKKLKTEWNEIHCCYEAGVTGYPLYRYLKSLGVNCILVAPGKIPRQNTDKIKTDKRDAIKLARLMRSGELESIHVPSEEDEAVRDYLRSRDSLRLDLGRNRQRLMKFLLRKDIKYSTTKYWTVSHYKWLNNLHFNNEILQETFNDYYSRVRVQEENLKAMDKKIQEIAESEPYREKVGILRCFRGVDYLTAMFLLCEVNDFKRFKTAGSFMSFLGLVPGEYSSGSKRKQTGITKTGSPRLRRILTEAAWQHRFPGTGSKIVTARRSGQPALVVALAEKASLRLHKKFRNLQLRGKTPQVMITAVSRELSGFLWAAMNLVA

SEQ ID NO: 363633 - protein, 397 aa, unidentified
MFQKSKSTIAILQPGGTIIRKPFNVPHTSQNLIELADYLGSLEGSTKIVMECTGRYHEPMLKALYEAGLFVSVVNPHLIKNFGNNSLRRVKSDPADARRIARYTLDNWAELRQYSGMDNTRTQLKTLNSQFSFFMKQKVAAKANLIALLDNTYPGVNKLFDSPPREDGSEKWVDYAYSFWHVDCVRRIGLKTFTERYRAFCRKHHYIFQPDKPEKLFHASKELVAVFPKEKTYKLLIQQSIQQLNLASGHVERLRQEMNALASTLPEYSTVMGIYGVGKTYGPQLIAEIGDVSRFTHREALTAFAGVDPGVDESGQHKSKSNRASKVGSARLRKTLFQIMTTLLQNAPEDDSVYRFLDKKQVQGKPYYVYMTAGANKFLRIYYGKVKECLRNLEQAE

SEQ ID NO: 363634 - protein, 347 aa, unidentified
MNRPALYVGIDISSKTFTSSIGCVSSTWRIQVKPKQFENTIEGFGMYLHWLMQHHATPTNAIICMEATGVYNEMLAHFLVAKGYKVSIEPPLKVKRAFQPAGHKSDAVDSTQISEYAYRFWDELRLWKPREEVVEQIKTLLTIREQFVVEKTGHLNALKALKRKAIRTPLAEAMHETTIAQLKAHILEIEKEIKRLIDQDPDFRNMIWLLTSIPGVGLMLAAHMLVVIQSSPHPLSAKKLAAFLGICPYERSSGTSIHRSSTSRHYGPPGLRRLLYLAALSVRTHHPCFRRYFYRKVQEGKPPKLVINNIANKLLKIMVAVLKSNTPYIPNFQSVNPAIFNVPLTKS

SEQ ID NO: 363635 - protein, 311 aa, unidentified
MNTTLCGIDISKDWLDAHIEPMGAANRFANDAAGIADLAAWCQNHDVELVIMEASGGGWPLAFLLLWEMGQPCGMANARSVRYFAEAMGFLEKTDRIDAAVIARYGAVKRLKPTPPPSAAQQRLKALVARLSQVGGDLTIQKQRKSTADAETIASLDEVIALLARQSRRLEGEIATLIDDDPLWACLDRAFRSLKGVASRTVARLMAQLPEIGILSNKAIAKLAGLAPIANDSGKRSGRRPVRGGRAGPRGVLFLVASIVAKYDPHLAAFKQRLQTAGKEKMVIRIALARKLLVILNAKARDARNEFANAT

SEQ ID NO: 363636 - protein, 349 aa, unidentified
MVIIGCDYHPSGQQVFGIDTESGEVVADRWIAHTGKEVEQFYGAWPAGTVVGVESSGNLLWFERRLAQYGHQLRLGDAAKIRTKETRKQKHDRRDAELIARLLREGSFPDLMHRHKLVRMRAQVKNQLQHIAMNQGQQKKQQLWTKAGRELLEKLPLEPWTARRRNDLLRWLDLLNRDCESLEMAVEQAAEARADERLLMTHPGVGPVISLGFVLTIGAIERFARSRQLVSYLGLNPSEDSSGERRRLGGISKQGNSFMRRLLIQGAQTAVRGDDALNRQYRRLANKKHRAVAKVMVARKLAVRMFWMLKTQKTHAELVRMRGSSNHPGVVKTERLSERPASPQTQPQG

SEQ ID NO: 363637 - protein, 416 aa, unidentified
MALKIIYPICCGIDVHKSFVVACIAATDKGVTTYKRRRFSTFTRDLRLLAQWLADNGCRDVCMESTGKYWIPVYNILESTCKVVLAHPKYVKAIRGKKTDARDAKWIADIFKHDLVSGSFIPPFDIRQLRDLMRYRVKLTQFSVGEKNRAQNCLTVSNIKLDDVFSDVFGKSASAITEQLLLHPDGSFDVIPFIDRRCKASPEKVQAAIDGLLCSEQAQKLKIIPSHMDSLELCKTNLESVILSLAEQFRPQIELVMTVPGIQLFSAISIIAEIGVDMSVFPTAKHLCSWAGLVPQNNESAGKKKSTRITRAGAYIKPLLVQCALTVCKSDKHPEIKSRYLALKKRRGHKKAIIAICRMLLTAIYAILKNSEAYNPNLYRKVVSLPAGRVFTIEQAVAFIQRHGFLVVDSDGVIAS

SEQ ID NO: 363638 - protein, 338 aa, unidentified
MNEWTVAIGVDTHKRTHTAAALDRFGKRVGALEIEASSAGYQRLWQWASDFGACCFAIEGAGSYGAGLARFLRERQAEVYECERPKRRDRRRGKNDQRDAVLAARRLLAPEEGLSELRGGGALRETLRVLLLERRSADDARTAALNQLHSFAVTAPLAEPGLAALRGEPLARAAAELVDAEAPPALVEAVRRLAARALALSAELRTVEKQIQSLLSERAAPLLAECGVGPMTAAQLLVSSGDPRRMRSEASFAALAGTSPVEASSGPIKRHRLNRGGDRQLNRALHMISLNRCRYHAQTAAYFQRKLAQGKTKREARRCVKRMLARRFYQQLCALPPT

SEQ ID NO: 363639 - protein, 378 aa, unidentified
MNRIIKIGMDVHTSNYTLCIFEPSFEHDGTVHCITQVKPEIKKIIHVIETFKKKHENEELNIVCGYEAGCLGYSLYHELKEKGVECVILAPTTMKTEKGGRKLKNDYRDAKMIAECLAYGGYSAVHVPTELDNSVKEFIRMRDDIKENLKSIKQQIIAFLTRNGKQFEGKSFWTRKHIDWINTVSFSEPLLQDTLKEYMIEYNHLCNRIETLDRQIEEISLKEEYVEKVQQLQCLIGIKTHTALSLIVETSDFNRFKKGNMYSAYLGLIPGDDSSGGHENKLGITKAGNSHLRRLLVEAAQGYTRGRVGFKSKDLKSRQEKCSSEVVAYADRANERLRRKYYRMTLRGKKFNVAKTAIARELACFVWGIMTDHIDLCN

SEQ ID NO: 363640 - protein, 412 aa, unidentified
MRRIRNRVAGLDVHRDTVVACCQVAHPNQSVEVTKQSFSTTSKGLGELATWLRDAGVETVAMEATGVYWKPVYYSLEGLFEDLWLCNAQHVKNVPGRKTDLADAEWLADVAAHGMVRPSFVPPPEIRELRELTRYRKTQVQARAKEIQRLEKCLQDAGIKLTSVASRVWSMSSREMIEAMIDGERDPKALAAMAKSRLRAKIPALEEAFSGHFGAHHATVCRQVIEHIDFLDRSIATLSADITERVCPFEPAFIILCSIPGVSERTAEVMIAEMGVDMTRFPTAGQLCAWAGVAPASHESAGKRRPAGTRQGSTSLQIALVEAAKAASRTKGTHYSAQYSRLAKRRGANRATVAVAHSILDVAWHLLTNGTLYNDPGAQFFESRHDPEVEAKRLQRKIEALGFEVNLTHTAA

SEQ ID NO: 363641 - protein, 338 aa, unidentified
MELSVIGMDIAKNVFQLHCVDRQTGEIERIKLRRNEVLPYFARRTPALVAMEACGGAHWWARQLQQLGHTVRLLPAKAVRPFVLRNKTDAADARAIWTAVQQPEMKTVAIKTEYQQSILALHRMRAQLLKFRHMQTNAIRGLLLEFGHPLPESYLALRKAFPTVMATLDKQLPGILIETLREQWARVQSLDNEIALIEGRLKRALAETPTCQMISDIPGVGLMTATAAVATMGDPASFKTGREFAAWLGLVPRQTGTGGRIRQLGISKRGDAYLRTLLMHGARAIIARRTYSDWVAGLIARRPYSVVIAAIANKLARTIWAVLATGKRYDGAAFAAAI

SEQ ID NO: 363642 - protein, 372 aa, unidentified
MKKVLKQCVGIDCAKDELAVCFGQLSEAMDISHKATAVFTNTLGGFKKLASWAQKLADSEVPVCFVIEATGVYHQKITSYLFDAGNPISVVLPNKASHFAKTLKVRTVNDKESSKMLATLGLEKQLDAWQKPEAIFTHLKQLTRERERLINEITVCKNQLHAEEHGAYGLPSTVKRIKKLIAFMDKQVRQIAQEITLLIESHAELDEKIKKACTIPGIGLITAVTIVAECNGFNLIRNSKQLVSYAGYDVVEKQSGTSVLGKAHISGHGNKHIRKVLHFPAITHVKYDIHHQNLYTRLESKHGIKMKAYTAIQRKLLVLIYTLWKKNESYRPMYHNEKPSSPKNLEQPLKVALTGLDLVRPHDIDISVCKDK

SEQ ID NO: 363643 - protein, 422 aa, unidentified
MTTQTSHDTFAAFVGIDWADAKHDGCLQAAGSAKRECFQLEHTPEAIDAWVTTLRTRFYGQPVAICLELNKGPLVFALRKYDFLVLFPINPLTLARYREAFTPSRAKDDPTDAALQLELLLTHRDKLQPLNPQSPTMRALEQLVAHRRRVVGDKVRITNRLTSTLKNYFPQVLQWFQDKDTHIFCDFLSRWPTLKAAQLARRTTLETFFRDHHVRSEDVIAQRRHAIKTATPLTTDEGVITPHALLVQALVAQLRVTLQAIADFDIAIAQRAQTHPDFPLFQALPGAGPVFASRLLVAFGEQRARYASAAELQKYAGIAPVTERSGKKSWVHWRLQCPKFLRQTFVEWAAESIRHSFWAQIYYQQQRDKGKAHQAAVRALAFKWISILYRCWQDRTPYDESAYLQALNQRGSSLMQNFAKVS

SEQ ID NO: 363644 - protein, 419 aa, unidentified
MRNSNTKKLKRISEQTLLVTVDIGKVKHTGYYRFPDGTDGKAFEFCNSRKGFEEMWQRVCRAKKVRNLTEVVMGFESTGPYAEPLLHFLKRHNVRLVQVNPFHTKRLKELQGNSPNKTDQKDPKVIADIIGLGHALTVIIPEGTVAELRRLTQARERSIQRMSILMNQLQDLIFLIFPEFMTVMKDITIKSTQHLLKNYPKPDDVVETGVELLTQILKKVSRGRLGKERAEALYHAAEESVGIVEGQESIVFEIKEIVSVIESIETFIKELEKHMSKHLKDVPYSRCILSMKGIGEITAAGLIGEMGDFKNYRTISEVIKHAGLDLFEISSGKHRGTRRISKRGRPLLRKLLFFASINVVRKGGILHKQYQHHLEKGMPKIKALVAISRKLLSIIFALVRDHSVYIAQYSKTQRLKEAA

SEQ ID NO: 363645 - protein, 353 aa, unidentified
MNSLTDLREVVDVVIGVDTHVHTHSAAVVDAATGGVLDEITVEATAEGYCELVEFANNHPMLRAWAIEGTGGHGAGLSRHLLEMSEIVIELDRPKRAARRNGAKSDPLDAIRAAREAMARPRLGTPRTGGERQALSVLLAARRSAINASTEAQQQVFSLVIAAPEPIRVRFRGQKLAAMLNTAANLRVHASWDTETTSTVVALRTLARRAHAMLKEARELQKAIVAIIRSWRPDLLEEFGVGPIVAATVLCAWSHPGRIHSEAAFAMLAGVAPIPANSGKVTTRYRLNRYGDRQLNNALHTVVQSRIQYQPATRDYVARRTAEGKTSREIKRCLARYVARDLYRLLENTATAA

SEQ ID NO: 363646 - protein, 315 aa, unidentified
MQEEWIGIDVSKAELAVAAFRSGEQWTVACTEEGLDGLTEKLKALNPAGIVMEATGGEEIKVTGFLAEASLPVAIVNPRQVRDFARALGVLAKTDRIDAHVIARFAAMVKPKPKPLANPVEQDLKTLMARRRQLVSMLTAEKNRLSRATKTIQPNIQEHIVWLKERVKDLDKRLGQMIQKSPFWQAKEDLLRSVPGVGPILARTLVSGLPELGNLNRKQIAVLVGVAPLNRDSGGVKGQRTIWGGRADVRCALYMGTLAAIRTNSAIQAFYERLRKGGKKPKVALTACMRKLLTILNAMLKHQIAWHGVLSNATA

SEQ ID NO: 363647 - protein, 353 aa, unidentified
MCNILAIDLGKFNSAVCIFDRSSLKCKYKTVRTRKQVMHDLFVEYQDKIEIVLFETGSQMGWVADILWALKIPFEVANTNHAAWKWKNNPNKSDRKDAQRLAMMYHTGFFPTVHVPKREVRQKRSLINYRDDVVKRITKIKNSIRAILGREDIHLPGGKKGWSIKALMSIRELALDMKKITDPEDIWKGQLDCELEALDNTTALLKNVVSKLNALGEADEKVRRLRTVPGVGPRLSEAVAAIIDDPHRFKNGRHVSSYLGMVPRRWQSGAVDITGRISKCGNKLLRTLLVEVSWLGLKEPWMRKIYDKVRRGDKKRSKVAIVAVARQLLVRCWAILRDESCWDGDHAKRFVKC

SEQ ID NO: 363648 - protein, 414 aa, unidentified
MEDILECCCGLDIHKENMVACLLKGPIGKGIKPSSEVKEFGTQLKDLIALREWLEAHDCYYVAMESTGIYWQAVYAVLEKALKDEMHLMVVNARHMKNVPGKKTDMSDAEWIATLLRAGLLEGSFVPERDIRNLRQFTRYRKALIRDITSQKNRIEKLLQSSGFRLSSFLSDIFGSSGLAIMHQLVQVGCISRQSLDLCLKGRARQKASEVLSSLNGTLSVPQRKLLDMQLAHLKDLQDNLLEIEQEIQSGFLQFVGPIVLLDSIPGIDLRAAYAILAEIGRDMSAFPTAQHICSWVGLAPGNYESAGKKKKQRVTQGNNYLKTMLCEVAWVIASHRKLYLSGWYWRLKQRTDSKRAIVALARKLLVIIYTMLKTNNPYDEQRFLERKKASEQRRVKRMVNELTRLGYAVTMAA

SEQ ID NO: 363649 - protein, 421 aa, unidentified
MSNERQQGTEVDVTNKSVRHSWRAVRKLLNRRRVESPNRFGRRLGLHPPPARRNAYKEMTRVNLAELKEVVRVGVDLAKNVIQVHAVTADGRVISNRPLAREKFVSWCGQLSRGTLVAMEACSGAHHWARELTAMGLEARLVSAVFVAPYRMQGRLGKNDANDAMAVCEAASRPMMRFVPIKTIEQQGLMVLHRLREGIKKDRTACINRIRGLLAEFGLVFPKSPHALREGLSRVVSGDAEVLDSQAILGLRSAALHLSQLDAHLKSCDRSIGSHCRTDPKARAAAALQGVGPIGASALIASVGDVSVFKNGAQFGAWLGLTPRQHSSGGTVSLGRITKRGDQYLRTLLIQGARIAVITAHKRGDAISRWALQLRKRVGWQKATVAMANKNARILWAILSKGDVFDPDHEVSHKRLQRSLF

SEQ ID NO: 363650 - protein, 346 aa, unidentified
MHATTIAVDLAKSVFEVAVSQRVGQVSERHRLTRAQFRRFLGEREPARVLMEACGTAHYWGREARSRGHEVVLLPPHTVRPYVLRNKTDGADTKGLLEAQRNEEIRPVPLKSVDQQVLTALHRMRATWMATRTARLNTLRGLLRELGHFIPVGARQVVPQVQALVGESDSDLPAALRPVLCEAAREIAELERRIGALEQQLEQLASEDVRIERLRTIPGVGLLTATALVAFLGEVSRFPSGRHLASYLGLTPRERSSGLQRHLGRISKRGDPYLRMLLIHGARSVLCHAKRRKHEPDRLRAWALEREQARGHNKAAVALANKLARIAWAVWRSEGVYTATRSALDT

SEQ ID NO: 363651 - protein, 326 aa, unidentified
MVVEQVDGSNPKPPQRFQKQAFLHWATKLKQSGAEVYAVYEACGFGFTLQRQLSELGIHCYVVCPQKLDEQNRRVKTDGLDAKALCLKLDRFVEGNRHALALVRVPSEEEEQARALHREREQLVNVRKVLEAQGRSLLVNHGMEPVQGWWKKRAFATLAAPEWIKELLGNSQPVVLLLQEKIDQLTRQLQNAANAEPPRGLGKMTSVIIDREIGDWDRFNNRRQIASYTGLCPGEYSSGNTRLQSCVTKHGNPRLRAALVELAWRLVRFQPNYKPVRKWRQILAKGALATGAARKKAIVAVARQLAVDLWRIKTGRLRAEELGLIN

SEQ ID NO: 363652 - protein, 369 aa, unidentified
MLYLAIDQHAKQITVCVRNTDGDTVLRRQVSTRPKKIEAFFQQLSEMDPEFMAILEVCGFNDWLIEKLRQWKCQEIVLIHPEKPSKKKTDRRDARKLGDLLWLNRERLAANEPVHGLRRVYIVTQREREDRQLTALRKNLGQRRTRTLNKIHRILNRHNLMWDYPTKSFQTQAGRRWLETLKLPEIDRLEMDMLLKEWKTWDEQIDQVDEKIVERANHTEPDDVFSSTQILMTAPGVSHYSGLALASRIGPIERFPRPRSLANYFGLTPGCRNSGNVQDRLGSITKEGSKIARFILGQLVLHFLKHDPKMRVWYRRIKLRRGSKIARVAVMRRITTVFWHMLKHREAYSIGGPPPRLRREPQTARNDAA

SEQ ID NO: 363653 - protein, 344 aa, unidentified
MATIAHIGIDLAKNVIQVHGIDANGKVLLKKMVKRSELIKTIMNIEPCVIGMEACGGAHYWARRFSEFGHEVKLMAAQFVAPYRKNQKNDANDAEAICEALTRPSMRFVPKKSVDQQAVLSLHRTRALLVGQRTAIVNHMRGLLLEFGIAISRGIQKARNQLPGILEDGDNELPDIVRELIAHNVQHLKLLDARIGDLDKQLDHLAKQSELSQRILKIEGIGPLCATAMIASIGDAKLFNNGRQLAAWLGLTPKQYSSGGKTRLGRITKGGNRYLRTLLIQGAKSALFQCARKKDQKSHWAMQIRERRNHNIAVVALAAKNARTIWALLAKNREYQHDYQPMAA

SEQ ID NO: 363654 - protein, 342 aa, unidentified
MDYFAGLDVSVKDTSVCIVDDTGRITREVKVASEPDALLQVLRNPAYRFKRIGLEAGPLSQWLFSALAEADLPVICVETRHMRAVLKAQINKTDRNDARGIAQMMRVGLYRPVHVKTLRSQKLRMLLTHRKLLQSKAIAVENDLRATLRNFGLKVGMVGTAKFEARIKELVENVADLAVLVEPLLVVRRALREQIGVLHRSVLAIVRDDEVCRRLMTVPGVGPVVALTYRATVDVPARFRRSKSVGAVFGLTCSRDQSGERDRPGAISRCGDEMMRAMFYEAAQSMLRSRKWSWLKAWAMQIARRRGIKRAIVALARRLAVIMHRIWVDSTEFRWTREATAA

SEQ ID NO: 363655 - protein, 380 aa, unidentified
MDPHAQVAAPTRYFVGLDAHLAYVSIAVVTRAGELVLEQRIPVRAPEQLVEALRAYLTPTSEVHAVVETCPFWAWLFDLLSPVGIHMHLAHAQELRAIASSHRKTDERDARLLARMLAAGLIPTVVARSRPERNVLTLLRHRAVLVRERTALANRIHAQLHLQRLALPRGKLLRREGRDWLRTEAWPRLLPEQRAVVVSHWRLIRHLTHVVRGLDRRIARRAAADPVAGVLQTVPGIGPYRGLLLAATLAPISRFATPSHFVSYVGLAPRTRSSGGHTRHGGLPGAANRALRGALVSAVPTHLRAAPTSAISGYYTAQKARLGWRVARVAAARRLARVLFQLLKTGVGWRPSSPPVPGSPPARWGELRSEVARSPVRRAG

SEQ ID NO: 363656 - protein, 306 aa, unidentified
MEKVTTLGIDLAKSVFSLHGVDGAGQTVLRRTVRRDQLVKVVAGIAPCLIGMEACSGAHEWGRRFQGLGHTVRLMAPKFVAPYRKSGKNDGNDAEAICEAVARPSMRFVPVKSLEQQALLAIHRVRQGFVVERTAIINRLRGVLCEFGVVLPLRSVTVRRQAVQAAENLPDLAGRAIGDLLEQLRSLDERIGSYDREIEAQAKLCEPAQRLMKIRGIGPTTALAIVATVGNAREFKNGRQFAAWIGLTPSQYSTGGKPRLGHISKRGDAYLRNLLVQGARSVLNSAGRHHDRMSRWILEKQPRRGY

SEQ ID NO: 363657 - protein, 422 aa, unidentified
MAELIPLAALIGIDWADQHHDLSLQASGRPGVEHQRLPHTPDALVEWLGQLRRRFRGQLVGIAVETSRGPLVHALLEHEFIILYPVNPRSLQRFRETFAPSGAKDDVPDADLLRELLVKHRDRLRPWVPEDVETRALRRLVESRRQVVDLRTKLTQQLTAALKEYFPQALRWAGDDLASAMACDFLLRWPTLAALQRVRATTLRRFYTSHHCRRAERIEERLAEIQRAVPLTRDRAIVETTALLVQTLARQLQALAPSLEQFDQDIARRFAAHADADLFKSLPGSGAALAPRLLVLFGADRTRFASAAEVQQLTGIAPVTRRSGQRSTVQWRWAAPTFLRQTLHEFAHHSIRYSAWARAYYALQRRRGKGHHAAVRALAFKWLRILWRCWQDRTAYDETRYHRALRQRGAPIAPELIAPEAA

SEQ ID NO: 363658 - protein, 322 aa, unidentified
MNPKNYGGIDVAKKNFVIGIYGQDKTKTEANTPKGHAKAVEYLQKHNVDLVVLESTGGLEVPLANALHAADIRVVIANPQRTHQYAASFSLGKTDHLDAKMLADYAQALDSRKMADDMCYAPPSEEALALEALVKRRSQLVEMRKMEKNRLEQTHASQKASVVAMIKHLGELIAALDKEIDQSNRGGFNGKGEILSEMKGVGRITCATLLSMLPELGKVPHKRAALLVGVVPPPRQSGEKEKKSGCVGGRMVVRNALYMAALTATRSEPKIKAFYEKLMSRGKAFKVALNACMHKLLRILNARMRDYLASLKETEESELQGA

SEQ ID NO: 363659 - protein, 430 aa, unidentified
MNESVSEQPLSPKVAAFVGIDWADQKHDVVLRSAGDPAKAEHQVIKSEINALNDWIAQIQERFGTKGKVLVCLEQSRGALIYQLMVYELFELYPINPSQLANYRKTFFSSGAKDDRPDADLLSELVMCHRDRLKAWKPDDQLTRELASLNEGRRNAVNRRTELANEIKSQLKLYFPVALQILENDITTALAADLLVQWQTLAELQKVSPGKLRKFFYGHNSRQEKKILERLTLIKQAKPLTTDVAIIRPNALRVKLLAQQLKSLLPFIAEYERRIAELFGSHPDRFLFDNLPGAGPALAPRLLTAFGTDRDRFEVAGDLLNLSGIAPVRIASGKKTGKSASVHCRRACPKFLRQSFHEFGECSIRYCPWAQACYQAQRGRGKGHHAAVRAVTFKWIRILFACWKQRTPYDPQRYFQALQTRGSDYAQTTA

SEQ ID NO: 363660 - protein, 402 aa, unidentified
MRSIGLDVHKRFAEVAIIEGKGPPLRQSIGTTTAALRAFATTLRPEDQLVLEATMNTWAIADVLRTSGARVVISNPVRTRAIAEARVKTDKVDALTLAQLLAADFVPEVWAPDEQVRRLRREVAARAALVRQRTQARNRIHAVLHRCLEDAPVTDLFGVAGRTWLAGLALPEAERAQLEATLRVHEAIEAEITLADRRLAEAALADERVDRLMSLPGVGPTVALSLIALIGEVGRFRRPAKLVGYLGLDPRVHQSGERAAWTGSISRAGHAHARSLLVEAAHAAVGAPGPLRAFFRRVARRRGTQVALVAVARKLAVLVWYVLTTGERYRLERATLMRDKRNRLARTLGQSTPRRRPAKGQPSLVVRREQELAMLTEAEATYKAGIAERIQRDAAAANGVRL

SEQ ID NO: 363661 - protein, 325 aa, unidentified
METKKLCCGIDVSHATLDVCYQNNLGELFYLKVGNNNSGYQKIMEHTGAGYHFVMEATGVYYIRLAFYLHQRGCSLSVVNAISIKRYIQMHLERNKTDKKDARWICRYAIERQPPYWQMPDSAYFESKQLYNTIRQYTELIKSFNNQLHSLRLLPVPSKDTIKSIEKTIVCMEKEIKLLEQKLQLLLQQWQPDQLKSVSSIKGIGKRAAAMLIVFTQGFKHTENHRQLISFAGLAPTQYSSGSSIQGKPRIYKRGGKNLRDVLYMCSMNAMKTNTACKTLYERLRANGKTGKQALIAVCNKLLKQVFAVVKNNTLYQPNYCSVKP

SEQ ID NO: 363662 - protein, 343 aa, unidentified
MQAITTIGLDIAKSVFQVHGVDAEGNVVTRRQLKRRYLLAFFEKLPPCLVGIEACASSHHWSRELQALGHNVRLMPPAYVKPYVKRQKNDMADAEAICEAVTRTNMRFVPTKTTEQQSGLVLHRTRHLFIRQQTSVINAIRAHLAEFGVIAPVGRKGIEELLHVIADPSDKRVPDVVRACLAALGSQLLNLKKQILDFDRMILAWHRSNPTSKRLNCIPGVGPLLATALVANVADPKVFRSGRNFSAWIGLVPKQHSSGGRAKLGSISKQGDRYLRSLFVAGALAVIRYAKLHGTKYRPWVAALLARRPTKVAAIALANKLARMAWAMMARGERYNYPAGLRV

SEQ ID NO: 363663 - protein, 353 aa, unidentified
MSVILTIDLGKFNSVFCWYDPATKASTFRTVRTGEAEFREVLLRQPVVTVAVEACSPAGWVHDLAVSMGLTVLVANTNAEAWAWKNVKRKTDRDDALKLAKLAAMGELPTVPMQPKPLRQRKSLIGLRKRLVGERTRGQNRIRGLLVGQGLAAPRGNRAWTALGLEGLGLLAKPLAECDLDELWRGELDLLLQRYRAVVEQIGSIERKLDAINAADSAVSLLETVPGVGPRTAEVIATSLGDPKRFRHGDEVGAYAGLVPKQYQSGETDRRGRITRRGPKLLRAALVECAWCSLRYNAWARSTWERLVANGVSKKKAIVALARKLLVRCWAMLKRGEVWKDPSAPLAADPVPG

SEQ ID NO: 363664 - protein, 346 aa, unidentified
MKIKRVGVDLAKNVFQLHGADHKGNTVWKRQLSRSKWIKVLCETVKPGTEIGMEACTGAHHWARLLIQRGYEVTIITPQCVKPFVKSNKNDANDAQAICEAMGRPNMHPVRVKTVEQQDIQAIHRVREEIKRHRAAKANQIRGLVSEYGLVAPQQMSSLRRAIPEWLEDADNGLSFLFRQLLQGLWGDLQVLDQRMTELDHQIAVIAQQDPVAKRLQQLRGVGPLIATALIATMGDAKQYRKGRDMAAAIGLTPRQHSSGGKDRLLGISKRGDAYLRCLLVHGARSAVRTAKDKDDRLSRWVVKLQSRRHANVVAVAMANKIARMAWAIMTKDTDYDPDFNPAIAG

SEQ ID NO: 363665 - protein, 388 aa, unidentified
MIYVGIDIAKLNHFAAVISSDGEILIEPFKFTNDYDGFYLLLSKLAPLDQNSIIIGLESTAHYGDNLVRFLISKDFKVCVLNPIQTSSMRKNNVRKTKTDKVDTFVIAKTLMMQDSLRFMTLDDLDYIELKELGRFRQKLVKQRTRLKIQLTSYVDQVFPELQYFFKSGLHQNSVYALLKEAPTPTAIASMHMTHLAHLLEVASHGHFGKEKARQLRVLAQKSVGVNDSSLSIQITHTIEQIELLDSQLFHTELEMANLVTCLHSVIMTIPGIGFINGGMILGEIGDIHRFSEPKKLLAFAGLDPSVHQSGNFQAQRTRMSKRGSRVLRYALINAAHNVVKNNATFKAYYDAKRAEGRTHYNALGHCAGKLVRVIWKMLTDEVEFNLE

SEQ ID NO: 363666 - protein, 421 aa, unidentified
MSNFAAFLGIDWADTKHDLCLITATTQQKEFRTLKHKPEALQDFFLDLRRRFAGQPIAVAVEQARGPLLFALLKYEFLTLYPIHPTTLARYREAFSPSRAKDDPTDAEYAAELIFHHRDRLIAWEPDDAITRTLQLLVEQRRRLVGDRTRISNRLTALLKNYFPQVLDWFPDVRTTLVCDFLTQWPTLDAVQQADTATLEKFFRSHHAARQGLLERRLQAITDGQPLVTDAAVLDASVVLLKALLAQMRVTLDAINEFDREIELLCQGHTDYPLFAALPGAGPVFAARLLAALGTQRARFATAQDLACFSGVAPVIERSGQSCWTRWRYFCPKFLRQSFVEFAGESVRHSAWAKAHYASQRAKGKSHAAAVRSLAFKWIRIIWKCWQTNTPYDEAIYLACLKKRNSPLMELIEAQMAAAET

SEQ ID NO: 363667 - protein, 361 aa, unidentified
MFSERTSVGLDVHARSVVGCGLDTVTGVLFRRRLSPTFQGISEWLTELPGPIAVTYEAGPTGYGLARRLTGAGVRCVVAAPSKLQRPPSDRIKTDARDAEHLARLLRMDQIVAVRVPGAGEEAARDLIRAREDVRGDLMRSRHRLSKLLLRQGIVWSGGAAWTGRHEQWLRQQHFDLPGRQVAFDADFEAILMATARRDRLDQAIAVMANDSPYTPVVRRLCCLRGVSTLTAFGLAVEIGDWHRFTGSTIGAYLGLVPTEHSSGGSRSQGAITKTGNTHARRLLVEAAWHHRKTYRNPGLVMQARWAQASPTAKARGHQGNHRLHARWELYNARKKKPAVANVAIARELAGWCWSLATLTD

SEQ ID NO: 363668 - protein, 421 aa, unidentified
MQVLYERCAGIDVHKDQVTVAVRTPGRGPGGRETRVRKFGAFYGVLRDMTRWLAGQGVTHVAMEATGVYTMPVYHALLEPGCFEQVLVCNAAHVKNVPGRKTDAVDASWLAELLECGLLRGSFIPPEDIKAVRDVVRYRRKIVQERGSETQRLGGVLQDAGIKLDSVASSIDTVSGLAMIRALIDGERRGEVLAELARGRMRSGIGDLSQALEGRFDDHHALMCQLHLDHIAHLNEMIAKLDAQAEAMMVPFGRQRDLLATIPGIGQVAAAAIISEIGASPGEFFATAAHLASWAGLCPGNHESAGKRKHGKPRKGSQHLKPLLVECAWSAVRASGRLKARYHRLVLRFGGYRNPAAKKRAIVAIACTLAVITWHVLTTGTAYTDLGPGFYATRSDPAKEAQRLIARLEALGHKVTLAPAA

SEQ ID NO: 363669 - protein, 339 aa, unidentified
MNVKRIGVDLAKNVFELYGVDESEQRVLSKTLRRGQLLATFAQLPPCLVGMEACGSAHYWAREFRKLGHEPRLMAPQFVAAYRKNDKNDRNDAAAICEAAGRPSMRFVPIKEVEQQAVLTLHRARALLVSERTALVNHLRGLLSEYGLVIAQGVAKVRAALPQILEDGDNALPALAREVFADLQERLRGCDERIGEYDRRISALARSSEPAQRLMRVEGVGPLTATALLATAGDGRQFRNARQFAAWLGLVARQRSSGGKARHGRITKRGDVYLRTLLIHGARALMRHLDGRQDRKSQWVLALKARRGFNKAAVALAAKHARLLWALLTRGTTYQVAGA

SEQ ID NO: 363670 - protein, 362 aa, unidentified
MRSIALERADIVVGVDTHKDQHVAVALNGIGVRLGELLVDATNPGYAELLAWATALGRVYIFAVEGCGSYGIGLARFLRRHGHPPVEVSRPPRAGERRLSGKSDAIDAEHAARSVLAGTATVTPKLADGQVEAIRLVKIARDTAVKAHTTAIITLKAVLVTATHELRDELGPLSDFKLISACAALAVTGDLAEPDVAMRHTLGSLARRWLELHDEIKIHSGHLKALTRAAAPQMLDAFGVGLDITAQMLSTAGDNAERVRNEAAFAKLCGVCPIPAGSGKTNGRHRLNRGGNRQANAALYRAVIVRMRWHEPTIAYVAKRTADGLSKKEIIRCLKRYLARELYQLLPATSAASTPTTLRSVA

SEQ ID NO: 363671 - protein, 407 aa, unidentified
MFYGGIDVAKHSHEVCLVNDSGDIVLKMHLDNNHKGMNKLLQALERLGLKPDDVKFCLEATSHYWLPIYCYLTNQGFELHVINPIQSDALRNLYVRKTKTDQKDALLLADLLRLGRAPETRLPSETTLKLQSLSRLRFEFVRQVGGLKNRVLGILDRIFPEYPDCFSDVFIRTSRELLKSYPEPEELAEVDLSELSAFLKEHSRGRFGEERAKKIQSLAKGTFGITMALDAFTLQLRLLVEQIEFIEEQIKVIEDAINEVMEELRPSKDTPYRHVIETIPGIGPVLAAAIIGEIGDISRFPNPRALVAYAGLDATVRASGLFEGTRNRMSKRGSPVLRNSLWLAAVSARRFNPELRAYYEQKRSQGKHSNVATGAVARKLVHLIYSLWKDNRPYDPDYQWSPPGKNA

SEQ ID NO: 363672 - protein, 402 aa, unidentified
MHRDSVVACFRQLGPRGGVVREKERFTTTTAGLRVLEAWLDDRDVQLVAMEATGVYWKPVLYALERRFTVWLCNAQNVKKVPGRKSDLSDAEWLADVAAHGMVRPSFVPPPPIRELRELTRYRKTQIDARVAEIQRLEKVLQDAGIKLTSVASKVLTQSGRAMIEALIAGERDPAKLAALAKGKMRPKMPALTEALTGHFGSHHAVACRRILAHLDFLDETIAALTEQVDARTAAFEAVYTALLPVPGFDRLTIDVIIAETGADMARFPTAGDLASWTGVCPGSHESAGRRRRVSTTPGNQWLRRALIEAARAAARTKGSYFGAQYRQIARRRGPNKAAVAVAHSLIELVWHLLSTGEVFQDLGEDYYARRQDPAKRARRLVTQLEDLGYAVTLEAPPATAA

SEQ ID NO: 363673 - protein, 362 aa, unidentified
MEEAHIITHSVLKSNYERSPIMAKNTFFIGLDIACDDFAASIYQSPEKPVITKEGIKNTFDGFNVFISWLKEHGLSKTNCIICMEATGVYNEAIAHYLVSQGFRVSVEPPLKVKRAFDPVGHKTDPVDSKQIAEYAYRYSDELRFWQPKDEIMEKIKHLLTAREQFTKQSTAIKNAMKSYEKHTVQVPLIVKAHRQTLREIKKHITEIDKELDRIIRQNPSISKMNNQLKSIPGFGLLLSTSLITLTGAFSDISRYKTLAAFLGICPYQHQSGKSIYRQPHMRSFGPVYPRKLLTLAARSVATHNDVFKKYYARKLAEGKDKKLVLNNISNKLIKLACALIKNNSRYTATYRSINPMFLNIS

SEQ ID NO: 363674 - protein, 437 aa, unidentified
MPSLYDILKEEVFALEIVYPICCGVDVHKKFFVATLITTEGLLPRYQKRRFSTFNNQILEFKRWLLENNCRDVCMESTGKYWVPVYNLLEDSINVTVAHPKFVKTVKGNKDDVKDSKWIGDLFRLGLVPGSFVPPKEIRILREFTRYRCKLVNCKSGEKNRYQNVFTVCNVALDAVVTDMFGVSASSITDYIVNSDTYDPGHCVSLLKRSLKKKASEVVESIEGFQMTDAQKQRARMIREHYDFLLKLIGRLEAAIDTLAEPYAGATTLLCTSPGYDRRSAISIISEIGTDMTVFGTSKRLCRWAGLTPGNNESAGKKKSVHIMKSGIYLKPMLVQVAWSAVKSTKTPYYAVKYAEIAKRRGKKRAIIAIARMILTATFHMLSTGEVWNPSDLQKVDMPQQLREKQLRHDLQRAVKLLVANGVVAPDTIQIPEQSTG

SEQ ID NO: 363675 - protein, 378 aa, unidentified
MHKDSVYLCILRENGEKIERVYGVLTPQLDSMRDFMAENEVSEVAMESTSVYWIPIWRVLVDSFELKLVNPYFIKQLPGRKSDVKDAQWIAECVMKELIRGSFIPPPLIQQLRLYDRRIFELNAELGRKYSKIDAILQRCNIRLSNYVSNTDCKSYKNVVKRISEGVTSPQELLMLVHKRIINKHGEDTILAALTGVVSEAEIDMLAQYVAESALLEDNKNKCIEKMREICNREFEEQMKNLQTIPGVSERSAQTILAEIGPDVNAFPSAKHLVSWCGFNPRNDESNKKIKSNKITHGNRFIRVASIQCAWAASRTKECYFSKFYAFHTQVRKKFKLKVVVAVARKVLVCIWHILKFNVSYKDFEPQKSVTKDCTQFA

SEQ ID NO: 363676 - protein, 360 aa, unidentified
MASATLTQSVHQRAPDVVIGVDTHKDIHVAVALAPNGGRLGDFRIPTTRKGYDELMTWTEQFGYTPVFAVEGTGSFGAGLCRELVDAGYEVVEVNRPDRSTRRRLGKNDAIDAEAAARAWIAGTATVTPKAGGERVEMIRMLKCAKDSATGSRTRAINQIKAILVTAPAALRERLEPLHRSALIRACSALRPGPLDAPLAAAKRALRTLARRVLALEVEIAGLRDDLDQLTQAVCPALRQTFGVGVDNAAPLLTATGDNPERLRSDASFAALCGVNPLPASSGKTHRHRLNRGGNRQANAALHRIAVVRLRWDEQTQAYAERRTEEGLSKAEILRCLKRFIAREVFRILMGGPAVRLKKA

SEQ ID NO: 363677 - protein, 433 aa, unidentified
MKVKYEDRQKQKVIAITTDTLVVGVDIAKNYQWARFVDFRGIEHDRALKFKNSKGGFETILARIREICKKENFAKAVVGMEPTGHYWKAFANWLEKQDGIKAVLVNPYATKQAKELDDNSQTKSDKKDALTIAKLVKDGRYFELYLPHDVYAELRGLSTTRTGLNKRKNALKNTITAVMDEYFPEYEEVFKCPLSGKASRHILKTCPFPKFILELGEDGVTDEIKKAVKKTVGRKKAAQLIETAKESIGVDYGEEAARLKLRLMLEELELLEKQTEELEVQMEAALQKTDYAGFLLSIKGIGVVTLAACLGELGNPARFENPRQMSRMAGYNLVEDSSGKNKSGTKISKRGRKNLRSVLYQMALIMVATNDEMKQLYHYLKTREEGPLRKMQALIVVSKKILALIHALAKKKENYDPGKVFGPVRREQLKAAA

SEQ ID NO: 363678 - protein, 355 aa, unidentified
MRQQISTNLSDSQNVYIGLDVHLAQWNVCIIHNGLKSKSFQQPPSATCLYEHLQRHYPGKKYYSAYEAGFCGSSIHYDLMELGIENIIFNAADVSQTHKEKMRKTDSIDATKIARSLWHNELHCIHIPPQWRLEDRNLLRLRSNQCSDIKRMKSRLRHFLHTNGISIPQKYSQRWSIEFFNWILCQGASMANSTGETLTLMCRSLLGQVAEHKALNRRLVLLMNTPRYATDYELLRTIPGVGSVTAISLLLECGDLADFYSAETFCSFVGLVPDIHQSGSRNPDCSMTRRRHKALRYMLIECAWRAIAKDEHLARLYHGYARRMPTQKAIVKIANKLAKIIKFVLKNKKEYDPPK

SEQ ID NO: 363679 - protein, 413 aa, unidentified
MTITCGIDWAESHHDVALVDESGKLVAKRRISDDAEGFRRLLDLLTEAGDTAQDPMPVAVETVRGLLISCLRATGRAVYSINPMAVARYRERHRVARAKSDHADAMALANILRTDAEMHRPLPADSELVQAIAVLARAQQDAAWNRGQLSNQLRSHLKQYFPAALAAFQGRGIGLDSREARAVLAVAPDPTTAAKLSTTRLQSVLGKSGRQRGIDAWATRLRSIFTAEYLRQPPLVETAMGRHTQALVAQLDAACRAADDLADATAEAFDQHPDAQILTSFPGIGPVTGARVLGEIGDDRSRFRDAQGLKSYAGSAPITIASGKSLVVHHRKVKNQRLAAAGYVWIFGALPTPQVKHHYDLRCAVGDKHAAAMRNLFNRFLGCLYHCLQTGQTFDPAGAFPAETTQHPQPAAA

SEQ ID NO: 363680 - protein, 344 aa, unidentified
MLHAGLDLSRRRLDVCLVDDAGELVAQIAAAPDADGLRHLAMRVSAGRVRAVIESMNGARFVHDTLEELGWEVLVADAQKVKGLAPLACKTDKIDARVLAVLSQRDLVPAIWLPDPAIRRERELARFRLHLVRHRTTLKNRIHATLITFGHPCPVSDLFGHAGRELLDRLAIPDPWRRTVDVSLGLIDDLELQIAHLTCELKRQGADHRYIPLLVTAPGFGWINAYTVASEIGDIERFPSPAKLVGYTGLCPRVIQSGSTDRRGPISKHGPRYLRWGLFEAAMNACKHPLYAERYQHTKRRLGRQRGPKVAQIELSRKLTEAIWHMLTRNQPFAPAGAGFRLAA

SEQ ID NO: 363681 - protein, 391 aa, unidentified
MRYIGIDVGKEKHAIAVMDESGEVVLKPKKFSENVDGYERLRRWVGEPEDALVGLEATGHYWKNLATTLLGWGFALVLINPLRTKRFAESDLARAKTDAIDAKRIARFLFEKRPSASRLPTEVSDELRELVRLRDRLLQDMGDRVRQLHRAVDLGFPEFSRMIKDLGSQKATAVLSVYPTAKAFSAASERELSNLRYDGRHPIGRDLARALIDTAKVSVGQHHGEPYQLQVGYFCEDIDTLRERLKKMERRIRNAADHHDLAKLLTSIDGIGPTTAARLIATLGDPSDFDSAKALSAFVGVAPMIQHSGKSTPKRASCGPHGDAKLRHKLYMPTLRAIQSNPHIKRHYDALVARGKPKKLAVIACMRRLLELVFVVAKRRSPFLPVPPQMA

SEQ ID NO: 363682 - protein, 346 aa, unidentified
MNYAGWDLHQQFSQVVVGTKDGKKRKSIKFSHFPNMFKHPNLRKLLQPPTEVAIEASSGWYWVVDQLEKMGVKVHLAHPLKTKLIAESKVKTDKIDANALFDLLRTGFLPESYIASTEVREKREIHRHRAALVKIRTSVKNRVHGLLAKHGVFLNLTDIFGIKGRQSLEKIMPRLKPVYKEELKRYISLIDWLDKEIGKIEQKICSLVKDNSLTKLLMTIPGIGYFSAHLILSEIGDINRFSRPKKLISYAGLNPGVDKSGKHFHNLPITKQGNTWLRWILIQDAPHAARSDRRLGQIYRRIARRKGNNTAKVAAAREILEAVYWVLKKRVPYCPKSVTPVVGMVS

SEQ ID NO: 363683 - protein, 320 aa, unidentified
MSASSVVVGIDVSKAHVDVSVLGAKLDVQRFDNQAQGHSALTAVFKPLDVALVVMEATGGYEAELACALQAAGLPVAVVNPRQARDFAKSMGRLAKTDKVDARMLAEFAAVLLRRDDLARFLRPLVDDQQQWLAALVTRRRQLLSMLLSERQRLQSTPTGLHPSIEAIVAAIKAQLDDIEAQMVAHVDDHFAELDTVLQSASGIGPVASATLIAELPELGRLNRREIAALVGIAPMANDSGSSKGRRRIQGGRFDVRRVLYMAALTASRRNPVIKVFYDRLLAAGKLPKVALVACMRKLLTTLNAMVRTNKPWDNSPHAA

SEQ ID NO: 363684 - protein, 345 aa, unidentified
MKITTVGMDLAKNVFQVHGIDERGKAVLGKQLRRAQVAVFFANLPPCVIGMEACASAHHWARTLQRFGHTVRLIAPQFVKPYVKTNKNDVADAEAICEAVGRPNMRFVPVKSIEQQAILSVHRVRQGFVKARTAQANQIRGLLGEFGLVIPQGIINVAKRVPEILEDASNELSVPFRHLIDRLTNHLKELDRQVKEFEREIIAWHRSSELSRKLEKIPGIGPLAASALVASIAAAHSFDNGRQVSAWLGLVPRQSSSGGKPTLLGMSKRGDTYLRTLLIHGARSAILAAKNKVDNTNGWLTKLLQRRHPNIAAVALASKNVRTVWAMLAHGREFKADYVPTRMAA

SEQ ID NO: 363685 - protein, 481 aa, unidentified
MHPLVPSLPIVPPEPSAPRRRRARFHPGSGRLQGVDALHPDLAGIDIGSRLHYVSVRPDRCPGEDPVRTFGFTTPDLRQMAAWLTACGVTRVVVESTGVYWVPVATVLEDAGLRVALVDARQVNKLRDRKTDVEDCQTLRLLYAAGILLESFRPDPAILKMRAYWRQRAELVGACATEIHHFQKHLELMNLQVHKVVSDVGGVTGLRILRAIGQGIQDPARLAALRDPKCQAPREAFLAALTGNYREEEVRGLQQALARYDLFQTQMAELDEALYGYLQTLPAAARAAGPAPVDPTKRRNASRRKNQVHFDLHAELIRLTGVDLTRIEGIDVLTAMTVISEQGWDMSPFETEKHFASHLGLCPNHQVTGGRVRRRRTRKVSSRAATALRVAAQSLARSRSALGAFYRRMQARHGAPKAITATAHKLAKIIYRMLKHGEEYVAQGQEAYEQHYRERQKRSLVKQAQRLGLEVLDPATGEVAV

SEQ ID NO: 363686 - protein, 440 aa, unidentified
MTESYDGRQVVGMDLHRHRSVLVRMTEDGRKLETARIDNSPAALRAVLARAGTNPRVVVEATYGWYWAADTLQAAGAEAHLAHPLGVKAFSYRRVKNDERDCADLADLLRLGRLPEAWIAPPPVRELRELTRYRVKLVRLRSSAKDQVHAVLAKLGICVPCSDLFGAYGSAWLDGLRPPRPYAGKVASLRQLIGWLNGEISLFDEVIADFLGSYPPYQAVLRLPGLGPVLGAVAVAEIGDVGRFPRPGPALQLGRADAAAPRVRRQGRSRAHAKQGSPILRWAMVEAVQHQPAGSPPRELRDRITDRRGTPPLPAHNHARQPAETPGRSVTPNKLSRIELSVLLRSGKDIAEQEALTIFNGGVTASRDNQRIEVSGTCPPGRGPAGSRRELIESVASDHEVAARLGVLRMLANRRRAPVADGRQASGCAKRKLAPPNSAN

SEQ ID NO: 363687 - protein, 355 aa, unidentified
MRQLEKVLKEVAGIDVAQKELVVSLGRLLESLSIEIFAYKVFVNSDNGIQSMIEWVSSCCENAAQMRYVMEATGVYHERLAYALESMNIDVSVILPNKISNYARSLDIKTITDKTASQAIAQFGLERKLDNWIRPKDIYRELKQLTRERDQIVEERSMVKNQRHAEKTEAMPNQKSLVRIEDRIKFLNRQEKEIKLDIATLLKSHPEVKTRVDNICTIPGVGELTAVTVLAETNGFELIRNKKQLTSYAGFDVKEKQSGTSIKGKPRISKRGNRHLRKSMHLPSLSSVKYNQSHKDLYVRIVSKSGIKMKALIAVQRKMLELIFVIDKNQNPYENDYHQKRVHHTNAEVPLQANL

SEQ ID NO: 363688 - protein, 347 aa, unidentified
MKKVSVIGMDMGDKNHKAVGLSEDGEVVCRDEVPCTPEDVRAYLKRHPGALLAIETGTHCRWVSRIGLELGHEVLVGNARKLRMIWDSSRKNDWNDAAMLARVARTDRSLLSPVRLRGEGDQELMRLVKSRDLLVKSRTGIVNQIRGFCKSEGVRLPRCSAESFGRMEHEVCASVRAVTKPLFAMLRELAKKIGVYDKMIADGVKRLRGEDAALLDTITGVGPVTTAAFLAAVGDVSTFGSARDAGPYFGLVPRQDQSGETDKQLRITKEGNEIVRRLLVTAANYIMGPFGKDSDLRRHGMRIAERGGKNAKKRAKVAVARKLAVLMLAVLKSRTAYRPLKDVEAVA

SEQ ID NO: 363689 - protein, 373 aa, unidentified
MRSFRERGRQGVRLPSWLVAGIVPGLERHPLKKLNVDPDALLRLLHRWREEAVGAGHAIERITIAYEAGRDGFWLARCLRARDIEAFVIHSTSIAVSREHKRAKTDRLDTDLLKRAFLGWLRGEPDHCHMAAIPTLNEEDARRPSRERENLVSQQTSLINRMKACLVRLGIRNFKPTLRQASERLETVRTPEGAPLPPNTLIELRRDMARLRLVRDQIKEIEAARVQRLGQASEEGPHAMVRLLSRVVGLGVETADMLVHEILSRPLRDRRAVARYAGLTGAPDESGRRRREKGLARAGNARVRRGMIQLAWRFLQFQKESELVRWFHARTSEGRSGIRKTMIVALARKLIVAFWRMTTTGEVPQGVTLRAAV

SEQ ID NO: 363690 - protein, 417 aa, unidentified
MKTYLLREPQTVEPQSVPRARRSPPARPATPAAMLGHPLPSHTGPVLFVGLDVHTDSIAVSLAPSDAAEVRRYGMIGGTHDDVLRLAKKLQAAHPAAQLRFCYEAGPHGYPLGRCLRTHGYECILVAPSKIPRQPGDRVKTNRRDADQLARLYRAGELTAIYVPEPQDEAVRDLIRARYQVLKQQHRARQQLKMFLLRHNFRYAGTKAWSAAHLRYLATVKLPFPEQQFLFQEMVNVITEAGARLERYDAQIPRVLPGWRWAPVVKALMSLRGVAVLTAATLVAELGDLHRFATARQLMGYLGLVPSEDSTGEKRHQGGITKMGNGIARRALIEAAWNYRAPARMSRELLQRQDGLSQEVKDLSWAAQTRLHHRYQHLTKVRHKKATVAAAALGRELSGFVWALGQLVSPHAKSVAA

SEQ ID NO: 363691 - protein, 307 aa, unidentified
MYHVKEALVYLGVDIAKAYLDAAIGNEKSRFSNDALGHRQLINWIKQMPAKVQVICEPSGGYERALVQPLVGAQLKISLVPANRVRQFARAKGILAKTDRIDAKLLCSFGEAMQPGTISASQLEQQHLRELESQRRHLTHLLVMEQNRAARMSDLCVCKMNRRLITQIKKQIEQLDLLIKGHIDQSHELSAKAAKLTAISGVGARTAALLLAQLPELGGIAALVGVAPFNRDSGRMRGKRAIYGGRKPVRHGLYMAALVAAHHNPILRNFYLRLRAAGKPAKLALTATMRKLLIVLNSALKPDLSYA

SEQ ID NO: 363692 - protein, 408 aa, unidentified
MTHNIAGIDVHKKLLVVVIADAAEPDVPLQSRRFGTGSTELGHLSAWLGQYGVVEAVMESTAQYWKPVWMELEPHMRLHLAQAQSNKAPKGRKSDMADAKRLVRRFAAGELMLSFVPEAGQRAWRMVTRGRLQLVRERVRLQNQIESLLEEGRIKLSSVISDLLGVSGRRILRALGGGETHPETLAALGDQHLKCGPGLLVDALTGSMGEIHRRLLTQHLDRIDLIDRQIEELNQLSAAQMQPHQDAVLRLIEVPGIGAEAAQQILAEIGPDAAAFPSAPQLASWIGVCPGSNESAGENHSARSPKGNRFLRRLLCQAAQAAVRTKGSHLQSVFQRLIVRLGYVKAVWAIAHRICKIVWNILHQRARFVELGEAINPKAVRRAINHHLKALRRLGYHIPASPTVVVGG

SEQ ID NO: 363693 - protein, 313 aa, unidentified
MKVEKKLSIGVDVSKETLDIAVGKDGLFTTIKNNARTIRHLFTSLSVEEIAQVVVESTGGLEQTLLAELSAASIPVALINPARVRYFAKSTGQYAKTDRLDARILAEYGEKVKLRLYRLPSDEENRLSDLGSRRRQLLEMIVSEKNRYQAMPRLQKSIQKHLAWLQEEVLQIESETEGLLAEHQEWQEKREILTSCKGVGNVTAFTLIAELPELGSINRKEIAALVGVAPINHDSGKRRGKRTTYGGRSKVRSVLYMATMSAIRYNPVIATFYNRLIENGKKKMVALVAAMRKLLTILNAMIRDNHRWMPDFA

SEQ ID NO: 363694 - protein, 408 aa, unidentified
MRVIGMDIHRTFAEAVMIDGDRLMRLGRINMSRNHLAAFAAKLTSEDHIVIEATGNAHAVAEAVAPFVGRVIIANPRQVHLIAKARIKTDVIDATVLARLYASGFLPEVWVPDQRTLSLRRQVTRRNQIVRQRVRLKTMVQAILHAHLVPQCPHADILGPKGRAWLLAQLLPDDESTAIERHIREYDRLTDDLRVVERELARDALGSAETKRLMTIPGIDMVVAVGLLAAIGPIDRFTSPGRLVAFLGLNPSVHQSGNSPARHGRITKQGPCHARTMLVEAAWQAVRGPGPLRAFYERVRGRRGTHVAAVAVARKITVIVWHLLTRGEDYAWVRPALHAKKLRDLELRSGQPARRGQRGAGYAYNLTQSRRQERQRGERAEAAYKRLTEGWTKRGRRVSADASKEERQ

SEQ ID NO: 363695 - protein, 342 aa, unidentified
MAEIATIGLDIAKSVFQVHGIDVTGQVVVRRQLRRSHVLKFFGSLPACLVGIEACATSHYWSRQLQALGHNVKLMPPSYVKPYVKRQKNDMADAEAICEAVMRPTMRFVETKNPEQQSVLMLHRIRLMLVRQRTLLSNTIRAHMAEFGIIAPIGRHGLDDLLAVLSDLDDVRVPALARNCLVAAAEQLLLVKKQILDMDRRITACHRSSEMSRRLAEIPGIGPLLATALVATVPDPRAFASARNFAAWIGLVPKQNSSGGKERLGGITKQGNRYLRSMLTVGALAVIRYAERHGTKRPWIVKLLARRPAKVAAVALANKMARMAWAIMAKGERYREPTAVAA

SEQ ID NO: 363696 - protein, 330 aa, unidentified
MKKMDYVGIDMSKEKMDVRLYFAKRQEVFDNKSTGFRKMNNWLLKQVEEGTALLFCFEHTGMYTVPLQLYLEETNLDYIQVSGLQVKRSLGIQRGKNDCVDAKRLAEYVYLHRDKIRPQKLQSAQLIRLKYLLSLRSRLVRQRAGYMASIKEYKVFLALGNSNVMIRSQKEIIKTLTDQVEAIEKEIRAVIASDTKIQEQFGLATSVKGIGLISAAYMIVLTNCFTEFKTWRKFACYAGSAPFEHQSGKSIKGKTKISHYANKQMKAILTNAVKSAVQFSPELRQYYQKRVKEGKHKKVVVNIIRNKLISRVFAAVKRGTPYVELVKYAA

SEQ ID NO: 363697 - protein, 318 aa, unidentified
MEAQQFVGIDVAKDTLALCVWGDSPSVSEIPNKSTDIRRWLRSLAPDAKLGMESTGNYHRLLADLAHESGRTVYLLKPKTLKHYRHSVHARGKTDSIDARVIARYMAQESHLLRSWTPPTPEQDRLDAVLKARKTCGRMLGSIGQVAEAHKEMIGDVLEPIQKAIEEAMKKLEHRVDKEIDKTPELAEKRKRLETIAGVGSINSGVLTHIFSRLDFKNPEALIAYLGLDPRPMESGKFKGRRRLSKQGSGWIRCIVHMAAMAAAKKSEWQAFMQRHLAKGLSRTAVLCIVARKILRIAWAIWQKPGEVYDSRRIALPV

SEQ ID NO: 363698 - protein, 314 aa, unidentified
MNKCHSNTELSSHEETRCQFNGGTGAIKLGIDVHQDFYVVVEQAGGSNPKPPQRFAKAAFLHWAAKLKSQATEVYAVYEACGFGFSLQRKLSALSIKCYVVCPQKLDEQNRRVKTDGLDAKALCLKLDRFVQGNRDALAIVRVPSEEEEQARAIHRQREQLVKTRKQLEAQGRSLMVNHGLEPVQNWWKPRTFTALPAPQWLKDLLANSQPILVALQQKIVALTVQLQSAASPYQPRGLGKMTSVIIDREIGDWNRFNNRRQVASYTGLCPGEYSSGNTRLQSCVTKHGNPRLALRWWSWPGGWSASSPITNRL

SEQ ID NO: 363699 - protein, 318 aa, unidentified
MLIHYIDIAKRNFVIAVSSLSKTKTETNNPKGIAHTIEYLKKHKVALVVTESTGGLEIPAAKAIRRAGIAVIIANPRQTHQFAQSQPLTKTDAKDAKMPAFFAQMTAQKEDSQTMPYQPPTEAEEVLEALVNRRNQPADMRTAEKNRLHQVHETQVGSVKQLIAHFDRLIDELDKQIDNHTHTHFDGKDQVAEQIKGIGSITTATLMAMLPELGRLSHKRIAGLAGIAPHPREGGETKFKSRCFGGRSAVRKALYMATVAATRFEPLIRDFYQRLPSEGKPYKVAVTACMRKLLTISNARMRDYFAENDTAENGIRTA

SEQ ID NO: 363700 - protein, 457 aa, unidentified
MRKSAKKQPAERKQSSFPLLNPDAAGIDVGAREHYVAVPLDREAQPVRRFGAFTEELHSLAQWLKQCGIKTVAMESTGVYWIPLYQILESYGFKVKLVNARHVKHVPGRKTDVQDCQWLQQLESFGLLTSSFRPEAKICILRSYMRQREMLIRQASCYIQQMQKALTQMNLKLHQVISDLSGRTGLRIVRAIVAGEREPLKLAALKDRRIKSDAATIAKALAGDYRAEHLFALKQALELYDYYQQKIAECDAEIHKEMQTLESRGTTGPVLKRKPRCRHNPVSFDSQAELYRIMGVDLTRIDGLNESTAQLILSELGLDICQKWPTEAQFTSWLGLCPNNEISGGKLLKRGTRKVVNRVANALRMCAQSLLNSKSALGAYARRMRARKDTPVAITATAHKLARLIYRTLKYGQEYVDAGCDNYEAKYKAKLVKSLQRKAQLLGYLLVSSQTSDAVVP

SEQ ID NO: 363701 - protein, 408 aa, unidentified
MINDAINTSRVIGFDAHPDSFTAAILSGPTPAAAVVEKMFNKVPMNRLLQWAKKNTLDSDIIVLEASGNSFHIARSLRSAGREASVLESRHIGKLKEAHANNDKISAIRIGKAYLAGTAKIVWIPDETTQERRDTFHTYSKAVKRSTQVTNRIKSYLSDHGVRLKSKTHILNQKESIMQACQWSPRERLIIEGMLMDLQNAQSQRAHWNHFMAQEVLHDPLLLSLTRLTGVREIVAYSIGAIIGDINRFASPKKLVAYIGLNPAFDKSGEGEWNGGIKGHGRRDLRSHLIEAAQSILQSNHDLGRWGKKLMARKGSRNLAVAAVARKLAVAIWYLMKGLWSTVEEVEAGMKLKIGKMIGKMGKEGLSLIGKTRKEFKKEIEQNLKKGREYILDRARSSPLKSSLKEAS

SEQ ID NO: 363702 - protein, 337 aa, unidentified
MEYFAGLDVSMEETHICVLDRDGTLIREGKARSSPDAISDFLAAGPTCAGVVFETGRMAPMLYHGLTERGIPVQCIESRQAYQALKSLAGHKSDRNDARGLAHLARTGFYKPTHVKSLSAHAIRALIAARKKLVGQRVTIDNQIRGLVVVFGVRLPRALSPAFKDAALKVSNGVPGLHAALNGLFAAREAILAAVAAIDADVKKMARKSKTCSRLMTVPGVGPITALAFAAAVDDPSRFRRSRDVGPYLGLVPRRHQSGEVDYVGSISKRGDTRVRTLLYEAANVMLTRYAGPLKLKEWALAIGARSTMRKARVALARRLAIVLHAMMRDQTEFQFA

SEQ ID NO: 363703 - protein, 394 aa, unidentified
MKLIGIDIGKNKHFFCVMDQQTGEIISQPVSFSNDKEGFDFLVQEIKSYPKDSILIGMEDTGHYHFALLKYLLDLQYTVALINPKTTDFNRKMQGGITKNDKLDTINICDVLDTPERKKQYRITKVNSFDLYEQKQLTRHHHNLKEEENVYKNRLQKCIDIVFPEFNKLFNSKYGIVYMNILKMFGSAENIANTDIRTIRKCFEIEGRGNRISLTPERLKECARSSIGISSSAEVIQIKHLTAQIELIEEQLTEIDKKIEEFSIQNNSPILSIPGISHFSGTSILAELGDISNYSKPSQIIKFAGVAPLHYESSQFNAQHTAITKKGSKYLRKTLYQIILPVIRHNPVFNKYYQLKISQGKGHRCAQGHCVRKPLRIIYHLLKTNQQFDPQLLR

SEQ ID NO: 363704 - protein, 316 aa, unidentified
MNSPVFIGLDVSKQHLDVAVRPQNRHFVNSNDDRGIRQLLKRLAALKPQLIVLEASGGYEFLVTAALAEAQLPVALLNPQAVRKFAGATGKLAKTDKIDAQVLAHFAEALRPEPRPLPDQALQVLKAALQRRLQVVKMIGQEKNRLEKTFIPSVRQDIQEHLAWLQKRLKELDRDLNDQVRQSPLWRDRDRLYQSVPGIGPAVSRAVIAQLPEIGTLSGKKAAALVGVAPFNRDSGRFRGKRMIRGGRSYLRNMLYMAAVVASQWNPVIRAFYQRLLAAGKPPKLALTACIRKLVLILNAMVKNNQPWNQFINQVP

SEQ ID NO: 363705 - protein, 421 aa, unidentified
MGFEDEAEQSIGRPCRQTNGGSKRPSELTSSIVPRGTSCHHAVELEFPPIAFDPAISCRHGFPGPAEFGAINPDNGMDRPCSNRVNGNAAEAQLIREKERAMTDIAMHNDRIATIGMDLGKRSFHLIGMDARGKVIMRQQLSRGRFERDMANLQPCLVGVEACAGAHHIGRRLSAFGHNVRLIPAQYVKPFRKGQKNDYRDAEAIAEAVQRPTMRFVPIKSAEQLDLQALHRIRSRLVGHRTAVINQLRGFLLECGVIVPQGPAMLRKILPSVLAQRTDVLSPRMIRLIEELADDWRRLDDRVDAVTSEVQALARQDEGCRRLMSVPGIGALTASAVVATIGNGAAFTKGRDFGAWLGLVPKQLSTGDRTILGRLSKRGNKYMRTLFIIGARAVLAKPGSWAKFGLEGWRQVPPSASIITS

SEQ ID NO: 363706 - protein, 313 aa, unidentified
MKALQSNVFIGIDVSKERLDVAVAPSGETIGFANNEDGIALLADFLKPRDPALVLFEATGGWEMNAVNHLATQRLPLVVLNPRQVRDFAKATGQLAKTDVIDARILARFGEAVRPEVRPLKPVELRKLEALTTRRRQIVEMITAEQNRLVSAPEWVRPDIKELLEILKKRLAAINRDLNKLIRKSPLWREKDKILQSFPGVGPVMASTMIADLPELGTLNRREISALVGVAPLNCDSGTHKGKRKIWGGRAALRSVLYMCALTATRCNPVIREFYQRLRCAGKPFKVALTACMRKILVILNAMMRSGSCWQPM

SEQ ID NO: 363707 - protein, 342 aa, unidentified
MNYYAGIDVSLECSSVAIVDGSGKIVREGKVASAPAALIGWFEALGLSVVRIGLEAGPQSQWLYAAMKQAGLAMELLETRHVRNAFKTMAVKTDRKDARGIAELMRVGWFRPVHCKSMEAREVRVMLTARSLVQSKLQDIEASVRGMLRGFGLKVGKTTPNRFGERVRQLVCGHPHLEIIAQSLLAVHEVLLREFKAFEKRVRGVARADARARLLTTIPSVGAIVSLTYSSAIDDPGRFKSSKQVGAHFGMTPKRYQSGEIDYTGRISKIGDKSVRTALYQAAHIMLTKPVKSSALKTWALQLAKRVGMQKAKVALARKLAVTMHRMLADGKPFNFAAGAAA

SEQ ID NO: 363708 - protein, 405 aa, unidentified
MKPVVALDVSKGKSTIVIYDQKRCIFEGEINHCQADFESLRKRMILLEQQKGQRPEIVFEATGVYSMALEKFLQDRGYIYCRLNPLEAKLQTAAMRRNKTDKSDAHELAKTHFKINRKPIFQQDTYYNQMRALSRYYDEVDEELIQLRGKMHAILQLSFPELERMITPSSALFLNIVQLYPQPSFLLVHSKTVIRNSLKKNTKKNLSLKLADKKAQELLLVAKNSYPAIDASDVRCEQVRDYASRIADLRDKKEEIIAKMVALSLDRKEYHILRSFPGIGDVTACRIIGELGDIRRFKNAKQLNAYVGIDIMRYQSGNTQYRDRINKRGNKKLRKILYFMIFSMISLRKKGQNHIVDYYDKLKKQPQRKPHKVAVIACINKFLKVAFHLISHNIPYDYEIASTHS

SEQ ID NO: 363709 - protein, 340 aa, unidentified
MSIVTIGLDLAKNVFQVHGVDADGGVVLRKKLRRSEVLRFFEALPRCVVGMEACATAHHWARTLSALGHEVRLMPPAYVKAYVRRQKNDAADAQAICEAVTRPTMRFVPIKSAERQSVLVLHRSRDLLVRQRTMLINAVRGHCAEFGLIAPQGALRMTDLVMQIRSADKAYLPLIVKSAMLLMVAQLDALMAQINRLGRALLAWHRQDEASQRLASIPGVGVITATALAATVTDPTHFRSGREFAAFLGLMPRQNSSGGKERLGRISKMGDRYLRKLLVVGATSVIRRARTSTLGAAVWIRSLLERRPARVVTVAMANKTARIAWALLARGDVYRAPSHA

SEQ ID NO: 363710 - protein, 368 aa, unidentified
MKERGLAPTGPASNARGVLVHSTKEALWRQDTTGGRSWVSICTGGAAWVVRIAADTGQRLGMVRIDNEPMALAAEIAKAGEQPEVVLEATYGWYWAADVLAGAGAGVHLAHPLGIKGFAYRRVKNDERDAADLADLLRMNRLPEAWIAPPATRQLREQVRHRAKLVALRSGLKASVHAVLAKEGVRVAMSDLFGVAGQAMLDQLSLGPAYAARVASLRRLIDAVSFEIDMVGRRVSAQLDADRGYRAVQALDGVGPVLAAVFVAEIGDVTRFAGPAQLCSWAGMTPRHRESDTKVHRGRITKQGNRLVRWAAVEAVQRVHRGAIGAARARIGAHRGVNIAKVAAGRKLLTLVYYGLRDGHIRYEPRPA

SEQ ID NO: 363711 - protein, 437 aa, unidentified
MRVLYEHVAGIGVHKDMIKVAIRSPGEKPWTRKTEILEFRTFYGVLQEMARLLRRRGVTHVVMEASGVYTDPVYYALCEQDFAEVAVVNPAHARALRGHKTDAADCRRLAELFECGLLRGSYIPPAELREVRDLTRYRMKTVQARTSEIQRLGKALESAGIKLGSVASDITGKSATAMIDSLIDGERRGAVLADLAIGRMRTAGKLADLSMALTGRFTEHHALLCRLHRDRIAGLDAAVADLDDQIAGRAGRWQRELDLLKTVPGFGDVVAQTWLAEIGPAPHRHFASHEKLASWVTLCPGNNISARKRKHGRTGDAGTYIKPMLIQAAWNAIRPKGRLQARYSRLVRRFGGEKNPGAKKKAITAIAHTLLKIAYQVLKSEVPYQDLGADFCTRRESPDQQRAYLERRLRKLYPGCAITITISPPEAVLTSTVSNAP

SEQ ID NO: 363712 - protein, 332 aa, unidentified
MENLYFIGVDVSKKKLDFCVMFEGKVVHEEETANHQSAIMSLLHHLEEDYGIVSDQILVCAEHTGQYTFPLACACKAVECKLWLENAAEIKYSSGVQRGKNDKVDAKRIAVYARRFQDKVQYYERPTEDIERLKQLESERTLYVTDLAKYKGQMKDQKDYMPKALYERKMKRLQALMDDLEEAIQAITDEMDEVIASCPVLSRQRELLMSIDGVGRVVATNMIIATEAFTRFDDPRKFNCYAGVAPFSYSSGSSQHSKARVSHRADKVMKRLLHLAAVAVTHRVGGELKKYYERKVAEGKNRMSVINALRAKIVARMFAVIKRNEKYKPILS

SEQ ID NO: 363713 - protein, 376 aa, unidentified
MNSVAVVPLDIHKKFSKAVEMGEGGEVLGEARVSHAGRDEMKKYFSRFPAGTDVVMEATFNWPWIADAAEEAGLRPHLAHPMRAREMAKGMAKSDRKDAIFLGKLWLAGDIFPESYLAPPEVRRMRGLFRLRLTLVSMRTALKNAIHGQLHRQGILISECSDLFGKSGLAILEKLPMKEHERWQLDTKLSVLGDIGLYVKEMEQKIRRELKTDPRAQLLMSLPGVGEITAYSMLAEIGEIERFHNSRALASYAGLLPLDNESAEKDFGKRTGAHCNRFLRCARIDAETGAVTASGRMKSLYMRVKNRNKDKPQKARIAVARELIELSHLLLTRKVKYEEKRPPRPGSKEAGDETRPNRASQSALCARSPQASQAAL

SEQ ID NO: 363714 - protein, 318 aa, unidentified
MNVIGLDISKDTIDVTLITAKSEMDYIKIGNSHEGFEKLIDWIKTKRVRKIAISMEATGVYYEQAAEYLSAVYTVYVINPLKIKDYAKSQFSHTKTDKADSKLIADYAKRHLDKLTPFRPSENPTLYKLINLLQQLKQQKHESQNRLHTAKDPFIRSTHETIILLLSKKINETSKRIDSTIKQQKSLNAEYQNLQTIPAIGKDTAAILLRHLTDKTFRTANQFVSFAGLSPKIEQSGSSVNKKGRLSRYGNRQLKRALFMPALVAYRINAFPQLVKNLEAAKKPKMVVIVAIMRKLAKIAYYIHKTQKPFDKARHQTV

SEQ ID NO: 363715 - protein, 343 aa, unidentified
MGEVSMIGLDVAKNAFQVHGVDAVGAVVLQRQLRRGQVEKFFAQLAPCMVGLEACGGAHHWARVIGRYGHRVRLMPPSYVKPYVKRNKNDARDAAGVCEALSRPSMRFVAVKSVEQQATLAVHTTRALLVRQRTQVANALRAMLSELGIVAAQGLRGLRELIGQLEAPSEAIPELMRGALALLAQQWQALDAAERALERQIRQAALANPDARRLMEMPGVGPMIASATLAKVPDARVFGSARDFAAWLGLTGRDHGTGGKHRIGSISKQGDRMLRTLLITGASAYLRQQRARGVTDPWLRAMLARRPYKVVMVALAARTARIIWALLSKGERYRDRTLLPTAA

SEQ ID NO: 363716 - protein, 333 aa, unidentified
MNKFKHFVGIDVSKEFFDAVVILDGARDKSVHNQFLNNCNGIKALCKWLKEHGSNSENTLICLEHTGMYGKLIIKYLSSSNFSLWVEMSLKIIRSIGLQRGKNDKIDAERIAYYAMKNSNEAIIYSVPRKEIDSIKNLLSLREKLVTTKASLLSNIKELKLFDKEVARLSEKLQKSTIKGIDSDLKKIEKQLNDIVNNDENISHIFKLATSVTGIGKVTALFLICFTNEFTMYQSPRQLACYAGVAPFEHTSGKSIRSKPKVHFMANKKLKKQFHLCAMSAIMSDPELKHYYKRKVEEGKNKMLVINNVRNKLIHRICACIKNDKLYERRAVA

SEQ ID NO: 363717 - protein, 406 aa, unidentified
MKHVVAFDVSMGKSTMVIYDRYRQCEYEGEITHNRYSFEKLNETLISLTQKDGQAPDIVFEATGVYSKPLERFLGDQGYMYYRVNPLEANIQMASMRRQKTDKSDAHELAKTHFRAEREQTYQEEEYYKQMRAMTRYYDEISSEMTHLYSRLHAILQLSFPELEKLFSKRSALFLNVVQLYSHPDHVLVCSKTVIRNRLKANTRKNLSLARAEEKGIALIEAAKEAYPAISKDDIRCEQVRDYAKRIADLKEKRDQLVQKMVKLSKDKQEYQILISFPGIGETTAVRLIGELGDIRRFKNHKQLNAYVGIDIMRYQSGNTFYKDKINKRGNNKLRKILFYMIQTMIQLRKNTQNHIVDYYDKLKTQPQRKPHKVASIACVNKFLKSAYHLITHNLKYDYEKATMHQ

SEQ ID NO: 363718 - protein, 315 aa, unidentified
MTSDTYVGIDVAKDTMFVAILPGGENWEERITEDGLKRLIAKLRPVAPKLVVMEATGGYEAPILEALWKHTIPVAIVNPRMVRSFAKALGRLAKTDKIDAAVIAQFAEAIKPRPKLPNYRQEKALGDLVARRKHILQMIVAEGNRKRRASGEVQKLIEKHIKWLQKAQEEIEKKLETYINKTVEWREKSEILQSVPGIGKIVAYSLMADLPELGNLNRKQIAALVGVAPLNRDSGNMKEKRGCWGGRASIRTALYMATVVAMRFNKTIKAFYERLCQNGKHKKVAINACIRKLLCVLNAMMKNHVRWGEFKPAET

SEQ ID NO: 363719 - protein, 392 aa, unidentified
MQISVGIDIAKEIHWVTAIDAGGVVQVDRKLLNTPAGIATLVDELTALRGTVRIGLDVIGGIAGLAEAMLGDAGFALVHVPGIAVNRARQGTVGGENKSDPRDARTIAEQVRTRSDLRPIEPATELDLEIRLLVGRRSDIVQAQTQRLSRMRDLLVGIFPGLEACLDLKTKGPLHLLTKFVTPAELRDAAKKRLVRHLQAAGGVPKVEDLADRVLTVATEQRIAVPAERTTARLIRELAVEALASRTRLTELDRELEALLARHPDAALIRSLPGMGAVLTAELIAEAGNLARFRSADALASAAGMAPVLRQSGRSRFLRRPSGGNKGLKRVFYQSAFCSLAHDDSRAFYERKRREGKRHHQAVIALARRRVNVLWAVVHSRTPFQTAFKTAA

SEQ ID NO: 363720 - protein, 346 aa, unidentified
MKQITTIGLDLAKHVFQIHGADAEGSPVVNRKLRRAEVLRFFEKLPACLVGLEACGSSHYWAREIAALGHEVRVIPPAYVKPFVKRGKTDAADAEAISEAVTRKTMRFVPIKSAEQQAAAMVLKTRSLLVRQQTQAINALRAHLSELGIITAIGTTKVAGLIEIVRDATDARLPQAARFALTILAGQIEALFAQIVKLEREIVAGAKRDEDMRRLATIPGVGPITAASIKALVPDPDGFKSGRHFAAWLGLTPRSHSSGGKERLGGISKMGNPELRSLLVLGASYVLRRVRGNDKAPKWLSALLTRRPYKVVAVALANKTARVIWALLTKGGTYRGMAPVNGVASA

SEQ ID NO: 363721 - protein, 367 aa, unidentified
MTVTIVDAARPVTGSADTHPDFHAAPCLVTGGVDTHLDLNVAAALDSIGGLLGVAEFSATLAGHRRMLGWLAGFGQVARVGVEGTGSYGAGLARFLRAAGVAVVEVDRPNRQARRRSGKSDPLDAIEAARAALSGRACGAAKSRDGNVEAIRALVVAKRSARSAKIQTLNQIRHLSFTAPEQLRQRLAGVSRHHLAARAAALRPSQREGADPVIAATKTALRILGRRVLALDEEKARIDALLSTLVAQTAPQLLAVFGVGIDTAAALLVTAGDNPGRLRSEAAWAHLCGTAPIPASSGKVTRYRLSRGGDRQANRALWGIVITRLRNDPRTKAYMARRLGEGRSKPEVIRVLKRYVAREVYHRLPRP

SEQ ID NO: 363722 - protein, 341 aa, unidentified
MNHVAIDLGGRESQVCIRSPEGEIVEEKRVATQRLESLMKTWPPSRLILETSAEAFRVADEALSSGHQVRVVPATLARTLGVGARGVKTDRRDAQVLSEVSCRIDLPSVHIPSPLSRELKSLCGAREVLVETRTKLINNVRGWMRTQLLRLRSGSSATFAVRLRQNAERTRQTLPFHVEQQLKLIETVVAHVKEADRQVKRIACEHPICRRLMTVPGVGPVTAVWFLAALDQVARFRSAHRVQSYLGLTPGENSSSDRQQRTGITKAGSTQMRRMLIQAAWTALRYAPNQPMVAWATQVAARRGKWIAVVALARKMAGILFAVWRDGTTYRPSLAALAATP

SEQ ID NO: 363723 - protein, 342 aa, unidentified
MTIVTVGIDLAKNVFAVHGVDAAGKPVLVRPSVARDKLLELIASLPPCLIGMEACSGAHHWAREFDKLGHTARLMAPKFVAPYRLSGKRGKNDAADAAAICEAVTRPQMRFVPIKSADQQGQLMVHRARQGFIEQRTATLNRIRGLLSELGIVLPLKAATVRRQALQHLEELPGWANTVIGDLLSEVSHLDERIARYDRHIALMARHSTQAQHLMQLAGIGETTATAIVSTVGNGHDFASGRSFSAWLGLVPGQYSSGGKARLGRITKAGDAYLRSLLVMGARAVLAAAMNTKTSKQDPISRWARSLAERRGYWRAVVAIAAKNARLSWAVLQRGENFKIPA

SEQ ID NO: 363724 - protein, 345 aa, unidentified
MNEVSTIGLDIAKSVFQVHGIDDEGNVVIRKRLNRNKLLAFFAELPPCLVGIEACPTAHHWSRELARLGHTVGMMPAAYVGAYVKRNKNDANDAEAICEAVTRPTMHFVPVKSREHQAALMLHRSRQLFVKQRTMLSNAIRSFLAEFGIVAPTGRNGLARLLETIEGPDDLGVPPAAWLCLKRLTEQYHNARNEVFRLEKAIHTWHRSNELSRRLEEIPGIGPIVATALVGSIPDATMFSSGRSMAAWIGLVPRQNSSGGKERLGGITKQGNRHLRTLLVVGAMAVIHYHQRNGFAKRPWLARLVERKPIKVAAVALANRIARMAWVVMARGERYRDPLQLAASA

SEQ ID NO: 363725 - protein, 361 aa, unidentified
MSESMVLVGLDVHQAQTVAAVLDPSTGELLVQRLRGEPASVVPVFLEELDRPVAAVYEAGPTGFALARVAERRGLDVRVVAPGSIPRAPGDRVKTDRRDAKRLVRLFAAGELGFAFVPSETDERFRDLVRCIEDARKDLMRCRHRLSKFLLRRGQRFPSKAWTQPHERWLGKLHFEDAPSQATFVDYLSAVQALVQRRRTLIGVLEQTVPQSSHAQTVARLRCFRGIDTLTAAGLCAEVGDFTRFAKPALLSGFLGVVPSEYTSDEKRTQGQITKAGPPHARRLLVEAAHHYRHRPAVGEGIAARQAGQDPRVVQIAWRCQRRLHERWTHLAGTRGKRTGTVAIACARELAAFCWEAATLD

SEQ ID NO: 363726 - protein, 368 aa, unidentified
MQKNLFYVGIDVDDKSFHVAVLCRISNDLQEFKCAPNITSLLKKLSKFESNRLVICYEASHLGFSLYRSLAEKGYRCDVIAPSLIPELPGKKQKTDKIDARKLAEYHMKNLLTIVHVPSFVEEMDRDLVRSRKFLAHQSAKQKNKITSFCRTLGWHYKQETGAKSYWNASHLNWLEKKVTSCDNASLKINLTILQRQLEQTLENISLYNAEIEKLAKTDKYAKKVSALNCYRGLDTNSSIAIITELGDINRFKNPSHLMSYCGFDLIEYSSGGKERKFSMSKDGNKYVRSVAIEACQYALMAPKASAALRIRRRGVDKELTNIADRCMARLYKKGTRLLFAGKERNKAKVACAREMLGFVWESLRAVS

SEQ ID NO: 363727 - protein, 369 aa, unidentified
MSKIAQFVGLDVHKDTIAVAVAEAGSGEPPRDLGEMPHDVPRLLKRLDGLAPRAALAVAYEAGPTGYGLCRHLRKVGIACEVIAPSKTPRHSGDRVKTDRRDAAKLARYLRSGDLTPIRVPSERTEALRDLIRARGDAKQAQLAARHHLSTFLLRHDQRYKGKSHWTQLHLQWIHSLEFDQEALTRVRNDYLHEVERLSERVERLSQDIEELATQIEEAPLVQALQALRGVKTLTAAAIAAEIGDLRRFASPRKLMAYLGLVPSEYSSGSSVVRGRITKTGNRHVRRLLVEAAWAYRYKPRVGRTLRWRQRELSVEVRQIAWKAQCRLHHRYVRMLGRSKTPQRALVAMARELCGFIWAIAQKTGPAAA

SEQ ID NO: 363728 - protein, 315 aa, unidentified
MSQEPIYFGIDVSKERIDIAARPTGTSWSVSYDSDGVDDLVAQLKDLKPAGVITESTGGLELPLVAALAASSLPVAVVNPRQVRDFAKSTGQLAKTDRLDAQVLAHFGEAVRPPIRPLRDADTQALGAVLARRWQVMGILVAEKNRMRRAAAEVRPSIEAHIGWLEQELDDLDTDLRQRIQRSPAWREKDDLLRSVPGVGPQVSLTLLAYLPELGKLNRKQIAALVGVAPFNRDSGPHRGKRSVWGGRATVRSTLYMGALVTSRRNPVLREFYQRLLEAGKPKKVVLTACMRKLLTMLNRMVRTGQKWDPIIPTS

SEQ ID NO: 363729 - protein, 341 aa, unidentified
MADYREAFVGIDVAKLKNAIAIAEAGREGEVRFFGEVDASATSMRRVIGRIASRFDYVHFCYEAGPTGYGLYRLIRSLGHECTVVAPSLIPRKPRDRVKTNRRDAISLARLLRAGELTAVWVPDEGHESIRDLVRARAGAVETLRVHRQQVSAFMLKHGRSYPRKKSWTMRYLRWLQEQRFDHPAHQIALQEMVEAVRVSKERVERLERVIEEFVPAWSLAPIVWALQTLRGVDLIVAVTFVTEVGDASRFESPRQLMGYLGLVPGERSTGETVRRGGITKAGNGRVRHMLVESAWKAQSRLTARYRMLSARGKRTTVVCTAIARELVGFMWAVAREARVT

SEQ ID NO: 363730 - protein, 310 aa, unidentified
MGGVNAAIDVGKQQLDVALGSAGERCAEPNEPRAIARLCKRLAAAGCARVLIEGGSYQNLLVGALRAAELPVVIVNPRRVRQFAQSLGRLAKTDALDARVLALYGERLQPPLRELPDEQTRTLRDLWVRREQLIEMLVMEQNRLEHARKALHRGLRAHIDYLRKQIRQADDDLDRTVRNSPLWDKYELLSSVPGVGPVLSVALLADLPELGRLNRREIAALAGVAPFNHDSGTLHGQRKIQGGRPRLRRVLYAATVAAARCNPLLRPFYLRLRAAGKKPKVARVAVMRKLLTILNLMLKTHTAWRPPCPA

SEQ ID NO: 363731 - protein, 346 aa, unidentified
MNFYTGQHKFYCGIDLHARKMYLCILDEKGEIRLHRNMDTDREVFLKALEPFREDVVVAVECMFAWYWIADLCKKEHISFVLGHALYMKAIHGGKAKNDKIDSHKIAVLLRGGMIPMSYVYPEKMRATRDLIRRRNHLVRKRAELLSHIQNTNTQYNLEEPFGCLTPVRNREGIAERFTDPVVQKSMSVDLTMIRSYDLLLGDLERTIIRIARHHDPISYALLQTIPGVGKTLGLVILYEIEDIKRFPTVHDFVSYARLVKCSHESNGKKYGSGGNKIGNGHLKWAFSEATIIFLRGNEPVKKHLDRLTRTHGKGKALSILAHKLGRAVYFMLKNKEAFDQEKFLR

SEQ ID NO: 363732 - protein, 447 aa, unidentified
MFEASPLSRGVKRRNDRLSRLRQIVRRDHAVVAIDLASKKQVIVVADHDSRILARKTFACTPWKLGPAIAWARTQAKAAGFTGIVLACEPTGYRWKVVGDVAAAAGVQMVCVQPMMVARARETEDFTRDKSDDKDALLIARLTTQLHVYLPEHADPHWARLRHLGVRRADQLTRRAAARQQVRDLLDSAWPDVLDCAAQPLDSSTWLATMTVIGCDPSTITAFGTPARAHTRLRARLRRELPRWGAHRIHGPILTAIINAAFTTTDSPDRAGALERAHYGLNDFHHAAAQCREAETRMLAVLDDLQLATLATSIPGVTAVSVAAILAETGDLSRFDSARAVVKHAGLCPRENSSGSYQGKTTISGRGRPRLRTAAWRAAFGALRHNPVYADRYQHLTTRTHKRLAPNQAYVAIAAALLRQLYIVITTATPWDPALAGPPQTAEVSAA

SEQ ID NO: 363733 - protein, 423 aa, unidentified
MKSHPSKIDQEESIYERCAGIDVHKKMIVVCLRIGRKTQVREFGTLTCELREMAAWLKENDVQMAAMESTGSYWKPLYNIFEQEGISAMVVNAGHMKAVPGRKTDVKDAEWIAKLLSQGLLKASFIPDREQRELRELTRFRKSQIEERARTLNRLQKMLEGANIKLSSWVSDIDGKSATQLLELIIGKEEFTVQEVERLRHFNMKASTDELFKSLEGIVTSIQRELFTHIMNVIKEQTVQIEKTESLISGYMTQPYQEAAAAIDAIPGIGQISAQQIIAEIGIDMSRFPDAAHLCNWAGICPGNNESAGKSKSGKTNYANETLKSTLTQCAQAVKKNKDSFFYAQYQRLVVRRGKNRATLAVAHSLLIAIYHVLSGKSFCDLGADYYNRFNKEKKINSYIKQLSKLGVSVPDDAIRVALEQTA

SEQ ID NO: 363734 - protein, 391 aa, unidentified
MICVGIDIAKDKHDCCILDSDGTVRADCFNIPNNMDGFKQLLQTIRNCTKKSDKIKVGLEATGHYSYNILGFLLDNGLPTYVINPLHTNLYRKSLSLRKTKTDRVDARTIATMLLSDVDLKSYTDIAYHNEELKSLTRYRFEKVRERAKLKQSVSRLVTILFPELEKLVPSLHGASVYALLSEYPGAKQISEVHLTKLTNLLVTASKGHYGKEKATLIRETASASIGSVMPAKSLELKHTIKLIQELTSEINEIEDSIQKIIDELNPPILSIPGMGVNSAAVILAEIGDFSNFSSPDKILAYAGCSPSTYQSGKLTNCYAHMEKRGSRYLRYALYNATKYVCHWNPVFAEYLAKKRAEGKHYNVALSHSMKKLVRLIYALQKSGKTYLAAA

SEQ ID NO: 363735 - protein, 291 aa, unidentified
MDREKYIAMDVHQASISVAVRDAAGKLVVESIIETKAATILAFIRGIQGSLWITFEEGTSAAWLYDLLKPHVTKVIVCDPRKNALLHAGNKNDRIDARKLSDLLRAGLLTPVYHGESGVRTLRELCRGYLTINKDLTRVMNRLKALYRSWAIPCAGDKVYSPRHRNAWLEKLSEAGVRRRAEQLYQQLDALVPIRREARRQLLAESQKHPATQLLRQIPRLGPIRVALLIALIQTPHRFRTKRQLWAYCGLALQTRASGEYRFTGGELQHAKRLPALRRRSAKLIHSVQVS

SEQ ID NO: 363736 - protein, 393 aa, unidentified
MICVGIDVAKDKHDCFILNSEGEVLADVFTIPNNAEGFDTLLQTIRRCARPEDKIKVGLEATGHYSYNILGFLLDKGLPTYVINPLHTNLYRKSLSLRKTKTDRVDARTIAAMLMSDVDLKSYTDTAYHNEELKSLTRYRFDKVRERAKLKQSVSRLVTILFPELEKLVPTLHMASVYALLSEFPGAKQVAGAHLTHLKAVLHDSSKGRYGRDMATTLRDAARCSVGSVMPAKSLELQHTIRLIRELDAEIEDIEAAIQSMMEEIHSPITTIPGIGVRMGAMILAEIGDFSRFDSPDKILAYAGMSPSTYQSGQLSLSGAYSHMEKRGSRYLRYALYNATKYVCLWDPTFAAYLAKKRAEGKHYNVALSHAAKKLVRLIYAMEKSQQPYNTAA

SEQ ID NO: 363737 - protein, 342 aa, unidentified
MYYIGLDVHKKTISYCVKDASGQVHQEGKIGATRRELDSWIKTLPQPRTMAMEATIFTGWIYDHLLPHAQQVKVAHPLMLRAIAAAKKKNDQIDASKIADCLRCDFLPECHMASTQIRDRRRTLRYRHLLVRQMVQMKNRISGLLMETGVSYNKQRLHKVGYFRELLSTSEDVHESIRPLLKLSRDTVVRLQKTEYALVSSLQRDPLLADRIQRLRTVPGVGPITALTWALEIGDVSRFRSIRQAISYCGLCGEEKSSGDKVMRTPLSKQRNKHIQRVLVEAAKLAPRQDHDLAQVYETEKQKGNANRATLAVARKMVAYLLAVDRAQRDFVPAENYQRAAA

SEQ ID NO: 363738 - protein, 411 aa, unidentified
MEAAVITAVGIDVSKSKSTVAVRRPGGEIVLRPFEVHHTNSDLKKLASTLKKLGGDIRIVMEHTSTYWRPIALTLKEAGFFVSVVNAMLTHDFSDNTIRKLKTDRADALKIANYALTFWDTLPPFNNEEETRLLLKMQSRANERITATATALRNGLIALADQIFPGVNIAFDPNTKNANGHEKWVDFFLRYWHKDCVCQYSMEAFTESYRGWCKRKNYKFRTDTAHQIYLLAQEGVATLPKCESTKMLITQACKSLNAVYEAKQSTQLEMQRLAAMLPEYEVVMQMEGAGPITGPALMAEIGDVRRFKNKKALVAFAGIDAPPFQSGAFESKSRHVSKRGSPHLRRTIFIVSNIILTRSNPENAVYCFMDKKRSERKHYYVYTVAGSAKFLRVYYARVTEFLRSQPSPGAC

SEQ ID NO: 363739 - protein, 520 aa, unidentified
MSTPRTRRRRPHRGPSGSVGKPRGVLHPRVQQVGPEHFGIVCFDCHKASSKFLLADFYGRQLIAPTKVHHNRPELDAAIAQIRQAFEQHQLGDGLVVIERTGRYHRVVQRAFAAAGFETRIIHPFVTKQYRQPVDPSQKTDDADLGAIHRATVTGCALLEATRDEAWTILQLLIRHRRDLVRKGAALNCQIRDHLEAALPGYAACFDKLWESTIPWHLLRHFPTAGQLRDAGLTTLCHSLDEAGIRFQQRTIQTVVDWAHQAAPGDIGASLHRRIALALYEDRQRKTQEITALEREIAGRLVQTPYVLLLSFPGINVVSAADFGGEAGPMEHYLNAKSITGRAGLRPSRYQSDQVDLANGPLVRNCNRSLRAAILGIADNLVVCNHHFQVLATQWRAQGKDPRHTRVKIGLRFCRIAFQMVAGRQVFRHPSIQGRHYILDKLTAFHLAHGTKMPDLLRDLQAAIGQIPRRQYAAEAKPLQDEYRKIHDGRRRGPQLLGDILPIVLARLGVDVVQSNESGE

SEQ ID NO: 363740 - protein, 344 aa, unidentified
MPHYVGLDVSQKTTAICVVDEQGRRLWRGACVTDPGAISARVLRHAGVVDVKVGIETGSMTPWLVHGLRSAGLDVECLDARRVKAALQMRLNKTDENDAEGLAQVLRTGWYRPVHVKSFDAHRARALLGARAQLVGMTTRLSNMIRGVLKTFGLLPGAGRGLRFDRRVEALLEGAPEIGLIVRPLLATWRQLREQIAVFDKAVQQRVRADPICRLLMTVPGIGALSSLVYVSTVEDPGRFSRSRAVGAHLGLTPRRYQSGETDRSGHISRCGDGLARTLMYEAAVVILHRIKRSLHLKDWAAAIEQRSGPGKARVALARKLSVILHSVWRSGEPFRWTPHTIAA

SEQ ID NO: 363741 - protein, 398 aa, unidentified
MLVGWDWASETHDVTVLDEAGMVVDRWVLRHTERELDEALRRLARHGRPDELPVAIERTTGLVVERLLAAGYPVVPIHPNAFHAARSRWGASKAKSDPGDSYKLADYLRTDGHRLRRLRPLDARTRELRALCRMRDDHVAARTAATNQLGALLEAHWPGAKAIFSRLGSEIALAFLEDYPTPEAAGRLGEARLAMFCRRHSYRGGRAPAELLARLRSAPVAPAGISPETLAELVRAQVRLVRATLSTIAELDQALGAALLGHPKAPLLAPLPRVGEVSLAQLVGEVGPILERSCHVEQASAEAGAVPVTKQSGKAKSVQFRLATNRHARKALTAFADNSRHASPWAAALYADARRRGKRHPHAVRILARAWMRVIWACWHNDTPYDPSQHGGERRLAA

SEQ ID NO: 363742 - protein, 423 aa, unidentified
MTKLSSTPAGAVLVAIDMAKNRQEVLIERPEGGRRRRMTVLATKADYDGLAEQLAAIGRPIVVGFEATGNYHRTLAHRLLTAGFELRLISSVALARTREALHNGWDKNDPKDAQVILHMLRIGATQRYVDPLAAGINDLQELSKTHEVVSRMKTQTWHRILTHYLPLYFPEIARFAGNSRSDWFLAMIERFPTPTSITSLDREAFSAEVWPLIGRKVSKARLINDVYETACASTALPVPEDSTAITMFRMVIAQGRSLIQQRDEIERLAHLRLADDVDYQLLRKIPGIGPINALTILAEAGDLRRFSHHRQFLKFCGLDLATCQSGTFRGRTKLSKYGNARLRRTFWMAAQVAARQRDNSFRDKLGRYTAGHADDADRRRKAMTALTAKMARVAHAVVKTGTEYRPFVERSDARWKDPSLQVP

SEQ ID NO: 363743 - protein, 372 aa, unidentified
MSNDSTVYVGLDVHKESIVAAYAVGDGEVLDLGQVGVLQRDLDKLCSRMQSKASKLRFVYEAGPCGYGIYRYLSAKGHACTVCAPSLIARKPGDRVKTDRRDAQKLVRALRMNDLSAVHVPDVEDEAMRDLFRAWSGTREDLKRAKQRLKSFLLVHDVRYLGKANWGEAHRRWLSKFVFPHGSSHIAFQEHLRSIEERLAQCDRLEHSLREVIQAWRFYPVIQALQALRGVQFTVAVGVVAEVGELSRFSTAPQLMAWLGLVPSEHSSGPRKRQGAITKCGNAHARRLLIEAAWAYRYTPKVSPTIQKRHEGMPKTIVDRAWDAQVRLCKRFRKLSARGKPHNVVVVAIARELAGYIWDIARMTMSTPISNR

SEQ ID NO: 363744 - protein, 402 aa, unidentified
MNAVGIDVSKGKSMVAIMRPFGEIVSTPFEIKHTASGINSLVELINSVEGESRIVMEHTGRYYEVLAHQLSEANLFVSAINPKLIKDFDNDSLRKVKSDKADAVKIARYALDKWQNLKQYNVMDELRNQLKTMNRQFGFYIKHKTAMKNNLIGILDQTYPGVNTYFDSPARSDGSQKWVDFASTYWHVDCVRKMSLNSFIDHYQNWCKRKKYNFSQSKAEEIYGKAKELVPVLSKDAITKLIIKQAVDQLNSASTTVESLRTLMNETASKLPEYPVVMAMKGVGTSLGPQLIAEIGDVSRFTHKSAITAFAGVDPGVNESGSYEQKSVPTSKRGSSDLRKTLFQVMDVLIKTHPQDDPVYQFLNKKRAQGKPYYVYMTAGANKFLRIYYGRVKEYLSSLPES

SEQ ID NO: 363745 - protein, 350 aa, unidentified
MLHAGLDLSRNRLDVCLLSDQGEIVEEFAAPSDLDGVRAMARRVLGYGEPVRGVIESMTGARFVHDTLERYGWDVLIADAQKVKGLAPLACKTDKIDARVLAVLSERDLVPAIWLPDPTVRSEREQARFRLHLVKHRSMLKHRIHSTLMTFGEPCPVSDLFGAAGRELLDRLEIPQPWRGTVDASIDLIDDLDRQIAEVNHQLRAGGAEHPYVPLLLTVPGIGWVLAFTIAAEIGDVTRFASPKKLCGYTGLCPRVSQSGDSDRRGPLSKHGPKYLRWAMLEATMHALRHPAYAERYQRNKRRLGKQRGARVAQIDIARKLTEAIWHMLSNNQPFAPTPASGGATHRLVA

SEQ ID NO: 363746 - protein, 423 aa, unidentified
MKVIYQTCCGVDVHKLFLVATIIKTTSGVEPTYQKKRFSTFNNSILEFKQWLIENKCRDICMESTGKYWVPVFNLLEEDINVTIANPKWVKAVKGNKDDTKDSKWIGDLFRLGLVPGSYIPCKPIRILREYTRYRYKVVCCHSSEKNRYQNALTVCNVALDSIVSDIFGKSSTSIIDSLLEQSGNSINHEEIASKLLKKLKEKESDVIESIEGYQMTDAQKYRMRLVRAHIDYITVEIQDIDTQIESLISSHTDFENAIQFLCTIPGVKHDSSITIISEIGIDMSQFSSSKRLCCWAGLTLGSNESADKKKSVRITCAGVYLKPALVQYAHAAVKSDKSPYYKKKYESIVKCRGKKKAIIAIARMILTAIYQMLSSGATWNPSDIYRVDMPATLVERQKEKAIEQAKKFLLREGVITESQLIS

SEQ ID NO: 363747 - protein, 321 aa, unidentified
MHCIAGIDVSKDHVDVAFDPTGPVQRFGTDPSGRTRLVQVLEEMQVSRVVLEATGGYERLLVIETASAGIEVVRVNPRQVRNFALATGCLAKSDPIDAKIICRFGHAMRPPARATPDADLIMLQELLARRRQVVEVQSGEKVRRQQVLDSDVRSSIDRMLAALDEELSRLDQLLDERVGQRVDWSDRARVLQEESGVGAVTARALLIDLPELGRVSRKKIAALVGVAPMARDTGKKRGARKICGGRSSVRRALYMAALVASRHHPRIRAYYLHLQGMGKCKKVALVACMRKLLVILNAKMRAHLQSQSCPSPAVSFASPPS

SEQ ID NO: 363748 - protein, 350 aa, unidentified
MSLELRSLLPYPNSCLGASPHQQERDTKMAMLSFGGIDVSKDRLDVVILPEEQWSAVSNDPSGWADLVEQLRGFSIAAIGIEASGGYERGVMRTLLAADLPVRQVNPFKLRQFARASGVLAKNDPLDARMIASFVAIMPTRPAQRQAPAAERLTEMLAVRRQLKTEKVAAENAARLLEDAMLRRLSRRRIARLTADIELLDERLVEIVASDAALAYRYRLLTSMPGVGEVLACTLLALLPELGCMNRKQIAALVGVAPYAFESGTLKGRRCIWGGRAHVRQVLYMAAMSAGNWNPTFKTFHDRLKAAGKLPKVAIVAVMRKMITTLNAMVRDDVMWADRLTGRHILPTAR

SEQ ID NO: 363749 - protein, 419 aa, unidentified
MSFKILKNNCCGLDVHKTWIFACIGITDSHRRTEYKQARFSSFTKGLQELCDWLAKYNCTDVCMESTGKYWIPVFNVLEKNNIWVTLSHPKYTKPQKGNKTDRKDAKWICDLYMCGMVKPSFIPPADIRQLRDLVRYRFKLTCMITSEKNRAHNCLTISNFKLDEVFSDIFGKSSRSITEQILQHPGETFDVAQFVDGRCKTPIEEIQAAVDGAISTEQAVKLRQCLNHIDELEKHQAEIEREIFRLSDKYEEVLNLIRTVPGFDKNPMTAIQVLSEIGGDMSVFPTAKNLVLWAGCCPRNDQSNQKIKSTRISRAGSYFKPVLVQVANALIKSKKNPEFTTRYRRIKARRGHKKAIIAICRMILTAIWHILTDLKPYTTEGFLESRPVNDSKILTTSQALNLLKQRGYVIKDDIVSVP

SEQ ID NO: 363750 - protein, 396 aa, unidentified
MMTPDDIDVWVGLDVGKSAHHAHALDHDGNTLYDKPLKQDEKAIRTMLGKLSKHGRVLLVVDQPNTIGSLPLTVARNMGIAVAYLPGTAMRRTAQLLPGDAKTDRRDAHVIAWAALKLPETLRDAGPDDETLAALKLLAGHDEDLAHESTRHVNRLRSLLLQTHPAFERALKGERITRDATLALLERYGGQLAGIEDVKDWAKSNGLRAGRIIDDMFKAIGEQTVTVPDTLMAETIIPSIAHDIKTIRDRRREVGRQVEKLLEDHPLLTVLTSMPGIGVRTASNILLGIGGDIANFKSSAHLAAYAGISPVTGQSGTSIKGERPSRRGNKRLKNALWQTAFVASTKHPPSVAYYKRKREQGKHHNAAIICLARRRCDVIYSMLKNGTLYQEPALVA

SEQ ID NO: 363751 - protein, 351 aa, unidentified
MLIVGCDYHPSFQQIAWVDTESGECGERSLLHSTGEAERFYRNLKEQGVKVRVGIEATGHSRWFERLLMELEYELWVGDAAEIKAKRVRKQKNDREDARLLRTLLVENRFPRVWLADQLNRDLRQLLWHRHRLVQMRTRVMNQLQALALNEGVQRKKGLWSQAGRAQLESFQLLPWATRRREDLLKLLDGLTPRIQALTAEVNKQAEQYPEARRLMTHPGVGPLTALAYVLIIGSPDRFRCGKQIGCYLGLIPSEESSANRQRLGHITKQGNSLLRFLLLEAAQAAVHSDADWRREFLHLTMRRGRQIAVVALARKLAVRLYWMWRNGRDYEKSLKFSSHVGQPGTGYGVK

SEQ ID NO: 363752 - protein, 420 aa, unidentified
MPFKILKNNCCGLDVHKTWIFACIGITDPFQRTVYKHARFSSFTKGLQELCDWLAKYNCDDVCMESTGKYWIPVYNVLEKNNIFVTLSHPKYTKPQKGNKTDRKDARWICDLYMCGMIKPSFIPPADIRELRDIVRYRFKLNCMIASEKNRALNCLTVSNLKLDDVFSNVFGKSSRSITEYILQHPGETFDVAPFVHGRCKTPIAEIQAAVDGAVSAGQAAKLRQCLDHMDELEKHKENIEWEILRLSEKYEQALNLIRTVPGFDKNPMTAIQVLSEIGGDMSVFPTAKNLVSWAGCCPRNDSSNYKIKSNRISHAGSYFKPVLVQIATSLSRSKKHPEITNRYRRLKARRGHKKAIIAICRMFLTAIWHILTDLKPYTPEGYLNPNPVKKEKKILTTSQALNLLKRRGYIIKDDAAPAF

SEQ ID NO: 363753 - protein, 343 aa, unidentified
MHGVTTIGLDIAKSVFQVHGIDAIGKVVIRRQLKRRYVLAFFQKLVPCLVGIEACASSHHWSRALTALGHTVRLMPPAYVKPYVKRQKNDAADAEAICEAVTRANMRFVDTKTAEQQGCLMLHRTRHLLIRQQTAVINAIRAHLAEFGVVAPVGRRGVEELLDIATASSEERVPEVARACVGALGVQLRLLKAQILEFDRQIMAWHRSNETSRRLDEIPGVGPALATALVASVADPKAFRSGRNFSAWIGLVPKQHSSGGKDRLGSISKQGDRYLRSLFTAGALAVIRYAKIHGTRHRPWLAALLARRPTKVAAIALANKIARMAWAMMVKGERYKEPAALAA

SEQ ID NO: 363754 - protein, 405 aa, unidentified
MNAVGIDISKDKSMMAALQPMGHVVLKPKEYPHTGTGLEHLALDILALGEDTRVLMEATGRYHEPVAAALRKYGVWVSVINPLFIKQSGGGSIRKVKTDKADAMKIAKYALDNWVDLLKYIPMENTREQLKLCSRQYNLYMKNVTALQNNLISLTDKAFPGVNELFSSPDRADGSQKWIDFIMTFWHCECISLVSETVFTERYRKWCKRKGYHFSALKSAELYAGSTRHIATLPKNSSTKFLITTAAKELAFAKATLAAMRTEMTQLAQQLPEYETVRAMYGVGEKTAPQLMAEIGDVRRFPRRSSIVGFAGVDPAVDDSGKHISKSNPITKRGSPHLRKTLYQIVCTYLRKAPANEPVYQFLDKKRAEGKHYFVYMTAAQNKFLRVYYARVKECLNAADSLYTP

SEQ ID NO: 363755 - protein, 343 aa, unidentified
MQTITTIGLDIAKSVFQVHGVDAGGRVIVRRQLKRRYVLTFFQKLSPCLVGIEACASAHHWSRELEALGHTVRLMPPAYVKPYVKRQKNDAADAEAICEAVTRANMRFVPTKTPEQQSGLVLHRTRHMFIRQQTSVINAIRAHLAEFGIVAPVGRHGVEELLNVVADSNDRRVPEITRACLSALGVQLRRMKEQILEFDRLIMAWHRSNEMSMRLDEAPGVGPVLATALVATVADPKSFRSGRNFSAWIGIVPKQHSSGGKNRLGNISKQGDRYLRGLFVAGALAVIRYAKIHGVKHRPWLTALLARRPTKVAAIALANKIARMVWAMMARGERYKEPIALAR

SEQ ID NO: 363756 - protein, 321 aa, unidentified
MTHHTTLTAGIDTAKDKLDVAIHGLPTHFTVENRQSGWRRLAGALTKAGVKRVGIEATGGYERGVVGYLRAADFTLLVLQPLQVKAYARLHLRRAKNDRLDAVLIAAYTAVLDVPRIAPDPRLPPLADVLTVIEQTEEDIARYKTRIEHIAQPRLRRRVLADIKRLGARRAAELKRLVQAVRRHDDLARRLDLIQSVPGIGERTALALVLRLPELGRITREEAAALAGVAPFDDDTGQHHGERRIAGGRSRVRGSLFAAALPAAFRWNSALIALYRRLTAKGKPHKLALIACARKLVIYANTVVARGTPWRLTPGLPAAAD

SEQ ID NO: 363757 - protein, 346 aa, unidentified
MEHYVGLDVSLKLTAICIVNERGKIVREGAVASNPEAIAGFVKSHAPHVARIGLETGATSTWLWTELSMLGLPVICIDARHAKAALKMQINKSDRNDAMGIARIMQCGWYKEVRVKDLDSHAIKGLLVSRALLVKIKRDLENQIRGLLKNLGLIIGRAKMNVFAVRAAAFVEDRPELVTAVEPLLKTREAVERQIADLDRKAMRLARNDAQVRRFMTAPGVGAITALCFLATIDDPTRFKRSRSVGAYLGLTTRRYASGEIDWTGRISKCGDKLLRSYLYEAANVLLTRVAKWSVLKAWGIRVAKRSGLRKAKVAVARKLAVILHRMWVDGTEFNWSAKEVAAQST

SEQ ID NO: 363758 - protein, 387 aa, unidentified
MPQPNDLSRSLVALDQNSTIIAVVELSQSSWLVGGVVPGIERQPRKKLEPNPERLLGLLHRWRDEAVRAGRTITRIAVAFEAGRDGFWLARWLAARGVEAYVIHASSVAVSREHRRAKTDRLDTELLKRGFLGWLRGERGHCSMARVPTIAEEDAKRPNRERDCLVGERTRIVNRIKSTLARLGIRNFKPTLRKAAERLAAVHTPEGVPLPPNTLAELQRDMARLGVVVSQIRQIEEARQKRLEQQHETGPHAMVRLLARIVGVGVETADMLVHEVLSRPMRDRRAVARYAGLTGSPDESGAQRREQGLARAGNARVRRGMIQLAWRFLMFQKESALALWYRARTADSRSGTRKTMIVALARKLIIALWRFVTTGEPLEGVVLRPVT

SEQ ID NO: 363759 - protein, 355 aa, unidentified
MISTKYIGMDVHKESISIAVVNVAGKVVMECVIETKASMILQFIDGLRGDLQVTFEEGTWAAWLYDLLKPHVSKLVVCDPRKNKSMREGNQSDKIDARRLAELLRLDHLTPVYHGEHGLRTLKETVRSYLTITKDLARVKSRVKAIYRSWAIPCTGKQVYARCLRAEWLARINEPGVRRRAECYYEQLDALRMLRQGVRRDLLIESKKQKAWKRLCEIPSIGPIRAAVLLGILQTPHRFRTKRQLWTYGGLAIETHSSADHQRFDGQLQRSRKNVLVRGLNRNCNHDLKNVFKGAAAVASSKPGPFEQFYAALVAKGMRPEMARLTLARKIATIVLIVWKRGVCFDAQHLKPQTA

SEQ ID NO: 363760 - protein, 426 aa, unidentified
MHCTQNYKIDQVTEQTLVVGIDIAKRTHYACFVDDRGRVLRKSFPIFQSKEGFRQLYEAIQEAMQAFGKPQVIVAVEPTGHYWLNLAYFLEEKGIPLVMVNPAHVCRSKELDDNLPTKHDAKDALVIARLAKDGRFLVPRLLHEIEADLRVGSTLKEKLRKEQAAVKNAIIRWTDRYFPEFWTVFRDVGKTALSVLEWTPLPADMAGRSAEELIEVYRQSEGLKSPQKTKIRALINAAKDSIGVTEGATMARFEIAALVRRYRQLEGEIAALDAELKVLVQTTMEYQWLKTVDGLGDATIIDLLAEIGSFAHYRDPRQLVKLAGLTLKENSSGQRKGQKQISKRGRKRLRSVLFRAMIPLIRHNEAFRELHDYYTTRPVNPLTGKQSIVALCRKLLNVLFAICTKKQAFDAERMKQDVLSQVHRAA

SEQ ID NO: 363761 - protein, 315 aa, unidentified
MQKLLNIGVDVAKDAVVVGCDEQVFAAHSIPNQRTALTAWLASLPSGSRIGMEATGCYHELLADLAYRSGHTVFVLNPKDTRHYAQAVGLRAKTDRVDALLIARLIAHEHARLHPYLPATREQRQLGRLLRRRAQLVKLKGALRQSMKGMAGLARDTSALVKRMDDLIAKLEQRMDALIAAMPEAREDRHRLETIDGVGAVVSVALIEPLTRLPFRSADAFVAFSGLDPRPRDSGRKVGKRRLSKRGPAELRRLLFNAAMAAARTRVWKPIYEHYRARGLPTTAALVVIARKIARIAWSIHRYHTSFDPERLKTT

SEQ ID NO: 363762 - protein, 412 aa, unidentified
MKDLLEISCGLDVHKEKIVACILTGPLGKPTRSEIREFTTLIPDMIALRDWIVSQNCHHVAMESTGIYWMPIYEILEDAFSGDITLLVVNARHMKNVPGKKTDMRDSEWISTLLRAGLLNGSFIPEKRIREFRDLNRYRKSVIHDITSQKNRIEKFLQSSGFRLSSFISDIFGASGRNIILHLMEHGQIDKAALDSCLKTKTRNRIDEILMSVNGTLPEHQKTFLKILMTHYDSLKEHLTEVETSLEEDMAPFTLQVEQLNSIYGISTTASCAIIAEIGIDMEPFKTAEHICSWAGLCPGNNESAGKRKSASVTKGNPYIKSMLCEIAWVIAGKRNTYLSAWYWRIKQKKGAKKAIVALARKLLVIIYTMLKQGTLFDESCFETRRKNCEQKQLSRYIRELEKHGYHVEAQS

SEQ ID NO: 363763 - protein, 346 aa, unidentified
MQGTTIAVDLAKSVFEVAVSERAGSVSKRHRLSRTQFSRFLAAQAPATVVMEACGTAHYWAREAYARGHRAVLLPPHSVRPYVLRNKTDGADAKGLLEAVRNEAIRPVPVKSVDQHVLAGLHRMRSAWMATRTARLNALRGLLRELGFAIPVGARQVVPFVWALIGDAESGVPDALRPVLAEAAHEIRELEGRVRAVERSLEGLASASPVVARLRTIPGVGLLTATAFVAFVGDAGRFPSGRHLASYLGLTPRESSSGLRRRLGGISKRGDPYLRMLLIHGVRSVLCHAKKTTGEPDRLRIWALDRERLRGHNKATVALANKLARIVWAVWRRERGFGDRNSQGAE

SEQ ID NO: 363764 - protein, 331 aa, unidentified
MKRARFTEEQIIAVSKAHEAGAKTADLARKHGVSEATIYNWKASSQWLARKIAAMGHTVRIIPAQFVKPYVKSNKSDIIDAAAIAEAVTRPTMRFVEIRSPEHIDLQALHRVRDRMISQRTCLINQMRAFCLEYGIAIHQGAGKFKADLPRVLADESNDLTSAMRRILASTFDELRQLELRIAEVNREIEAIASQSDTARRLMTIPGIGPLAATALLAAAGSAPQFKKARDMAAWLGLVPREYSTGGKTKLLGISKRGNRYLRRMIIHGARSCVTHLDRSRYHLGAWLDGLQARMHTNKVTVALAAKIARIAWVVMTKPGASYERRDPAFS

SEQ ID NO: 363765 - protein, 369 aa, unidentified
MEKFITYVGLDVHKKSIDIALAGDGRDSEVRYYGTINGDLNSLDKVIRKLVSKGSLLHFVYEAGPCGYEIYRHLTRQGFDCMVVAPSLIPKKSGNRIKNDRRDAEMLARLHRAGELSPVYVPRIEDEAMRDLCRVRIDTKNAERKARQQLNAFLLRSGFRYSGKTLWSLAHWRWISDIKMPHPAQQITLQEYVDAVRSCTERVERITDQIRQLVAEWRLGPVVEAFQSLRGVSLIVAATTVAELGDLSRFNNPRHLMAYLGLVPSEYSSGESTHRGGITKTGNGHARRMLVEAAWSYRLPARVGRRLRERQHNLPQAVWEIAWKAQLRLCARYRRLVAKGKQSQVAITAIARELAAFMWAISQVVPVAA

SEQ ID NO: 363766 - protein, 355 aa, unidentified
MYGLKHQKEKRSMDHFAGLDVSVKETSVCIVDDTGRIVREVKVASEPEALLAVLTNPACHFKRIGLEAGPLSQWLFSALAEAGLPVICVETRHMRAVLKAQINKTDRNDARGIAQMMRVGLYRPVHVKTLRSQKQRMLLTHRKLMQSKAIAIENDLRATLRNFGLKVGVVGTVKFEARIKELVENLPDLVVLVEPLLIVRRVLREQVGILHRRLLAIVRDDDVCRRLMTVPGVGPVVALTYRATVDVPSRFRNSKAVGAVFGLTPSKHQSGESNRTGGISRCGDEMMRMMLYEAAHIMLVRSAKWSWLKAWAMKIARHRGLKKAIVALARRLAVIMHRIWVDGTEFRWTREVAAA

SEQ ID NO: 363767 - protein, 314 aa, unidentified
MKFYTKQHKFYCGVDLHAKTMYLCILDSEGKIVLHRNIKSKPGVFLKTIEPYREDIVIAVECLFLWYWIADLCSDEGIPFVLGHALYMKAIHGGKAKNDRVDSYKIATLLRGGMLPMSYVYPRQMRCTRDLLRRRTHLMRKRSELISHIQNTNYQYNLPDIEKKISRKSNRKGLLDRFSDESVRKSMELDLKLLDIYDELLPRLEHEISLVAKQYDGDSYFRIRSVPGIGRILGLTILYEIGDIKRFPTVGDFVSYSRLVKTAKESGGKRQGTSGAKIGNVHLKWAFSEAAVLFLRRNPQAMSRGILNVPFSGK

SEQ ID NO: 363768 - protein, 338 aa, unidentified
MKVAVLGIDLGKNSCSVVGLDDTGKVIMRRRMHRDSVIKIASGLAPCVVAMEACCGAHHLGRILRERGHQVRLMSPEYVRPYVKAQKNDDRDAEAIAEAATRPTMRFIELKSAEQLDMQSLHRVRDRLVSERTALLNQLRAILLERGIVIPQGRRKLEDHLRTLLEGQEAILSPRVWSLLNDMQAEWRALDSRIEALTDEFAAQAKTDEAARRLATIPGIGVLNATALVAAVGNAATFARGRDLAAWLGLVPRQMTTGGKARLMGITKRGNKYLRKLLVHGARAALPSLSASATPLGKWLTSLLERAHKNTVVVALANKLARIVWAVLRRGETYAWQP

SEQ ID NO: 363769 - protein, 311 aa, unidentified
MMNDNIGIDFSKAHLDVHRLSDHGSTQVANTPAGFRGLRRWLGSKPIARVIYEATGPYHRAFEEEMRDRLPLVKVNPLQARRFAQAQGTRAKTDKADARMLARMGAAFEFNPDTPAAQDHHQLKELQIARLALIKDRTRLNNRLQTQTLAFTRRQTKARLDQIRRQLKKIDAEIETRIKDCPKRARAHQILQSIPGLGATTAGAILVEMPEVGTLSNKAVASIAGLAPITRQSGQWKGKASIQGGRKFLRDALYMPALVAMKHNHDMKQKYNQLKDQGKPSKVAITAIMRKLIILANTLVRDDRQWSKNAP

SEQ ID NO: 363770 - protein, 359 aa, unidentified
MKDYSVAVIGMDMGDRRSELCALNEVRTVLWRNSVKMNREDIQEFFESLEPTLIVLEAGTHSAWVAELLRGLGHEVIVANPRSLRLITSSYKKNDRNDAELLARLGLADPVLLNPIVHRSSEDRADLVFVQNRCALVEARTKLTTSVRGIVKSFGYRLRSCSAESFHKLEQEVPECLQEQLAPSFGCIKVLTIKIKSLDKKIETLCEEKYPETQRFRQIRGVGPVTALVFALVIEDPSRFDDSRQVGAYLGLVPRQNQSGAVDRQLRITKAGHKYLRSLLVQCAHYILGCHGEDCDLRDFGVRLFERGGRYAKARAVVAVARKLAILMHRLWVTGEEYDRFRVRGQRRESVKTYKLRAA

SEQ ID NO: 363771 - protein, 343 aa, unidentified
MDYYAGIDVSLEQSSVCVVDEKGKIVREAKVESEQEALAAFLRGLGLTLTRIGLEAGPLSQWLHAGLEAAGLPMVLLETRHVKAALSAMTVKTDRKDARGIAQLLRMGWYRPVHCKSPPSQDVRTLLTARKLLLVKVIDVELSIRGILRGFGLKVGPVSTGRFVARIRELAAGQPMLEQVTEAMLRARETMRAEVNALHRKVLEIVRADEVCRRLMTVPGVGALTALTFKSAVDDPTRFSSSKAVGPHFGLTPKKYQSGETDVTGAISKVGDEMARTALYEAAQVMLIRVRSFSTLKRWAMEVAKRRGMKRATVALARKLATVLHRMWVDGTDFRFGKEAAAA

SEQ ID NO: 363772 - protein, 398 aa, unidentified
MTESSDYESVQVFIGVDVGKDTHHAVAINRSGKRLFDKALPNDENKLRSLISDLKQHGQILLVVDQPATIGALPVAVARSEGVLVGYLPGLAMRRIADLHAGEAKTDARDAAIIAEAARTLPHALRTLKLADEQIAELSMLCGFDDDLAAQTTQASNRIRGLLPQIHPALERVLGPRLEHPAVLDLLQRYPSPEKLASLGEKKLAAQLCKLAPRLGKRLAADIAQALAEQTVVVPGTNAAAVVLPRLALQLITLRKQRDEVALEVEQRVLAHPLYPVLTSMPGVGVRTAARLLTEVACRAFASAAHLAAYAGLAPVTRRSGSSIRGEHPSRRGNKALKRALFLSAFAALRDPLSRAYYTRKMSQGKRHNQALIALARRRCDVLFAMTRDGTFYTPQGS

SEQ ID NO: 363773 - protein, 354 aa, unidentified
MKKIFIGIDFSKEKYDATLIKAEGVKECAPSVHEVFDNKTSGYRRLVKWVKTHAEGFTIDTWLFCGENTGGYSIGLSNYLYASGYDMWLECAYKIKHSTGIQRVKNDKADSRAIAEYAMRNYDKMIPHKPQSASLTCLREVFLYRHSLVRQKVALTVRRDEKLLTQEKSDARAFMSFTSKHLITEVNKAIVKCDQKIKEIIASDNELREVFDIITSMPGIGVQNATCLMVYTDNFQKFDLDSRKIACYYGIAPFGRQSGTSVNSRPQVSPFANRMIKSLLSQAALAAIKFDLNVHSYYQRLIKRGKHPLLVHNNIKNKMLHILVAMVRDRVKYNPDNVYRTSNEVSLTPQVLNI

SEQ ID NO: 363774 - protein, 348 aa, unidentified
MLIIGCDYHPGFQQIAFVDTDTGEAAERRLTHREEAEQFYRTLEARRVRIGMEASGHGRWFERLLNELQFELWIGDAAEIRTKRVRKQKTDRQDAQLLLKLLMEDRFPRIWVPDAENRDLRQLLWHRHRLVQMRTRIMNQLHVVALNEGVRRKKALWRPAGRSELESLVLAPWALRRRRDLLDLFDQLTPKIHDLTRALEEEVEKRPIARRLMTHPGVGPLTALAFELVIGTPERFHCGKQIASYVGLVPSEESSGDRRRLGHISKQGNALLRFLLVEAAQVTVRSQPQWRSKFFHLAMRRGRKIAKVAMARKLAVHLYWMWRQGLDYGQFEKLGSHAGEPGNRHGVQ

SEQ ID NO: 363775 - protein, 341 aa, unidentified
MRTITIGLDIAKTVFQLHGVDASGKPVVSARLRRERLEKYFAALSPCVVVMEACGSAHHWARVIGALGHEARLVPAAYVKPFVKRNKTDARDAEAICEAALRPHMRFVAVKSVEQQSARALHRARDLLVRQRTQLGNCLRGLLAEMGVVAAQGAAGLAALLRLVEAGADPRVPASLYATLQALARQWRALETEDEALYARIEAQARADEKARLLMTIPGVGPITAHAAIAAIGDGRQFHTARDFVAWIGLTPSQYASGEKRRSGHVSKAGDAGLRRLLTLGASAHLRQARAKPERMGPWLSGLLARRPVRVAVVAQAAKTARILWAMLTSGESYRARPAKP

SEQ ID NO: 363776 - protein, 480 aa, unidentified
MNSKAKKTKVQPLSKNSVINVLSQDEIKKKVQVIEQKLKSSTWRELETNGKFEKNDKLSFISDEMLIVGCDIGSETHYIRAIDTRGRELSRGAFEFSNSSEGFASAKAWVLNLAAENDKKQVVLGLEPTGHYWFALAAWMVSNGISVVQVNPYAVKQSKEIEDNSQLKDDRKDPKIIANLVKDGNYGMPYLPEGIYADMRRLSMFRDQLTEDRIRNINRLHREMKIYFPEYMDAFGKIDGAFALEVLKVAPVPSDIVAMEAEGLKNIWHEAKLRGRGYSRAGIIVDYAKRSVGLTGGTDAGREAIKWFVEQIIKLDKQLDEIENVLHQKCMKIPYAENILEINGVGENILAGILAEMGDISRFDDVKEIQKLSGMGLVACSSGKHKGQTKISHRGRKRLRYWLFQAAKSAVAHANEFKQLHVYYTTRSNNPLKKMQSLIVIACKILRVIYTILNTGTKYDPERMLKDIRYSQSDMSQAAA

SEQ ID NO: 363777 - protein, 281 aa, unidentified
MFQKCRWILCLIKRLDHSASNDVDGFDAIIAELKQHSIALVLMEATGGLEAAVACSLQAQGFDVAVINPRQARDFARSMGYLAKTDRVDAAMLAQLAEVINRHPERARFIRNLPDAEREMLNTMVVHRRQLITMLTAERNRLYPSHPQSRKSISTIIGVLQDELKRINKSMEVHISTHFKTLAEILGGVKGIGAATIATLLAEVPELGHLSRREISALIGLAPFNRDSGNMRGRRTIFGGRANVRSALYMATIVATGHNPVIKQFYNRLVESGKAKKKSHW

SEQ ID NO: 363778 - protein, 343 aa, unidentified
MEYYVGLDVSLKQTSICVVDQAGLVVREGVVDSDPEAISVYVTSKAPNAVRIGLETGPTSTWLWTELKRLGLPVICIDARHAKAVLKMQINKSDRNDAIGIARIMQTGWFKEVHVKDIDSHSVRALLASRALLVKIKRDLENHVRGLLKNLGLVIGRAKFNVFAVRAEELIEGRPELVAAIRPLLEARNAVEQQVRELDRKVMKLARHDAQIRRFMTAPGVGPITALCFKATIDDPTRFARSRSVGAYVGLTSRRHASGEVDWTGRISKCGDAMLRSYLFEAAGVLLTRVPKWSSVKAWGVRLAKRNGLRKAKVAVARKLAVILHRMWIDGTEFNWSKKEIAA

SEQ ID NO: 363779 - protein, 309 aa, unidentified
MEQIFVGIDVAKDRLDVHLRPSDEAFAVARDGEGLECLVGRLMAQAPALVVLEATGGYEQVVAAALAGAGLPVVVVNPRQVRDFARATGVLAKTDRLDALAIARFAEAVKPEIRPLPDEAARDLAETVARRRQVVEMIVAESNRRRTANRRIAKRIDAHLTTLQAELTEIETELDESIRGMPFWRETENLLTSVPGIGPATARTLIAELPELGALDRKKIAALVGVAPLNRDSGTLRGRRAVWGGRAPVRAALYMAALSATRHNPILKTFYRRLRDAGKPPKVALVALMRKLLVILNAILRDKNPWQIA

SEQ ID NO: 363780 - protein, 356 aa, unidentified
MKNDQNTFFEKVLLFIGIDVHKSKWVVTVRTYDLELKTFSMKPSAEELENFLIKNYPGAVYRIVYECCFSGFWIYDYFTEKGYSIIVTPTNRIYKDGSTIKTDKIDSRKLALQLSRELLREVIVAAKRIREYKYIFRIYDKQKMRQGQILRQIKAFLEQKNHLLKWNRWNKGLLEKLKTLKFEDKLFDLKFGNLITEYEYIVSQIKDTEKIIEQIKEDEQLGRRIQIIEKINGIGIISAVRMCLYLFDRKDRFESSERLNHYLGLTPSERSSGDKIIRDRSGVCGNRQLRSIIIQLAWMTVRKDGALLEKFDKVYKSSGSKQKAIVAVARKLMTKIFAAIKKEEDYRINVRIASAA

SEQ ID NO: 363781 - protein, 400 aa, unidentified
MPRPEYAVFLGLDVGKQEHHACGLGPDGKRVHDGPLPQSEARIGEILEDLSGRGRVLVVVDQPASIGALAVTVARSLGVDVAYLPGLAMRRIADLHPGNAKTDARDACVLAEAARPMPHALRRVDAGDEALADLEVIVGFDDDLAGEVTRISNRIRGLLAQVHPALERVLGPKVQHRAVLELLQRFGGPQGLAKATRRQLIAATKVRAPRSYERLVDAVVKALTEQTVSVPGTRAAELVLPQLAVTLGGLLDQREQAAKQIEEMLDPHPLSRVLTSMPGIGVRTGARILLEVGDGSAFPTSGHLAAYAGLAPVTRRSGTSIRGEHPSRAGNKQLKRAFFLAAFASLSDPTSRVYYDRKRAAGKKHNAALICLARRRVDVLHAMLKNGTLYETRQSSAPAA

SEQ ID NO: 363782 - protein, 407 aa, unidentified
MHERCVGIDVHKDSLSVCLIVGGAGGTAEGEVRQFGTTTRQLRELGAWLEQEEVTHLVMESTGVYWKPVWQISDNGRLPLLLANAKAVKNMPGRKTDQADCIWLATLLRKGLIRGSFIPPAEIRALRDLCRCRTTMVQQRSQTVLRIQKLLEESNIKLDSVLTDVRGGSGRAMLNSLSEGETDEEKLAALAVPQLRGKMPQLTRALEGTMVRHRRFVLKQWLSNFEELDRHIAELEQEIEAYAAPFESQIGRLDEIPGVNRIGAIAILSEIGVDMSAFATAGKLCAWAGVCPGNNETGGKRKKARVRSGNRWLRGMLTQCAWAATRTRKSYFHAQYRKLVGRCGNNKALVAAAHSLLAIIWHMLQRNEPYRDLGADYFDCLNTQNKQRAYVRKLEQLGFKVTLQPAA

SEQ ID NO: 363783 - protein, 433 aa, unidentified
MKEGRRERQLKGSQGRAKTEDMEVIFEHCCGLDVHKETVTACLIGPSPDGKPQKEIRTYGTMSDDLIKLRDWLSANGCTHVAMESTGVYWKPIYNILEDHFHILLVNAKHIKAVPGRKTDVCDAEWIAKLLRHGLLKGSFIPPKPIREMRDLTRYRASLIQERAREIQRVQKVLEDANIKLASVATDISGVSGRAIIQAIISGQDDPKLLTELARGRLRSKTGELERALKGMITDHHRLLLTRMLAHIEFLDQAIEKLDAEIEEKMRPFAAEAGRMATVPGIKGRATEEILAETGTDMSAFPTSANIASWAGVCPGNNESAGKRKSGKTRPGNPWLRAALVRAAWAASRTKGTYFHAQYSRLAARRGKKKAILAVAHALLVVVYHVLREGTNYRELGYNYFDRLNAQAKARYYIRRVEEITGRKVNLVEPDAA

SEQ ID NO: 363784 - protein, 360 aa, unidentified
MIVQGTSVGLDVHALSVVAHAIDEETGKIARARLCPEHGEVLGWLHQLRVPVRVTYEAGPTGFGLARAITEAGMQCVVAAPSKLQRPAGDRVKTDARDAAHLARLLRLGEITEVTVPDRETEAVRDLVRAREDARADLMRVRHRLSKLLLRQGIVYYGGTPWTCVHEQWLRRHRFDDVHLKAAFDYSFDAVLAATAARDRLDEQITEVAASPRFADQVNRLGCLRGISALTGLALTVEIGDWSRFTGSSIGAYVGLVPSEHSSGTSRVQGSITKAGNTHVRRLLIESAWHHRKSYSTSGPTLRARWAKVDPALRARGHAGNRRLNKRWQTFTERGKNPLVANVAIARELAGWCWSLATMK

SEQ ID NO: 363785 - protein, 348 aa, unidentified
MAHFVGLDVSVKETSVCVVDDAGKVILEQKVPTEPADIIALLTSLGEPYGRIGIEAGPLSQWLVNALTAAELPVICVETRHMKALLTAQQINKTDRNDARGIAQMMRVGLFKPVHVKTLVAQEQRMLLTSRKLLQRKLLDVESDLRGTLRNFGLKVGVANRSRYEARVRELVEGFPRLAAIVEPLLNVRRVMRQQLAVLHKMLLDTVRDDPVCRRLMTAPGVGAVVALTYRATVDQPQRFVHSRAVGAHAGLTPKRYQSGEADYDGGVSKCGDALLRTVLYEAAHSLLTHNGKWSWLKAWGVRVAQRRGMRRAIVAVARRLAVVLHRMWVDGSEFRWRKDSATVPAVT

SEQ ID NO: 363786 - protein, 323 aa, unidentified
MEHILGIDVSKDTLDLVLDQRFHRKVLNDIRGFQQIHQWLVSQHVDRVHACLEATGQYGDGVAEYLYEMKHFVSVVNPARIKRYGESKLHRNKNDKADAALIAEFCMKEKPACWKPISNNMKHLRALVRRLSDLQTSRQQERNRFGSGEKDEWVLSDLQSHIHYLDDCILNTTKAIHQFIDQNTSLKSQRDLLISIPGIGNLTAARLLAEIGDVSSFENAPQLAAFAGLNPRGFSSGSSVHKKTKISKQGRAFLRCILFMPAIVAQKHNPVIRQFSNRLADRNLPKMAIVVASMRKLLHLCFGVLKNQIPFDPNYGDQFNFAT

SEQ ID NO: 363787 - protein, 468 aa, unidentified
METGFTRKGVVMESYYMGIDISKGYADFVILDAKKNVVEPNFQLDDTFSSHCKLFEILKRFFDHHCESVIFAAVESTGGYENNWLHSLNGFHGSLNIRSARLNPLGVWANSKASLRRVITDKISARDVAEYLIAHPEKVTYQQEDSLASLRRQWGFVRLLVKQKTQILNQFESLLYTANPELITYCKSGVPAWLLKLLKQYPTAAKLAKAKASSVARTPYVTADRAKKLVGQAKKSIASATDETTGKLVSAMAEQIIRMEETIRIQTQQMVKQCAIPEIALLKTFPGISDASAIGLMLEIQSVKRFSSVKKLAAFFGLHPAFKTSGDGTSSVRMSKQGRKEPRKILFMVAMVSLTANPHIREIYEAHTEKGMKKMAAIGLCMHKILRIIYGMLKNNQAYDSQVDQENRKNRTTREATHTAKNENRRYEMFNQQAPISRRQNNKRKEWEQSQGDNITQCGIDVSTPSAA

SEQ ID NO: 363788 - protein, 347 aa, unidentified
MEQITRIFIDTSKTFFQLHGVNAAEAGVLRRKLKRSQVLAFFAKLEPTVVGLEACAASHYWARELSALGHQVKLVAAQHVKAYVRRGKNDAADAEAGCEAMSRPRTWFVPVKSAEQQAALMLAATRDRLVKTRTQLGNAIRGHAAEFGLVAGRGIDKVAPLLAAIAAAESLPELARELFADLDREWTRLLQEVSAIDAKLVAWHRANPLSRQLAQIPTIGPVGASLLVMKTPDPKAFSSGRHFAAWIGLTPKDHSTAGKVRLGVITRAGDEALRSTLVAGATAVIQHVNRGRGLASPWLAALLKRKPAKLAAVALANKVARIAWRLMITGEDYDPERLMRALPAKAA

SEQ ID NO: 363789 - protein, 414 aa, unidentified
MFYIGIDWSTESHAVTLLGASGEVLESLVIENRLAGFLTLLETIRKHLRKLEPAATSDSVSFAIEDQNQRLTDFLLAQNFQGHLIEPSRMKGYRLRYRSSGNKTDPDDSFILADVLYRDHDQLPRMAPDSEVIRTLKTLLRDREGFVRDSTRLTNRLTACLRQYYPEALGFFDDVAGKTVLDFIAAFPDFAAASRLSRGEVKRFLVEHHCHREAQLERILNVLGSSPTPVPTVVVQTKRQQALAIIQQLRAVQAAVADYDAEIERLGKENDEVQRFRGLPGGGPITGAALSTLFGEDRSRFTSAMSVQSLAGTAPKTIQSGQFRTACFRFGCNRFYRMLLQQLALGALRRSAWAKQYYRGKRKEGKTHQHALRCLANLLLKIAFAIWRDRTEYSEDRHLAQIMRHRLRPTSNSV

SEQ ID NO: 363790 - protein, 329 aa, unidentified
MSNIIGIDVSKASLDCAYLRDVDQQRAKRKTCHNEVRCFAALVAWAEARSELPVQALAFIIEPTHVYHEQLVQFLYHTGATVYLVNPGKVRKFAEGIGILSKNDLIDADLLARYGLMARKLIAWAPVPQELNDLRSLLNRLEVLERNRRSELNRQEKIGKTMVFHRLEQQSIARTVKRLKVEIMTFKNAIRQCIKSTPSLQHNFYLLCTIPGVGAKTAWVMLVILGSRQFRSAPEVASFLGLNPIEKRSGKSEYRRPRLSKSGSGHYRQQLFFPAMVATRKNPDIKALYERLLAADKTKMCAIGAAMRKLVHICYGVVKNQTPYQAQTV

SEQ ID NO: 363791 - protein, 351 aa, unidentified
MEMVCGLDLHRSQITFRTVDLRSGEVQRGKIHPGARDAFRDWLGGFEPGTDAHFALEGTTGWRFVVEEIQRRGYAAHLADPAELSERRGPKRRAKTDHADCELMVNLVLEGRLPESSIPPAHILELRALVRLRKTLVDQRIEWQQRLQAQLFHQGVVPGLRLCNVEDRRRLGGMEISPAGRQMIGTGLVMLDHFDAQLNPLSTQLVGLAKAQPGCRALEHELYGVGWLTAVAIVAELGDCRRFHSADQAVRASGLDITVYESNGKRPGGHLARQGPAVLRWALFEAAQCAARKSSPDHAYYLKVRDRIDHNRAALSVARKICRRACHILTDLGDAALAPPEPTPRQDPRAA

SEQ ID NO: 363792 - protein, 404 aa, unidentified
MNDSMIGYAGVDWAMDGHAVCVVNGHGTAVIEFDVEHSAEGLSEMCRRIAGTGARRVAIERPDGPVVDALLGAGLEVVVVSSRSVKALRERYGTSGNKSDRSDAFVLADCLRTDGHRWRSLEPDSPATVTLRGHVRARKDLVETRVAVANQLRAHLRIVFPGAVGLFSAIDRPIALRFLERFPSATSAGWLSEKRLATWLRANSYSGSKDPAELYTRLSAAPAGVIGVDGDARGAITLAYVNVLKTLRTQIDELNTRLDELLDAHPDAPIFRSLPRCATVRAATLLAEIGDCRARFPDPESLCCLAGVAPSTRASGRHRVVTFRFSSDTKLRAAICDFAGDSWRGNEWAAHRYHELRASGKTHPHAERILARSWTHIIWRCWQDNTTYDPTRHGAHQRLTTQTA

SEQ ID NO: 363793 - protein, 462 aa, unidentified
MRLSSHYRQVNLMRQPSSLPQLDPHAAGVDIGAHSHFAAIPPGSDPKGQGVREFEAFTADLYALADWLAACGVTSVAMESTGVYWIPVFQVLEDGGFEVRLVDTRRMKHVPGRKTDVLDCQWIQQLRSFGLLDGAFRPSADITLLRGFLRQRAMLLRDCAQHIHKSLEQMNPKLHLVVSNIVGVTGLRIIRAILAGERDPLRLAALRDRRCKNDVATIARTLHGHFRPDLLFSLQQAVELFDFYQAKVADCDTRIEALLASFADASAGKSLPPAPRPRGAYRNAPSFDVRSALFRISGTDLTRIEGIDASIALTLISEIGLDMARWPSEKHFASWLGLCPGSKVSGGKILSSRTKLCANRAAAAFRLAANGLHNSHSALGALFRRKKAQLGTPKAITATSHNIARLVYRLLRNGEDRVAVSEEEFERRHRDRTLRNLERRARMLGFALQPALAPGAGPAVPI

SEQ ID NO: 363794 - protein, 412 aa, unidentified
MEEVFTCCAGLDVHKESIEACVRRIEPNGRLHQETRHWGTMTGDLLAMAEWMTAQGVTQVAMESTGVFWKPIFNILENRFSVLLVNARHIKQVPGRKSDIRDCQWIAQLLQHGLLKGSFIPPRSQRDLRDLTRYRTQLANEKVRTANRIHKVLEDTNIKLSSVATDILGISGRAMLEALIRGEEDPVKLADLAQRRLRGKIPQLERALQGHLTEHHRFMLQLLWKQLAEQEKLIDELDGKIKKQTRPLAAELDRLDAIPGVDRRVAEVVLAEVGANMQPFPSHENLASWAGMSPGNEESAGKRQRRRITPGNRWLKRTLAQAAWAASHVKNSYLASQYRRLASRRGKKRALIAVGHSMLVIVYHMLKAGTTYADLRADFFDHLEPKRLTHYYITRLERLGYKVTLESYAPAA

SEQ ID NO: 363795 - protein, 337 aa, unidentified
MDHYAGIDVSLERSSVCVVDATGRTIRETKVASEPEALVRFFRELGLPLTRVGLEAGPLSQWLHAGLTGAGLEAVLLETRHVKAALSAMIVKTDRKDARGIAQLLRMGWYRPVHRKSPDAQEARALLAGRKLLQAKLRDVELSIRGILRGFGLKVGEVSKGRFAARIGELIAGHEMLEAVIGAMLRAREGLRAEFVRLHRRMLAIVRGDAVCRRLMTVPGVGALVALTFKTAVDDPERFRRAKAVGAHFGLTPKRYQSGETDVSGGISKVGDASVRTALYEAANAMLTRVSGISALERWAMGVAKRRGMKRAKVALARKLAGACWTTWQTAERLSRA

SEQ ID NO: 363796 - protein, 401 aa, unidentified
MGRAIGMDVHREFAQIAVVEDGLCRDEGRIGVTPEALRAWAATLRPDDQVALEATGNSDAIAVLLTPMVARVVVSNPKKTRAIAEAKVKTDKVDARILAQLLAADFLPSVWLPDDRTRMLRRIVSRRAHLVRQRTRLKNQVHAVLARNLAPTCPASDLFGTAGRHWLARQDLPADERRSVDALLRQLDFHGDELARVDRDLAVETLEDPIAARLMTIPGVDAVVAMSVIAAVGDFTRFASPDKLVSYVGLNPKVRQSGDTPAKHGRITKAGRAHARGMLVEAAWSAARAPGPLRAFFKRIKARRGFQVAVVATARKLTVLCWHLAIKNEDYAFARPSLNAHKRRKLELAAGASRSHGRRGAGFDYNDKALRRHERELVEQSERAYETLVAHWQPKKPTRQG

SEQ ID NO: 363797 - protein, 367 aa, unidentified
MKKVSTAVTKQSRNISQQKLTVGLDLGDRNSWYCVVDEAGQIQLEQRVRTHAKALQEVFGAMPRSRIALEIGTHSPWISRWLCELGHEVIVANARKVRLIGESRKKDDRLDAQTLARLARIDPQLLSPVKHRSAKAQADLTVIRARAGLVRARTALVNTARGLAKSYGERLRGCNVRNLNPEKAEGLSPELQAALEPLLACIESVSKQIREYNERIETLALQSYPQTALLKQIKGVGTLIALTYMLTLEDPHRFRKSRDVGCYLGLQPGRRNSGQSEPQMHISKEGDPYLRTLLVQGAQHILGPFGVDCDLRRWGLKLAERGGKSGKKRAIIAVARKLAVLLHRLWVSGEAYEPLHNRQPRPLAIAA

SEQ ID NO: 363798 - protein, 359 aa, unidentified
MGSIAFDPADVIVGVDTHKHQHVGVALDGLGRRLGQRLVPATPAGYAELLTWATGLGRVAVVGVEGSGSYGLGLARFLRRHDVAVLEVARPPRKGQRRLQGKSDPVDAEHAARQVLAGAGAVTPKTGEGSVEAIRLLKVARDTAVTAHSQAMITLKATLVTASDALRAELEPRTDFALVTACAELAVTGELADPEVAMRHALRALARRWLALHEEIKLHTRQLKTLTNKTAPALVATFGIGFDSAAELLCAAGDNTARVRSEAAYAKLCGACPIPASSGKTTRHRLNRGGNRQANAALFRIVVVRLRWHPPTIAYAQRRTAEGLSKREIIRCLKRYVAREVFRLLPAPAATPTQSLQAA

SEQ ID NO: 363799 - protein, 429 aa, unidentified
MIDVTDRHELFKLMRASVRGSEKYLLVGVDVAKNNHHAFFGTPNGRTLRKNMVFDNCIKGFESLRSIARDLQSQHGLVEVVYGLEPTASYHKPLAEYLIRQAEHVVYVSNVAVAKNRALLDGRWDKNDKKDAANVADLVGQGRCLYYDVPEDSLRELRSLIAFRIRLKKEEHSLRMRLRNNVFAQFFPELDKLYIRAGQPDDLVLSIAQHCLDPREIAGMTFEAFLKLITPRKIRIEQERRLRDLWEAAKESVGCLVHDAARWEARSLVNKLKAVRETVKDNEKLMGKVAQRFPEYGCLLSIPGFGPIVSAMVLAAIGNCFRFENRKQVLRLAGLDLSAERSGKNSDSAQPVISKQGKAALRYALVQAAMVASSLNPDIRSYYSKLIKGRELERGIKLKMKVKLAAKLLVVAWTLMRRREQFKPSCFAG

SEQ ID NO: 363800 - protein, 338 aa, unidentified
MQFKHFFGIDVSKNTLDLTVLDIQGNLIAYEHLANDLKSIKKCFLGVLKRHQILMEDCLFCLEYTGIYNLPLVQWLTNLEAHIWLESGSQILKSQGIVRGKSDKVDSLRIAKYAFLNRNEVRLWKAPREIIQHLASLMSLRSRFIKNKKQLEVPVKELNGFLNKETIRSINKHNKAPLNAIKLQIDKIEKEILEVIKSDERIHQLYKIITSVDGVGLVTATQIIITTNEFINITEGRKYACYSGVVPFEHRSGTSIRGKNRVSHMANKKIKTLLHLAAISAIRVKGDIQDYYLRKVAEGKHKMSVLNAVRNKIILRIFACVTQERMFEKKINFCLEKP

SEQ ID NO: 363801 - protein, 421 aa, unidentified
MESENLNYAAWIGLDWGSQKHAICLKPANSEAVEHYTLEQKPQALHSWFMNLIARFDGQKLAIAIEQTRGAVIHFLLGLACVHIFTIHPKSLKNYRDAIHPSGAKDDPTDAELLLQFLTLHQHSLKPWVPDKPEVRLLLRLVEFRRKMVGKRVRLTNELTQLLKEYFPAALDCVGELDRAMACDFLSKWPTLEKLQQSQPETIRKFYQEHVCRRRNVIEGRLKQIRSALPLTTDKPVIEPSVFLVQSIVPQLHSVIDAIAQFDKRIKEIFEKHPDAQIFNSFPGAGPALAPRLLAVMGSDRSRFGSSLEVAEYSGIAPVTERSGKSKWVHRRFACAQFVKQSFHEFAAESILFCGWARGYYDQKKREGKSHHSAVRALAYRWIRIIYRCWKDRLPYDEGKYMKALRQKKPPWVQSLPLSKP

SEQ ID NO: 363802 - protein, 457 aa, unidentified
MAKRRRKAMSRKFKITKLPAELQHINLNAAGIDVGSERHLVAVPEGRDVVSVRAFGTFTSDLEALATWLKKCGVTTVAMESTGVYWIPLFEVLERRGFEVKLVDARHVKNVSGRKSDVLDCQWIQQLHTYGLLAGAFRPPDEICVLRSYLRQKEMLTQASSMHIQHMQKALQQMNLLLHNVVSDITGATGMKIIKAILAGERDPQVLSRNRDERCKHSATTIAKSLVGNYREEHLFALRQAVDLYETYQTKIADCEQAIIKELEKQPNVSDDEPPPADKETQARDRIRAGVDVRDMLYQKSGVDLFAIPGLAADTLLILASEVGFDMRPWKTEKHFSSWLSLCPGTRRSGGKVLDSKTKRNPNRAAQAFRMAASSLSRSTTALGAFYRRIKMRTSGQQAVTATAHKIARIYYAMLTKGASYIELGQQAYEQRYKQRRLDQLKNQAKSLGYQLIPCAS

SEQ ID NO: 363803 - protein, 408 aa, unidentified
MELLHPRCAALDVHKDLVMACARIQVREYAKHPTAEFPTTTRGLLALADWLEEHQCQHVAMEATGVYWKPVWHVLEGRFELLLVNPAHARNVPGRKSDVNDAHWLADLLAHGLIRASFVPPQPIQELRDLTRTRKQLVRQIARHTLRIQKTLEDANLKLTGVISSLLDTSGRAILKALIAGETDPQRLLEHTTGKLKAPRERLLDGLRGVVTDHHRFMLKLHLRQIDSLESGIRQLERQMEKLLRPFRERVEQLVTIPGVSDTVAQVLIAEIGLDMARFPTSGHLVSWAGLCPRMDESAGKQRSTRLKKGAPWLKPMLVQCAWAATRTRNSYLQTQYLRLRGRRGPKKAIVAVAASILTAAYHILRDGTDYHDLGADYFTHRDSDRIANRLARRIRELGYEVQIQKAA

SEQ ID NO: 363804 - protein, 348 aa, unidentified
MRNKPLGAVVYGIDLGKTRFDVVGCDAAGQPIQRVKFSRDTLLAFFAAAPKALIGMEACPGAQWMARKLTELGHTVRIIPAQFVKPFVKSNKNDARDAEAIAEAVIRPTMRFVEIKSCEQIDLQALHRVRDRIVGNRTQLICQMRAFCLEYGIAIRPGTGAFKLDIARIITDETSDLTPAIRGLLKELWEELKIADIRLAAVSRQVEVLAAKHDTARRLMTIPGIGPIGATALIAAVGDGRQFRKARDLAAWLGLVPRQNSTGGKTTLLGISKRGNPYIRRLLIHGARSCMLHLDRSRDRMGVWLNALDGRMHRNKAIVALANKIARIAWALLRRPHTLYERIAPAHA

SEQ ID NO: 363805 - protein, 426 aa, unidentified
MEQPTRFIGMDVHKDTIVVAVTAAGEVGKAMPYGTFPNTAATVEKLVRRLRQAGSGPLKFCYEAGPCGYGIHRALTKMNEDCMVAAPSMIPRKSGDRQKTDKRDAASLAVLHRGGLLTAVWVPDAAHEAMRDLIRARLAAVRAVRAARQQLSAFLLRHERIYPAGRTAWTKAHRGWLAEQSFAQPAQQIVLEESIETVRLGEQRRDRVDGYLRAQIPTWSLFPLVQNLSALRGLDTIASAGLAAAIGDPSRFVSAPDFMAYLGLVPSEHSTGPKRRIGAITKAGDVHARSLLIEAAHSYRFPARVARHKLTAVDAVPDAVREIAWKAQTRLCQRYRHMMAKGKLKQVVVTAIARELAGFVWSIACIITDPPTKNFAVTTASEKICRTGSTTCSSVPRRQPIKETARRAERPGQIRTASADGKRPDR

SEQ ID NO: 363806 - protein, 349 aa, unidentified
MDKITAVGLDLAKQIIQVHAIDATGRVVLRKVVRRERLLALLAQFPRCVVGMEACSGAHHWARELTELGHDTRIMAAEFVRPFRKSLAAKNDANDAEAVGTAMLQPNMRFVTRKNVEQQALLCLHRVRQGLIEERTASLNRLRGLLAEFGQVAPQSAPALYRALSVLLAAEDARLPGLMRRCMQDLREHVRAVEGRIAALDREIAQHAQGDESARRIAALCGVGPNTASAVIATVGNARDYRNGRQFAAWLGLVPKQYSSAGKTKLGRITKRGDAYLRMLLIQGARSAMQAALRRPPAKRDRLSAWIVQLAHRIGYHKTLVAIANKHARIIWALLARDAAFDRVYAGTH

SEQ ID NO: 363807 - protein, 341 aa, unidentified
MKNKSFIGIDISKNVIDASIFCEGTPIKDFPHAVFNNSRKGFGEMCTWLKKNHVVLSNCLFGMEFTGSYSMELETFLNARKYQFCMLSTHVVKHYPMGPKDKNDKIDSAKIADFLYRYNGTECVKPYKMPDKTMQRLKALMNERKFLVEQRTCFMNRRQLCTTKEDAQLYDGYIKKFSRDIENIELEEQKLLATDDSLLATYKNLLTIPGIGFVNAMNVIVITRNFTAFETARQYASYVGVAPHFRTSGTSVKWRPRPSARCDGQAKADLSMAATVAVQYDAELQSFYNRKLGGKQDSDTKRKALNAVKFKLILRMFAIGKQNRKWEPLDSKSSNEKLAIS

SEQ ID NO: 363808 - protein, 334 aa, unidentified
MQNVTLIGIDLGKHSFHVHCQDRQGNALLRKKFSRTQLINFLGSCKAATVVMESCGGAHFMARRIADLGHEAKLISPQFVRPFVKSNKNDFVDAEAICEAASRPSMRFVPPRTEDQQAMAALHRVRDSLIRQRVKTPNQMHAFLLEFGVSLPRGIAVIRRLAAVLEENDFPPYLARVLSRLHSHYVYLSGEIEEVDKELKTHLAEDETAQRLLTIPGVGPVTASLLAMRLGDGKNYASSRDFAASTGLVPRQYSTGGKTTLMGISKRGDKNLRRLLVQCARVFMQRLEHNPGRLAEWVNRQLARHHSNVVACALANKLARIAWAVTAHQTVFIK

SEQ ID NO: 363809 - protein, 407 aa, unidentified
MEVLHEICCGLDVHKQNVTACLRKGRESEVRTFKTVTRALLELYDWLSENKCAQVAMEATGVYWKPIYNILESGFHVMLVNAKHIKAVPGRKTDVKDAEWIAQLLQHGLLQASFVPRPDIREMRELTRHRTKLTQQRASVVNRIQKVLEDANIKLASVATDIPGKSGRAMLEAIVSGNSDPEVLAEMSLRSMRKKIPELREALYGRVVEHHRFMLRELLDQVDWLDAAIERASKRIEEKMHPFVEMLDKASTIPGVQTCVAQRVLAEIGPEMSQFPSERHLLSWAKLCPGNNESAGKHKSEKTGKGNNWLRGALVEAAWAAARTKGTYLSAVYHRIARRRGKNRAIVAVAARILVILYHIWRDGGVYQELGVDFFDKLNYEHLKKHLVRRLESLGLAVTLTETAAAA

SEQ ID NO: 363810 - protein, 408 aa, unidentified
MEITPIYKRVIGLDVHQAKISACALAEQADGTVTVEHREFGAFKRDRRSLAQWAHEFSPDVVVMESTGIYWKSSYAALEAVGIAAWVVNARHVKNVPGRKTDVADAHWLATLARAGLLRPSFIPPADIRYLRLIARQRQKLGGMLASEKNRLHKLLADAGIRLNVLVSDIHGQAGRAMVKALIDGQSIPEVLNLAGRLRASREQLFDALQPEELSAHHLFVLKEVMAHIEELEARMIRFDQALIQGLDAWHPQLNLLQTIPGIDLMGAAMLLVEIGADMNSFGSAEKLASWVGICPGNNESAGKRKSGKTRKGNAWVRRLLCEFAQAAARSRCALKDKFAALSIRKGHKKSIVALAHKMLRTLFAMLKNNTPYRDKAVDYEALSVQRNAPRWIKMLVKHGFMPATATA

SEQ ID NO: 363811 - protein, 331 aa, unidentified
MTNNVYVGVDVSKNILDTLFKYPAGQAAEQRSFSNAKTGRKKLISRLSQMPGAHVVMEATASYHLGLMYDLNEADIPFMVVNPFCAKAYGRSKNLRSKSDTIDANTLAEFGSERPFIPTQMPSDNQLKIRQLASVIRLLTKHRTATKNSLRMIEQMPVISSDATKELKKIIALIDKAIARATEVMKQLVLACHKETLALINSVKGVGLKTTLILISYLGDLDSFQSAKQVAHFMGLGNVDNQSGQRTRPRRISKRGHPELRSLMFLCALSAARHNTSCRDLYQRLMAKGKPKKVALIAVANKLVRQIFAVVKNKTPFENNYLEKASISLAS

SEQ ID NO: 363812 - protein, 402 aa, unidentified
MKTSGLDVHKDSIFCAIYDGEFHSEVQTFDTFTESIKKMCKYLKSEGVKRVAMESTGIYWITVWNIMESMDFELTLVNPFLIKQIPGQKGDAKDARWIAELLHKGMLRGSYIPDAPVQRLRSYSRKYMKLQQQITRSLIFMDNILITSGIRISSCVSDIGGKSTLNVIEALIKGENDPVKLGKLVYGNKENKKNGKLQQALTGYIQEYHRDRLEMEKEQYDLLDKQAKRCLSKMEEICNEQFADEFALLCTMPGIGNISAMIIIAETGADMKAFESSNKIVGWAGLRPRNDESAGKYKSTAITKGNKYLKTTLVQIAWAASRNKGSFFMEKFNRLAMRKSRKKALIAIARKILVTVWHILDEKRGYNPTLLPVYNPEKLSAKVRYHKREIERIEGLIPRKTA

SEQ ID NO: 363813 - protein, 411 aa, unidentified
MKLFVGLDISSFDIKVCILNDEGEKIQSFTVSNDLPGATQLRDHILKCTENQTIQALKIGLESTSVYSFHPSMFLHNDDSLKSLGAKVFVMNPKQIANFKKSYSDMDKTDEIDAFVIADYLRFGRNSMSVVKEEQYIALQQLTRSRYQLIHQVTKGKQHFLQHLSFKCNTFSQEVDSSVFGNAMMEMFSEKFSLDELAQMPLVDLASFLQKKGKNRFNDPECIAKSIQKAVRSSYRLDKVVEDSIDVLLGTSIEVIRTLQKQVKEIEKAIERIIASLEEKQTLQSIPGVGPVFTAGIIAEIGQIERFEDETKIAKYAGLYWRKHQSGRFTADDTSLSRNGNQYLRYYLVEAANSVRRYIPEYQEYYAKKYKEVPKHQHKRALVLTARKFVRLVDALLRNHQIYTPKRSVIK

SEQ ID NO: 363814 - protein, 417 aa, unidentified
METYAALIAIDWADRQHAVSLYDVSTGKRERLTVKHTPEALSEWMLGLRRRFNGQSLAVCLEQTRGPLIYFLLQYDFLVLYPINPVTLAKYRQAFSLALGKDDPSDADYLLDLLQHHRSRLQAWRPDDEQTRTLRFLVEQRRRLVNDRTRFSNRLTALLKGYFPQVLDWFEDIRTVLVCDFLERWPTLAAVQKAKPTTVEKFLRAHHSVGLALNQRRLAEIKTALPLTTDGAVLSSSILAVKVLVTQMKTAIAAIAEYDRNIEAVCQTHADYQLFQALPGAGPVYAARLTAALGSDRSRWPTADNLLRFSGIAPVIERSGQHQWIRYRYFCPKFFRQSFHEYAAESIKHSFWARAYYGMQCAKGKGHHAAVRALAFKWIRIIWKCWQTHTPYDEVSYLKELRKKASPLLNFAANNPN

SEQ ID NO: 363815 - protein, 447 aa, unidentified
MEILYTHCAGLDVHKKTVKVCLLTQGSNGQPHKEFRTYLTTTEELLKLSDWLSEQGCTHVAFEATGVYWKPVFNLLEGSFELLVVNAQHIKAVPGRKTDVRDAEWIADLLRHGLLKASFIPSSPQRELRDLTRYRVKLTEEKAREINRVQKTLEDTNLKLGDVVSDILGKASRMILQAIVDGETDAGRLAALAVGRVHASQEQLEAALRGHVTDHHRFLLSEHLTQIHHLEQAIERVTAEIVRRFTPPSPPEDGNSSRKKLEAASEMGPDSESSSAPQAALSWSEAVTLLSSIPGIGERSAIGILAEIGSNMQQFPTAAHLASWAGICPGNHESAGKRLSGKTRKGNPFLRCLLVQAAHSASHQKHCYLAEQYRRIAKRRGAKRAAVAVAHTLLVIIYHLLSRQTTYQEQGETFFEERDRQGKEQRLVRQLSSLGYHVELQPIVLAG

SEQ ID NO: 363816 - protein, 460 aa, unidentified
MNQYFLGIDASKGYSDFVMLNEKKQPVIENFQLDDTFEGHARLYELLRSFNQDHPEATIYAAVESTGGYENNWFQSLLKFQGSLPIKTAHLNPLGVNYNHKADLKRNVTDKISAQNVAEYMIAHPEKVSYQHQDSLASLRKQWGFITMLTKQSTQLLNQLESLIYNANPEILMYCKDGTPQWVLKLLTLYPTALRLSKAKVKSVARIPYVSKDRARQLVATAKKSVASASDNVTQQLIVATVKQVVDLKKTIKEQTKILTNECAMPEVELLKTFIGISDYSAIGLMLEIQSIQRFLLSKKLASFFGIHPAYKKSGDGTWKYRMSKKGRKEPRRILFMVAMSAIKSNPLIRSIYQQAVQRGMEKKAAVGLCMHKILRIIYGMLKHNKAFDPEIDRKNRQKKPLRQRRVRQDKNRRYQDFDSKAPISSRQKIKRKERKQSQNVSNVECGISEASVPITELAN

SEQ ID NO: 363817 - protein, 347 aa, unidentified
MSMTMIGLDTAKAVFQVHAVDGAGQVVTRRTLRRNELIAFFEKQAACTVVMEACGAAHHWARVLTGLGHEVKLIAPEAVRPFVKQGKKNDAADAAAICEAASRPGTRFVPVKSLEQQGILALHSARSLLVKQQTMLANAMRGLATEFGLTVPLGMGRLEELMALVDADEAVPAKARQALTALSDQCRALGESIETFGAEIVAHARHDDTARRLATIPGIGPITASLIAATVADIGVFPSARHFAAWLGLVPRQHSTGGKTRLGRITKAGNREIRRLLVLGATSMVRQAPGWNSVAGAWARGVLERRPARLVTVALANKMARIAWAVMARKEVYHAKGRVAAAAEAMA

SEQ ID NO: 363818 - protein, 392 aa, unidentified
MRFAGIDIASEKHVLAVVDETGEVLVKPKSFTEDAEGYSSLFEQFGEPKELLIAMEATGHYWKNLFAALTTRGYVVALVNPLRTHRFAAEDLERTKTDAIDALGLARFAAQKRPVPTRLPESATEELRELVRLRDRLMQDFGDRVRQLHRLVDLGFPEFTRYVRSLDSELATSILKDYPTAEAFVGTRPRALAHLKYDGRHFVGLELANQLIEAAKLSVGRHHSHAYRVQVKFYCEDLDLLRRRLKALDGDIDTKLGDHEVGTLLTTIDGIGPHTAAKLIAVLGDPASFRSAKALASYVGVIPGLKLSGKSQNRRAPLTPIGNAALRTALYMPTLTAVRRSPWLRSFYERLIASGKPPKVALLAAMRKLLLAIYSVAKHRKPFELRLAEVRA

SEQ ID NO: 363819 - protein, 300 aa, unidentified
MPPTECLVTIGVDSHKELHVAVAVDQLGRRLGAITVATTPRGFGQLERWAQRLGTIQRFGIEGTGSYAAGLARWLQARGHQVVEVNRPNRQTRRRQGKSDPIDAEAAARAALAGHGLVWPKTADGTVEMLRVLRMARRSAMKARTQTAQQLDSLVVTAPDQLRAQLRRLSLEQLVPVAAGLRPGELVGPLAATKLALRTLARRHQSLSAELARLDHQIAKLTATTAPRLLARGGVGPQVATALLVAAGDNPARLRSDAAFAMLCGAAPIPASSGKVIRHRLTGAATARPTTPCGPSPSAG

SEQ ID NO: 363820 - protein, 322 aa, unidentified
MGTLSFCGIDVSKDRLDAMVLPEQQSSCMGNDPAGWAQLVEWLSDFSIAAIGLEASGGYERGVMRALLAAGVSVRQINPFKLRQFASASGVLAKNDRLDARMIASFIAVMPTRAAQRRTPGIEQMSEIVTVRRHLSDQKIAAENATKLLEDAMLQRLSRRRIAQLASDIAQLDNRLAEIVAADSALSRRYQVLTSMPGVGLVLACTLIALLPELGRMSRKQIAALVGVAPYDFDSGKLKGKRCIWGGRAPVRHVLYMAAMSAGNWNPTLKAFRHRLKTAGKVPKVTIVAVMRKMITTLNAMVRDDVAWADHLAGRRSAPTAR

SEQ ID NO: 363821 - protein, 449 aa, unidentified
MSKPQVIDDEEHERVHERVAAIDVAKDSGVVCTRLPHPSRPGAQRSTVWTVKARMGAVRQLGRQLMRDGIEIVTLESTSDYWRIWFFVLEACGLAVQLVNAAQAKNLPGRPKTDKLDAQWLARLTEMGLLRASFVPPKAIRDLRDYTRARTRLVQERTRCFQRLEKLLETALVKLSAVASKLTTESAKDMVKAMIAGERDPRKLADLARTRMRARHDDLVEALDGMFDDHHGELARMLLDQIAFLDERVTQLTARITESVAAIPAAWGVDGDGTTGPDAGTGPDAVVLPAVARLAEIPGISPDLARAIIAEIGLDMSQFPTAAHLVSWAGLCPSARQSGPRTRAGKKGQGDTWLRGSLGQAANAAARTDTFLGERYHRIARRRGKAKAQVAVARSILVIIWHLLSDPAARYADLGSGYYQARLDKDKKIKNHIRQIEALGFTVTITQTA

SEQ ID NO: 363822 - protein, 344 aa, unidentified
MPHPAPAVVGLDIAKNVFQVHGTDAAGHRVLRRRLRRGEVTTFFARLPSCLVGIEACPGAHHWARELQALGHEVRLIPPQYVKPFVKTNKNDAADAEAICEAVVRPTMRFVPVKTVEQQAATMLHRTRALLIRQRTQLINAVRGHLAEFGLVARKGARNLRQLADLVRDAAPSALPDAARAMLVLLLEQIREAQARIAHVERALDAWAARSDACRRLMAIPGVGTMSATALVVAMGDPSRFRSGRHFAAWLGLVPKQDSSGERERMGGISKRGDAYLRTLLVHGARSVTRWRRRSWGWLAGLMARRPTNVAAVAVANKTARTAWALLARGTTFEVGGAPATAAA

SEQ ID NO: 363823 - protein, 356 aa, unidentified
MDSTKYIGMDVHKEATTIAVMNSAGKLVMESIVETKAATLVQFFEGLRGELYVTLEEGTWAAWLYDLLKPHVTKVVVCNPRKNALLKAGSKNDRIDARKLAELLRAGLLSAVYHGETGLRTLKELGRSYLAISKDLTRTMNRVKALYRSWSIPCGGPSVYAPRHRAEWLSKITEPGVRRRAELFYQQLDGLQKLRQEARGDLLAESRKHGATELLRRIPYIGPIRAALLIALMQTPHRFRTKRQLWAYSGLALETHSSAEYHYVQGQLQRSKRPVALRGLNQNHNHDLKSIFKGAATKAGSAKGPFHDFYAALLAKGMKPTMARLTLARKIATITLIVWKKGVCFDAQQLKQQVSV

SEQ ID NO: 363824 - protein, 427 aa, unidentified
MNYTQNHRIKQMNEFTLIVGADIAKHKHVARAQDFRGIEVGKPCVFDNSRARFNKLLHWIHLLMEGHSKTHVLFGIEPTGHYWMPLAQFLRHEGIKIVIVNPLHVKRSKELDDNSPTKNDVKDARVIAQLLKDGRYSEPQIPQGIYAELRVGMNMRERLSKDLLQVKGRIHGWLDRYFPEFLTVFKDWEGKAALLTLQNFPLPNDIVKQNAEEIVQVWKIEVKRAVGTKRALQLIMAAEESVGLKSGLDMAKQELHVLLSQYKLLCEQLAQCMERVERMVHTIPGATQMMTIPGVGFVTVAGFLAEVGDLNGYSHPRQIQKLAGFNLKENSSGKHKGRTRITKRGRPRLRALLYKCVMPLVAKNEQFKALHDEFTARTVNPLRKKQSLIALCCKLIRIFFALGRKQQPYDALLVIAKSQHSSARNVT

SEQ ID NO: 363825 - protein, 391 aa, unidentified
MIIVGIDIGKFNHEATIIDIQGNIIGKSIRFSNSHQGTNKLLKYIRENNPYNEEIIFGLEATGHYWLALYSRLLSEGFKINVINPIQSDSFRNLYIRKTKNDTKDSFIIAEVIRFGRFTSTKLSDEKILALRQLCRYRTYMVDQISDLKRKVISVLDQIFPEYSKLFSDVFGKTSKELLLNHTTPEEIANLDTNYLAELLSKLSKGRLGFEKATQIKEAAANSFGIKLATDAFTFQIKQLLEQIKFMEAQLKELEENIANNFQTFNSPLTSIPGIGPVLGAIILSEIGDFSRFSNAAKLVAYAGIDPSVKQSGQFNATHNRMSKRGSPYLRRAIWMAATVAAFKDPVLNNYYNKKRSEGKHHLTAIGAVARKLTYIIYAVMRDNKEYTPMA

SEQ ID NO: 363826 - protein, 345 aa, unidentified
MKKLFVGIDFSKEKVDAAVICAEGLSETAARVYGEFKNGVSGYRLLLKWVEKNSQGTDASLWLFCGENTGDYSRGLCNWLYGKGYDMWLENAKCIRDASGIRRLKSDRADASMTAEYAMRNHDRAVMYEPLSESLTQLRELFLYRQMVVRHRCSFQVRRDEKRLTVEKSPVKTMISQSGRHIISELNREIEKIDRRIEELIDSDDGLKGVYDIVTSVPGIGTQNAVAFMVYTNNFTKFDYNPRKIACYYGIAPFGKDSGSSVHTNPHVHYMANRLIKALLTQAALAAVNFNSVMAQYYSRLIGRGKKKQVALNNVKNKLIRLVTAMVRDRRMYNPGYENLCLNYK

SEQ ID NO: 363827 - protein, 362 aa, unidentified
MLIIGCDYHPSGQQVFGIDTESGEVFADRWIAHTGNELEEFYSGLPAGAVVGVECSGNMLWFERRLAHYGHRLRLGDAGKIRAKETRKQKHDRRDAELIARLLREDNFPDLKWVPRLAERDQRQLLMHRHKLVRMRAQVKNQLQHIALNQGQQKKRQLWTKAGRELLESLRLEPWTARRRDDLLRWLDLLNRDCESLEREVEQAAEARAEARLLMTHPGIGPVISLAFVLTVGSIERFQRSRELVSYLGLNPSEDSSGERRRLGGISKQGSSFMRLLLIQGAQTAVRGDEDLRRQYRRLASKKHRAVAKVMVARKLAVRMFWMLKTRKTHAELVRTRGSSSHPGVGKTDRLSERPASPRIQP

SEQ ID NO: 363828 - protein, 457 aa, unidentified
MSKAKRSSRKRAISPVHPHAAAIDVGATTHVAAVGPDRDPEPVRSFGTFTADLHRLADWFERCGVRTVAMESTGVYWIPVYEVLEQRGFTVVLVNARDAKHVPGHKTDVSDAEWLRRLHEYGLLRASFHPEARIAALRDYLRQRERLLDYAASHIQHMQKALTQMNLQLHHVVADITGASGLRIIRAIVGGERDPAVLAALRDHRCKASVETIRQALVGNYREEHVFALAQALELYDLYQAKVAACDARIAAVLDRLQAERPVPTAPLPAPRHQTRTPNAFAFPAREALHRILGVDLTRIHGLGPYLALKLVAECGTSLTAWPSAKHFTSWLCLAPGNKISGGKVLSSRTRRSNNRAAALLRLAAVAVGRTETALGAFYRRLSGRVGKAKAVTATARKIAVLFYNTVRHGMTYADPGASYYEERYRQRVLTNLRRRAKSLGYVLQVADPTAPVAEVS

SEQ ID NO: 363829 - protein, 368 aa, unidentified
MKNITTYVGVDAHKKDLFIAMLVGDHTTPVSWQVANEPNAVRRLVRKLEREAPGPVRMCYEAGPCGYALQRQVTTPRVSCQVIAPALIPRKPGERIKTNRRDARKLVELHRAGLLTEVRAPTPEEEAIRDLCRARDDAREDFQRCRHRLGKLLLRRGLHYSGRNWTRAHRRWIDSLEWTQPAERVVVDDYLLAIDHLEARLIEFDARLTEVAQTEPYREKVAWLRCFRGIDTLTAILILAELHDFRRFQTPRALMAYVGLVPGEDSSGEKQRRGRITRTGNALVRRLLVETAWHYQHRPGVGPALTRRRKGQPGRVIAIADKAQQRLCRRFRRLAEQHKPAPKVAVAIARELAGFLWAALQPAPVSAS

SEQ ID NO: 363830 - protein, 440 aa, unidentified
MGRRCIGLDVHRDFAQVAIWQDGVVWQAGRVATTPEELRLFADSLAPSDEVALEATGNTYAIATLLAARVGRVVVSNPGKTRAIAEAKVKTDKVDAAILAQLLAADFLPPVWLPDAGTHALRRQVIRRAHLVRQRTRLKNQVQAILARNLVPRCPAADLFGHKGRAWLAGQPLPADERAAVAALLRQLDFYAGELAEIDAALGREGLRRPQVRRLMTIPGVDATVALSLVAAVGDFTRFRTGDQLVAYLGLNPRVRQSGGQPATHGRITKAGRAHARGMMVEAAWAASKTPGPLRAFYQRVRSRRGMQIAVVATARKLTVLCWHLIVHDQDYVFARPSLTAKKQRALELRAGLPARRGRKGSAAAYSLKEIRRRENELTEQAEAAYQHMVSGWQPRPRPGAPARTDPARAQPGFTVRMDVAAVTGARLSGPSKGTAARQG

SEQ ID NO: 363831 - protein, 341 aa, unidentified
MDKELYIGVDVSKKTLDLAYYDGEAIDWKNAHIQVSNDDAGFKKIGSWVAKVGKDFATFLFCMEYTGLYNQNFRLWLESKEYIYGMVEPRKMHHFEPDLDDDQRSLDRIKTDELDAFRIAIYCEQNHKKILRNPSKLPSPVYFKLKRLLAERKQNTKQSVLYKQQLHDICAYDTDLSVERKKLLLKNMKKNQKAIDKEIDSYMNEDASISKNYDLLISIPGIGRIIALETIVLTENFTAISNPRKYACYIGIAPFKKESGTSVRKRTSVSKKGFSEAKADLSIAVLSAIKNNPSIRDYWIRKRKEKCGGIVLNAVKFKLVLRMFAVIKRGTPYVETDAYKN

SEQ ID NO: 363832 - protein, 288 aa, unidentified
MHSTKPVSLSAKIIWCGRVSIRDGLDNFIKALLPYCQDFDHVAVVESTYNWYCLADVFKERGWLLRIADPSTVSQANLKASDDRTDAQYLAERLRVGSLKHYLPLNYSSRALRDLCRYRMAMVQDCASLKIKLINLYRNQLSKNLRVADLLDQCRNHMQSNYRFDPDILEEFKDPNIRLRVAFEVSRIAMLEEMIEECNAEIQKQCKDQELVKLCKTIPGCGPVLSAVICTDIGTMQRFKSAGDFVSYCRLCSTSKLSNGKSKGLGNAKNGNAYLSWAFTEIENAHPE

SEQ ID NO: 363833 - protein, 409 aa, unidentified
MRIIGLDIHRAFAEAVAWEDGKLRRLGRVDMRRELLTAFAQGLRQDDVVVVEATGNAASVAAVLTPHVTKVVIANPKQVRIIAHAKIKTDTIDAGVLAQLYASGFLPEVWIPDEPTQALRRQVTRRNQIVRQRSRLKNIIQSILHEHLIPACPHADLCGPKGRAWLVEQPVPEDERLAIERHLREFDRLGEDLKVIERDLARSALADESVKRLMTIPGVDMVVALAMAAAIGDVRRFDSPQKLVSYLGLNPSVRQSGPGPAHHGRITKQGRGHARGMLVEAAWAAARAPGPLRAFFLRIRARRGQHVAAVATARKLAVVIWHLLAKGESYVWARPSLHAKKLRDLELKAGHKAARGQKGAAHAYNIKALRDEERRWVEQAEAAYTRFVAGWNPRGPKRARTGAATEVRR

SEQ ID NO: 363834 - protein, 380 aa, unidentified
MRRVRRPPKRLLAQEDRTMLYLAIDLHRKQMTINVRGEDGEPLLRRQVSTWGDEPQKFLADVQRRTAGDGFVTILEVCGFHDWLMELLPQHGCREIVLIQPEKKSSRKTDRRDANQLGELLWLNRARLLTGRKVQGLRRVVPPQPGEREDRRLTQLRCNVTADLTRTINRARYILRRLNIEQHCPTKGIQTVKAKAWLKTLALSALDRLEMDQLLARWAALSQQRDQLDRRIVERAALDPRVALLRTTPGASCYTALALACRIGDIRRFPTPRSLANYWGLTPRSDSSGPNERLGSITKEGSTLARHLLGQLVLHVLKKDAAMRQWFRRIKQRRGAKIARVAVMRRLTVIFWHMLTKHQPYTIAAAPKRARRSKPIASND

SEQ ID NO: 363835 - protein, 338 aa, unidentified
MFYTGIDLHKFSSYLTTIDSSGTIVKQENLKNVAHNFVQYFSSIPGEHQTTVESTMTWYWLNDLLTSINIPLVLAHAKYVKAIAYAKVKTDKVDSHTLAQLLRMDYIPAAHKISNDNRTLRDALRARLKIVQRHTSITNSMHLLLAKYNYDSPTQLTGIPEFQYQQLSEVESLLDEQMLELEKQLYPYLIPNDDIQHLLWIPGIGKMNAFTILLEVDDINRFPDVKNFFSYCRLVPSARNSSGKSKQRSSKDGNKYLKVTFCDAAVHALQYYPVIKKYHDSKLRKKKKQVAHAIIAKEIARIAFYVLKNKSDFNNKFKGTELEHKKSLQWPRVVNPCA

SEQ ID NO: 363836 - protein, 363 aa, unidentified
MPTAHPCTSPLKFVVGIDIAKDTFVACFGQIDARQHLRFGKQTSFDNTLTGFAALLSWTEKQAVLPAPIWFVVEATGVYYEELAYFLSDKAQALSVLLPNKAKHFAQSTEQKSKTDQLDARLLCRLGLERALPAWQPPSPALRQLRALARERQSLTGHGARLKVKIHAYQHSYQPDARSLSRLATQQTLIQQQLLAVDQDLAALLEAEPELGRKLRQLTSVPGIGLTTAIVVVAETSGFVLVDNERQLASYAGLDVVQRQSGLFAGATRISRRGNVRLRTALYLPAISSLRYNPQQMAFYTRLRARHPNGKPGVIAVMRKLLLLCYSLWKNDRMYDPQYHPAVNELAAALESVHPETNEKAPV

SEQ ID NO: 363837 - protein, 356 aa, unidentified
MSNCSKLDFTGQHVYVGLDVHRKNWSVCIMTQQFEHKVFSQPPDPSVLVNYLHRNFPGATYHAVYEAGYSGFWIHDRLREKGIDCIIVNPADIPTTDKERSGKTDKVDCRKLARCLRNGQLTGIYVPTRIKIEDRSLIRTRRSMVKKQTRCKNQIKSMLAFYGIHLPTDIVHRNWSSAFIHWLEEIQMERASGNFVLKVHLDELGHLRRIITALNRNIRVLSRTDDYKVNVQLLKIIPGISTYSAMTFLTELCSIDRFQSLDKLASYVGLIPSTDSSGEKEIIKGITSRRNQPLRDIIVECSWIAVRKDPALLMTYERLIKQMPKTRAIVHIARKLLNRIRFVLKNQMEYVPAVIQ

SEQ ID NO: 363838 - protein, 394 aa, unidentified
MLHDHPSVGPTAILTQFGAIFVSLELSRSKWVLTSLSPGNGEKMSQYSLTAGDIGGLLARFADLKRKAKERTGSDYPIITIHEAGLDGFWVHRVLQNEGIESHVVDAASIATSRRRRRAKTDKIDGEALLRALLAFKRGEPRVCAMVVAPSPEEEDRRRLCRERQTLIAERIIHVNRIKGLLFAQGISDYAPLRRDRRKRLEGLRTGDSRPLPVHLKTQISRELDRLELLLDQIRKVEAEQEALLAAESKAGREKAGPEEEPHNAVAMLLAVKGIGEHSAAILWSEGLCRQFSNRRQVAAYAGLAATPWRSGAVMHEQGLSKAGNPQLRTTMVQLAWLWLRHQPQSALARWFRARGERGRKGSIVALARKLLVALWKYVTHGVIIEGAVMKPAT

SEQ ID NO: 363839 - protein, 402 aa, unidentified
MNAVGIDVSKGKSMVAIMRPFGEIVSTPFEIKHTVSDIRSLVELINSVEGESRIVMEHTGRYYEVLAHQLSEANLFVSAINPKLIKDFDNDSLRKVKSDKADAVKIARYALDKWQNLKQYNVMDELRNQLKTMNRQFGFYMKHKTAMKNNLIGILDQTYPGVNTYFDSPARSDGSQKWVDFASTCWHVDWGRKMSLNAFIDHYQNWCKRKKYNFSQSKAEEIYGKAKELVPVLPKDAITKLIIKQAVDQLNSASTTVESLRTLMNETASKLPEYPVVMAMKGVGTSLGPQLMAEIGDVSRFTHKSAITAFAGVDPGVNESGTYEQKSVPTSKRGSADLRKTLFQVMDVLIKTHPQDDPVYQFLDKKRAQGKPYYVYMTAGANKFLRIYYGRVKEYLSSLPES

SEQ ID NO: 363840 - protein, 347 aa, unidentified
MDHIGIDVHKKESQICILAEGGELMERRIPTQPWRFAEELGARPHARILLESSTESEWVARCLEGLGHEVVVADPNFAPMYATRTRKVKTDRRDARALAEACLLGAYRVAHRLSDAQRHVRARLTVRDTLVRTRTRYISLVRALLRQHGWPVPTGSAEGFGRRVMTLPLPGRLRSEVAPLLAVMRHLQQQLAYSDERIAAVTQTDERVRRLQSVPNIGPVTAAAFVAALDDAARFRRAHEVEAYLGLVPRELSSGETQRRGRITKAGSSRMRWLLIQAAVSMRRLHDPRTAALREWAGHIAARRGKGIAVVALARRLAGILFALLRDGTVYESRQRALAAVPQAVPA

SEQ ID NO: 363841 - protein, 468 aa, unidentified
MRKLSSRTPAQPSRSEVRPLEGLTRRQPHAAGVDIGAHEIMVCVPGPGATQEVRAFGNYTVDLYALADWLQAHAIQTVAMESTGVYWIPLFETLEGRGFEGCLISAAAIRRIPGRKSDVLDCQWIQTLHSYGLLAASFRPEADLIALRTLLRHRAQLIEHRSPHTRSVHMQKALTQMNVQLAQVLSDITGETGQKIIRAIVAGERDPYRLAAFRNYRCKKDEAEIALALTGTWRADHLFVLAQSLALDDAYPAQIAACDAEIERHYALVRPEWSPPAELLPARKPHSHSKNAPHDTALRTQLRRLAGVDLVAVPGLSSSLAQTILAEVGTTLRQFPSAKHFCSWLGLAPHNDISGGQVLRSRTLKTHHRAGQAFRQAAATLTRAKCHFGAFYRRKKAQLGPAQAMVATAHKIARTVFHMLKFKMEYGAMTAEEYDRLFEAQELQRLERKAARLGLGLVPLTATVGTVS

SEQ ID NO: 363842 - protein, 415 aa, unidentified
MNDQGQWYTGVDWASESHYVWLADKDGRRLGERSFKHAGDGLAEMVNWLLKTSGAADPGQIDVAIEVPHGPVVETLIERGFNVYVLNPKQMDRFRDRYSMAGAKDDSRDAKVMASALRTDPHCFRRLAISDPIIIELREWSRIAEDLTAERTGLVNRLRQQLWRYFPAFLELEADLSAPWAIELWQALPTPDAARRVRKASVEAILKRHRIRRLAAEQVLEILRQPPLTVAAGTTQAARAHIATLIAKLKLINRQIADAYRQLDTLTAKLGATGQADPGHNKQRDAVILASLPGLGRINLATLLAEASDALQRRDYHALRTLTGVAPVTKRSGRSCMVVRRYACHQRLANTVFHWARTAVQHDSVSRAKYAVLRARGHNHARALRSVADRLLNVACSMLKCGTTFNPSLQPQNAA

SEQ ID NO: 363843 - protein, 343 aa, unidentified
MNIKTIGLDIAKMIFHLVGLDQYGNQVLKKKLRRGQLLHYFANLPPCTIAMEGCAGSYYWQRELIKLGHTVKLLPAQHVKAHVRGNKNDYNDALAIAEACRVPEMREVTPKTVDQQSMQALHRLRESATGDRTALSNQLRGLLAEFGIIFPQGLSHIKQGLFSVLEDAENELTHTLRAALAHKHSQFKQLDELVAELGLLIQQASDEQQQVALLQSIPGYGIILSSSYYSVIGDGQAFAKSRDASASLGVVPKQHSSGDKTVLLGISKRGDSYLRKMLINGARSVVNHAHKKDDALSVWVTRLVERRGKNKATVALANKLARIGWAVTVSGKPYQENYGISMN

SEQ ID NO: 363844 - protein, 453 aa, unidentified
MGREEKRLEEFRRLREEIRGSQAYLVVGIDISKDIHNALMRTSSGKILYRRLTFNNTREGFETLLLQVEAVRVQQSLKEVVFGMEPTANYHKPLGEFLINRDQQVVLVSPEAAKQNRALLDGRWNKHDGKDCANVADLICQGKCLYYEYPSVELRDLRNLLSLNRKLKKLEQGLRLRIRNHLVAQYFPEMDQYCHWGATEGLALVRWCLDPAVMAVLSDEELTQRLGRLGRTIAQRKRLSALKEQAASSIGCQFGSSAEFEGRSVVELLKEVRQAMSQTQDQIEQVCQKFQEYGCLLSIPGFGPTLSAMVLGAIGNPWRFQNGAQVLKMVGLDLSASQSGKSQGSAVISKKGKAEIRYALYQAAMVASTRNKHFVAYFTDQLRGREKEKGIKTKKRVKLAAKLLMIAWTLMKKQQRFDPKYLCAQTEPVVARKTTTSVNRRIPKVQPNADRRL

SEQ ID NO: 363845 - protein, 322 aa, unidentified
MRYIGIDVSKATFVVAYSSDKGGEIRTFNNTTAGIRQFIGTLPKDGSIHCVMEATGNYSALLLYMLNVAGITVSMENPLKVKNFAKALLSTVKTDKSDARLITLYGEKMNPRPFKVQGEAILRLRQKRTVIRQLTKQITAMSNLRGSLACLPVPDKGATHTVDETIKFLEKKRDRLQAELTDLVEAEFSRQLALLTTIKGIGITLATALIITTGGFTYFQNAKQVSRYLGICPTYEQSGTSVNIKGHINRNGDAYTRGLLYIAAWPASRFNAQCKETYTRLRQNGKSGKLAMIAVANKLIRQAFAVVAHDKEYIDGFVSNRP

SEQ ID NO: 363846 - protein, 340 aa, unidentified
MDITTLGIDIAKSVFQLHGIDADGVVVVQKKLRRGAVLNFLGNVGPCLIGMEACATSHYWAREIAALGHEVRLIPPAYVKPYVKRQKNDAADAEAICEAVTRPNMRFVPIKTEEQQSVLVLHRARDLLMRQRTMILNAIRGHLAEFGIIAAQGPRQVMGMIARLRDDGDASLPEIARSVLLALGAHLEALAGEIRALERQLMVWHRADPTSQRLETIPGVGLITATALAASVSDPSVFKSGREFAAFLGLVPRQNSSGGKDRLGRISKMGDRYLRKLLVVGATSVIRRAGSNPTKTGAWVRSLMERKPARVVTVAMANKTARIAWAVMTRGEAYRASPIA

SEQ ID NO: 363847 - protein, 385 aa, unidentified
MTIQIQVPRFIPRDYDVFAGLDVDKKSMAVTFADHAGSQRALRMAHQVTPLLNYVRKHFAGQRVAFAYEAGPTGFGLHDELVRRAYTCVVVAPSKVPRAPGERVKTNRLDSRKLAESLRGGQLHSIHVPSAVYRNLRHLVQMRDTHVRQLTSSKLRIKSLLLFEGIAFPDPHEKWTARAMRELQTLPCSEPVRFKLDDLLDTLHFHFQAAARATKQIRQYCLQEPELQQSIEVLLSLPGIGWIVASHLVARLGNHREIKNGRQIAGFLGIVSSEHSTGDKQNRGEITRSGDSRLRNKLIQSAWTAIKRDPELRAFYRRIYQRHPKKVAARKAIVAVARKLTNRIYVVLKEQRPYVIRPDSSIAPLTAEETVGPRERLDGAQNDQS

SEQ ID NO: 363848 - protein, 342 aa, unidentified
MKDSIYDHYLAIDWSIKNMAIARMTKKSNKITVIDVDSDIEDLQAYLKNLRGTKILTIEETTTSQWLYTELREYVDRIIICDPNRNKLLNEGAKTDKIDASKLVQLLKAGLIKEVYHSTDKFLYLRRIVSGYEDLVKAGVRLKNQRYSLLRVCGKSGSEKKGSRLDAQGEQFVLECLDRQIEAYEKDKQGYEMQFTKLAQSYPEIKHQKSLPGIGVINAVKIVARVVTPYRFPDKGHYLSYTGLIKLAKISGGRSYGKRNPRYSRQLKSVYKSGVLAAIGGNNSINDYYNSLIQDGYAQHNARQKACRRLAIISLGVFKSGKRYQPYRRDHVKGDKEGTSSL

SEQ ID NO: 363849 - protein, 387 aa, unidentified
MTVRTVTNLPAVTHGETVRCLFAIELSTMSWVVAFNTPLSEKISRHALTGCKWKRLLELIEEVRARVSRETGRAVEVVSCYEAGYDGFWLHRKLEAHGIRNYVIDPASLQVDRRARRVKTDRSDTDRLLRSLMAYLRGEPKVWSVVRVPSVAEEDARRLHRERDRLVSERVQHVNRIKGLCALQGIYDYNPLRPQAMARLEQLRTAQGGAFPPRLKSEIMRGLQRLEMVVEMIATLEAERNAIVENEASTHLNAKKIQTLHKLKAIGPEFAAVLVGEIFHRDFNNRRQVASYVALAPSPFQSGNVAHDQGISKAGNRKGRTTGIELAWMWLRYQPESDLSVWYRARVGATKGRIRRIAIVALARKLLVALWRYLETGLVPRGAVLKG

SEQ ID NO: 363850 - protein, 356 aa, unidentified
MPTIAHLEPVRVTVGVDTHKDNHVAVAKDHLGRHLGENTIRTTPRGYRDLLGWAESLGEVEAWGIEGTGSYGAGLARFLHGVDQVVIEVNRPDRKARRLKGKSDLVDAEAAARAVLSGEATAVPKSGDNRVEMIRALRTARSSAIKARTQAINALKALVVNAPAELREQMRALSTVQLVRTCSRLRPGSITDPTAATKLAFRSLAGRCEALAAEIKILDPELARLTAEAAPGLIELFGVGPDVAGALLVTAGDNPERLRSEAAFAHLCGVSPINASSGKTVRHRLNRGGDRRGNAALYRVVLVRLCYDARTKEYAERRTAEGKSKAEIIRSLKRYVAREVYAVLTDSSQKSLAQAA

SEQ ID NO: 363851 - protein, 344 aa, unidentified
MKIAVLGIDLGKNVCSVVGLDPSGAVVLRRRVRRDTLIDLVAKLPSCIVGMEACCGAHHLGRLFAAQGHDIRLMSPEYVRPYVKAQKNDDRDAEGIAEAATRPTMRFVEVKTEAQLDMQTLHRSRERLVGERTALINQLRAVLLERGIVVPQGKRKFEQYLVAMMDEHDGEGLSARMRMLVADTRAQWRELDRRIAAFDAEFARWAKENEDARRLATIPGVGVTISTALIAAIGKAETFEHARDLAAWLGLVPRQATTGGKPRLMGISKRGNKYLRTLLIHGARAALPHLAEKGTTLGRWAKNLLSRVHQNVAVVALANKLARICWAVLRSGEKFAAKEATLTV

SEQ ID NO: 363852 - protein, 424 aa, unidentified
MHNRKANRMKSWQDLTHYAGFDWAKDHHALVVVDRQGRIVADLEFEHTLEGWKGFADKLSAWPNLAIAIETSQGAAVDQLLQQECLVYPVHPVAAQSYRERKAPSGTKTDHLDAWGLADALRGDGHGWKALQPMDPLTQQLRLLCRDEVSLIEQRTALVNQLQQALAEYCPIALQAFDDWTRPFTWEFVLAFPTPQVLAGAGKRRWEKFLHTHKLWRPETAEKRLRLFAQADQFKASEPVVRAKSQLAVSLCKLLCTLEQQLKLYRKQIEALFREHPDHDLFGSLPGAKQVLAPRLLGAVGNDPDRYGSQEVLQCIAGTAPVSYQSGQINKVRVRWLCDKFMRHTVHLWANCFRKASVWGQTYYRKKRREGMSHAAALRCLGQRLLKILFRMLQTKMPYDAELHARSQQKHGSWVLKLVNQSPA

SEQ ID NO: 363853 - protein, 339 aa, unidentified
MSIQSKQIIQEPKPLFAGIDVGAEELILVIRKNGTPYKAQKFTNTPADRARLVKKLAKLPGIIVCLEATGVYHFDLSIALHDAGVALMVVNPKASHNFARALMKNSKTDAVDAETLAQYAERMDFVAWARPSGEKIALRGFARRINALTRQKAAAKNHLHALSASQETHKAVLRDVNLSISQLEKRIDRLTKEALVLVGKHPDLERVFLLFTGIKGVAQTSAIALMGELLLLPPGLSNREWVKFAGLDPRAFDSGKSVHKQARLAKAGNRHIRSALYMPALSAKQHDPHVKAYFQHLVDNGKKPLQAVCAVMRKLLHAIHGMLKYDKPFDNARFYAIQA

SEQ ID NO: 363854 - protein, 401 aa, unidentified
MAKKNRLFKMFLGIDISKEKFDACCIDKSVEKLFRLSLLMEREGLDELNKKLSSLSVPKESILIGMESTACYHINLFSFLTSLGYTVVIINPLLISNFVKLQLRKTKTDKKDALVIAQFLLLNKDSLSERSLSSDISDMRDLSRQRESLIGQMTAIKNEMKRLLTITFSELEHIAGLFSKSILRLLCQYPSAYAIRKAKRTKIAKILIPGSYGKQTDESVERIRKAAETSIGTTSPMKEVILKQKASLLVQMEGHLQELTDILMQQCESTIQEDVDILTSIEGIGKKTATNFLIELGGDMNQFENHRKLIAMAGLDPAVYQSGKIDRKGKISKRGNRHLRRVIWLMATKVIQFNRIFKLYHAKRMKDGLPYKKAVLATAHKLVRVMFSMLTHKTLFIAKAN

SEQ ID NO: 363855 - protein, 406 aa, unidentified
MTVMIGVDPHKGSHTAVAIDEDEHVLGELRVRSGPKQLDRLMAWAKQFPERTWAIENATGLGYLLAQQLVAAGERVLDVQPKLAARVRLLATESTNKNDPHDARSVAIAALRSPSPKQVGVEDHAAVMKLWARRHKNLSSTRTQIACRLHAVLCDLVAGGVPDEIYAEKAASLLTDVEADSAVAAARVELAHELLDDLRRVDHQIKESKKRLAQVVAASGTTTINIFGVGPLVAATVVGITGDIARFPTRDRFAAFNGTAPIEVSSGGRKIWRLSRRGNRTLNHAIHMAAVTQVRFPHSPGRGYYDRKLAEGKTPKEAIRALKRRISDALWAAMVADARRAAAANAKVGPGGQPGNDSVASAAGSHPETPALRLSHSRTRTKATTTNSGPRRAATRATTPRARRTA

SEQ ID NO: 363856 - protein, 409 aa, unidentified
MPTTFDCPTGPVAGIDTHTDTHTVAVISDTGRHIATDTFPATNPGYVAISEFMATYGVTTVGVEGTSSYGAGLTRHLRTQKYSVVEVLRPTRAVRRRDGKSDPVDAVAAARQVLTGEALSIPKDTSGPVESLRGLQITRRQLVMTAAKLMTTIKSLLVTAPDEIRRRYSAMSTLVMVEALSRCRPSADLADPRNGVLLALKTLATTYRDLQKQGTQLEKHISILVEMINPHVTSIFGCGSVVAADLIVSVGDNPGRIHSEAALAHLCGVAPIPASSGRTHRHRLNRGGDRRANSALHRIALVRMHHDQRTRDYVAKRTKEGLSKKEILRCLKRAIVREVYRVLCLGQAVLPTGQVEVDELKARRIERQLSQAQVAEKLGCAPARISDIETGKRPLPELRLAYEELLKSA

SEQ ID NO: 363857 - protein, 428 aa, unidentified
MPYKIAGIDVHKRMLAVVVSDVEVHGEYAFERRQFGSNPAQLRLLADWLLEQQVEEVVMESTAQYWQPVWAALERYWTPTCKKREGAGAMSGTQHLAQAQSNRARQGRKNDFVDAERLVKRLVANELTLSFVPDPEQRLWRTLTRTKYQLTRNRVQLQNRLEALLEEAHIKLSSLVSDLLGVSARRMVQALADGETDPTALAALANYRLRATQEQLRDALGACQELNPVYRRLLKRALEELQLIEKQISQLDQEIADLLRPHQDQVQRLADVPGLGVDSAQQIIAEVGPTAATFPSARNLSSWVGACPGDDESAGVSHSHRSPKGNRQMRRLLNQAANAAVKYKGGIFEILYRRYVPRLGHKQTIGVIAHRLCRLIWKILYQGVRYEERGPDVRKKSQRYRAARMIRELQSLGYRVEQANSQSAAVPE

SEQ ID NO: 363858 - protein, 352 aa, unidentified
MMIIGCDYHPSWQQVCWFETATGETGELKLEHASGEAEKFYRGLPGHALIGMESTGNCQWFVEMATTAGHDVWIGDAAQIRASDVRQQKHDRRDAALILKLLLEGRFPRIWIPSGQEKDLRQLLIHRYKLVRIRAQVKTELQHLAMNQGVTKKRKLWSKAGEKVLRELPLKPWASRRREDLLKVREMLNGQIELLDQAVMEAAEKNEKARLLMTQPGVGPITSMAFVLTMGDVNRFQRGKQVASYLGLIPREYSSGGHQRFGSISKQGNRFLRMLLVEAAQGAVRCDPGFRNEYLHRCHKKAKGVAKVAAARKLAIRLYWMLRTNTGYPEVVRVESSSRVPLVSASLPGQAS

SEQ ID NO: 363859 - protein, 356 aa, unidentified
MISSTKYIGMDVHKESISIAVRNAAGKISMECVIETKANTILQFFDGLRGEVQVTFEEGTWAAWLYDLLKSHVAKLVVCDPRRNALLQDGNQNDRVDARKLSDLLYMNKLNVVYHGDHGLRTLKELGRSYLTMTRDQSRVMSRIKAIFRSWAIPCSGKQVYGLRHRAEWLGKIAEPGVHRRAELYYQQLDALRTLRQAVRKDLLAESKKHKIWKRLCEIPSIGPIRAAELLGILQTPHRFRTKRQLWTYCGLAVESSSSADHQVENGQLRRRKKRKETRGLNENCNHDLKDLFKGAAVVASLKPGPFAEFYAALLAKGMRPEMARLTLARKIATIVLIVWKRGVCFDAQHLKPQTA

SEQ ID NO: 363860 - protein, 421 aa, unidentified
MDTRMLSEEPIGVVHPRCCGVDVHKREVQACVLVSAPGGRVRQEQRAFATTTDALLALADWLVAEGCTHVAMESTGVYWKPLYNVLDGQVEILVVNAQHIKAVPGRKTDVKDAAWIAGLLRHGLLRPSFIPDRAQRELRELTRYRTSLVQEKAAEVNRLQKTLEGGNIKAAGIATDIMGKSGREMLDLLVAGETDPVVLAQCARGRMKEKIPQLERALDGRFGPHQRFLVARQLAHIDFLDRAIEEVSAEVTVRLAPREEELVLLDTIPGVGRETAEVLLAEIGTDMEQFPSAAHLASWAGMCPGNHESAGKRKGGKTRKGSRWLRATLVNAAHAAGRSKHTAVGARYRALVSRCGKKRGAVAIGHTILLIAYHVLRDHDPYDDLAQQPVPRRQVPNRDHLVQQLQALGFDVTIAPRAPAA

SEQ ID NO: 363861 - protein, 356 aa, unidentified
MQTQVTKKIDFSGKDLFIGLDVHKKSWSVTIVVNGIEHRTFTQPPDPIALHNYLQRNFPGGSYHSAYEAGFCGYDIHRQLNSEGIENIVINAADIPTTQKDKLQKRDPVDSRKIARGLEKGTIRGIHVFDREAEELRSLNRTRFYLMRDLRRSKNRIKSFLQYYGIPLPNELDNNQWSLKFVAWLKQVNMRTPAGQDAFSNLIASYEHYRQQLLILSRIVRLRISQHDKELYRLLTSISGIGPLTASALITELGDINRFPHIDHLGSYVGLVPRVRESGETVHTGGITFRCNTFLRTLLIEASWQAIRKDPALMQYYHSRLSGSKGHKVIIKVARKLLNRIRYVMKNRKPYMTCMA

SEQ ID NO: 363862 - protein, 320 aa, unidentified
MATASSEVFVGIDVSKRRLDVHVHPAGDALAFDNTPGGIAQLIERLKPMNVDRVVVEATGGYQRRVAIELTTAGIPVMTVNPRQARDFARSLGKLAKTDKIDAAVLAEFARVIRFRADPAADPTRDQLQERVGRRRQIVEMLVRETNRLHLAQDKVACKSLRVIIRALEKQRDELDARIAELIESDDDWKNKLELLKSVPGIGANTAQQLIANLPELGQVDRQQAAALAGLAPLNRDSGSMRGHRSIFGGRRAVRNALYMATVASIKWNSLIRPFYQRLKAAGKPSKVALVACMRKLLVVLNTLLRENRKWMEEPPAIRA

SEQ ID NO: 363863 - protein, 340 aa, unidentified
MSKESVSSHVTVYAGIDVSAATLAVAVQREDRAGFEQRQFANSAMGHKQLIGWLLKGGGIVRVSLEATGIYSLDVALALDLAENIEVAVLNPKIANRFAQTLRRSKTDAADAVALAEYSRRMQFVAWQRPGRIELELRAISRHIVTLTDEHTRLSNRLHAAEVSDTTPRCVRQDLKHSIDGLKKRIARLRKAALALVEQNETLAMKFKQLIGIPGIAEASALQLLGELAPLDPEMTARQWVAHSGLDPAQQVSGSSVHKPSRISRHGNRYLRRALYMPALVGVRFDPHLKTFYLHLQARHKTKLQALMAVARKLLHAIYGIFKSRTPYDGRKLFPQLDAA

SEQ ID NO: 363864 - protein, 325 aa, unidentified
MIDQDGQVLANRNVPNGAEPILKVIGGLPLGTPAAFEACYGTSWLVELLEDYGFAPHLVHPSRCKAIASARLKNDKVDAAILGQLLRADLLPEAWIAPPPVRALRALLRHRVYLVRLRTRLRNRIHAIVADYGYDRPAGGYWTGPGRAWLAALELAAVFRELVEDYLGLIDALQQRIDRLDWEIRQRARSDPRVTVLTQLPGVGPFTALVILAEVGDVSRFASARQLASWAGLTPTVRGSDRVAHYGHISKQGSVWLRWVLCEAAQTAKRSPQFAATFQRIATRRGKKIATTAIARKLLTHAWHLLTKTDQAAAPQPAAPQTAAR

SEQ ID NO: 363865 - protein, 387 aa, unidentified
MQVISNRHETSDAVRNDLGAIFVSMELSRSTWLITSLSPGGGEKMSKHTLPAGDIGALLARFSELGQKALTRTERSFPIIVIQEAGLDGFWIHRVLESEGIESHVVDPASIATSPRRRRAKTDKIDGEARLRALLAYKRGEPRVCAMVKTPGPEEEDRRRLCRERRVLTNERVLHVNRIKGLLFSQGAAGYEPLRRGRRQRLEELRTGDGRPLPPHLKAQISRELDRLELLLEQIKSVESERDALLAAQQTTPNPAAMLLAIKGVGPESAAILWSEGLCRHFDNRRQVASYAGLAPTPWQSGTIHREQGVSKAGNPRLRTTLIQLAWLWLRHQRQSVLAIWFKERVNRNGGRLKKTIIVALARKLLVALWRYVTAGVIIEGATMVSA

SEQ ID NO: 363866 - protein, 342 aa, unidentified
MTVVGTFVGIDVAKRQLDVMVRPSGQRWTVVNDAAGIAGLVDRLRSEASAALIVLEATGGYEIPVVAALSAAKLPIVVVNARQVRDFARALGTLAKTEAIDAGVLARFAEAVRPELRTLPDELTQTLQGWLGRRRQLLEMLLAEEQRLPMAGREIRPQIQHHVDWLRRQLHDVDEELRTAIRRSPVWREQEDLPRTVPGVGPVLATTLLADLPELDRLNRKQIAALVGVAPLNWDSGQQRGTRHIWGGRAAVRTALYMATLAAVRHNPVIAGFFERLCWAGKPKQVALTACMRKLLTILNAMMRRRTSGGENASLIVCSRRSLAVTRSCPAPLPVVLGVRAC

SEQ ID NO: 363867 - protein, 351 aa, unidentified
MRTSQKITGIVTTIGIDIGKNTFHLVGFDQRGAIILQQKVSRSQLERRVANIPRCLIGMEACSGSHHIGRQLAEIGHDVRLIPAQYVKPFLKGHKNDYRDAEAIAEAVQRPTMHFVTIKTPEQMDLLALHRVRSRLVGRRTGVINQIRGFLIERGITVRQGPMPLRKALSEILSSDTGALSPRMVGLIAELAQDWRRLDERIAAVSAEIEALAEQDDSCQRLMTVPGVGPIISSAVVAAIGNGTGFKQGRDFGAWLGLVPKQESTGDRTILGKISKRGNKYLRTLFVQAAHVVLERRPSAAMRGLWPWVEQASKRLHRNMLAIALANKLARIAWAVLARGGTYQPRITHAA

SEQ ID NO: 363868 - protein, 487 aa, unidentified
MAKQKRSTFERLSSGAMNRQQRRDLARRLAGNDPGLAIVHSNAGGIDVGNESHFVAVPPDRDANPVQEFGCWTADLKRMAAWLNACRIDTVAMQATGVYSIPLYDILTGHGIRVVLVNAQHTKNVPGRKSDVQECQWLMKLHTYGLLRDSFRLEEKMESVRTIWRLRDRHVKDASRSVQHMQKALTKMNIQLANVISDITGVSGQAIIAAILKGERDPWKLADLKHAMVKASRDEVARSLEGNWRDDLLFELRQAVDSYYFAHQQMRDCDQRLESFLASLPARTLERPSQSAETPTATTPPEKKARKKPKARRNEPTIDLKTELKRICGVDLTSIDGIDVLTAQTILSEVGADMSGFPTENHFASWLGLTPSKDFSGGKPIGTGKRKVQNRVAMALRMAATTLLNSKTYLGSRYRHLRKQLPSFASAIKAMARYLAVLVYRLLTHGEAWVDRGAAKFEQRRAERELASLNSKARARGLQLVPITPAS

SEQ ID NO: 363869 - protein, 417 aa, unidentified
MKIMYRRCAGLDIHQKSIAVCIRIVKGHCREPELHTAIFGTFSEDLERLRGWLRDHKVKQVAMESTGVYWIPIWNVLERKPTRFELMLLNPQHVRALPGCKTDMQDCERIAELLQYGLVRASFVPPVPIRELRDLTRARVHVQQDRNRVINRIHRLLESANIKLASVLSNIVGSTGRAILDGLAMEGLVRPEALAMLATHKRLKGKREEFRQALRCERSEHFRFLLSQLLGELDWLDAKLALLERHIGERMRPYEDLLGRLCRIPGVQILTAWAIIAEIGTDMTRFADAAHLASWAGLCPGNAESAGKRHSGRTRKGNSYLRRALCQSAWAASRKHDSFLSAVFLRVARRSGLKKAAIALAHRLLIIIFSMLRDGTEYQELGGDYFDRMHPERTAQRLIRRLDRLGFDIIANPRPAT

SEQ ID NO: 363870 - protein, 351 aa, unidentified
MTMVGGLDVHRQQITFDYVDDDGLVHWGQIRPATRQTLRGWLAEHCPDGDGEFALEGCTGWRYVSEELAAAGLGVHLGDPAETAALRGRKKRAKTDRADARLLRTLLVEGRFPESWIPPAHVLEIRTLGRLYCTLMDERRAWQQRIHAQLFHQGCPPIRALLSGAGREALADADLTPIGRQSVEVALGRIDELSVEIEPLRTQLVDFARRQAGCRALQAHYGIGWLSAAIMWAEIGDARRFTSSDQLVRYAGLDVTVYSSDTKRSPGHLSRQGSPELRWAAFEAAKCAARPGSPDYGYYRKLAAKRDGHNGKNPTLAVERKILRRCYHTLRELGDAALALPGTRPQQKVAA

SEQ ID NO: 363871 - protein, 340 aa, unidentified
MEKVSTIGLDVAKHVFQVHGVDAQGAVVVRRKLRRDDVVAFFTSLPACLIGIEACATSHHWARVLTALGHEVRLMPASYVKPYVKRQKNDASDAEAICEAVTRPTMRFVPTKSEEQQSVLMLHRVRELLIRQRTMLVNALRGHLAELGIITRQGATGLSMLVALVEDEGHDLIPPLARSALFLLVQQLREVHEKVGELDRQIHIWHRSHELSRRLETIPGIGPITASAIVATVTDASLFKSGRQLAAWLGLVPRQNSSGGKDRLGRISKQGDPYIRRLLVVGAHAVLRFCRKGKAAPTRWAAELLAKKPYNVVAVALANKMARIVWALMTTGKRFADSPA

SEQ ID NO: 363872 - protein, 368 aa, unidentified
MDSLKTVFGIDVSSRKSNVCIMVNGQKVNDYAISNDMVGFNQLLDDLKQVTNPQIIFEATGVYSRRLQAFLDMHDLRYVMMNPLEAKRKTKDDLHQNKTDKLDAMYLAKMQSEHPQRLAYVQSEEYQELMANNRIYEQASHDLITNKNRLHKAIQLTFPEIEHLLANPRGKNYWSIVLKFPHPNIVLETKEADIIDFLKSLSGIGEKRANDLAQRLIRLAKLAPKRDLEILKSIPGIAENTALRIISELGDIRRFNNPNQLNAFVGVDPQVYESGNLTAHLSISKRGTAIGRKVLYLAINQIQSAKKAGNPCHIADYYEKRKRSSETASHKKAAIASIHKLLRTIFALITNDQLYSYDIAKHNQRLLS

SEQ ID NO: 363873 - protein, 345 aa, unidentified
MPIVGGLDIHRKQITFDYLDTETGQVQRGQISPADREHLRAWLARFAGREDVAFAVEGCAGWRYVAEELAAAGIAAHLAEPADTAFARGRKRHAKTDRTDARHLRVLLAEGRLPECWIPPARILECRALLETYNDLRRERTAWAQRIHAVLFHQGAPALGEGALRTEKGVTALREVAAAHLSPAGQLQVATALEVIDALEARLHVVRHQLTDAARHLAGARALAARLYGVGPVTALALTCWLGGAGRFSSSRQAVRFAGLDITVHSSDRKGPPGRLSRQGPPVLRWAVYEAGKTHARTSAPDHRYYAQVKDRKNSKRACLSEARKILRQAHHILAELGDDALAAA

SEQ ID NO: 363874 - protein, 342 aa, unidentified
MKIIGCDFHPSFQQIAMVDTETGEETERKLTPEEAEQFYGQLEGEVVVGAEASGNMLWFERLLAGMGHRLRLGDAAQIQARELRKQKTDRRAAELILQLLLEGRFPEIWVPSLAERDARQLLIHRDKLVGMRRQVKNQLQHLCMNQGLQLKRRLWTQIGRKHLEELPLEGWTAKRREDGLRWLDQLDSNVAELDAAVARQAQQNAVARLLQTHPGVGPITSMAFVMTLGRIERFRGSRQVVSYLGLNPSEHSSGMRRRLGAISKQGNPMLRSLLVEAGQSAARFDTELKRAYQRLKQKKHSAVAKVMVARKLAVRLYWMWRTQQPYTATRMQGSPSHPVAKR

SEQ ID NO: 363875 - protein, 367 aa, unidentified
MNKVSIVGAKPNKKILRQRLTIGLDLGDRNSWYCMLDESGRIQREQRVRTNATALREVFGEMAQSRIALEIGTHSPWISRLLSELGHEVVVANARKVRLIGESRKKDDRLDAQTLARLARIDPQLLYPVKHRSAQAQADLTVIRARAGLVRARTALVNTVRGLAKSYGERLRGCNVRNMNPEKAEGLSPELQAALQPLLAALESLSEQIAEYNERIEHLALESYPQVGLLKQIKGVGTLIALTYMLTLEDPYRFRQSRDVGCYLGLQPGRRNSGQSEPQLHISKEGDPYLRTLLVQGAQHILGPFGVDCDLRRWGLKLAERGGRSGKKRAIVATARKLAVLLHRLWVSGEVYEPLHNSKQRALPAAA

SEQ ID NO: 363876 - protein, 387 aa, unidentified
MSQTVAALIPAAVDYERTLILAIEVSNKSWVLAAQVPGLPHTKAKRTIDPEAEALLAAVSGYRARAAATGRSIERVIAVYEAGWSGFWLARWLIRHGVEVYVIQPSSVPVDRRMRRAKSDGIDSELLLRTLLAWLRGEPRVCSMVPVPDEADEDARRCVRERTELISERVGLINRIGAVLATLGVSDYNPLLRNRGRRLAELRTALGEALPANAHAKIKRLLARLELVLRQIAELERERDAVVETEASDKASEMIQQLTALRGIGVQSATVLVREAFVRRFANGKALGSYAGLASSPYSSGGIDREQGIGKAGNRRVRTVMVELAWLWTRYQPGAAQVCWFRERVGSTGRRVRKIMVVALARKLLIALWRFVTDGVVPEGAVLKPAV

SEQ ID NO: 363877 - protein, 345 aa, unidentified
MDQISRVGMDTSKHVFQLHGVNAAEEVVLRRKLRRKEMVTFFEKLAPTVIAIEACGASHHWARLLHSFGHTVKLIPPQLVKPYVKRGKNDAADAEALCEAMSRPTMRFVPVKSPEQQAALMLTSVRDRLIRNRTQLANAIRGHAAEFGLTAAKGMAHLVPLLERIQVDESLPALARELFATQAKEYEQLQTQIGEVDAQLMARHRADECSRRLAKIPGVGPVGATLLRMKTPEPELFRSGRQFAAWIGLTPKDHSTAGKVRLGAVTRAGDEGLRSVLVVGATAVIQQAQRRGTASPWLAALLKRKSPKLAAVALANKTARIAWKLMLTGEDYSATPAPAAVAGAA

SEQ ID NO: 363878 - protein, 319 aa, unidentified
MSEPYNVGIDVSIDRLDVAIRPSGRAFCVTNDAAGWAELLARLPRGAIAAIGLEPSGGYEREVVRILLAAGFSVRRINPNKLRQFARAAGALAKNDRIDARLIADYITVMPTRVVERNPAIERLAETVTMRRQPCDEQIAVENQASHLEDALLQRIAKRRLIRIKADIVLLDKRLAELVAGQPDLVQRFRLLCSMPGVGATLAYTLLALPELGQIGRKQIAALVGLAPYAFDSGRFRGQRHIYGGRAAVRNTLYMPALAAFRFNPALRTFHHRLVAAGKKPKVAIVAVMRKMLTTLNAMLRDGNSWTDGYTSRHTVPAI

SEQ ID NO: 363879 - protein, 422 aa, unidentified
MVLKGVPMALKIVYQICCGIDVHKTFVVACIASTNKQGVTTYKRHRFSTFTQGLKELLQWLLDNHCKDVCMESTGKYWIPIYNVLEKDCNIVLAHPKYVKAIRGKKTDKKDAKWIADLFKHDLVAGSFMPPADIRQLRDLMRYRFKLTCFMSSEKNRLQNCLTVSNIQLASVVSDTFGKSSQRILDKILENPDDTSFDIEPLIHGSMKKKLPELELAIDGFITPEQAGKLKVIKKHFEDLESRKAELEKLILALASPYQQELDLILTAPSFKNKFTAIGIISEIGVNMEAFPSAKHLCSWAGLTPTNNESAGKKKSVRVSKAGCYIKPLLVQCANAVVKSSKHPEMRNRYLRLKKRRGHKKAIIAIARMLLTALYHMLKNGENYNAELYRKSDLPPVDREITVEQAILIARNQGYKIKSATA

SEQ ID NO: 363880 - protein, 409 aa, unidentified
MRYYLGVDWADPTHAVWVVDEGGTKVAMRTVPHTAEGLTEWGRELDEWRAQGIELWAAIERPEGRVVDFLLDHGVVVYAVNPKTLDRARDRFRQSAAKSDPFDARVLADFLRTDHAHLRAVQPSSEAAQELKLLTDDYQRQIRQQTRLVNQLTTTLKAYYPRGLEVAELTTGLAREFLQAYPTPATITALTERQWQRWAHAHRLSETRTQQLWVVLQRPQLPVPPHVVRAKARLMQSLVAQLMVVMEGVGAYREAIEDFFARIPAAQWIRTLPIGDHGITAPTLWARLGDAPGRWESFRHLQAQAGTVPVTIRSGKQQVVRFRFACDKSLRYIIDHVAFLSLRWSEWAHAYYAGQRARGHSYRQALRALSAKWLKIIFVMWERQIPYDEQYHLAMMTRQQLRQRQEKVA

SEQ ID NO: 363881 - protein, 351 aa, unidentified
MAAKKRSVIGGVDTHRDTHHAAIIDNTGGLLDDAEFPATAAGYADLLAWMRSFGRLTAIGVEGTGSYGAGLARHLTGQKVTVVEVDRPDRRTRRSKGKSDPIDAVAAARATLAGTAMGTPKTRTGPVEAIRALRVARQGAVKARTAAINQMRGLVAAAPEALRAQLTKLSTAVLINRCAALTIDPTRLADPEQATAAALAGLARRVTALADEITTLDRQLTPLVRQAAPHTSALFGVGTDVAAQLLTTAGDNPDRLRSEAALAHLCGAAPIPASSGRVRRHRLHRGGDRGANHALHTIALCRLRYDPRTRAYQQRRITQGLSKQEILRCLKRYIVRDVYTALRADFAALTP

SEQ ID NO: 363882 - protein, 343 aa, unidentified
MTMVTVGIDLAKNVYQVHTVDSHEKIVLKQKIKRNQLASFFANKPPCLIGMEACSGAHYWARLLQSQGHSVKLMAPQFVKPYVKTNKNDAADAEAICEAVTRPNIRFVSIKSPEQQSLLSVHRARMGLIKSQTAQINQIRGLLTEFGIVIPVGKIAVFKHIPLILEDADNNLPGTFRAVLAQLYQHLVELREHTETLEKILKEHYKQCALSKRIATLPGIGLLTATAIVGTIGDGSEFKNGRQLSSWLGLVPKQHSSGGRNVLLGISKRGDAYLRTLLIHGARAVIHARKNTLSDEGWLGSLIHRRNTNVAAVALANKNARILWAMLTRGEEYQANRDCNLYA

SEQ ID NO: 363883 - protein, 350 aa, unidentified
MVVVGVDVHKRTHTFVVVDQVGAKLGQRTWAATTAGHQQAVCWVREQFGAEVVWAVEDCRGLSGRLERDLLAAGQRVVRVPPPLMAEQRRTARAPGKSDPIDALAVARVALREPDLPVAAHDEVSREMKLLTDRRDDLVKQRMAMMSRFLGKLHEIEPGWSPPAGSMDRPTWQRKLADRLADVPGIVAELARDELADITRDTVTINALERRIAILVGPMAPTLLAMPGAGALTTAKILAETAGITRFKSEAAFARHAGIAPIPVWSGNTAGRVRLSRGGNRQLNAAIHRIALTQIRLHGPGKTYYEKKKTEGKTSREALRCLKRQILGVVYRHLLTDHKTATQTALRAAA

SEQ ID NO: 363884 - protein, 347 aa, unidentified
MKIIGCDFHPSFQQIAICDLETGEVQERKLSHAGGQAEQFYRELGEPALIGIEATGNSQWFLDLVQQLGHEIRVGDAAKIRASYVRKQSTDKRDAGHILKLLLEKRFPELWRPSAAMRDQRQLLRHRDKLVEIRTKVKNSLQHLAMNRGMQKKSRLWTRTGMEQFQQLAMPGWAGVRREDLLHLLQQLNGPIEQLDQAVKQAACQNPQAQLLMTQPGVGPVTALAFVLTIGDVARFAGSKQLTSYLGLVPSEHSSGSKRRLGAITKQGNCFLRKLLVEAAQTTVRKDEGFRKEYQHRCRRRPKAVAKVAAARKLAVRLYWMLRSNVGYPEIVHIESNPRVPLGDVSP

SEQ ID NO: 363885 - protein, 359 aa, unidentified
MDNNEDGTRHVVGGVDTHKDLHVAAVVDGQDRVLGTACFATTRQGYRQMLVWMRSFGDLRRIGIESTGSYGAGLLRFMQQAGIDVLEVTAPDKHDRRRRGKNDDLDAQNAAHAALAGRRTVTPRSRDGMVESLRVLTVCRKTAVTARRVAIQIIQTTIVSAPDGLRDTLRSMTRMQLVRTLAAWRPDLTAYREVEAAYRISLKSLARRYLELHDEIADLDAMISAIVDDLAPELIARNSIGYTSAAQLLLTAGDNPERLRSEASFAALCGVSPVPASSGKTIRHRLNRGGDRAANSALHIIAIGRIRTDSATKAYVARRTSGGHSKLDAIRALKRYIAREVFHIITRRHREINQTCIAA

SEQ ID NO: 363886 - protein, 363 aa, unidentified
MIVIGADTHKQTHTVAAVFAGSGQLAGELTAPAREPGFREFLAWGRSLDDERIWAIEDCRHVSGSLERFLIASGERVVRVPPKLMGQSRRGERSAGKSDPIDALAIARAALREGPETLPAAYLDEDAMQVKLLLGHREDLVKARSEDQCRLRWHLHDLWPELEIPAGALDRMVWLERVARKLSRAEQGARVAIARELVREIRRRTRRAAELEREIGALVKAQAPELLDLQGCGALTAAKLIAETAGAERLASDAKFARLAGVAPIPASSGKSVRHRLDRGGNRQLNCALHRIAVTQGRIHPPAREFLAKKQAEGKSRMEALRCLKRHLARRVWKLLVDSERGISMTTVDTQRGKLTPQIAVAA

SEQ ID NO: 363887 - protein, 391 aa, unidentified
MVCVGIDVAKDKHDCCILDSEGTTLVDCFTIPNNMDGFKSLLQTIQNCSQKSDKIKVGLEATGHYSYNILGFLLDNDLPVYVMNPLHTNLYRKSLSLRKTKTDRVDAKTIATMLLSDVDLKSYTDTAYHNEELKSLTRYRFDKVQERAKLKQSVSRLVTILFPELEQLVSSIHGTSIYALLREYPGAKQISEAHLTRLANILVKTSRGHYRKDKATHIRDAARTSIGSVMPAKSLELKHTIKLIQELTSEINEIEDAIRKIMDELKPPILSIPGMGFHSAAMILAEVGDFSNFNSPDKVLAYAGCSPSTYQSGKLTNCYAHMEKRGSRYLRYALYTATKYVCYWNPVFTEYLTKKQAEGKHYNVALSHATKKLVRLIYALQKSGKAYLAVT

SEQ ID NO: 363888 - protein, 370 aa, unidentified
MTNRITVGVDLGDQSHSICVLDADGNVIERKTLANTAAALRKYFEALPPALVAMEAGAHSAWVSQLLSGLNHNVVVGNPRKMAMIWNSYDKSDITDAEKLARMARFDLRLLHPIHHRGKAAHADLAIIKSRDMLVKSRSMMIAHARGLVKSVGQRISKCSTESFHTRLNDEMPEELRPALEPLVKIIEELTARIRHYNNLIDKKCREDYPETEALLAISGVGPVTALAFVLTLEDHKRFNNSREVGAFLGLVPRRDQSGNTDKQLRITKAGDSYLRRLLVGSAQYILGPFGPDCDLRRFGLKLAARGGMNGKRRAVVAVARRLAVMMHHLWKTGKTYDAFHRQMTGLLRGSLSHHTQQGLCAAFPEQHPA

SEQ ID NO: 363889 - protein, 343 aa, unidentified
MKLSYVGVDLAKNVFQLHGIDRHGQAVWRRRLRRKQWLKVLLQTVEPGCIIGMEACSSAHHWARQLQANGYDVRLVAPQFVKPFVKSNKNDRNDAEAICEAITRPHMRFVPLKTVEQQDIQAIHRVRCTLMSQRNAKANQIRGLVAEYGIVAPPQMLSLRRAIPDWLEDAENGLSTCFRALLHDLWMDLQHLQERLAELDRQIEQIAKDNPVTRRLQQLRGVGPMVATALVATVGDGSHFRKGRQMAAAIGLTPRQHSSGDKRRLLGISKRGDAYLRTLLIHGARAVVSQAKRRDDPLSLWVTSIAERSHTNVAAVALANKTVRIAWSMLRNESDYNPAVAVA

SEQ ID NO: 363890 - protein, 423 aa, unidentified
MKTITSPAQTNQPVAILAFDVSKKYLNMATGISGQLTDHEFRNSTPEIEKHLNRWTQRAHMAGYSEILVVCEPTGCYHISLLATAHRLGLKTAWVSGEAVFKMRAIETNDSGKTDLKDPHVIHTLASMGKTLICRHYDETYALLRQWHALYEQADIESVRTKCLLASQLKVLFPDYDFQKDFLYTRSGVALIELYGANPQQITKDGKDRFCQQMKQAVSRMRQRTLDRLFSQAQSSVKNQRGSRLVDIQQWRFRQLWDDCQRHQARKEEARQQMENLYQELCQFDPHLPQQQPGVISTFHLARIVAETGPVRDFETLRKFMRYAGLNLREKQSGTYRGKNKLSKKGRRLLRKVLGLIVLPLVKRTGLYGAYYHNKKAHGMSGTKAMTAVMRKFLKLFYGWYKSGGHFDRNRVFACESQYLSAA

SEQ ID NO: 363891 - protein, 392 aa, unidentified
MIISVGIDVSKDKHDCFIASSEGEVLADVFTIPNTLDGFNLLLQKIRDCTTLQDKIKVGLEATGHYSCNLLGFLLDNGLATYVLNPLRTNLYRKSLSLRKTKTDRVDARTIAAMLLSDAGLKPYTDTSYHNEELKSLTRYRFDKVKERAKLKSSIARLVCILFPELEKLVPSLHIASVYTLLEEFPGAKQIAAAHLTRLKALLETASKGHYKRDMALKVRGTARNSIGSWMPAKSLELQHTIRLIRELNREIDEIEEQIQSIMDELHSPITTIPGLGFRMAAMILAEVGDFTRFDSPDKLLAYAGMSPSTYQSGQLKNCYPHMEKRGSRYLRYALYNATKYVCHWNPAFADYLAKKRTEGKHYNVAISHAAKKLVRLIFAMEKSGQPYCSAA

SEQ ID NO: 363892 - protein, 418 aa, unidentified
MQTKLSQYTAVIGIDWADKKHDVCIQDMATGRRRASQVRHRAEDLDEWARSLHCRFGGLIAIAVELSKGPIINALQKYDFFVIFPIEPAGLASYRRTFTLSGAKDDPTDAEFALKLLLSHAEHFKPLQPQSVEMRTLMTLVEQRRQLMNDRVRTTNRLRNTLKQYYPQALEWFDRIDTPLFCDFVRRWPSLPQARRARRATLERFFREHNMNRKPLLERRIKAIKSAMPLTTDDAVIVPHRLRSLALVAQLEVTLECIKQYDAEIALLAPQHPDYELFDPLPGAGPVFTPRLMVAFGEQRERFNSAADVQKCGGIAPVTQRSGQSTWIHWRWQCSTFLRQTFVEWAAQTINKSYWAGLYYHQQRAKGCSHQAAVRALAFKWIRILYRCWKTHTPYDEARYLKALQERGSPLLKTAEAA

SEQ ID NO: 363893 - protein, 366 aa, unidentified
MDAIYIGVDFHARQQTICYLKTETGELVISALQHQDKEQVRAFYQQFQEPVIVGLEASGYSPWFEALLEQLGCEVWLGHATEIRRRARWRQKNDRRDAELIWDLMVHNEFPRLHRPAVASREVLRMLRYRQKLIKLRTMTKNSLQAIALQAGLAKGKQLFTAAGQEQFQAAEMSPVLQWQREHWFELLKPFNQQLLETMVWFKAQSKDDVNIRRLRTHPGIGLLTSLCLLHTLQPVSRFRNPRKVTAYAGFDPVERSSAERQHFLGISKAGSRMLRYLLVEAVHTAIRYDEDLKRFYKRLAERRGRPKAKVAAARKLLIRAYIMMRDEIDYAEFRRRAVAARLARTGQGPTNVPEVLIGQPASPGA

SEQ ID NO: 363894 - protein, 443 aa, unidentified
MSGKRRTHLRGRRGQAFADKIRGVPLDRILCVSLDVHKYFHMVMIHNALGEIVTPTFEIDIFRSGFDQLCQAIDEATSRTQAQVVLIGMEPSGHYFENLARQLDKQSRPVTLINSYAVKQNRDQQMMHHEKSDEIDTAAIGDLLRRGEGTPFQPVKGVYLQLQHLDRVRFSKVRIRTALQNQIIGHLDRIFPGLVIIADEAKERYKPLFATDFWSCKTMQHLIRVCPDPRQLVAMSPQDLVDAFHAQHYAMGRITAAKIIAYAKKTLLPDPEVIAIRCELLSHDLALLDAVERHIAQLEDRLRTLLFQTPYHIWTSVKGLSDVQVAALAAAIGDPANYACAAQVFRRSGLVSGRNDSGIRQRKGKGKRIIKVGDVHLRRALMNALYTLRLHQPVLRRYYHQLSQSKAAGVASVATARRANGILWATMRDQQARTLILKRGASM

SEQ ID NO: 363895 - protein, 344 aa, unidentified
MGEVSTIGLDIAKSVFQVHGVDADGAVVIRKRISRLKVLEFFAALPRCLVGIEACPSAHYWSRKLQALDHTVKLMPPSYVKAYLKRSKNDANDAAAICEAVTRPSMRFVPIKSEQQQSGLMLHRSRQLLVRQRTMLSNAIRGHMAELGIISAKGRNGTAELLAVIANADNDRIPAVARLSLDALARQYANTTAEIRAIEKHIHAWHRSCEESRRPEDVPGIGPIVATALVAEVGDWKAFSSGRNLAAWIGLVPKQHSTGGKYRLGGISKQGNRYLRWLLVTGAMAVIRYARQHGTKRLWLAHIMERRPIRVAAVALANKIARMAWAMMVRGERFKEPKLLPVAA

SEQ ID NO: 363896 - protein, 345 aa, unidentified
MQPMYYIGLDVHKRTISYCVKDSSGAIHAEGTIPATRFDLDRWMKTLPQPWSAAMEATVFTGWIYDHLRPHAAALKVAHPLMLRAIAAAKKKNDRIDAKKICDCLRCDFLPECYMASTAIRERRRTLRYRNLLVRQMVQMKNKIGMLLMEAGVSYNKQRLHKAGYFRELLATNQDIDEGLQSLLRLCRETVVRLQRTESALVRSLERDSLLVERVERLMTIPAVGPITALTWALEVGDVQRFSSIKKAISYCGLCGAEKSSGNTVQRTPLSKQRNKHLQTTLIEAAKMAPRNSSELAMLYDKEKQKGNANRATLAVARKLVAYLMAVDRGQRNFQVVETSNGIAA

SEQ ID NO: 363897 - protein, 411 aa, unidentified
MLYVGIDWADDHHDVCVTDDTAITLTQFQIAHSSEGFAALHAQITQHQADSSAVLVALETTRGLLVYDLLCQGYQVYAINPKAVNRYKDRHVLSAAKDDRLDALALAHLLRTDRHRFKPLAPPPAHYRLLDRLCLDLRKLIDEKTRLSNQITSCLKEYYPQAVGLFRDVASPISLAFLQAFPDPDTVRQTDRNAFAAFFRAQRYTHPQRVDALYERTHAPAPEADPVVIRAARVRLAVLVDQLTVVRTHQHTYEHTIQTILEEVPEAQPLATLPGIATRLVPELVAALGPHRPEEPQRFASASDLAKLSGCAPITRASGKRRTVLRRRACDKRLRRTFYDWAMASLSWSRWARAYYDYHKAQHHAHATILRGLGQKWAKIVYAVWSSGAPYDEARHIEQLKRHEVVWALSL

SEQ ID NO: 363898 - protein, 392 aa, unidentified
MVVSVGIDVSKDKHDCFIVSSEGEVLADAFIIPNTMDGFHHLLQRIRHCTAPQDKIKVGLEATGHYSYNLLGFLLDNGLTTYVLNPLRTNLYRKSLSLRKTKTDRVDARTIASMLLSDAGLKPYTNTAYHNEELKSLTRYRFDKVKERAKLKSSIARLVCILFPELEKLVPSLHIASVYALLEEFPGAKQVANTHLTRLKALLETASNGHYKRDMALEIRNAAKNSIGSQMPAKSLELQHTIRLIRELDREIDEIEEQIQSIMDELHSPITTIPGLGFRMAAMILAEVGDFTRFDSPDKLLAYAGMSPSTYQSGQLKNCYPHMEKRGSRYLRYALYNATKYVCHWDPAFADYLAKKRAEGKHYNIAISHAAKKLVRLIFAMEKSRQPYCSAA

SEQ ID NO: 363899 - protein, 350 aa, unidentified
MSIIGGLDVHRRQITYDWIDTDTGQTRQGRLAPASREHLRGWLERFAGQQASFALEGCTGWRYVVEELQLAGIAAHLAEPADTRALRGRKRHAKTDRADARHLRDLLLGGRLPESWIPPTHVLEARTQVRLYKALVDQRTAWQQRIHAVLFHHGVPAESDLLVAERRQRLTQGAGLTLPAHQAVLLALRMIDAIDAELDLLRTELAHLARRQPGCRALRELYGVGLITAVAIWAEFGDVRRFSSSRHAVRHTGLDVTVYASDDKRAPGHLARQGPAVLRWALFEAAQCAARAGAPDHAYYTQVKARLGGNRAALSVARKLARRAYHLLRGLGDDALAPVAGSHPSAAVVA

SEQ ID NO: 363900 - protein, 390 aa, unidentified
MSQSFDASKSLTAFEQDSTLVAVIEMSQSKWLVAAVVPGIARQPLKKLDADAGALLKLLQRWREEARKAGREVKRIVCAYEAGRDGFWLVRWLQARTIEAYVIHAASIAVSREHRRAKTDRIDTELLMRSFLGWLRGEKRHCSMVAIPTMVEEDARRPSRERESLVAEQTRTVNRVKAALALFGIGGFNPRLRKAAQKLETLRTVEGTPLPENVHAELRRDLERLRLVHDQIRTIESERLRRLAQAPAAATGPHAMVRLIAKVLGVGIETADMLVNEVLARNLRDRRAVARYAGLTGAPDESGKRRREKGLARAGNGRVRRGMIQLAWRFLIFQKDSRLVQWFRERTADGRSTTRKTMIVALARKLLIALWRLVTTGEMTEGLKLRPAGT

SEQ ID NO: 363901 - protein, 341 aa, unidentified
MQITTIGLDIAKNVFQVHGIDAAEKVIVRKQLRRGQIIAFFEALAPCLVGMEACATSHHWARELTKLGHEVRLMPAKDVKAYVKRNKNDAADAEAICEAVRRPTMRFVRIKSAEQQGQLMLHRARDLLMRQRTQLINALRAHLAEFGITAAQGREGIKELLAIVAQDEGSRLPVDAHASLTVLAAQLQAVQTMIGSIEKRIVAQHRSNEASKRLETIPGIGVVGATTITAVVTDPKAFRSGRDFAAWIGIVPRQDSTGGKQKLGPISKQGDQYLRRILIVGAHSVLRRARQQPEKYPWLTQLLARRPFKVVAVALANKMARIAWALLARGGTYRAPQLVAL

SEQ ID NO: 363902 - protein, 474 aa, unidentified
MDQGNNGLSRGDRNRNARLAALRAAVPRDHAILGIDLAQSRQAAVLADHDSRVIARWRPRCSPWQLGELLDRALCKARAAGFAGITVACEPTGHRWMVISQLTAERGMPMVCVQPLVTARAREAEDYTRGKSDDRDAVLIARLAAQLHCYLPESAGAAWARLRHLGARRSRLIEASTACTQQLRDLLEVAWPAVLLAAAGPLEPATWLACLSVALERGDGDLRAVHAMGHDRFTAAARGRLGAFGARRVCRRIAAAVYTALADPGGVAAQRPGALERAFSVLGDWITVRCELAEVSARMLQALDQLGIGDVAGSIPGVSALSVAAILAETGDPSRFATSRAMVKHAGLAPCENSSGNHSGQPGISRRGRPALRLAAWRAVWGALRHNPVYAARHGELTSRAKDPLTTEQARAAIAAAYPPGPRRHHPPRPLGRRHRRWPAPSRPGGDREGRITAAGAHLRPGAKLVFPSGETRF

SEQ ID NO: 363903 - protein, 389 aa, unidentified
MFYLNPKSMRNVCGLDVHKDNVFVCIDKENGEKIQFKTGILTKELDALRDTLVANDVTEIAMESTSVYWMPIWRILENDFKLYLVNPYAIKQLPGRKSDIKDAEWIATCLRKELIRGSYVPSSEIQQLRQYNRRIFDINKQSVYIQNKIDAALQRCNIRIGNYISNVRAKSYCEIVDMLSEGKTSPELLIVKVHKRTINKWGRDTILAALEGVVNKTDCRILKQLKEELDMLRRHKVECLVMLRDICMENYKEQILDIQTIPGIGEQGAMQIIAETGVDMKAFMTAAMLVGWAGLKPRNDESNGKFKSRSTTHGNKYLRKILIECAWGASRTQGCFFNKFSYHQTMVRKKNRQKVQVAIARKILVVIWNILEKGVVYSDVLEKDKTKDK

SEQ ID NO: 363904 - protein, 425 aa, unidentified
MNYKQNEKINQVKESTLVVGIDIGSTTQYARAFDWRGIELGKVFTFSNSREGFESFKAWMQHLQDKYRKSDVIVGIEPTGHYWFDLGAYLEDEGILLVMVNPYAVKQTKELDDNSQSKNDRKDPKVIAKLVTEGRYSAPYTPDGVYADLRIMVANRKRLIREMTQIKNRFARWFAIYFPEYTDVFGDYEAQSSMLLLKKVCTPEAIVELGAEKINQIWRDAKLRAVGMKRATTLCETAKRSIGLKKGSSAARYEMKLLLEDYEYKKAQLDAVMEEIEKLCRKIPESEQMLAIKGIGVITVAGFLAEVGDVRRFESPRQIQKLAGLSLRENSSGKHKGQTTISKRGRSNLRAVLFNAAIPLIAKNPEFKSLHEYYTTRANNPLKKKQSVIAISCKLIRVFYAILANGVTYDAQKMLSDIHRQPQAA

SEQ ID NO: 363905 - protein, 307 aa, unidentified
MRRFVGIDVAKAELVIHVLPEEQTWIQPNTAQERLALVKHLSGMNCERIVLEASGGYEAAVLRALRQAGLPAVRMCAHRPRALAKALGVKAKTDALDARLLAIAAQSIPATPTTVVPEHQQHLRELLDLRATLVGQRDAHRRRLEHITSAHVQEHCREAIALLQGKIQTLTRQIEQQAKACSSLPKVPGLGGILRATLAARLPELGTLPPRKLAALVGLAPFNHDSGCWQGQRRIKGGRADVRRVLYMATWASIRSGSPLAKTYARLTGAGKPAKVAIVACMHKFLRWLNAIARDQAPYAPPAIAGA

SEQ ID NO: 363906 - protein, 384 aa, unidentified
MKIQYYIGLDVHKETVAIAYIKSNSRGDAIYKATCGGSNAAVERALRKLAKELGVKLQELSICYEAGPTGFVLGRRLIQLGLECTLCSPSKTERKPGEKIKTDKRDAMKLAKLYKNGDITPVRIPPALDEAVRDVCRARTDAVDDLTRSKQRLNSFLLRLGMSYTGRSKWTPAHMRYLRDLTMPTDVQKIVLEAYITSIDLNESKVKELKASMLTILQDWEWKPVVDALMGCKGFQEVAAMTVISELGDLRRFDNPRKLMAFLGLVPSEHSSGGKRRQGGITKCGNSHARWMLIECSQHFRKSPQIGAALTTRQIGLTDEVKNLSWRMQNRLNKRYVKLKMRGKNENKCIVAIARELVAFIWELQNKCKLEMPAPSEARNMIEN

SEQ ID NO: 363907 - protein, 331 aa, unidentified
MNYSHFVGLDVGKKTFDASLMSADEKELSHKSFDNTSEGIQSLLDWIAGYHLSLSKLLFCAENMGSYVTELSVSSVSMGFSLALVCPLTIKKSIGLQRGKNDRIDAKRIANYAVLHYRKLELYKLPDKDLVRLRGWIIIRDNLVKQKVSSIKLLETFSQMAKLADVTESISFLEEQLKSIKERILEVEEDMEQLIAASTSLYTNYLLLRSIKGIGIINAIVLLCVTNNFQRFDNPRKFACYCGVAPFEHTSGISIRGKTQTSSLANKEVKVYLTRAAITAISWDPQMKAYYKRKIAEGKHKASVINAVRAKIIARSFAVIRRQTPFVTLAV

SEQ ID NO: 363908 - protein, 388 aa, unidentified
MYLIGIDISKYKHDCFIATESGVPIKAFSFENNRLGFDLFLKDLRFLDQSKEIRIGLESTGHYGSNLKQFITTSGYTYLEFNPYLTHMFSKALSLRKTKTDKVDAKTISSMLGSVDYKTLHTKFYHINELKQLVRYRHVQMMNRSKTLIELTNILDRTFPEFKPFFNERLAGSALFILKKFKSRTRISKFSTKDYESIRSYSKGKLSYVRVQKLKSLALSSVGYETQSDLLLLKHTIKHYEELSNTLDTIDEEILSIMKDIPQTLTTIPGVSVISAAIIIAELGDFKNFTNPSQIVSFSGLDTSVNQSGTMETRGHLVKRGSGLLRMTLWQITFSSLKLNPKLYDYYLKKRAEGKHHKVALVHCARKLIRTIYYLGVNQVPFDHSLFK

SEQ ID NO: 363909 - protein, 428 aa, unidentified
MKNRNIQKLEAITPGTLVVGVDIAKETQWARFVDYRGLELRKVLKFKNHKNGFDSILASIEAICKNRRLDDVIVGMEPTGHYWKPLANYLLKNKVNVVMVNPYHTKRAKELDDNSQTKSDKKDALTIARLVRDGRYYEVYMPQDIFAELRVLSNSRISLMKRSNALKNTITAVMDEYFPEIVTVFKKPLKGKAAMQILKSCPFPSLILELGIEGVLFEIKKAVKKTVGRKKAQQLVETAKNSVGVGYGLVSAKLKLGLMIEELELLIKQLEQLEKAMEKALADTGYGEIILGIPGIGVVTAASFLGEIGDPRRFDHPRQICKMAGYNLIEDSSGKNKSGTKISKRGRKNLRSVLYQMARTMVAVNAEMKELYQYLKTRPNNPLKKKQALVVISKKIVTIIYSLVKKQTGYQAELALGEFRKNQIKQVA

SEQ ID NO: 363910 - protein, 632 aa, unidentified
MKKKHSYQAASIQQVRVSELVGLVMAGCIVALDVAKTKWLVAIATAAGEVVKLFRFEHPVETTAFLKVVTELRGGVTGGKVDVVMEPTGTYGDAVRYQLVKSGAKVFMVSPKRTHDSKEIFDGVPSLHDAKSAVLIAKLHAMGLSKEWQTPREGHARLRALVDLRQREERREEECHGWLEASLARHWPELLRSAKLREQKCALHLLVAYPSPTAAAAAPEDVKNLLRKRSRGGLPEETMEEIVAGAQSALGVPMVPEQERCVEVWASQALDACQRQEALEAEMRAVGKGDVIYERLRVWMGTVTAAVLLTMCDPMQFASARQLEKAASLNMREKSSGEHSGRLSITKRGPGLVRQMLFLFALRTIHADATVRAWYERRRGYREASKISAVVAVMRKLLRAAFHVARGSAFDASKLFDERRLGITASSTTAMTGTGVETPSAGNHAMDVAETTAEATGVEAPAEASAATSVVAPSVSETRTLATETPAVTPAPIVASSVVTRAAREPERRAVEGAVRKRSERETPPSLDATSEARAAATNAIPTSGATASTAKSSVSNKAQDATPPIACALLSDAPSTGAPMPLAQIASAAKQVLAACAPEVSGTATATTSLKTAKATARQRTRSRGASRASP

SEQ ID NO: 363911 - protein, 378 aa, unidentified
MQVELPLHVRLIPQEIESAMRNAGIHADSLLEVRRMYNAVGIDVSKGKSTVAVLQPGGTVIRKTFDVSHTSQNLNELADYLSSLDGTTKIVMECTGRYHEPMVKALSEAGLFISIVNPHLIKNFGNNSLRKVKSDPADARKIARYTLDNWTELRQYSGMDNTRTQLKTLNSQFSFFMKQKVAAKANLIALLDNTYPGVNKLFDSPTREDGSEKWVDYAYSFWHADCVRKIGLKAFTERYMSFCKKHHYIFQQDRPEKLFNASKELVAVFPKEKTYKLLIQQSIQQLNLASEHVERFRREMNELASTLPEYSTVMGIYGVGKTYGPQLIAEIGDVSRFTHREALTAFAGVGPGVDESGQHKSKSNRASKVGSARHCFRS

SEQ ID NO: 363912 - protein, 506 aa, unidentified
MAQTAKAARQKEKESVSKRRSTPVTAESKAAKPKGKVKRGDRRRRTQKGEAIENRPVFEPNAAGVDSGAREVYGAVPPDRDKQPVRICETFTADLQELANWLTACGITTVAMESTGVYWIPVYEILEAHGIRACVGIARHMKNVPGRRTDWHACQWIQFLHAVGLLRAAFRPEPEVCALRAVIRHRGELVQMAAKHVQHMHKALTQMHLQIQHVITDLTGLTGWAIGDAILKGERNPSRLAQLRDPRVKASPETIEKSLVGHWQPEHLFTLKQSRRLYAEYQREIGECDAEIERLVGTFQPRVDPEVKPLPPDQKKRNRNYAKSRKRRARPQSSTREFDLRTEVYKLYGVDVTQIPGLEFLALQLFSELGRDMSRWASAACFVSWLALCPDNDISGGRVLWRTKRRVHNRAGQLFRMAAYALDRSPTPLGAYLRRMKAKLGPQAAHTATAHKIAVIFYAMIKNQTEYDETIWEQRDAQRHQRHMTGLKRQAQRLGYKLTPIEEEAA

SEQ ID NO: 363913 - protein, 444 aa, unidentified
MEQSTRFVGMDVHKDTIVVAVTATGEVGKATAYGTFPNTATALETLVKRLRQAGDGPIKFCYEAGPCGYGVHRTLTRMGEDCMVVAPSMIPRKSGERQKNDKRDASSLVVLHRGGLLTAAWVPNAAHEAMRDLIRARLAAVRAVRAARQQLSAFLLRHERIYPDGRSTWTKAHRRWLADQTFAQPAQQIVLEECIEAVRQGEQRRDRVDGYLRAQIPTWSLFPLVQNLCALRGLDMIAGAGLAAAIGDPSRFATAPHFMAYLGMVPSEHTSGPKRRIGAITKAGDVHARTLLIEAAHSYRYPARIGRHKLAAVDAVPEAVRAIAWKAQTRLCQRYRHMMARGKLKQVVVTAIARELAGFVWSIACITSDPAVSGNIVTELYDEGTAPYDEVTILSEEVAQQVQQLTPDMGRPRAPRHQSLKGTARPRRRTPANQAGSVERSRTG

SEQ ID NO: 363914 - protein, 456 aa, unidentified
MMLRDAIGIDPDSKGCQCALVKLGECQTQQRGYLATEEGMTGFIRWVKKQGDVIVAIEGSNGQSKPIEKALRSAEIVFYSFKPSDVDKFRKAVLGQNKNNKKDAESTARYAMALEAQGKLDNWKRVWNPDEELQGLTRSYAQKTKESTREINRLWKLLREASVDLYLALGGDHPDIDITENILQNEGIMALLAEKPDIFEWKTLSETDFLAVMGNFNYKGRKKLIEELQKVSRSFRPVSQALSLMIKNTTEQVILLKRQLKEIKKMIEKQTKDNKAVKTLEQHKGIGAMTASTLYAEIIDIRRFVKDDNLASYAGLCKLEYKTGKNAKEIPNFFFNRRLKNVFMTAARNYVLFNPDSHLAGYYRNNVKGGMKKTEARKRIARALVRVFFRDLYSLVELDNSDKLEDEKMGKENDMANGLSRSDKHHSNISFHSPIKNNTEEREKVKREKTEKLVME

SEQ ID NO: 363915 - protein, 396 aa, unidentified
MKTVSGLDVHKSTIFMCILKANGEIFQQEFSTLTPDIESMREIMKTQGVEELAMESTGIYWIPVWRILQGHFEMKLVNPYFIKQLPGRKTDVKDAHWIATVLQKGLIRGSYIPEKRIQELRQYERRYVRLCEQVTRIEQEIDRQLHRCNIQITNYVTKIGSVSVMKVVKAIIDGEDSDEVLEKLIHGRITGKHKEKIRASLKGIISKADRFILKQNYEEYQLLLTQQKECITEMDNLCDTYYKEELELLCTIPGIQKLSAMTIIAELGVNLKTFATAAMLTGWAGLRPRNDESAKKVKSRKITKGNKYLRRILVQSAWATTRMKGCWLKSKFEQLSIRCPRKKALVAISRKLLVITWNVLSKKEGYKEYQPVIDEKKRSKKIAYYEKQLLDLKSAI

SEQ ID NO: 363916 - protein, 329 aa, unidentified
MKITNIMGVDVSKHTLDCHLFVQQQSLSSVSNDSKGFKSISRWLHKELKNTEGLLVVMEYTGIYTYGIERYLEQQQIKFVKRPALDIKRSLGMVRGKSDKVDARFISKYGWMRREELQPMTPLSDAQLELQQIMNHRDKLVTDKASYQCKLHELVSQMGEKVNEKMVASMKYVIEVLTQEVKEAETAIKEAMCLDQSLQTNYELASSVTGIGFATAVHLLIATENFTRFSDVRKLICYCGVAPFEHSSGISIRGKTRVSHLANKKLKSLLTMAALSAIQHDPELKAKYDQKVKEGKPKMSVLNIIRAKLIERVYAVIKKQKVYEVKLAA

SEQ ID NO: 363917 - protein, 343 aa, unidentified
MQIRSVGIDLGKTTFHLVALGDNGKVLLKKKFTQRQLITFTANLQSSLIGLEACSGAHFLGRALREQGHDVKLIPAQFVKPFVKSNKNDFLDAEAIAEAVDRQNMRFVPIKTDDQLDLQALHRVRDRLITRRTSVINQLRAFLLERGLVFAKSPAKLRERMPEILENAEEDLTPRMRNLLALLWNEWKDIEQQVVDLNLEVELIASSDAACLRLRQIPGIGPLVATAIVASIGNGAAFHKGREFAAWMGLVPKQYSTGGKVKLSGISKRGNRYLRKILIHGARAVVLRCKRERVSMGAWMTALEMRAPRNVLIVATANKLARIAWAVLSSGQDYRAGQDPVPA

SEQ ID NO: 363918 - protein, 337 aa, unidentified
MQYFAGLDVSMEETHVCVVTRNGTVVYEAKVSSTPASIAAALARAPACRRVLFETGRMAPMLYHGLSRLGLPVVCVESRQAYQALKSLATHKTDRNDARGLAHLARTGFFKPVHVKSLPAHAIRALIIARKKLVGQRVTLENQIRGLALVFSVRLPRALSPAFIRQALQASEGIPGLSAAMRGLVAARAAVLAAVVAIDGDIRKMARASGACRRLMSIPGVGQLTALAFTAAVDDPGRFRRSRDIGAYLGLVPRRYQSGEVDYTGAISKCGDRGVRTLLYEAANVMLTRYKGQLKLKDWALAIAKRSTMRKARIALARRLAIIMHAMLRHGTEFKPA

SEQ ID NO: 363919 - protein, 398 aa, unidentified
MPTTNLQKTNDFAGQNFYLGLDVHKKSWAVTIRSLGIEVAHFTQPPGAEALSNYLKREFPGGIYHSAYEAGFCGTGTHEQLCKLGIKNILVHAADIPSTDKQKKNKTDLHDSRAIGGHLERNNLEGIHVLTQEQQELRSLFRLRESKVNDVTRSNNRLKSFLMYYSIRLPETISKNEFLSGKALTWLSMELGCAAGTFVLQQYIEDLKYQRQQLFHITKSLRVQVQALHEKTYKSLLSVPGIGAITAMGLITEVADFGRFDDPDEYCSYLGLCPWEDSSGDTIKTKGVQPRCNSHLRPLLVEASWAAIRKSRTLFAYYSKHTSKSGKKAIIKVARKLALIAKGVATKGQLYQDDYLKKKQQEQQNKKGLKAERFSSGITEQHINKQPDDRLQIAAMPG

SEQ ID NO: 363920 - protein, 337 aa, unidentified
MRRYLGVDLHRTQFTVCTRLENGRTYLRQWPVRELKLFVAQLRADDELAVEATGNTRLFYDAVMPHVAGVVVVNPCQFKVISQSVKKTDRNDAETLALYLAKGLLPEVRMKKRHQRELSHLAQTRDLLVKQRSALKTKINNLLAAEGINLKKEALSSNKALERVLALPLPPVLAAETRVLVAQIRNLSGSIAELERLIEAEGPKLPGHENLMSIKGIGPVSAAVLLSTVGNVKDFADPGKLAAYLGLVPRVQNSNETEHSGRITKQGNKLARTVLVQCALVAKRYSSYLQQFYQRIQRRRGGGKANIALARKFLGIIYHTLKNNWVFEDFPNFVLAS

SEQ ID NO: 363921 - protein, 423 aa, unidentified
MKNSTARKLRQVPKGYLVMGVDPHKKKHAAVAMTQDFTTHCKFKFNNSRGGFEMALERARAEMVRTGSRGLIFAIETGGHYWRNLAYFLDERGIPFHFINQFTLKRRREGKDLNRRKNDYRDSEVAAQLLCTGEFTDTKLQHGVYAELRAAYNAYRRLVKERTRITNLMKGLLDGIFPEFTQVFKDPCGLTALSVLSICPVPNIIAQMTEEEFVNAIRVKHQGRLMRKKLCALHYVARTSIGIEAGAQSVSSEISFLVEKLCLIRRQVRSIDETLARLVDETEEGKYLLSIIGLNYISVAGLLAELGSFRSYRSAKQLIKMAGSNPTESESGGKRSAHTPMSKKGRPVLRYCAWTAVIPMLRFNPDFRVWAKKLRERPVHANPLSGREIVGAALNKLLRLAFALVKKQTFYQVPQLEVAQVVI

SEQ ID NO: 363922 - protein, 392 aa, unidentified
MDDTASRVVIGMDPHKRSVTIEVMTKDESIVGTGRFATDRDGHAAMRRYVQAWPDRVWAIEGCQGIGRHVANRLLADGEQVVDIPPKLSARARVFATGQGRKTDATDAHSVALVGTRMSGLRPVVNDEQLAVLRILVDRRRSLGEEHTRKMSQVHHLLLELIPGGAKKDLSAAQAKKLLATVRPRDAAGKTRRRVAAELIADLERIYQRKRAANKELTALVAATGTTLMDLNGIGPSGAARLLVEVGDITRFPDKNHFGSWTGTAPIDASSGDNVRHRLSRGGNRQINRVLHIMATVQLRNPTEGRGYFDRSKARGKTSNESMRLLKRRLSDIVYRTMVNDAARHMATGPGGQRGDDSDSSVAGSHPHTNSSDKPLPGPATTETTTPLPVAS

SEQ ID NO: 363923 - protein, 340 aa, unidentified
MSKVSEAVRSAVFAGIDVSAATLAVAVQQEGRDGFRQKEFANSGSGHTQLIAWLLQCGDRVRVSLEATGTYSLDVALALDEAEGIEVAVLNPKTVNRFAQTLRRSKTDAADAAALAEYSRRMEFVAWQRPSRSGLELRTLSRHIQTLTEDHTRWGNRLHAAQASRTTPRCVLDDLKRGRAAIAKRILKLRKQAVARVAEDKDLARRFQQLNGIKGIGETSAVQLLGELAGLDPEMTVRQWVAHSGLDPVHQVSGSSVRKQSRISRHGNRHLRRALYIPALVGARHDPHMRAFYELLQTRHKTKLQALIAVARKLLHAIFGIFKTGTPYDGAKLFPVLKTA

SEQ ID NO: 363924 - protein, 390 aa, unidentified
MLRKNIVQTLDAATSWKVFGLDLAKHDLAVVAIPADGSEVQYVKRYSYADFLEFTAQIPSATMVFEPGNGANHFALRLQAQGHTPKMVSGASVKSWITLHMSGQKTDLNDAYALARLSEDPDLKTVRIKSVDQNRLQSLQAMRKQLVEQRTKTIVSIKGIFQCWGILFKKDSRSLKKFKEAANNNKELLGEEVVEAMILQIDRIANLDKDIKHVEELLKKVTMQDPRAQPMLDIPCVGLQTVSRLCTIMGDIKDFETPRSFVAFIGLVPKNMISGNKTTTPSGYEQVGQGKVNRRGDKMARSLIIQCASSMYMNFHKDNFPECALKDWIQKQKDAHKPYGKIMVSLAAKLLRIIYAVLKHGEAFSYEKAGISRLALAALKAAQPAEVGNA

SEQ ID NO: 363925 - protein, 371 aa, unidentified
MKSIIYIGMDVHKKTYSLCALLKETGEIIGETKIPADVSLIIKFIENAKKSVDSDDVQIKTGYEAGCLGYSLYWQLAEKGIECDILAPSTMHRSAKNKVVKNDRRDAKNIAANLANGTYKSVYVPTDEDEEIKEYIRMMHDFKIELKKVKQHINAFLLRFGHQYPGKSKWVPAHIKWLKELELSDMHREILDEYLSQLEILSEKIERFKHRLEELSQKETYNEKIGQLRCIKGIDTIAAMTMHAETSDFDRFPTANAFASYCGLTPGEDSSGESYHRLSITKQGNSMIRTTLIEAAQVLVRGTIGKKGKKVKSKQKDQDVKVIDYADKAVIRLQKKYHRMIFRGVKRNIAITAVARELACFVWGIETGHIS

SEQ ID NO: 363926 - protein, 346 aa, unidentified
MLIIGCDYHPSWQQICWLETTTGETGEQKLEHASGEAERFYRQLSGPALVGMESTGNCQWFVELLARLGHELWVGDALKIRAADVRQQKHDRRDAALILKLLLEERFPRIWIASGEEKDLRQLLIHRYKLVRIRAQVKNELQHLAMNQGITKKRKLWSKAGEKVLRELPFKPWTSRRREDLFRIREMLNGQIDLLDRAVEEAAEKNERAKLLMTQPGVGPITSMAFVLTMGDVARFQRGKQVASYLGLIPREYSSGGHQRFGSISKQGNRFLRMLLVEAAQVAVRCDPQMRNEYLHRCHRMAKGVAKVAAARKLAIRLYWMLRTNTGYPEVVRVESSSRVPLVSAS

SEQ ID NO: 363927 - protein, 478 aa, unidentified
MQDRRLVGIDLGITSAHTVRVLAGDGGLVCRRKAVPTVESLGEVEQAALAGAAAGTRLEVVVEPTGPAWLPIAVFFAARGHTVYRVSSAKAHDLRRFLRRHAKSNGIDADTLARLPLVDPAGLHPLQLPDAARAALDRRVRACDRLTRQAADHKRRIKGLVRQLLPASPLTGELGQADLAVLERWADPQALVAVGRARLQQVLASASAGQQGTQRAEQWLAAARAALELYGDHPAIAWQDLAAEVHSEVRLLRATQAELAAHAREREACYRRVDPAALARSLPGLATIGGPALVATMGKASRFATAGKFRCFTGLAPKASETGQTDRKGQPISKAGNRLLRTTLVRAADHARRQDPQLARIYWTQMVQRGKDHLGAVCVVAAHLAERAWTVMDRATPYVICDTDATPVTPAQAKQIIAERWTVPEEVRRRRRHKKGKAPQQVLQGHVHGAQGATRRPSPSSATLGQPPSRVKPTQPQP

SEQ ID NO: 363928 - protein, 344 aa, unidentified
MKHYVGLDVSLKETAICVVDENGVVIREGKALSEPEAIVAWLNESGLPIVKIGIEIGGLARWLYSELRAAGLHAVCIDPRRLRGVTKTMPIKTDRNDARAIAQVMRVGWYTVVHIKGDVSQELRMLLNNRKTLLIKQIDIENEIRGVLRVFGLKLSGRIPQATFEQQTNELTDGHPRLAAMLRPMLVARAALREQYGVLHKMVLEIVRREPTCQRLMTIPGVGALTAITFLTTIDDPDRFQRSRDVGAHLGLTPRKYASGETDRNGAISRCGDVMLSTILYQAALALLTRTKRWSALKAWGVRVAKRRGLRRAVVAVARKLAIVMHRIWGDGSEFRWTREEATA

SEQ ID NO: 363929 - protein, 429 aa, unidentified
MNNVDNIRLEQYRQIKKEIRGSSEYLIIGIDIAKSKHYAFFGTATGKTLLKRMIFENNLEGFNKLRAHEDSVKTRYGFQKTIYGLEATGNYHKPLGEHLIKCCRNVVLVPGVAVKNNRKMIYSRWDKNDTKDAAVIADLISQGKFAFYEYATMPLRDLRNLLSLKRRLKKQEHSHKVRIRNNLLAQYFPELDQYYSTWGKEGLAIVRWCLDPSIIYGLEYDEFTRRVAPDCRGGIPQQKRLKAVWETAIKSVGCAAGESLDVETKLMVEGLQYTRESIKYVEEKIKEICLNIPEYEYLLSIPGFGPDISSKVVAAIGHPFRFNNGRQVLKMAGMDLSASRSGENSDNATPKLSKSGKANLRYALYQAAMIASIKDVHFMRYYTEKLRGREKEKGIKTKMRVKLAAKMLIIAWTLMKKHEYFNPGYLRIE

SEQ ID NO: 363930 - protein, 358 aa, unidentified
MARNSLAGISLFVTGFEKHRFYVGVDVHKRSYHLAVRRADGRSISLVTPASPEYVVEFLRSLPIRIGSVAYESGPTGFTLARALQEEGIPVIVAAPSKIPRAVTPGAKCDRLDCLKLADYAAKGMLKPIAIPTVEEESRRTLLRRRHILVDSVRRCKQRIKGHLLFLGINEPKELTNWHSDVEEVLMGLSMDPASLMTMESYLRELTFHQGELHKVELQLKSLVKSKELAKRMTYLQSVPGVGPTVATTFAMELFRPDRFNRPEEVASYLGLAPVVRQSGNKSPSGRLVPVGQTRLRSLLIEAAWMWRSRDSYAENLYRRLLGKTGIAQKAIAAVARRLAIILWRLCIEQRMYRTVMA

SEQ ID NO: 363931 - protein, 318 aa, unidentified
MLIHYIDIAKRNFVIAVSSLSKTKTETNNPKGIAHTIEYLKKHKVALVVTESTGGLEIPAAKAIRRAGIAVIIANPRQTHQFAQSQPLTKTDAKDAKMPAFFAQMTAQKEDSQTMPYQPPTEAEEVLEALVNRRNQPADMRTAEKNRLHQVHETQVGSVKQLIAHFDRLIDESDKQIDDHTRTHFDGKAQVAEQIKGIGSITTATLMAMLPELGRLSHKRIASLAGIAPHPRESGETKFKSRCFGGRSAVRKALYMATVAATRFEPLIRDFYQRLPSEGKPYKVAVTACMRKLLTISNARMRDYFAENDTAENGIRTA

SEQ ID NO: 363932 - protein, 360 aa, unidentified
MIGTMTWAAMDVHARSTYAASLDVLTGELTRRRFDTGAVEPVVQWLAGLPAPVRACYEAGPTGFGLYRAAAGAGIDCQVIAPSKTPRPSGERNKSDRRDTDLLLRQLMAGALTPIAVPSATFEAARDLARAREQVRADLMRCRHRVSKLLLRHGRVYDRKAWTQAHRRWLATQSFGQVNTELAFIDNLAACDGLLARKDALDQRLARVAREPEFWPFVSRLRAFRGLDTLAALVIVLEVADFTRFARAVQLGSWLGLVPSRQQSGESDVHGQITKTGSKYARRILVEAAWHYARPPRIGRTLADRHDGVADHILQIAWRAQWRLHRIHKRMRARKKPANVITVACARELSCFLWAAATAP

SEQ ID NO: 363933 - protein, 370 aa, unidentified
MLDTTTFVGLDVHARSIKAVSLDVMTGEVRAATFGYDAGAVAEWVRSVDPRARCVYESGVTGFDLQKRLSGLGVDCVVGAVSKMIKPSADRRRKNDRNDAEFLARMLSVGNVVEVWVPDDECEAARDLTRALEDARDDLSRAKQRLSKFLLRHGLAFDERTPTGRRKGNWTRAHWSWIESIRFAEGADNDVLAYYVDAVRRAAEEKARLEGLVEAEARKPRWRRRVDSLRCLKGVDTASAADLVFEAGEFSRFRNARSFAAWVGLTPSEHSSGESDRRGAITKAGNKHLRKTLVEAAWHYLTCSGRPKDLAKGQAPDRGARRHAAKGVRRLVERRGTLLARGVHGNKANVATARELACWVWAVGLMAEEA

SEQ ID NO: 363934 - protein, 347 aa, unidentified
MRLYTKQHKAYCGIDLHARSMSVCILSQDGEVLLHRNMKTSPELFLKAIAPYREDVVVAVECILTWYWLADLCAREDIPFVLGPALYMKAIDGGKAKNDKIDAQKIAVLLRGGMLPRAYVYPADMRATRDLLRRRLHLVRKRAELLTHVQHTNRQYNFPEIDKDIAYKTNRPGVAERFADPAVPKSVEVDLALIDYDDQLVRDLESAIVKTAKQHDANTLYLLQTVPGMGKILSLVLRYEIHAIACFPRVQDCVSYCRLVKCAKESAGKRYGPTGTKIGNAYLKWAFSEAAVLLLRTNPGGQKYLARLENKQGKGKALTILAHKLARAIYDMLKRRVAFDLDALRQG

SEQ ID NO: 363935 - protein, 366 aa, unidentified
MSSLAHRGFTHLGMDVSKNSISVAVLEPDNDHAVIDRIFHDEPSVRRLINAFPDPAKLWTCYEAGPTAYDLHWLLTSMGVRCEVIAPSLVPKGRGDRIKTDKRDARRLAGLHRAGELVAIAVPAPAQEAVRDLCRTRGDMVEDLTRARNRLTKFMLRHSRVWRGGSNWTIKHQRWLATQHFEDRALAATYQHYRATVAIRDVALEAVEADLAPWCEGDPFGAQVRRLAAYRGVTHLGGLCLAAEVFDWRRFPRARPFMSFTGLVPSEHSTSDRAHRGDITKAGNSHLRAQLTEAAWSYQHRPSVGLYLRRRQEGLRPETVARAWSAQLRLTGRFRALAARKNVKSVVAAAVARELAGFLWAEMTAD

SEQ ID NO: 363936 - protein, 404 aa, unidentified
MYNAVGIDVSKGKSTVTVLQPGGTVIRKPFDVPHTSQSLNELAGYLGTLDGDTRIVMECTGRYHEPMLKALSEAGLFVSVVNPHLIKDFSNNSLRKVKSDPADARKIARYTLDNWPELRQYSGMDNTRTQLKTLNSQFSFFMKQKVAAKANLIALLDNTYPGVNKLFDSPAREDGSEKWVDYAYSFWHVDCVRKIGLKTFTERYKVFCKKHHYNFQPDKPEKLFTASKELVSVFPKEKTYKLLIQQSIQQLNLASEHVERLRKEMNTLAATLPEYSTVMGIYGVGKTYGPQLIAEIGDVSRFTHREALTAFAGVDPGVDESGQHKSKSNRASKVGSARLRKTLFQLMTTLLQNAPEDDPVYRFLDKKRSQGKPYYVYMTAGANKFLRIYYGKVKECLRNLEQEQ

SEQ ID NO: 363937 - protein, 358 aa, unidentified
MKISVALAEEGRQGEVRFLGDIDNTPDAIRRLVNKLTGKYQQLLFCYEAGPTGYGLHRQITAFGHECSVIAPSLIPRRPGEHVKTNRRDALTLARLHRAGELTAIWVPDPGHEAIRDLVRAREAAMEDLRAKRQHLQSFLLRHGRIYPGLRSWTLVHARWLSSLTFEHSAQYLVLREYRQAIEDAEARLERLTQQVADVVSTWSMAPVVEAYQAMRGVAFLTAVTFVAEIGDVRRFETPRQLMAYLGLVPSERSTGEQVRRGSITKAGNPRARRVLIEGAWTYRYPARLSRPLQVRQESLPKIVRAIAWKAQVRLCARYRRLMATGKRQSLVTTAIAREMAAFLWAIGHEVEPRRAVA

SEQ ID NO: 363938 - protein, 408 aa, unidentified
MNSLFVGIDVGSKNNVAYLMKPDGSKHSGFSVQNNLGGAKLLSEGIVSALKSMQLSDVVIGLEATSIYGDSLVYALREDGSLGRFQRKIHVLNPKQVRKFKEAYPDLPKNDWVDAFVIADHLRFGRIAKEVYVDDYRYQALRTLTRSRFDVIQNLTREKQRFANYLFLKCSGIAQAKDIQNTSATTIALMEHFESVDDLANADLNELTAFISKAGRGKFADPNATAKAVQAAARGSYRLPKTVNDTVNQAMAVSITSMRALKEQVKTLDNAIEQQFEIIPNTLTSIPGIGKVYSAGIIAEIGDVHRFDSQASVAKFAGLVWTQHQSSEFEAETTHLIKSGNRYLRYYLLEAANSVRRCDSEFQRYYDLKFHEVNRFQHKRALALTARKLVRLVFRLLKDNRLYIPLEG

SEQ ID NO: 363939 - protein, 338 aa, unidentified
MNYYGAADVHSNNTCLSIIDETGKKVFRKKILNFPKLIINELEPFKPELKGMVVESTFNWYWIVDAMMEAGYKIHLANPAAVKQYEGLKHTNDFDDAYHLANLLRLGILPEGYIYPKEQRAVRDLLRKRLMLVRHRTAHTLSFQSLYNRQTGFHLRGSDVQRFQDYKLKDISPLEHVQLAGQANILTMRFLASLINDIEKRVLRLMAPQPQFIKLKTITGIGDILGLTIALETGDITRFPKVGNYASYCRMVSSQHLSNDKKKGQGNRKNGNKYLCWAFIEAANFATRFCPHAKRFHQRKLAKTKNVVATKALAHKLARAAYYLMRDQVDYDPIKLFG

SEQ ID NO: 363940 - protein, 318 aa, unidentified
MTQISTVIGGIDIAKEKLDAAVHGMPGGFVVENLEAGWKQLAAFFKQAGVGKVGVEATGGYERGVVRYLQRAGFCVAVLQPNQVRAFAKMRLQHAKNDRIDARLIAACTHVLEARARAPRDARFDELADHLTFIEQIEADAVRIKTRLEHISDRRQRGIYERMIKSLEARAKAERALLMKRLAVHRDLVRRVELVSSIPGCGDKTALAIVIRMPELGQISREEVASLAGLAPFVHQSGKHQGKMHIGGGRELLRRALYKAVLPAASFWNPALVAFSQRLKSRGKGHPCAQIACARKLLIFANTVVRRDTPWEARIIAA

SEQ ID NO: 363941 - protein, 388 aa, unidentified
MKKHTKNETTKSKRETKKVAEVQQLQTGLAEREANTLVIGIDLGDRSSAYCVRTLGQQIVKEATVATTATAIEEAFRELRRQRFVIETGTHSRWVAQLLELMGHEVIVANARKLKLISENNQKSDKVDARLQSKLGCMDVDWLHPVYQRSQEAHCDLLQARARQALVDARTALINHVRGSVKSLGSRVVKCASERFVEVARGALPEALRPALSGVLAALEEINEQIYGYDCQIEHLCNTKYKESAKCLLQVNGVGPVTTLTYVLTIENKDRFEHSRGVGPYLGLVPKKRQSGQRDPQLGISKAGDEMLRKLLVNCAHHILGVNGEDSDLRRWGLELVRAVERKGKKGARKLAAAAVARKLAVLLHRLWVTGAKYEPLRNRGAQQAPAA

SEQ ID NO: 363942 - protein, 444 aa, unidentified
MARKNQKKRFEIIHRDCAGIDVGSREHFAAVDPERCDSPVRKFSTFTDDLIALADWLTSLGIKVVAMEATGVYWIPLFEVLDARGFEVYLVNSRATRQTSGRKSDVLDCQWIWQLMTHGLLSGAFRPSDEICSMRSLVRQRANKVCDQAKSINRMQKALSQMNIHLANVISDITGVTGMKILQAINQGERDPQVLAALRDRRIKADQATIARSLHGNWRAEHLHALGQELACYDFLETQIADCDQAIAQALGRLPTRQEEVPVASKVLRSPHRSAAEQSALHQALGQVMGVDLTAIPTIGVDTALVLASELGPDLSRFPTSQHFCSWLGVAPPTRISGGKALPGRAPKVINRAAQALKQAASNARNDKSFIGASHRARLTRMDTGCAIKATAHQLARLIYAMLTKGQPYVEKGIEAHEEKSRDRQLRALERKARKLGMQLVMVG

SEQ ID NO: 363943 - protein, 317 aa, unidentified
MEQNQSNTKIAGIDVGKRFLDVAAHGLEDETQVENGPEGHAALIAWLRARRVGRVGLEATGGYERKVRAALEAAGFEVVVHQPLEVRLFARLKRLRAKNDRIDARLIAQATAQAETVRAAQDPRLAELAERLTAYEQVADQIAGLKTFLEHVTLKDVLRSLKVQLASLERLKARLLAQVLQALKAHEDLAARFRLLLSIPGFGPVVAASLAIRMPELGQMRRGQAAALAGVAPFDRDSGQWKGLRFITGGRARVRRMLYLASLAAKRYDPGFKAFHQALLARGKPIKLAIVAVMRKLIEAANLILHRGQPWVKTQPA

SEQ ID NO: 363944 - protein, 384 aa, unidentified
MLDEKIGEVNFENKPSKFPAFVEEIRKICGTKDFVFGLEDTSGFGRNLASYLTGRKFEVKHVNPAYTSAIRLSNPIIYKDDSYDAYCVARVLRDMVDTLQDAKHEDIYWAIRQLVKRREIIVKYNVMNKNQLHSQLSYSYPSYKKFFSQIDGKSALCFWENYPSPEHIWSTTPEQIYETIKAVHQAFKIERVHAIIDMIKKDGNTQKGYQEERDTIVRNIVKDIKNNQEILKDIEKQLRKLLPQTGYKLQTMPGIDLITEAKIVSEIGDINRFPNSDKLARFMGLAPVHFSSAGKGKDERCRNGNRELNAIFHFLAIQMVAVSPSGKPRHPVFREYFEQKVKEGKNKPQALICISRTLVRLIYGMMKTKTEYRPYEKKEEEGNN

SEQ ID NO: 363945 - protein, 368 aa, unidentified
MKKNIRISKSSTRSTTIRKSDQVTIGMDLGDKTSRYCALNAAGEVVVEASCATTKKGMAQLFGSMAHCRIAVEVGTHSPWVSRELKKFGHEVIVANARQVKLISQSSRKNDKLDAQMLARLARMDPGLLRPIRHRSEEAQKDLLTIRIRAALVESRTGLVNAARGLTKATGERLASCDADQMDMGKLEELPADLRESLKPLVEEVESLTEKIKECDRKIEQIARDRYPETKLLRQVSGVGPLIALTYILTIEDKERFEKSRDVGCYVGLRPKQSESGERQPELRITKEGDVYLRRLLVQGAHCIMGSRAPDTDLKRWGAKLAGRGGKNARKRAIVAVARKLAILLHHLWATGEVYEPLKNSQAMAKAA

SEQ ID NO: 363946 - protein, 337 aa, unidentified
MDFAYYVGWDVSKASLNFCIRDPQQSEPVQEGQVANTPTAIGKLLRQWSKRWETDLAAFAHCVENTGRYTYPLLGLVEPLGLHLWMEDPLQLKRSMGRQKRKTDAVDARNIAEYCRWKHERATWYTPPSALSLHLRELSHSRTKLVRMRQSLHTSHRAKEAFALVPPNAVGQRLNCQLIEAIDQQLAALDLEILRLIEADERARRKLEIARSVPGIGPKNVVVILAITGLFERIASARACAAYAGLVPYEFQSGTSIHRRSRVSRAVSKPLKTALHQGAQFLIMRPSPFKELYDRLRAKGRTYRQAINAVRNKMIRVLYTCLKKDVTYDKKVHAGLA

SEQ ID NO: 363947 - protein, 374 aa, unidentified
MVNHSEAFVAFDTSKLRNSVAIAEAGRGGDVRFFGEIDNTPAATEKLVRKLTVQYGRLTFCYEAGPTGYGLYRQITALGHACVVVAPSLIPKKSGARVKTNRRDALNLAKLLRAGELTAVWVPDARHEAMRDLVRARTAAVDDLKSKRQQILSQLLRLGRHYPGKKTWTRAHMIWLVSQKLAHREQRIAFEEMLLAARQAQERVVRLDQAIVAAVPDWSLAKAVTALMALRGLDLVAATILLAEIGDLSRFAGARELMAYLGLVPSESSTGEQIHRGGITKAGNHRARRILVECSWSYRHPPRVGKKKLDKIAAAPPDVQDIAWKAQARLTARYRALTRRGNRPTVVVTAIARELAGFIWAVGRAVGTPTAPAM

SEQ ID NO: 363948 - protein, 341 aa, unidentified
MKNLFIGVDFSKEKVDVAIIFADGLTETAPRVFNEFKTTVSGYKQLVKWVEQNSYGIDSSLWLFCGENTGDYSKGLCNFLYGKGYDMWLENAKSIKDASGLRRLKSDRADASMIAEYAMRNYDKAIMYEPLSESLAQLRELFLYRQMVVRHRCSFQVRRGEKRLTMEKSPIKTMISQSGRHIVSELNKEVEKIDKRIAELIKSDEELTEVFTIVTSVPGIGTQNAVCLMVYTDNFRRFNYDSRKVACYYGIAPFGKDSGTSVHSDPHVHYMANRQIKAMLTQAALAAVNFNPIMARYYMRLVERGKKKQVALNNVKNKLVHLITAMVRNRQLFTTEYKITA

SEQ ID NO: 363949 - protein, 337 aa, unidentified
MERQYVGIDLHRRRSVIVRRDSAGVTHSTVRVDNHDIATILREVRAAGPEPDVIVEATYGWYWLADLLAAEGAKVHLAHPLGNNWGTRRVKNDERDATDLVDLFQLGRLVESYIAPPELREQRELVRYRHKLVSFRSSCKAQIHSVLAKEGVAVPMTDLFGVAGTTLLDTVELGSGFAIRVESLRDLIELLDREVTMLDREIHKGMLSDPRYRAVQMLPGVGPVTAAILLAEIGDVTRFSSGDKLCSWAGLTPTHRESDTTVHRGSITKQGSRLVRWAMIEAVQRCGDSSPLVGTAKSRVAERRGRKIAKVAAARRLLTFVFYALRDGELRCLERAG

SEQ ID NO: 363950 - protein, 361 aa, unidentified
MHLTANISIPQKNFIAIDLHSDNAVICVRRNALNKAGELVGKNIWCGRVSIRDGLDNFIKVLVPHCQDFDHVALVESTYNWYCLADAFEERGWLLRVADPSTVSQANLKSSDDRTDAQYLAERLRVGSLKHYLPLNYSSRALRDLCRYRMAMVQDCASLKIKLINLYRNQLSKNVRVADLLERCQPHMQPNYRFNSDILEEFKDPNIRLRVAFEISRIAMLEEMIEECNAEIQKQCKDQELVKLCKTIPVCGPVLSAVICTEIGTMQRFKSAGDFVSYCRLCSTSKLSNGKSKGLGNAKNGNAYLSWAFTEVAQYASRNPVIREILQRLLRKYGGLRVKAKLRNPPCLVHAYVPNCQTVQA

SEQ ID NO: 363951 - protein, 352 aa, unidentified
MEVYYGVDFHPHQQTICWLDDGTGELKTRTIFHKNREELAGFYREMPKGTVGIEATGKADWFEELMFENGHRLLVGNSGLIRKRAESRHKSDTRDAENILTLLMRQEFPALWRRSRESVAILEMIRLRSGLVRQRTQVYNRLQALAHDFGLPKGRMGTQAYRETLEAVPADPRKALRREILLRTAEQLSGNIHEIERRLEEEGGTDPRVALLRTQAGVGILTALCLIHTLGEVARFSSSRQVVAFAGLCPLEKSSGARVSFGGISRAGSPLLRYMLGQAANAAARRDERLRAFYRRLARKKTRRVAKTAVTRKLLVKLSVMLRENITAREFDMRGSTAGDTRGETRSEMTVA

SEQ ID NO: 363952 - protein, 356 aa, unidentified
MNKISKLDFEGQQIYLGMDVHKKSWSISVLTDEFEHKTFTQPPEVSTLVNYLKRNFPGASYKSVYEAGYCGFWIHDCLQEHGVQCLVVNPADVPTKDKERRKKTDRVDCRKLAKSLRSGEIEGIYVPCRPKVEDRTLIRTRHSMVKKQTRCKNQIKSILQFYGIQIPEELADSHWSKRFITWIEAMRMERASGNFALKAYLEELNNMRKIIAELTRGIRSLANAEEYRQNVCLLKSVPGISILTAMTILTELYEISRFRNLDKLCSYVGLIPDTHSSGETDRDMGITKRRNAQLRGILIESAWVAVRKDPALLMTFNTLCKKMPKNNAIVRIARKLLSRIRYVLKNQQKYASAIVQ

SEQ ID NO: 363953 - protein, 403 aa, unidentified
MFYCGIDIAKYRHEATVIDQAGAAVQESISFANSKEGCEKLLALFQRLDISKEGLLIGMEATGHYWLSVYGYLLEQGFEVKVINPIQSEAFRKMYIRQTKNDRKDSFIIAQIMRFGQFSATNLAEEGIVAMRQLSRYRLALVDTCGDCKRRVIALLDQVFPEYDSLFSDTFGVTSKEVLSQYPTPEGMLTVSIRKLTTLLEKASHGRFGKEKAEQLKAAAASSFGVNFAKDAFAFQIRQLIEQLEFLERQVAELEEQIFSLLKQTGSYITTIPGIGDTLGAIILSEIGDIHRFDAPNKLVAFAGLDVRVTQSGEFTGTRQKISKRGSPYLRRAIWLAASRAAFCDPILSEYYQGLRARGKHHLTAVGAVSRKLCNTIYTILKEDRPWQPIPPKGKKVSTYTEE

SEQ ID NO: 363954 - protein, 361 aa, unidentified
MSSIAQQASVRNVAIGIDTHKHIHVAVALDELGGRLGELTVATDRGGADRLERWAASQGRILAFGIEGTASYGAGLTGHLRRQGYRVIEVNRPDRRDRRMNGKSDALDAENAARAILSGRATATPKAADGAVEMLRQIKIAKDTAVKARSQAMVALKTLVVTAPPQLREELEGLPKVALIQRCAGLRPGPMTSPLAATKHALRGLARRWQQLQVEIKEHERHLTTLTESVAPAMVAAFGIGPDTAAEMLIVAGDNVDRIHSEPAWAKLCGVCPVPASSGKTSRYRLDRGGHRQANSALYRTVIVRMRLHQPTIDYVTRRTAEGKTKAEIIRCLKRYVAREVWAYLRLRPAHHSVSLPEPSA

SEQ ID NO: 363955 - protein, 356 aa, unidentified
MKQVKTLSFAGQDIYCGIDVHKKDWSICIRDNERELRCFSQPPQPAILADHLKRNYPQANFQAVYEAGFCGYWIQQALSQQGVSCIITHAADVPTTDKDRRQKTDRVDCRKLAQALKEGSIKAIYIPSQQIIEDRSLVRGREQLVQDQTRYKNRILSWLHFFGITIPEGYKKSTHFRKRFISWLEQLPINENAKFSLQAKLGALQGIRNQLLLVNRSLRKLAQSEKYQKKIELLRSIPGIGITNAMIFLTELDDISRFKTFDQLSSYAGLKPDIYSSSDTTIIKGITHRCNLLLRESLVESAWKAVAKDPALLMAYKKYKNRMHYNKAIIRITKKLLRRICYVLLHQIPYVTGIVG

SEQ ID NO: 363956 - protein, 417 aa, unidentified
MAREIKSTQTQDELYYERCCGIDVHKKMIVACFRNGRKQTVKEFGTQSKELRELAAWLLEGQCEMAAMESTGSYWKPVYNILELLGVEIIVVNAQHLKTVPGRKTDVGDAEWIAKQLSAGNLKASYVPDREQRELREVTRYRKSLTEERAREINRLGKMLEGANIKLSSVVSDVLGKNARRLLMKYSEGVDITQETIGSYLDSCMVGKAGALAEAMDGMMSGTQRKLVKAVLNHIDDMTRRIADLSKIIEDEMSRYDNAIKRMDRMDGIGEQSAQVILAEIGLDMNRFPTAGHLAKWSGLCPGNNESAGKRKSGRASQGNATLKATMVQCAQAAVLKKGTFLRAQYDRLVVRRGKNRAKVAVAHSMIVAIWHMLKYDTEYKDLGGDYYNRFNKEKKISMHLKKLAELGWSPPVQATA

SEQ ID NO: 363957 - protein, 340 aa, unidentified
MDIRTLGIDLAKNVFRVHGVDAKGRTVVARQLRRRQLLPFMVQLQPCLVGMEACGGAHHWARAIAKLGHEVKLMSPRFVRPYVKSNKNDAKDAEAICEAVGRPSMRFVAVKSQTQQEVLALHRVRSLLIRERTALMNQIRGLLAECGIVVAQGAARLRRAVAEILGDHNESVGEIARDALAEMSERLRSFEQRLERYDQRVEKLARDDKRAGHLMKVPGVGPLTATALIATVGHARQFKNGRELSAWLGLVPREHSSGERTMLLGISKRGDRYLRTLLIHGARSALRHASNKCDRRSLWLIALRERRGPNIAAVALANKNARVLWALLTRGEEYRIPVAA

SEQ ID NO: 363958 - protein, 344 aa, unidentified
MDHFAGLDVSVKETSVCIVDDTGKIVREVKVASEPEALLAVLKNPVYHFRRIGLEAGPLSQWLYSALAEAELPVVCVETRHMQALLKAQISTRRSNDARGMAQMMRVGLYRPVHVKTLRSQKLRMLLTHRKLLQSKAIAIENDLRGTLRNFGLKVGMAGTVKFETRIKELVGNSPELAALVEPLLVVRRVLREQLVILHRRLLAIVRDDEVCQRLMTTPGVGPVVALTYRATVDVPARFRKSKSVGAVFGLTCSKYQSGEIDRSGRISRCGDEMMRVMLYEAAQSMLYSKKWSWLKAWAMQIARRRGMKKAIVALARRLAVIMHRIWVDGTEFRWTRGQTAAAA

SEQ ID NO: 363959 - protein, 410 aa, unidentified
MRYHIGVDWADQEHAVWVEDEQGQRVSAGNKVPHSAAGFSDWGQELNAWRAQGITLWAAIERPEGRVVDFLLDHGVRVYPVNPKALDRARDRFRQSGAKDDLFDARVLAGFLRTDHGHLTALEPSSEAAQELKLLTEDCHRQLREQTRLMNQLTATLKEYYPRALEVAELTTALLREFLQAYPTPESLTALTERQWQRWARAHRLSAARTTELWTALKPPPLPVPAHVVRAKSRLMQALVAELAVVVQMVARYRQAVDDFFAGMPAATWARTLPVGEHGITVPTLWARLGDAPSRWDSAEHLQAQAGMVPVTVRSGKQLVVLFRFACDKQLRYAVDQLAWLSLSRSDWARAYYDQQRERGHRHRRALRALGAKWLKIIFVMWRRQIPYDEEHHLATMARQALRRPEKKIA

SEQ ID NO: 363960 - protein, 310 aa, unidentified
MERIFVGLDVAKDRLDVHVRPTDEQFAVAYEEAGVATLVHRLVGLQPTLIVLEATGGYESAVAAALAHAGLPVAVVNPRQVRQFALATGQLAKTDRLDARANARFAELVQPTARPLATEQAQELGELVARRRQLVDMLGAEQNRHRQARARGLQQRIRTHVTWLTRAIAEVDEEITRLIRASSVWRETENLLTSTPGIGDITAHALIADLPELGQLDRRRIAALVGVAPWNRDSGRWRGRRMIGGGRPAVRRALYMPTIVAIHHNPVIREVYRRLTAAGRPKKVAVIAAMRKLLTILNAMLRDRRPWQPA

SEQ ID NO: 363961 - protein, 346 aa, unidentified
MEHYVGLDVSLKLTAICIVDRTGTIQREGVVHSDPEAIAAFIKSNAPHVARIGLETGATSTWLWTELNKMGLPVICIDARHAKAVLKMQINKSDRNDAVGIARIMQCGWYKEVRVKDLDSHAVKALLVSRALLVKIKRDIENQVRGLLKNLGLVIGPAKMNAFALRAAELTEDRPELAAAVAPLLNARAAIELQIADLDRKVMKLARSNAQVRQFMTAPGIGPVTALCFLATIDDPGRFKRSRSVGAYVGLTTRRYASGEIDWTGRISKCGGKMLRSYLYEAANVLLTRVAKWSALKAWGIRLANRSGLRKAKVAVARKLAVILHRMWIDGTEFKWSSKEAAQQPA

SEQ ID NO: 363962 - protein, 395 aa, unidentified
MNKTVHYLGLDVHKETIAVSIAPQDAKEVRRYGIINGSLDAVDKLVKKLALPGLELRVVYEAGPCGFVLCRHLRAKGIACEVVAPSLIPKKASDKVKTDRRDADQLARLHRAGELTPIHVPDQEDEAVRDLIRARHRAMDDLRKARHRLKGFLLRLGFRYTGKSSWNDAHKRYLAGLVMPQPPQQIAFQEYLHAIDDAGARLERLNQAVLDALPNWKWAPVVRALMCLRGVQELTGMTLVAEVGDFSRFDDPRSLMHFLGLTPSEHSSGGARTQGGITKGGNAHCRRVLTEAAWQYRLNPKVSEAMQQRQQGQSKAVRLIAWKAQQRLNKRFKQLSAKKKRVVAATAVARELVGFVWAIACRVKPADQPAVPEMVRTGRGKVYHLDANKKMPKTK

SEQ ID NO: 363963 - protein, 317 aa, unidentified
MAKDCGVGIDIAKATLDVALSTASGQPWQTTNDEAGWAAVVAYVAPLPPRVIVLEATGGYETGIATALTAAGLPVAIVNPRQVRDVARALGSLEKTDRLDAAVLAAFAARIQPTPRPLADDLQADLHARVTRRRQLVERCTAERNRLPLARGAVRKNLLAHIAWLEKQVSQTDRDLRRRIEASPIWRGRDQRLQSVPGVGPTTSACLLAYLPELGTLTHRQISKLVGVAPLPDDSGPRSGYRRVQGGRSDVRSALYRATVTAITHNPTIRAAYRRWRAAGKLPKVAIVAAMHKLLIHLNALLKHQTDWHARPVAPTA

SEQ ID NO: 363964 - protein, 357 aa, unidentified
MYYNTIYIGMDVHKNSFTLCAYTIESVLKYLEFLRTIYGNDTKFLCGYEAGCLGYTLYHQLSARNVDCVILAPTTMLEQRSRKRIKTDRRDAEIIAKCLAQHNYSPVHIPTATDEETKEFIRMRDDHKLALKKVKQQILAFCLRRGYRYDGNSHWTASHMKWLKALNPEALYKEILEEYLLTYTILSDKLERLDRRIEELASREEYRESVKKLCCFIGVKTHTALSVLVETGDFNRFASAQTFASYLGLVPGEDSSGDDKTQLGITKAGNRHVRMLLTEAAQCYARGQIGYKSKALKSRQSGNSLQVIAYADKANERLRRRYYKMVLAKGKKHNVAKTAIARELACFMWGMMTDHVS

SEQ ID NO: 363965 - protein, 359 aa, unidentified
MTSIAPDAHHRKIVVGVDTHKYAHVAVALDALGVRVGERHVPANREGYARLEAWAASLGRVTAFGVEGTGSYGAGVASFLRRNGHRIIEVNRGDRRSRRNNGKTDTLDAEAAARAVLSGEAAAVPKSADGTVEMIRQLKIARDTARKGRTSAIVTLKALIVTCPDELRETFDGFTDKILIDRCASLRPGAVSSPTAAAKHSLRALARRYQALDAEIAAHDAVLDELTKNHAPTLRDGFGIGIDTAAEILMVFGDNPDRVRSEAAFAKLCGVCPIPASSGMSNRFRLSRAGHREANAALYRAVIVRMRYHQPTIDYVARRTGEGLAKRDIIRCLKRFLAREIYQRVMSDHRARQALLAPT

SEQ ID NO: 363966 - protein, 351 aa, unidentified
MSHKTAATVAHTIGIDTGKNTLHLIGLDDQGAIVLREKIARGRITARLANVPRCLIGIEAGMATHYVARELSALGHDVKQVPPAYSKPFRQGHKNDFRDAHAIAEAVQRPSTRCVPVKTDDQLDLQALHRVRSRLVGQRTAVVNQIRGFLLEHGIAVRQGLRFLRQQLPDILAKRTDVLSPRMIRIMEDLSGDWRRLDERIEHITKEIEVLAGTDVNCGQLMTVPGIGPIVASATVAAIGNGASFARGRDFAAWLGLVPKQMSTGDRTILGRITKRGNRYLRMLFVQGARAILLRPKSWAKHSFGPWLTTAARRLHRNILTIALANKLARIALSVLIQGRSYETRIVSAAA

SEQ ID NO: 363967 - protein, 476 aa, unidentified
MTTAFTAGVDWGSRKHHVCVMDHQGKVVKERAFDHGGSGLAAMNEWLLDCARRPANLIKVAIEVPHGPVVEALMESGFPVHSINPMQLDRFRDRFSAAGAKDDRRDAKALASALRTDPDCLRPVREPDDAIIEMRGGARARKELVEDRNRIANRIRQLLLDYYPQFLDAVDGDVSTPWAIALWKQVPTPQKARRTRKTTLAKLLRKHRIRRIDVDELADRLQAQPIKRRNASIESARNRILRLMPILKQYNDQIRQARCELQRTLQLAKECLPDDSELRDAAILASIPGVGDHVLSTLLTEAEQALGQRNHAALRCLAGVAPVTVRSGNRTVVRQRRAKNHRLADAVYHWARVAVQRDTECRNKYDLARARGKTHGHALRIVGDRLLRIACAMLRNRTPFHPGPGPHDDDQNAPMPAPEHEHPCRLHDDDPATTTRNPQPCISSTDSQPGRPTQRPTRRPGNTFNNPPIDPPQRST

SEQ ID NO: 363968 - protein, 344 aa, unidentified
MRYFAGFDVSLEETAIGIVDETGRLVREGKVATEPEALDAYMRAGGLPIERVGLEAGPLSTWLHGELTAGGWTMVCIETRRLRAVTRAMPVKSDRKDTEAIAQAMRTSWYRAVHVKSAESQRIRVLLRNRKILQAKRLDIDNEIRGTLKAFGLKLGKVGRAGFAGRVRELVAGEAVLEAIMPPMLQARSALIAAFDKLHRQVLAIVRQDPVCRLLMTAPGIGAVTALGYKTAVDDPHRFRHSADVGPHFGLTPRRYQSGETDYSGRISKCGDAMVRALLFEAAMAVLYRVKAASRLKTWGRALMRRIGARKAATALARRLAVVLHRMWLDGKPFNPKPVHAAAS

SEQ ID NO: 363969 - protein, 321 aa, unidentified
MDAAPASSACVGIDIAKDHFDAKFLPEGRLQTLPNNPQGSQALLAQLKALPGCLVVVEATGRYERRLVAELVNAGHRVAVVNPRHVRHFANALGQLAKTDRIDAHVLALFGQRMQPRETQKTSEKQQELQQLVTRRRQVISLRTGESNRLEQTTSKLARKGIRQVLALLDKQIDELDDQIARLVQSDDDWKAKDELIRSIPGVGPVTSSALLAELPELGRLNRQQIAALVGLAPFNRDSGKLQGKRAIAAGRRTVRCALYMAALSAHRCNPVFQRFTQRLQRSGKRFKVVLTACMRKLLVTLNSMVRNNTPWNHQTAPVPA

SEQ ID NO: 363970 - protein, 410 aa, unidentified
MEVMFDRVAGLDVGKDSVTVCVRTPGPRGGRRSETRTFKTMFGSLRVMRDWLVEAGVRIAAMESTSTYWKPPFYCLEEVMVVWLLNAAHMKAVPGRKSDVRDAEWIAQLLEHGLLAPSFVPPPQIRRLRMLTRYRMQLMGDRTREMVRLELMLEDASIKLSSVASSLRTVSARAMLTAMIGGETDPLQLADLAKGKMRRKIPDLAQALTGTFDAHHAQLAKSMLRRLELVEQALAELDAVITEACRPWQHQLELLQTIPGVGETVAQVIVAETGADMSRFPTAAHLAAWAGLAPAMHESAGRQTPAGKRHGNKWLTAMLVEAAGSVGRMRGKNYLAAQHARLTRRRGMGRAQVAVAHSMLVSAYWMLKRDEPYHDLGADWHSRRNNEAHTRRLVAQLERLGHTVTLDSAA

SEQ ID NO: 363971 - protein, 429 aa, unidentified
MTVSNDTPQRVTLVAVDIAKNSHDVLIESPTRGRRRRLRLANNLEDFEQLAGYLRSLKSAVLIGFEATGNYHRPLAYFLHRQGFELRLIPTLALARTREAMHNSWDKNDPKDAQVILHLLKTRLAQTWHDPMVKGINDIQELSKTHFQVTLARVRVWHTLRNHYFALYFPEIDRFIRSDHSVWLVQLLASFPTPASITALSEGEFQTRAWNLVGRKVSKRALLAEIYAAAKRSIGVPVPLDSAAVAMFRVVLGEYLDLHRLRGHIAERAAIVLGDNPDSRRLMTVPGIGPANALTILAEAGDLRRFRHHRQFLNFCGLNLSTLQSGKSRSQSHISKYGNARLRTALWMAAQTAIRMRENSFRRKFDNYVRGNPLDADLRRKAYTAIAAKLARVIFGLIKSGADYRPFFEHKFQVEEPSRASAVGATSTP

SEQ ID NO: 363972 - protein, 339 aa, unidentified
MRYGGIDWADDHHDALVIDEKGHQVGSIRVNHPPARLAKLTTFLQHVIVTEPKEQMACIIETTHGLLIAYLLEAGWPVYPVNPRTVDRKRSASGAKTDRIDAYLLAKTGRADLADLHRLIPDSEKVAELKLLTLDQDALIQMQTRLINQLTACLKAYYPVALDLFGKLQQKSTLLFLQTYPTPAAAASASLSQIQQVLEQAKHPQPKKVASQITEHLSQPHLQAAPVTIRAKSRLLQALVSQLLPLVEQIAQYDKEIRTLFLTHQDHEIFESLPRAGQRLAPRLLAEIGDDRTRYLAANSLQALGGTSPVLYQSGMYSKAHCRLGCIKPLRNALHQFAW

SEQ ID NO: 363973 - protein, 372 aa, unidentified
MDQHNRLFVGLDVSKLKISVAVADGGRGGEVRFYGDVASDETSVANVVEKLAKRGAVLHFCYEAGPTGYELYRQLTGMGHDCVVVAPSLIPKRPGDRVKTNRRDAVSLARLHRAGELTAVWVPDRGHEAVRDLVRAREAAQEAQKRARQQLQSFLLRHGRIYSGRSSWSLAHMRWISTLKFEHPAHFIVLKEYCQAIEDAEVRLKRLTDLISETVKSWTMAPVVEAYQALRGVSLIAAVVFVAEIGDIRRFENPRQLMAFLGLVPSESSTGEHVKRGGITKAGNSRARRMLVEGAWAYRFPARVSRTKQAQLEGLPRTVREIAWKGQLRLCSRYRKMILAGKHKAIAITAIAREMGAFLWAIGQEVQPAHHA

SEQ ID NO: 363974 - protein, 409 aa, unidentified
MERVVERGCGLDVHKKSIAACVRIPDERGQRRQQVRTFGTVAAELLALRDWLEAHGVTHVAMESTGVYWKPIFYVLEEAFTCVLVNPVHMAQVPGRKTDVQDCVWIAQLLEHGLLRGSFVPPTPIRELRDLTRYRKTITQERSRAINRLHKTLEDADIKLASVATDVLGVSGRAMLETLVRGNTDPDVLADLARGALRKKLPALRQALNGRFRPHHAFLVGQILAHVDYVEEAIEAVSQQIDVVIAPFTSALERLSTIPGVKKRTAEVILAEIGPDMSAFPSAAHLASWAGLCPGNNESAGKHRSGRTRKGTPWLRTALTEAALGAIRHGRGALATRYRRIMRHRGHKKAVIAVAHAILVVVYHLLTRQTTYHELGDGYYDRRHAERAKRRALETLERQGYRVVLEPAA

SEQ ID NO: 363975 - protein, 451 aa, unidentified
MVKSTQKGVKAKTVTKQRPEIFVAASYESAIGVDVHAELLVCAYQWMNENHEIETEHAEFGTRHSELEAFAEWCCDCSPSIIVMESTGVLWRSAYEALERAGFTSENLALVNARDVKAIIGRKTDKEDAQRLAEIARLGNIKKSFIPPFEFRNMRQLARRYQTIVAKAASHTNVYHKLLSSAGCRATSVFSNVRGKAATVILEAKLNNVPDFEQVVRDHCKRLHAKPEEIMDALNFEISPEMRDQLNDEREQLREQALFAQRTLDRLRELQKDFSKEIDLLQTIPGIKEVSARLIFAELCTDLKDHFVDSEHFCSWLGICPGNKISANKSYSGSAAKGNKWLRRTLIECAQGIGLSKYSFRDRFNVLKLRRGTRRAIVAIAHLLARVIFSVLTNGKAFVCAKAKTLRDEVVNRLRRTTKQLKRLTPVADREKYAVVDCDTGVIVSRTPVAV

SEQ ID NO: 363976 - protein, 418 aa, unidentified
MDSIKSKKVKWINKKTMIATFDIGKNVHYGYFRAPDGQECKPFCFYNAQKSFKQLWAEISRFKNEHQLEEVVIGFESTGPYAEPLFHFLRKKPVKLVQVNPVHTKRIKELTGNSPNKTDKKDPRVIADVICLGHALTLVVPEGPAAELRRLTQARERAIKTRTSMINQLQHLIFVIFPEFLTVLKISTKTARYLIKHYTTPEKICALGLESVGQLVKKVSRGKLGQARAKQLHEAARDSIGISEGKQSIVYEIEHLVGRIEAEDQFIDSLQKQMCVYLQQIPYSQNILSIKGLGEVTVAGLIGEVADFNKFDTISEVMKLAGLDLYEISSGNHRGQRRISKRGRPLMRKLLFFAAINAVKSKGIMHEKYQQMLDRGMLKMKALVAIARKLLGLIFAIVRDKTKYVENYSDNYHYKLAA

SEQ ID NO: 363977 - protein, 317 aa, unidentified
MSKHITVCAGIDTSKHKLDVALDGKSERLQVGNTPEGHERLSGWLQRHGVNRVGIEASGGYEFAVVATLRRHEFVVVVFQPAQVRAYANFHLQRAKNDKIDAALIAGCTREVKKIHAPPDPRLTAFAGPLTAIEQMMDDLTRLKTRRESCRDARLRQLWKEEISRITKLQKAELKALVAAIRQHQDLAQRLALINSVDGIGLPTAVAILVRLPEIGQITREQAAALAGLAPYDDDSGTYVGVRHIAGGRARLRGALYAAALPAAFRWNPQLIALYRRLTGAGKLHKVALIACARKLLIFANTVVARGTPWTPQAGAV

SEQ ID NO: 363978 - protein, 343 aa, unidentified
MGEVSTIGLDIAKSVFQIHGVDVDGAVVIRRRVSRAKVSEFFAALPPCLIGIEACPTAHHWSRKLGALGHTVRLMPPNYVKAYLKRSKNDANDAAAICEAVTRPSMRFVPTKSEQQQSGLMLHRGRQLLVRQRTMLSNAIRGHLAELGIISAKGRNGTVELLEVIANQEDDRIPAVARFSLEVLARQYAAIAAEIGVIEKRIHAWHRSCEESRRLEEIPGVGPIVATALVAEVGDWRAFVSGRSLAAWIGLVPRQHSTGGKERLGGISKQGNRHLRWLLVAGAMAVIRYARQHGTKRPWLARLMATRPIKVAAVALANKIARMAWAMMVRGERYKEPTLMIAA

SEQ ID NO: 363979 - protein, 457 aa, unidentified
MWRNRELAECENGSGLVSPPVYLQRKSPTTQTMSGRQSADASSRLRNAGRGWGTQFADIGTLTPAACNARIWAGWRGLMGWSIGLGPRRHRACSWRRGALQTRGDHPVNARTIAIDLAKNVFELAIADEAGKIVDRKRLSRSQLRRYFENYGAAHVVMEACGTAHYWGRWFSERGMQVSLLPPHYVRAYIRRNKTDRADATALLEASRANDIIPVCVKSVEQQALQGMHRVRSAWRGTLTARLNALRGLCREFGIIAPVGARRGLAELVQRVADESSGLPRIIRTVLQGVIEEVRAIQERLRQLELELAAIAEQSAVCQRLRKIPGIGLIGATAFAGSIGDIRSFRSPRRFAAWLGLTPREFSSGNIRRLGSISKRGDGYLRMLLVHGARAVLYSANAAQRAGRPLDALREWGLRVSSRSGHNKAAVAVANKLARIIWASWYRQRDFEFRPPSPATH

SEQ ID NO: 363980 - protein, 409 aa, unidentified
MEVLHRRCAGLDVHQQSVVACIRVVDADRVKSEVRTFDTTTSGLLSLSSWLEEHACTHVAMEATGVYWKPVWHVLEQSCQLVLANASHVKGMPGRKTDVKDAEWLADLLAHGLIRASFVPPTVIQDLRALMRTRKQLVRETARNTQRIQKTLEDANIKITGVVSDVLGKSGRAILDALARGETDPEKLVALTSGRLKAPREKLIEALRGNVRDHHRFLIKLHLDQIDALRRAVADLEVRVGEHLQPFRKNVELLTTMPGLSETAARVVVSEIGHDMGRFPSASHLVSWAGLCPRNDESAGKRRSTRIRHGAPWLKTTLVQCAWAAIRKKDSYLRAQFHRIKTRAGAMKAIVAVAASMLTAVWHMLTHGVEYRELTGAYLDKRDATKISNRLVRRLENLGFTVTLSAAAA

SEQ ID NO: 363981 - protein, 350 aa, unidentified
MAIVGGFDVHRKQITFDYVDNDGLVQWGQIRPATRKTLRSWLAKHCPEGAGEFALEGCTGWRYVSEELTAAGVGVHLGDPAEIAALRGPKKRAKTDRADARLLRTLLVEGRFPESWIPPAHVAEIRALGRLYCALMEERRVGVTHIHAQLFHQGCPPVKALLSEPGREVLVAAELSAAGRQYVDTALRRIDELTAEIDPLRMQLVRFARRQSGCRVLQRHYGVGWLCAAIIWAEVGDPRRFSSSDQLVRFAGLDVTVYSSDGKRAPGHLSRQGSPELRWAAFEAAKCAARRGSPDYAYYHNLAAKHEGRNGKNPTLAVERKILRRCYHTLRELGDAVLAMPIAEAEEVAA

SEQ ID NO: 363982 - protein, 421 aa, unidentified
MTQPSHDTFAACIGIDWADAKHDLCLQAAGTAKRERFQLEHTPEAIDAWVTTLRTRFNGHPVAVCLELDKGPLVSALRKYDFLVLFPINPLTLARYREAFTPSRAKDDPTDAELQLELLLTHRDKLQPLQPQSPPMRARAQLVEHRRRVVGDKVRITNRLTSTLKNYFPQVLHWFQEKDTRIFCDFLSRWPTLKAAQLARRSTLETFFRDHHVRTADVLATRLHAIKTATPLTTDEGVIAPNTLLVQTLVSQLRVTLDAIEAFDQAIAQRAQHHPDFPLFQALPGAGPVFASRLLVAFGEQRERYASAAARQKYAGIAPVTERSGKKAWVHWRLQCPKFLRQTFVEWTAESMRHSFWAQVSYQQQRDKGNTHQAAVRALAFKWIRILYRCWQERTPYDESTYLQALHRRGSLLIQHRAKAS

SEQ ID NO: 363983 - protein, 320 aa, unidentified
MTYIGIDVSKDSFVAAYPKMDGYTTQTFKNSTDGIRKFINTLPDESHCVMEATGNYSMLLLYLLQQRNIPVSMENPQKIKHFSRAMMSVTKTDEIDAKLIAMYGEKMNPAPYKIPSESIMLLKQKRTVLRQLKKQLTSMKNMQKSMDCLPMKDPVAQASMKQTIKFLEKQISKLEEDITHLSKKEFTRQMELLTSIKGIGENIASALIMATGGFTYFSSAKQISRFLGLCPTYQQSGTSVNVKGHINRNGDTHLRSQLYVVAFSSIRYNTACKEAYERLRARGKSGKLAVIAIANKLIRQAFAVVKSDKPYIDGYVSCLA

SEQ ID NO: 363984 - protein, 354 aa, unidentified
MPHNTSRLEAVATIGIDIDKNTFHLVGLDRNGAIVLRQKLSRRQIEARLANTPPCLIGMEACVGAHHLSRQLKAYGHDARLMPARYVRPYSKGQKNDFRDAEAIAEAVLRPTMKFVAIKTVEQLDLQALHRVRERLVCQRTSVINQIRAFLLERGIAVRQGPPALRSEIPIVLSMTDKLSPRMIQMIEDLCADWRYLDERVETVSDEIKTLSEQDDGAKRLMTVPGIGPIISTATVAAIGNGDAFSKGRDFGAWLGLVPRQMSTGGRTVLGPISKRGNRYLRMLFVQAAHAVLLHPKCWERHGLKSWIAAAARRLNRFKLAIALANKLARIAWGVLHGGRSFEVRSMKPAAQCL

SEQ ID NO: 363985 - protein, 341 aa, unidentified
MSIATLGIDLGKTSMHVVGLDASGKPVHRKKLTRTALIRFLSNLAPCRVAMESCAGSHDIARKADAMGHDAVLLPAQFVRPYTKGQKNDNADAEAIAEAATRPTMPTVSIKDATQQEIQFLHRTRQGWIKQRTETANRVRAMLLEFGITVPKRILNLRRALPGILEDAENDLPDGVRQLVADHWQQLQELDDKVADITQRVERIPVRDARAARLMSIPGIGPMIATAMVAAVGDGTQFTQGRGLSAWLGLVPQQFTTGGRPRLLGISKRGNRYLRTLLIHGARAVLQQAHRGDDALRRWIQRVNGRVHRNKAAVALANKLARVAWAVLTRGETFRASAAAA

SEQ ID NO: 363986 - protein, 333 aa, unidentified
MVEGTMGSHHKEGSTKMSQINTVAAGIDVAKEQLDIAVHGCKQSWRVANTPEGFRDLLRLMHQHQVARIGLEATGGYERDVVEYLRTAGLAVIVLQPVQVRAYAVMKLRRAKTDRIDAQLIAAFVAEHAVMREAPDPRLAGLSERLTCLEQIEEDMARIKVRLEHVRDPDVLLNWKADLARLKQRRASMMARFLIALRQHDDLATRLKLLLSIDGIGPRTAIALLIRMPELGRLSRGEAAALVGLAPFNNDSGKRSRQRCIAGGRTRLRTSLYAAALPAAFRWNAALVSLYVRLKAAGKPHKLALVACARKLVIFANTVLARGTPWVKGGACS

SEQ ID NO: 363987 - protein, 394 aa, unidentified
MILVGIDIGKNQHTFSIIDKGTGEILSNPSVFNNNQEGFLSLIKKLSDYAKSELLIGMEDTGHYHFALLKYLLDSHYTVALINPATTDLTRKLQGGITKNDSLDSLTICDVISSNHRKKPYRITKVNHFDLYEQKQLTRHHHNLKEELNIYKNRIQKCIDIVFPEFNSLFRSKYGIVYMNVLKTFASAKKIADSDIQTIRECFEYNRRGKRISLSAEQLKAAAKTSVGIYSVAEEIQIRHLVRQIEMIEEQLSEIDKKIEEFSLQNDSPILSIPGISHFSGTSILAELGDICNYTKASQIIKFAGVAPYHHESSQFTAQHTAITKKGSRYLRKTLYQIILTVINNNKVFTAYYNKKLAEGKGHRCAQGHCIRKLLRIIYHLLSTGQTFDPDLLR

SEQ ID NO: 363988 - protein, 346 aa, unidentified
MTIVETRPITGGVDTHLDTHVAAALDANGGVLGVESFATTPQGFRALHGWLAGFGPIARVGVEGTGAYGAGLARHLRGEGLEVIEVDRPNRQLRRKLGKSDTVDAVEAARAVLSGRARSVAKTADGNVEAMRALLIAKRSGREARITCLNQLRHLGFCAPDELRERFRGVPRDQLADVAAALRPRSDSGPVTYATKLAMRTLARRVLTLVEDNHALDGVLAELVAATAPRLLELYGVGIDTAAILLVAAGDNAERVRSEAAWAHLCGVAPLPATSGKVTQRHRLNRGGNRQANHALWRVVFTRMASEPRTRIYVQRRLDDGLSKPEIIRILKRYVARETYRHLPRT

SEQ ID NO: 363989 - protein, 442 aa, unidentified
MVRTKVAGIDLGSERHWVCAPTEDGGGREIADFGATTPELIRMAEWLKVRQVESVAMESTGVYWIAPHEILEAQGLAVLLVDTRQLARVPGRDKKTDPTDCEWIQRLHGCGLLQGSFRPPEDICMLRTLVRDKATLVAESSDWVRRMQKSLDQMNVRVHRAVSSIEGTTGMAILRAIVGGERDARKLAKLRDPHCRKSEAEIAEQLSGHWREDHLFSLKQALKMYDAILKRIAEYEEEILRRLGEMERPEQRGQSAPPPHNANKARAIRKRGQEAKRQALFRMSGVDATQIDAIGVETVEVVLSEYGPDLSRFPDEKHFVSHATLAPHMAKSGGKPVKKKKRNSSSTRVAGALRMAALALRHSDTALGAYYRHIAQRVGADVAVFASARKIATLIYRLLRWGQPYADEGTKAYEDRYRELRIRGLKSKAKQLGYQITPVTAS

SEQ ID NO: 363990 - protein, 369 aa, unidentified
MNTTTFVGLDVHARSIKAVALDAMTGEVRSATFGYDAAEVAGWVSSVDPSAKCVYESGVTGFDLQKRLSSMGIDCVVGAVSKMIKPSADRRRKNDRNDAEFLARMLSVGNVVEVWVPDDGCEAARDLSRALDDAREDLKRCKQRLSKFLLRHGHVFSETTPTGRRKGNWTAAHWAWIRSIEFPEKADDDVLAYYVDAVRQAMEDKARLERLVEAEASKPRWKKRVDSVRCLKGIDVTSAADLVFEAGEFSRFKNARSFAAWIGLTPSEHSSGESVRQGGITKAGNKHLRRVLVESAWHYLGCSPHSKDLAKGQAPDPGARRHAAKGVRRLVERRRAMLERGVHKNKANVATARELACWCWAVGRMIENG

SEQ ID NO: 363991 - protein, 329 aa, unidentified
MKKQFIIGADISKLTIDVHCHGQTEVTTISNDAKGYKQLLRWLKKQITTEFSSVIVVMEYTGIYTYNLERFLHEHAIDYVKRPALDIKRSAGIKRGKTDKADAMMISKYGWQRREELKPMQPVSETQQQLQQLMAYRDKLVADQASYQSRLKELKGQMRENMNTRIAESTEYIMQVLAEEIKQTEASIEEVISTEKNIQTNYNLLTSVRGIGFVNAVHLLIVTENFTRFTEVRKFACYCGVAPFECKSGISIRGKTKTSHLANKKIKSLLTMAAKNAINHDPDLKAKYREKVEEGKPKKVALNIIRFKIIERVFAVIKRQTPYILSQAA

SEQ ID NO: 363992 - protein, 320 aa, unidentified
MGPATVYIGIDVAKRRLDVGDYPGGNVWAVPNDDAGIDELVAKLAAVTPKLIVLEATGSFEAPVVASLAAAKLAVVVVNPRQVRDFARATGRLAKTDRIDALMLARFAEAVRPAVRALSDAASQELVSLVARRRQLCDMITAERNRLPTARGQVRADIEDHIVWLRRRLKDKDGDLEKAIRSSALWQVKDDILQSTPGVGPVVSATLIAQLPELGQLNHKQIAALVGVAPFNRDSGTFRGRRTVWGGRPAVRSVLYMAALAGARWNPAVSVFYERLIAAGKPPKLALTACMRKLLTILNAMVRDGVHWQGALNASPKDSC

SEQ ID NO: 363993 - protein, 324 aa, unidentified
MADNMLGIDVAKGKFDVVLMRADGKRRWRTFANRAEGFAALLGWLDKQQALPVHACLEATGTYGLALASFLYQAGQPVSVVNPACIKAFSDSELNRTKTDKADAGLIARFCRALRPALWQPPAPEVAKLQGLVRRLESLQEMAVQERNRLSVPGLAEPVRESVERTLAMLEEEMKRLRGQTDDHVEGNPALKQQRELLTSIDGIGPTTANLLLGELSGCDFRKAREVAAYAGLVPQERQSGSSVRGRARLSKKGNARLRKALYWPAIVAIRHNPVLAAFARRLREAGKPKMVVIAAVMRKLLHLAFGVLKHQRPFDPNWIARRT

SEQ ID NO: 363994 - protein, 312 aa, unidentified
MNNVFIGIDIAKNTIEISVRPSGEHWSASTEPDVLIRTVDRLAALEPATIVMEATGGYEARVASLLSTAGLPVAVVNPRQVRDFARAAGILAKTDAIDARVLALFAEKMKPECRPVPSEDEQTLKELISRRRQLVDMRTAELNRRQQTISPQVHKSISTLIESINQELDTIEREIKTRIKADSAWRAKDKVIQSAPGIGETTASMLIAEMPELGTINRRKIASLGGLAPMNRDSGTFRGRRMITGGRSSIRAGLYMPMLSAIRCNPQIKTFYNRLIADGKPKQVAITACMRKMLTMLNAMIRDNQPWHPVSP

SEQ ID NO: 363995 - protein, 371 aa, unidentified
MMNNSHSESTLLVAMELSNSKWRLAFSGGEKVRQKVIEARNRSRFLAEVRLAKEKLGMDAAVPVLCCYEAGRDGFWIFRWLKNEGMECLVVDPASIEVNRRKRRAKTDRLDAQSLVRLLRRYWSGDEYVWSIVHVPAEQQEDELRLHRELERLKKERSAHLCRVKSLLILHGIRVSGNLIRLDRVLDGIVCWNGQSLPEALRAELHRELARLDQINDQIKTLEKQKVEILKNPKTNADRQAADLIRLHGVGEVSAWVLAKEFFGWREFKNRREVGALSGLTPTPYDSGGSCKEQGISKAGSPRVRRVMIELAWSWVRFQPESELTKWFEKRFAHGSKRMRKVGITALARKLLIALWKYVEFGTIPEGAIIR

SEQ ID NO: 363996 - protein, 323 aa, unidentified
MALLVGVDIAKRTFDLAILQSNGKYRTKSKLGNDKAGFAVFTDWLQRYAEPHAWIVMEATGIYHEALAEHFHGMGYRIAVLNPAQIARYAQSQLQRSKTDKLDAKLIATYGQRHVDHLRAWQPEPVAVRQLRALTRRLEDLQSLRQMELNRLDVSPANVQDSIQAVVQRLDEQVTWTLEQIKCHIDDDPDLRGKRDLLVSIDGIAEKTAALILAELGDIERFTDARAVTAFAGLDPRLRESGVYRGHTSISRAGSARLRTALYLPAVVALTYNPAIKAQAERLRAKGKKGKQTVCAAMRKLLGIAYGVLKSGKPFDPALAIAR

SEQ ID NO: 363997 - protein, 424 aa, unidentified
MKSLPGCEFAAFIGIDWADAKHDICLQVANTEKREFAVLPHRPDAIDQWACSLRQRFQSRPVAVCLELAKGPLIYALQKHEFLVLFPVNPATLAKYRGAFTPSHAKDDPTDAEYQLELLVLHRDKLKALNPQSAPMRTLESLVEQRRRLVDDSKRITNRLTSALKQYYPQAVEWFEAKDTVLFCDFLSRWPTLKQVKHARRATLQAFFREHNARSAKLVEERLTAIKSATSLTEDIAVITPHRLLVQALVDQLRVTLQAIERFDAEISAISRTLPDYPLFRNLPGAGAALAPRLLTAFGEQRERYDSAVEIQQYTGIAPVTERSGKQHSIHWRLQCPTFLRQTFVEWTAETIPRSFWAGAYYRQQRAKGCSHPAAVRALAFKWIRILYRCWKTRTPYDESQYLNALKRRGSPLLNWNAEAAKNT

SEQ ID NO: 363998 - protein, 339 aa, unidentified
MVKAATIGLDIAKQVFQVHGADRTGRGVLRRKLRRNEMVRFFSELPPCLIGIEASGSAHHWARVLGELGHTVRLTAPQFVKPYVKSQKNDANDAEAICEAVARPSMRFVPQKSIEQQDLQCLHRVRSRLVACRTLLINQIRGLLAEYGIVLPQHPGQVRSGLPAVLEDAQNQLTGFGRELFQSLYEELAELDAKIGDADRRIQIAFQNHPDCRRIAAVEGVGPLIATAVIAAISNGHAFTNGRQFSAWLGLVPRQNSSGGKSRLLGISKRGDPYLRTLLIHGARSVVYRAKAKTDQRSLWIIDKQRRLGTTKACVAVANKNARIIWSLIAREQEYRRAA

SEQ ID NO: 363999 - protein, 436 aa, unidentified
MTSHCQSYNYKSQEVILLSFKILKNNCCGLDVHKTWIFACIGITDPYNRTEYKQARFSSYTKGLQELCDWLAKYNCNDVCMESTGKYWIPIFNILEKNNIWVTLSHPKYTKPQKGNKTDRKDARWICDLYMCGMVKPSFIPPADIRQLRDLVRYRFKLICMITGEKNRAHNCLTVSNLKLDDVFSDIFGKSSRSITEQILQHPGEYFDVAPFVHGRCKTPIEEIQAAVDGAISNEQAVKLRQCLSHIDELEMHKTEIEREILRLSEKYEDALSLIRTVPGFDKNPMTAIQVLSEIGGDMSVFPTAKNLVSWAGCCPRNDQSNHKIKSTRISRAGSYFKPVLVQVANALIKSKKNPEFAIRYRRIKARRGHKKAIIAICRMILTAIWHILSDLKPYTPEGFLAPPSVNESKVLTTSQALNLLKQRGYVINDAASPVI

SEQ ID NO: 364000 - protein, 330 aa, unidentified
MKITTVGIDLAKTCFQIHAVNEHGKTVQKKQLRREQMAVYFANLQPCLIGMEACGSAHYWARKLQGFGHTVKLMAPQFVKPYVKTNKNDAADAEAICEAVARPNMRFVSIKNVEQQSVLALHRVRQGFVKGRTAQANKIRGLLGEFGLIIPQGIASIASGVPELIEDASNELTGSFRLLVDRLMNHLKELDRQVKEIEAQINAWHRASDTSRKLERIPGIGPITASAMVATIGDAKDFDGGRQVAAWLGLVPRQHSSGGKPTLLGISKRGDTYLRTLLIHGARSVIYAAQRKALKSDDWLSRPLARRNFERGSGRAGEQERQDRLGAVGQ

SEQ ID NO: 364001 - protein, 425 aa, unidentified
MDIIAYRAAGLDVHRSIIAACVVLTPPHGRATKERRQFAATAAGLAELAAWLKGLGVTHVGMESTGVYWMPVYAVLEQAGGFELIVANAQHIKAVPGRKTDVKDAEWLAELVRFGLMRKSFVPPKPIRDLRDLTRYRRTLVDVQASERQRLIKLLEATDIKLAEVVSDVFGKSGRAIVRALIDGETDADAMAKLARGHLRKKTDRLRGALAGRLDDHHREMLSIQLARVEAAEADIESLDKQITVRLAPYDQQMGLLIRIPGIDWVGAATIIAEIGIDMSVFPTAGHLSAWAGACPGNNQSAGKNKPAGARKGNIHLKTALCNAAVGASRKRDSFFKSKYTKLKLRRGGGRAMLAIGHKLLVCVYHILSTGSLYQDLGEHYQDRRDHERAKNRCIRRLESLGYSVTALPIGGAANADQPNATEAA

SEQ ID NO: 364002 - protein, 337 aa, unidentified
MTHITRMGIDLAKHVFQLHGVDERGHTVLRRRISRAQLRPFIAQLHPCLIGMEACGSAHYWARELAMLGHDVRLIAPQFVAPYRKNDKNDGNDAEAICEAVGRPHMRFVPVKDVEQQAVLTVHRARQLLVAERTALVNQTRGLLAEYGLIVSTGVGVLRRALPARLETPALPGLAREVFADLADRLRALDERIATYDRRVAALARQTEPAQRLMQAPGVGPVTATALVATVGNARAFKNGRQFAAWLGLGPRQHSSGGTRRLGRITKRGDVYLRTLLIHGARAVMRQLTRRTDATSRWILALKARRGFNKAVVALAAKQARVLWALLATGRPYVACS

SEQ ID NO: 364003 - protein, 356 aa, unidentified
MSSGVRLTDEELEGKVVAGVDTHADTHWLCVLDGRGRVALSREFDATAEGCAELARAIGGAGGCAAVGVEGTCSYGAQLTDELVACGYRVLEVLRPKRPPRRPGEGKDDARDAERAARDVLAGEGTSVPKLRGGWVEGLRALLNARERCVGACVSARNAALAVARTASEEERRRWEGLSQAEMMRRCAAIPERGATPVGRALLALGRTWEAARAEAGALEDEMEAMVAENLPSLAAVPNCGAVSAAKLVVAAGENPGRLRSEGSFAMLCGAAPVPASSGKTDRFRLNRGGDRRANNALHMIVAGRMRSDPETMAYVERRRADVNVNTFFASCTNASPPVAPTPAHRPYQRGCADSG

SEQ ID NO: 364004 - protein, 403 aa, unidentified
MRIMYQHVAGIDVHKKIIAVAILVLDQEGQWYQETRTFSTMTADLLALSDWLTSHGVTHVAMESTGEYWKPLFNILEEDFEVVLVNARHLSKVPGRKTDQSDAEWLAELMQCGLLKASFIPPPGQRELRELTRYRNSFVRERVNLMNRLHKLLESANIKLGSVASDVLGVSGRAMLEAIIAGQMSPAEMAELAKGRMREKREELAKALEGRVKAHHRFVLTELLCQIDSLDETIARFDQQIVEYCRPFEEAIALVDTIPGVGRRSAEDLIAEIGIDMERFPTHRHLASWAGRSPGNHQSGGKRLGAVLNQMAHAAARSKDTYLSAQYHRLARRIGKKKAIGALEHTILVMAYHMIKRRVPYHELGADYFEKRNSELTAKRLIKRLEKLGYQISIDQQPVSLAA

SEQ ID NO: 364005 - protein, 376 aa, unidentified
MNKIQNLITNTITIGIDISKEFFDIYVYESGNTMRFDNNSKGIKKFIKYITPLNPTLVAMEYTGGLERQLFFALQDYNIPCCCIKPINIKNFAKTIDAKAKTDLISAKLIAHYAFLYKPAPQPKPDEKSLLLKDLASRLQSLTDFLISEKNRLASSTFAKIKSQIKKSIKSVEKLIEDGKKQLKELVYSDPNLKAKVELLDTMPGVGEYSAMMLAVLLPELGTISGKQIASLCGVAPFVNQSGKATGKAFIKGGRDKARRVLFLITLAAIVHNPLIREYYNRLIQKGKPPKVAIVACMRKIIRILNAMIRDNRPFIPDYYETYVREQDNGYKIILTKNNEIKQQELNYNEATYNSVLSDVNFFKENDRKTDMKNIT

SEQ ID NO: 364006 - protein, 379 aa, unidentified
MTRFPAATSDEHTLYAALELSKNSWLLAIQFPGRDNPSLHPIKGGDADGLIAKLDAARERLAKVSGQVPKVILCYEAGYDGFWLARFLEHRGIDCLVMDPASLQVDRRARRVKTDRIDVEKLLHTLIAWCRGERHVCSMVVIPSVEEEDLRRSHRERDRLVRERTAHINRIKGLLFAQGIRGINVKSRYKTLTPADLVTGDGRPLPERLSREIAREIERLALVQAQLVEIERERDRAPTPCAATERKRHQLLRLNGIGAASAPILAREVYYRQFANRRQVASYLGLAPSAYDSGESRRSQGISKAGNSLVRAVMIQTAWLWLRHQPNSALTQWFHHRTQGQSKRMRCIMIVALARKLAVALWRYLEHGLIPEGATLSAP

SEQ ID NO: 364007 - protein, 325 aa, unidentified
MQSTTNYTGIDISKSFFDVAFTRRGKYEYYKFSNDESGFSGLIKVLLNDSHVIMEASGPYYLKLASYLTSRNIAVSVINPLVIRRFCQMRMSRAKTDKKDAMMIAEYGKTENPSLWRIPEQHVLSLQQMEALLANLNKERTALNNQLESFTHSGMLDKQLKKIMVRELEHKERLIREVSLSMEVMAKQHYAEMLANLESIPGMGKKTAMALIIISGGFNNFDDYRKMSSYIGICPRLFESGTSVKGKSRICKMGMSRIRAMLYICSWSAKRYNKACKELYERLVAKGKAKKQALIAVANKLLKQAFAIATQKTKYNENYSNIICF

SEQ ID NO: 364008 - protein, 404 aa, unidentified
MYNAVGIDVSKGKSTVAVLQPGGTVIRKPFDVSHTSQNLNELADYLSSLDGTTKIVMECTGRYHEPMVKALSEAGLFISIVNPHLIKNFGNNSLRKVKSDPADARKIARYTLDNWTELRQYSGMDNTRTPLKTLNSQFSFFMKQKVAAKANLIALLDNTYPGVNKLFDSPTREDGSEKWVDYAYSFWHADCVRKIGLKAFTERYMSFCKMHHYIFQQDRPEKLFNASKELVAVFPKEKTYKLLIQQSIQQLNLASEHVERLRREMNELASTLPEYSTVMGIYGVGKTYGPQLIAEIGDVSRFTHREALTAFAGVDPGVDESGQHKSKSNRASKVSSARLRKTLFQIMTTLLQNAPEADPVYRFLDKKRSQGKPYYVYMTAGANKFLRIYYGKVKECLQNLEQTE

SEQ ID NO: 364009 - protein, 431 aa, unidentified
MSGIESGGQEPEFAAFVGIDWADQKHVWCLQGRDSTKCESGELEHTPEAVEAWVAQLCQRFGNRPIAVALEQSRGSLVFMLAKYEPLHLFPVPSTMSASMRKALYPSGSKDDPRDADVLLVLLLQHRNKLRRLSPDTEATRRIQNLVEERRKLVDEKTEHTNRLTSHLKIYFPQMLNWFEHLDTELVCALLERWPTLEELQKVPPSKLRAFFGKHHCRNHELIEWRILAIRQSIPAIRDRAVIEAKSAAVNVIVQLIRILLEGIADLDERIEDTATAHPDFFIFKSLPGAGPALAPRLLAAWGTDRQRYAAAQDMECLSGAAPVTNQSGKKCWVHWRLACPKFLRQTFHEFAGQSILWSPWARAYYQQMRQRGVDHHPAVRSLAYKWIRIIYRCWKDHTLYDEARYQKALQRHGSPLATALRQLSTGEARA

SEQ ID NO: 364010 - protein, 365 aa, unidentified
MNKCLHTELSSPEGTRGQFNGRSGAIKIGIDLHQAFHVVVVQAGGSLPKPAQRMAKGAFLPWAAKLRRAHPGVALHAVYEACGFGFGLQRQLSALGIHCHVVCPQKLDERQQRVKTDGRDAKALCQKLDRYVEGNTDALALVRVPTEAEEQARALHRQREQLVRTRKQLAAHGRSLMVNHGIEPVNNWWKARPFARLEVPAWLHTLLSNTQPLLVSLEAQIRQLTLQLENSAAPGQPRGLGALSSVVIDREIGDWHRFQNRRQVGSYTGLCPGEYSSGQTRVQSCVTKHGNPRLRAALVETAWRLVRFQPHYRTVAKWRHLLAKGALATGAARKKAITAVARQLAVDLWRIRTGQLQPEKLGLVI

SEQ ID NO: 364011 - protein, 408 aa, unidentified
MERFYLGVDWADQFHQVWVSDFDGKKVVEKKVTQNIDGLAEFGRWLDEQRAKPIELWAAIEKPQGRIVDFLLDHGVEVYPVNPKALDRARDRFRMSRSKSDGFDAYVLAQFLRTDHGHLRALKPNSVQAQELKLLTRDQQRLGHQKTRLLNQLTATLKEYYSRPLEVFSDLETQIALDFLKQNPTPDDLSKLTRRQWNRFAKREHHLGAERAQELWEQLNQPQLTVPEHVVRAKAHLLRVLLGQLDPLRKAVKSYEERIKSFFGSMPAAELFKGLPGAKTGTIIATLWAELGDPKSRWESFRHLQAEAGVVPVTKTSGKSRVVQFRFSCNKIMRHAAYWLAFVSLNRSEWANHYYRDQRAKGHSHHQSLRALGAKWLKIIFVMWRDHKPYDENYHLANIARQKMRQAA

SEQ ID NO: 364012 - protein, 328 aa, unidentified
MDTVGAVLASLTIATDGGGFRQLLQWAQGLGKISAFGIEGTGSYGSSVASYVRRHEYKVVEVSRPDRRLRRLNGKSDTLDADNAARAVLAGASAIPKTADGTVEMIRQIKVAQDTAVKQRAATMVTLKAMLIHAPESVRQDTRNLTQIKLARHLAALRPRQLHTPNDSIRHTLRSLTKRWLAPDNESRELAALIEGLVTTAAPQLIEPFGIGVDTAAEILIVVGDNPERIKSEAALAKLAGISPIPASSGMTTGKHRINHGGHRQLNAAIYRTVIVRMRFHEPTIAYVNRRTAEGKSKRDIIRCLKRYVIREVYHLIKAQPNAQNIAA

SEQ ID NO: 364013 - protein, 355 aa, unidentified
MDSKKYIGMDVHKESISIAVMNGAGKIVMECVIETKASMILQFIDGLRGDVHVTFEEGTSAAWLYDLLKPQVTKLVVCDPRKNASMREGSQSDKIDARRLAELLRLNHLNPVYHGEHGLRSLKELVRSYITITKDLGRVMSRVKAIYRSWAIACTGKQVYAPRHRAEWLGKIGEPGVRRRAEFYYQQLDALRCLRQEVRRELLAESKKHQAWKRLCQIPSMGPIRAAVLLGILQTPHRFRSKRQLWTYSGFGIETQSSADHRRVDGQLQRAKKPSSIRGLNRNCNHDLKNLFKGAAIVASSKPGPFQEFYAALLTKGMRPEMARLTLARKIATIVLMVWKRGACFDAQHLKPQTV

SEQ ID NO: 364014 - protein, 342 aa, unidentified
MDAKRYIGIDLHRNCFTACLRLENGREYLKQWKLEDMAKFTAKLRPSDEVAVEVTGNTRLFHDAVAPHVGRVVAVNASQFKVITHSVKKTDPNDARNLALYLAKDLLPEVRMKDKTQAQIASLTQTRDTMVKLRTALKNKVNNVCSAHGVNLNKESLGSEKGLRTVLEMRFDPLVNQELKIIIDQIRSLNQSIAALEETIGKEGQKLEGHKNLTSIKGIGGLSAGILLSIIGDIGDFSDEGKLAAYFGIVPRISNSNETEHSGRITKRGTKLGRTTLVQCALIAQRYSPYLKNYYEKKKSRGTGKAIIALARKFLGIIYRTLKNKWLFEDFPNFVLAEETTA

SEQ ID NO: 364015 - protein, 345 aa, unidentified
MKHFAGLDVSLEETAICVVDETGTMVREARVSSEPEALVAFFRGLGLVVERIGLEACSLSAWLHESLVAASLPAVCIETRRAKAAMGAMPNKTDRNDARGLAQIIRTGWYRAVHVKSPTCRSWRALLTARRLVLNKMRDLENGLRALLREAGLKLGTPARKEFAARVRELTAADPVLSIMTEPLLTIIAAMTRELAQLTKRVLDIVRDEPVCRRLMGVPGVGPLTALTFRATIDRPERFRRSRDVGAHLGLTPKRYQSGETDVQGGISRCGDELARTALYEAAHSLLIRSRKWSTLRAWGMQVAKRRGMARARIAVARKLAAILHRMWADGTEFRWGEADAAVAT

SEQ ID NO: 364016 - protein, 409 aa, unidentified
MGKTLFVGIDIGSDTNVVRILDDTGKDVCSFNVSNDLPGAERLVERIVAEAELLNADKVKIGMEATNLYWWHLSQALHEAPELSAFATEIAVINPKVIDGFKRIYPDMAKTDSLDARVIADCLRFGRVRPTPPPDMTYAPLQRLTRFRYHLVSNLTREKNRALNLIFLKFSTYQKECPFSDLFGQASRAVVGNLTPDEIANMPVEELVDMMLEHGNNRLKDVPEMARVIKQAARSSYRLNPKMRDAVDVTLAMSLETIRFFETQQKKIDQVIAKELKAIPQTLDTVPGIGPVYSAGIVAEIGDISRFKNHNALAKFAGLTWRQHQSSRFTAEDLPLTRSGNYYLRYYLIEAANSVRVREPEYAAFYRKKFTEARHHHHKRALVLSARKLVRMVFTLLSEGQIYRQRRLG

SEQ ID NO: 364017 - protein, 368 aa, unidentified
MASIIYVGMDVHSSTYSLCSYSIEKQKCFAQTRVEADHNRIVQYLKQVEAHSGGPCEFVCGYEAGCLGYTLYHELTEHGIHCVILAPTTMMSERKRIKTDGRDAETISKCLAYHTYSPVYIPSETDNAVKEYIRMRDDEKIVLKKVKQQINAFCLRHGFHYTGKSKWTTTHLEWLNRLRLGNALLQEVLCEYLSLYQQAKDKLEIFDARIKELASEQEYSNRVKQLSCFIGISVHTALALIVETSDFARFKSATQYSAYLGLVPGEHSSGGTQKRAGITKAGNSHLRTLLIEAGHCYGRGRVGLKTNVLKNKQQGNPASVIAYADRANDRLKRKFYKLAFKGNHNVAATAVARELACFVWGMMTENIA

SEQ ID NO: 364018 - protein, 467 aa, unidentified
MNDSLILGVDPAKEKFTAAFFAADDSKPQAGRDFPMTRQGLDDLGQAIAGRLAADQRLVVGVEATAALDDNLLAWFAAQRQRWPLLLLQLDPGQVARFSGARPVRGKTDKADARRIAAFTAAHARHLDAFERDAEAQSLTRLVHERGALAADRAALKNRLRDRLVISFPEFTGVFDDPSMPMARAVLRKAPTAKRAAACRATTLARVAPEGEGAHALGMARAEKLRALGRGSIASATFDDDADAIVFMLDQIELIGRRVAAIDRALIACQAGALAEEAALAKAAASASATNDSNANATSTAVSIPRQIARLAAMRGVGAVGAATIVLSAGGLARFTSAKALAAQMGACPERLQTGKTMDKGRLTHRGDRRARSMLYMLALTVTQFDPGLAFHKFMMRRRGHQPKQVLCACMNRLARIMWAVATGPPAYDPRRVIENAQRHHAGPWKEFVDQTRHNRKLWKGHEEFIQ

SEQ ID NO: 364019 - protein, 417 aa, unidentified
MNTPLLVGVDVHRKENVVAMMNGDGEEVAERLSVDNNRPGTEQLIEQLTELLETGEYDALQVGAEATGYYWLHFFRMLQEDDFLNQWPLDLYSFNPRVIAHYKKTFVDLDKTDGIDAFAIADRLHLKRDLPTPFAFDEPHLALRLLTRYRYHLVHNLAREKSYCLAILYLKASEYTHPDRKPFSDVFGAASRAVLLEFTSIEEIAALPFEQLQEWIDGKGKRHFADPSDNTRKLRQVAQDSYALPPTLLPSVNLILATSFQQITQLQRAIKRVDTAIAEQLQEIPQTLDSIPGFGPVFTAGIIAEIGDIARFSYDQAKVAKFAGFKWRQHQSADFRAEETRLTRTGNRYLRYYFCEAANLIRVLDLDYKAFYQRKFREVRRHQHKRAIVLTARKLIRLVVRLLTTNQTYRPRRLAIA

SEQ ID NO: 364020 - protein, 389 aa, unidentified
MYIVAIDIAKFHHDAIVVDDDTGAIVVEPFRFGNNDEGFKTLMQNIRPYLKGKHLIGFESTGHYGHNLMMFLLDHKLTVGIVNPLSTKAEREKKIRKTKTDRIDCYVIYKVLSSRDYARMSRKKLKLQEAKTLTRAYNNLMEDITLYKNRLQKCVDIAFPELNGLVTPYTKRYNAILKEFGSAKVVAKTHLGTIKKVLSIKGRGNHTKVDPHELKTLAQRSIGQNIDANNLEIEYLLGMIEFLEEKKKIYTKKIEEYARQLNSPIFSIPGIGYTTGLSILSEIGDIALFSSATKVVAFAGVDPSVYQSGEYQGNGLAISKRGSRYLRKALYQCILTVCNNSSTFKNYYNLKKSQGKTHLCAQGHCVRKLIRVIYKLLTQNIKFDETALV

SEQ ID NO: 364021 - protein, 340 aa, unidentified
MYNILKQVFGIDVSMDSFTVRFGTTDTKQDQQISKEETFKNTTLGFKKFIKWTKKHIISNDIPLFFVMEATGVYYENLAYFLYSNNYNVSVVLPGKIRNYAKSLQTKSKTDPIDAANITSFGLERKLNLWKPANSTIKPVKELCREYHSTKIIITEIKNQLHAKNHSYQPDKQTILRKKQLIRMLEKQTKEIENQIKAVIKQDKELSDKIDRAVKIKGLGFISVVTAVAETNGFELVSNQKQLASYAGLDVVYNDSGIKKGKTSISKKGNKFLRKAVFMPALSASKHNQKMKELYVRLVSKGKNKKLALIAVARKLLLLIYTIWKNNTDYIPNYNPCLRK

SEQ ID NO: 364022 - protein, 363 aa, unidentified
MVSPILAQWTTLSEDFVLLGAIMDTVSLIGIDLGKHCFHLHAQDGSGRMVLRKKLTRNQMFALLSNFPSCTVVMEACAGAHWIARRLQALGHEAKLISPHFVKPFRQGNKNDFADAQAICEAASRPSMRFVSPRNEAQQVVSALHRVREALVRNRTGTINQIHAFLLEFGISLPRGMAVMRRLPAVLEAQALPPRLVAVLERLQAHFKYLDEQIGQVEHELLTQLHEDERSERLLEIPGIGPITASVLMSELGDARQYGSARQFAASIGLVPRQYSTGGKPTLLGISKRGDKGLRRLLVQCARVIMLRIERRTDSLGVWVRSLLARRHSNVVACALANKLARIAWAILAKGTHYRSAPTALPA

SEQ ID NO: 364023 - protein, 338 aa, unidentified
MNRYVALDVSLEFAAVCVMDEEGELVLERKVASDPAAIAGLLFELPERPCCVGLEAGPLSEWLARGLAQAGLDAVLMETRHVRAALSAMVAKTDRNDARGMAQLLRMGWFRPVHRKTMNAREQRALLAARSTLGRRLRDVENSVRGILRGFGIRVPRLPRGRWSDGVRGALQGNTVLRGVVEPLLAATQALRDQLAVVDKRARDAARQDAVCRRLMTMPGVGAIVALTYRAGVDQPERFKSSRQLGPCFGLTPRRYQSGETDRSGAISRAGDASVRVALFEAAHVMLTRSTHWSKLKAWAVAVAKRRGAKRAKVALARKIAVILHRMWIDGTEFRFVA

SEQ ID NO: 364024 - protein, 343 aa, unidentified
MQSITTIGLDIAKSVFQVHGVDAGGQVVVRRQLKRRYVLAFFQKLPPCLVGIEACASSHHWSRELKTLGHTVRLMPPAYVKPYVKRQKNDATDAEAICEAVTRANMRFVATKTPGQQSGLMLHRTRHLFIRQQTAVINAIRAHLAEYGIVAPVGRNGVEQLLGVVADSNDKRLPEVARACVAALGAQLRMLKTQILEFDRRIMAWHRSNETSQRLDKIPGVGPALATALVASVADPKAFRSGRDFSAWIGLVPKQNSSGGKDKLGSISKQGDRYLRSLFTAGALAVIRYAKIHGTKHRPWLTSLLSRRPTKVAAIALANKIARMAWAMMAKGERYKEPAALAA

SEQ ID NO: 364025 - protein, 418 aa, unidentified
MTRGDDSRIIRIVHPICCGLDVHKESVSACVIFPDDKGEEQCDVKVFGTFTDDLMRLRDWLAAHNCPVVAMESTGVYWRPVHNVLEDSVQVVLVNARDMHNVPGRKTDIGDSRWIAGLLRHGLLKSSFIPPQDVRQWRDLTRLRKKYVHTVGDYRKRTHKLFESANIKIDSVVSDLFGVTGRNLMQLLVADRKLTLSDIQTCVRGKLKGKEAELFRSIQGFFTDHHRFVLKMILETIATLEAQIEALDLQIRCAMKEHEALLDRMKQAPGIADVASREILAEIGPTLDSFRKDTALVAWSGLCPGNNESAGKRKSGKSPVRKHHLKTIMIEVAWAAIKKKDSYFKDKYYRLKARRGAKRAIVAIAHRILLGIYHVIKDGADFRDLGGDYLTLRNKSQKVFHLRKQALAMGFDLVPQAV

SEQ ID NO: 364026 - protein, 341 aa, unidentified
MEHIAIDLGRRESQICVRDESGQILEEARHSTSELRSYLRGRPMGSRVLVESSAEAFTVADWASELGHEPRVVPSILVPALGVGERGLKNDVRDARKLSEMDCRMEVPSVHIPTAERRAHQARLTARDALVRVRTKLINTVRSFVRMRAIAPIRATPPTLPRAVRATLLHTPEGVPDYLEALLQSLEHLNAQIQQADHALREVAHGEPVCRLLMTMPGVGPVTALSFVSAIDDVTRFEDASRLTSYLGLVPGERTTGFRTRRTAMTKAGPSRVRWTLTQAAWTLVRVQPDSPLGQWYEQVSKRRGKKIAISGLSRRMAAILYAMWREQRPYDATRAASRQR

SEQ ID NO: 364027 - protein, 337 aa, unidentified
MRQIKFFIGTDVSKEWLDMCIILEGEVIHRQQIKNKETAIRKWLKQTQKQYGYSMQDSLFTMEFTGIYNHHLLELLHQAGANIWLIPGLEINASRGLQRSKNDKDDARLIAEYAIKNLKKVRLWKKPRTVLKQLAALLMMREKLMTSKHQYQTTLKEYKSFSTKDEYLIIKDYSSAMLKTICQDLKTIEHQIKDIIEGDEQLKELHEYITSVDGVGIITSANTLVETNEFLDISEAKKFSNHSGVVPHKDESGKKIKKPKVSHKANKKMKKLLHLAAMSVIRKKGELRDYYERKIAEGKNKMSVLNAIRNKLVLRIFACVNNKRKYEKNYVYSLVNP

SEQ ID NO: 364028 - protein, 354 aa, unidentified
MPCLPVEVILGVDTHRDTHAVVLVDLLGRLVATASFPTTRPGLRALIKWAQQRGNVRRAGVEGTGSFGAGLTRALRQEGIEVVEVTRATRVGGRHRGKNDTRDAEAAARSVLSGQATAEPKARDGIVESIRVLRNTRASAIKARTQAILHIKNLIVTAPDELRETLSPLTNRQLVKRCARMHRSSRRDSLAATRHALRSLARRHQDLDAEVAELDQLLGELVAQAAPRLLKQPGIGPEIAARMLLVAGDNPTRLRSDAALAALCGASPIEASSGKTIRHRLNRGGDRQGNSALWLIANNRMIHHPETRGYVKRRTTDGKSTKEIRRCLMRHIARGIYPLILADLHDAHQQPALT

SEQ ID NO: 364029 - protein, 311 aa, unidentified
MTTQSLFVGIDISKDQLDVSIRPEGSCLSHPYTEEGIRLLVDHIARLQPELILLEATGGYETRIVAALAHARLPVVVINPRQVRDFAKATGKLAKTDRIDAQVLAHFAEAIRPEPRLLADEDQKELNALMTRHQQLVEMITMEKNRLRTTTKLVQRQIQDHLQWLVSQLKKVDKDLDKFIGNNPALQRKVEITKSVPGVGPVLSRALISYLPELGTVSNKQISALVGVAPFNCDSGQYRGKRIIWGGRAHIRSILYMGALVATQCNPVIRSFYERLLQAGKSKKLALTACMRKLLTILNAMVKNDTLWGEN

SEQ ID NO: 364030 - protein, 345 aa, unidentified
MEITTIGRDLAKNVYQVHAINGVGEVVVRKALRRVQVLRFFERLDPCLVGIEACGTSHYWAREIGKLGHEVRLMPPAYVKPYVKRGKTDASDAEAICEAVTRPTMRHVAIKSCEQQAALTVHRTRDLFVKQRTQLVNMIRGLLAEFGIEIRRGITHALSLAERIAAGEMPDIPALAAKMIASLAGQVLDLQTRLRELERELLAWHRSNDIARRLATIPGVGTICATAFAASVTDPHQFRSGRQFAAWLGLTPLQHSSGGKERLGRISKMGDKYLRRLLVVGMTSLVRRAKYKPDAVDPRLAALLSRKPVRVVTVALANKAARVIWAIMARGGIYRAPQPAGAGIA

SEQ ID NO: 364031 - protein, 354 aa, unidentified
MGMLEGQVEFVIGIDTHRDTHTAAVCDPAGALLVHATVPTTTVGHRQLLGLAQRHASGRRVWAVEGTGSFGAGLTSLLVDHGELVVEVDRPKRPARRNGAKSDALDATRAAREVLAREHLAQPRAGGDREAMRVLLATRRCVVDARTKAINQLKALIVGAPPPLRERLRHRCTAAQVRCCSRLRIHANHSIEHRVTVQAMRATARRIQFLEAEAAQHQAELDRLVAKIAPFLLSELGVGALTAAQLLVSWSHPGRVRSEAAFAMLAGVAPLEASSGRVTRHRLNRAGDRQLNRALHVIALTRLRQDPTTSRYVARRRAEGKGDKEIRRCLKRILARRLFRLLQRELTQLPAPPA

SEQ ID NO: 364032 - protein, 344 aa, unidentified
MKITTVGIDLAKNIFAVHGVNEHGRAVLKKVLKRDQIAAFFANLPACLIGMEACSSAHHWARKLQKMGHTVRLIAPQFVKPYVKTNKNDAADAEAICEAVARPNMRFVPVKNVEQQSVLSLHRVRQGFVRARTAQANQIRGLLSEFGLVVPQGISHIARRVPELLEDATNELTGSFRLLIQRLMEHLKELDRQVRELEVQIQVCHRANETSCKLAKIPGIGPITASALVASIGDATSFANGRQLAAWLGLVPRQNSSGGKNVLLGISKRGDTYLRTLLIHGARSVMQAANRKEQKEGWLHRLLQRRNPNVAVVALANKNARIVWALLAHRREFQSDYTAATAAV

SEQ ID NO: 364033 - protein, 445 aa, unidentified
MHYKRLLALIDSVSSHLSVGLDVGADFTWMSIALPNGSFIGKPFKIVHSDPRSRDLAVTKIKEAQETYSLKSRCFLESTGIYHIPLLCFLRDKGFDCSVINPIITKNSTNINIRKLHNDKFDSKKAALVGLNVSLKTSIIPDDSVVDLRNLVRDYYYFKDLQSAVALKLTAELKVSFPAYAKVFSKVTTQSSLKLLSSYPLAGDMLEASKDDIVEIIRSTARFGEAYALRKYNAIIAAAQDAAVFGRALPSNAVRIRLYIDTYQEYQKHLDALLKALHETVERLQDTLIYDQICLLQSLRGIGFLSAVVLIAEMGNFKLFSSPKKLYAYFGLDPAVKQSGKLNGDKVHMSKRGSSLARRVLHIVALNNVKVDKGSGTPVNPVVYDYYARKCSGKKKPVAMGAVMHKICNIIFAMLRDNKPFEVIPPEEHCRRFAAEHPDKMRKAA

SEQ ID NO: 364034 - protein, 365 aa, unidentified
MESPFNVTKEGDAHSMTVIKQVVGIDIAKDTFSVRFGTISDRQEERFLASAAFPNEKRGFRKLLEWTRKQIISPDAPLWFVMEATGAYYEHVAYFLHEHDQQLAVLLPNKVKHFAKTLEGKSKTDRLDARSICQFGLERPLHAWQAPSPQMKLLKELSREYNAVQEMATQVKNQLHAKDHTYQPSPETTQRLRAQLQLFQKQLRSIEQQLRSLVNDDDDLRRRIANITSVKGIGFMTAVTAVAETNGFALITSEKQITSYAGLDIVIRESGKQQGKPALSKKGNRHLRRAVFMPALAACRFNPALRAFYLRLVRTKASKKVALLAVARKLLCLIYILWKKNVPYDPDYRHQNIRSVPDNFALQTA

SEQ ID NO: 364035 - protein, 415 aa, unidentified
MDILYPRCAGLDVHKDTVVAGVRLAGDGPVRTEVRTFNTTTPGLLALSAWLAEHGCTHVAMEATGVYWKPVWHVLSDGEFTLILANAAHVKNVPGRKTDVADALWLADLLAHGLIRASFVPEAPTQELRALLRTRKQLVREQASHVQRLQKTLEDANLKLSSVLTQIMGKSGRAILEALVDGEADPDKLLALVQRGVKAPPETLRAALQGRITVRHRFLLRLHLRQFDALAAAIAEIDAEVDRDLDPFRQAVRLLSTIPGVSDLTAQVIISEIGIDMSRFPTAGHLISWAGLCPRNDESAGKRRSTRLRKGAPWLKTTLVQCAWAGARKKASYLQAQFQRLRHRRGPKKAICAVAASILTAAYHMLRDGTFYQDLGPDHFRRAAPEVQANRLARQIAKLGFTCTISPAAEREVSV

SEQ ID NO: 364036 - protein, 391 aa, unidentified
MIAPRAVGCNDGMDSSRFFRGMIAVNSWVAPRHQEEAKMDATTVAVDLAKDVFEVAVANRAGRITERKRLTRRQFERFIDTLPPGTEVIMEGCGTAHFWGRRCRARGLDVRLLPVQYVRPYVRRNKTDRTDTEALLEANRCSGIDPIPVKTVDQQALQALHRVRTQWQATRTARINAMRGVLREHGLPIGVGAQTALTRIPALLEDADVELPGLVRHVVSLLLEEVRWLETRITTIDRELAAIARDHPIAQRLQQIPGVGVLTATALVGAVGHIHAFRRARHFASWLDLTPRESSTGGRRYLGGISKRGDVYLRCLLSHGARAVLLTAQRTVQSAPHRATPFQQWAVTLAARRGHNKAAIAVANKLARQVWAVWHHGVDFTALRPRGSAAA

SEQ ID NO: 364037 - protein, 355 aa, unidentified
MDKIKFIGLDVHRDTISAAVLNESGRLLQQSVLMTRTVAILDFIGGVRGSLHVTFEEGTHSAWLYDLLSRRVDKLVVCNPRKNALLKSGNKGDAIDARKLADLLRAGLLSPVYHGETSALEVQQLARSYLMLTEDTTRAMGRLKAVFRGQAISCTGRKLYGPKHRGEYLAALGGCALRRRAERLYQQLDALQQLRRDARHDLIVECRKHVEAKWLQTVPFLGPLRAAVLIGRVQTPHRFRTKRQFWTYCGLALETRDSAEYRVTDGQLERKKRPAQVRGLNWNYNHELKNVFKGAANAASTGQGVFREFYLGLLTKGMRPEMARLTLARKIAAIALKIWKKGESFDAEHLKSKAA

SEQ ID NO: 364038 - protein, 412 aa, unidentified
MEQVIIGVDPHKLSATIEVVNNQEHLLGSGRFTTDQRGYTAMRSYVKAWPNRVWAVEGANGAGRPLAQRLVEDGEQVVDVPAKLAARVRLFDTGHNRKTDALDAHSIAIVAVRTKGLRVLAADGELEALRMLTDRRDELGHLRVQTVNRLQRLLSELFPGQRKKDLSALQAKAMLTTVRPRDIAGKTRRRMAAEELADLVAVDAKLKKIKAELKAMVIARGSTLLQINGIGPAGAARTLADVGDITRFADRNRFASWTGTAPLDASSGEQIRHRLSRAGNRRMNHVLHIAAIVQLRNDTEGRAYFQRKVAAGKTRMEALRALKRRLSDVLYRRLVADARTRDLDAKSRGLIDDGTGPGGHCGATQESSAADLPPHVDTSDQPLPGPARPTLPRPNRTRKTATSPSSLNRLLT

SEQ ID NO: 364039 - protein, 420 aa, unidentified
MTSPNAIPADAVLVAIDIAKACNEVLIEAPSHKRRRRLSVLNSRAEHDRLVEVLQTYGRPVICAFEATGNYHRPVAWRLAEAGFEVRLVSSLALARTREALHNSWDKNDPKDAQVILHMLKIQATQVYQDPLRAGINDVQELSKTHEAIARAKTEIQHRILTHYLPLYFPEIDRFRGNSRSDWFFAFLDAFPTPASITTLTKEAFVAGAWDVVGRKVSKTQILMDIYETARTSIGLPLPLEAPAIRMFRMVIAEARSLIRQRNEIETQADELLRHSKDYLLLRQIPGIGPINALTIIAEAGDLRRFHHHRQFLKFCGLDLSTQQSGQYRGQTRLSKFGNARLRRTLWIAGQVAIRQRENGFRHKFERYIARDRDNPDLRRKAMTAITAKMARVVHAVVKGDSDYRPFVEGRVPGGRTSVS

SEQ ID NO: 364040 - protein, 389 aa, unidentified
METVVERPAALDVHKEHVTACVRVPGLDGGREQQVAEFATTVAGLLTLRDWLAAYGVRQVTMEATGVFWKPVWAVLEDEFELLLVNARHVKQVPGRKTDVKDAEWLCQLAEAGLLRSSFVPPKPIRALRNLTRYRKTQIQERAREANRLHKALEDTGIKLDCVATNILGKSGRAMLDALVAGTTDPEVLADLARGRLRAKIPALREALEGRFDHLHAVWIGAILNHLDFLDEQISGLTEAIGEQIAPFEQAVELLCTIPGVQRRTAEVIVSEIGIDMSVFPTAKHLASWAGQCPGNDQSAGKRRSGHTRKGSKWLKIALDEAALAATRTKGSYLQAQYQRLRPRIGHSRALLAVQHSMLVAYWHMFSTGETHHDLGGNYFRKRDPERTT

SEQ ID NO: 364041 - protein, 355 aa, unidentified
MSMLAEQYEFVIGGDPDRDTVDLAVVDSATGALRAHLADRADGAGYARMLAWADSHAPGRRVWALEGTGSFAAGLAVFLAEAGEDVVEIGGVKRQRGAKNDQIDAARAARQALAREHQTKVRAHGLREALRMIVTTRQAILVSRTKAINELKGLIVAAPEQLRSDLRGCSLARQLDRIEAMSTQPEGAVEHKMAVLTLQSIAARVRFLSAQVDELDPELMTLLKQHPAGPALLAEPGVGPVVAAQLLVSWSHRGRVRSEAAFAALSGTAPLEASSGQRTRHRLNRGGDRDLNRALHTVAITRMRCHPETRAYHAKRTAQGKTHRDIRRCLKRALARRLYRRIQAATHQQQIPAAA

SEQ ID NO: 364042 - protein, 405 aa, unidentified
MEQVFVGLDWAEDHHDVFVEDDIGKRLGGGRLPEGVEGVARFHELVAGHVDDPADVVVATETDRGLFIGALVAAGYTVLAVNPMSTSRYRERHSTSGAKSDPGDAKVLADLARTDAHNHRPVAGDSELAEAVKVLARAHQTMIWSRQRHTNQLRSILREFYPAALEAFDELAGRDALAVLAIAPTPTIAKLLSRSKIAAALRRGGRQRRIDERAIEIQTALRAEQLEAPAVVADAMGASVAALVAVIAEMQTQIERLEAELAERFEQHPDAKIIRSLPGLGMTLGARVLAEFGDDPNRYADAKSRKNYSGMSPITRASGKQHVVLARYARNRRLADACYQWAFATLTASPGARHFYDQRRAAGDTHTRALRALANRLVGILHGCLRHHTIYDEHTAWAHRTHIAA

SEQ ID NO: 364043 - protein, 338 aa, unidentified
MRAYAGIDLHSSNNYIGIMDQDYKRLFGRRQPNDLNNVLKVLEPFKPDLEGVIVESTYNWYWLVDGLQEHGYTVHLANPSAIKQYEGIKHTDDRWDSFWLAHMKHLNILPEGYIYPKEQRAVRDLLRRRLFFVKHRTANILSLQSTITRNLGIKMSNNDIKKLNMDDAYKLFDSSNLVFMAQNNISAIKHLGKIIKGIEKKVKSQVQLRKKFVMLLTIPGIGTILGLTIMLEIGDIGRFSKVGNYSSYCRCVSSKRLSNGKKKGENNKKNGNKYLAWAYVEAAHFATRYIPRAQKFYQQKMAKANGAVATKALANKLARASYFIMRDQVPFDEDMLFK

SEQ ID NO: 364044 - protein, 362 aa, unidentified
MVWTLLLLDRGGILAVTTLYQQEGLMNNITTIGLDLAKRVFQVHGLDQDGQLVLRKQIRRGQVVKFFGTLPPCLVGMEACGSAHHWARELQGHDVRLIPPQYVRPFLKTNKHDAADAEAIAEAVVRPTMRFAPIKSADQQAVLMLHRSRELLVKQRTMFLNAIRGHCHELGMIASQGASRVNDLIAIIEDPEDMRFPAIAREALGVLIAQLQVVKEAIRKLEHKLHVWHRSQQASQRLTTIPGVGVITATALVATIGDGSQFKSGRHLSAWLGLVPRQHSSGGKSRLGRISKRGDGYLRRLLVHGSRAVLRWQRGVPKQPSPWIGELLTRRPTNVVLVAMANKTARTVWAMMRDQQAFKAVA

SEQ ID NO: 364045 - protein, 412 aa, unidentified
MKDLLEISCGLDVHKEKIVACILTGPLGKPTRSEIREFSTLIPDMIALRNWIVSKNCHHVAMESTGIYWMPIYEILEDAFSGDITLLVVNARHMKNVPGKKTDMRDSEWISTLLRAGLLNGSFIPEKRIREFRDLNRYRKSVIRDITSQKNRIEKFLQSSGFRLSSFISDIFGASGRNIILHLIEHGQIDKTALDSCLKTKTRNRIDEILMSVNGTLSEHQKAFLRILMTHYDSLKKHLAEIETSLEEDMPPFALQVEQLNSIYGISTTASCAIIAEIGIDMKPFKTAEHICSWAGLCPGNNESAGKRKSTSVTKGNPYIKSMLCEIAWVIAGKRNTYLSAWYWRIKQKKGAKKAIVALARKLLVIIYTMLKQGTLFDESCFETRRKHCEQKQLSRYIRELEKHGYHVEAQS

SEQ ID NO: 364046 - protein, 413 aa, unidentified
MSVTLHSRASRVCAGVDWAKDDHAIAIIDSEGKVMDRFAVNHDAAGLKSLVRRLLTAGVSEVGIERGDGPVVEALLQAELTVLVIPPGQLKNLRSRYGSAGNKDDRYDAYILADVVRTDRHRLRPLVRDTTATTALRGTVRARRDLVEHRVAAANQLRAHLQIVFPAAANLFATIDSAISLTFLERFTTQSKADWLSPKRLSTWLSSVSYTGRTTPDVLHTRLLAAPRGTTSTDAATHTMTTLAFVAILRALNTQIQALATSIGEQLAIHPDAHIITSLPRSGTVRAARLLAEIGDARGRFPTADSLACLAGVAPSTRQSGKVKAVTFRWGANRELRDAVCDFAGDSRHANPWAADLYTKARARGHDHPHAVRILGRAWIHIIWRAWQDNTAYDPTKHRALQTLLNTTTEKAA

SEQ ID NO: 364047 - protein, 364 aa, unidentified
MHYVNNIELSSHEETRRQFNGGLGAIKLGIDVHQDFYVVVEQVGESNPKPPQRFAKTAFLHWAGRLKQKSGAEVHAVYEACGFGFGLQRDLTTLGIKCQVVCPQKLDEHNRRVKTDGLDAKALCLKLDRFVQGNRAALAIVRVPTEEEEQLRAIHRQREQLVKARKQLEAQGRSLLVNHGLEPVQNWWKPRTFAALQVSDWIKELLQNSQPILIALQEKISALTAQLQSAAAPKQPRGLGKMTSVIIDREIGDWRRFSNRRQIASYTGLCPGEYSSGNTRLQSCVTKHGNPRLRAALVELAWRLVRFQPNYKPIVKWRQILAKGALATGAARKKAIVAVARQLAVDLWRIKTGRLSAEELGLIN

SEQ ID NO: 364048 - protein, 396 aa, unidentified
MYTADNPMLVGIDVAKDSFVVALRHDESQTWTFAVDLEGLTQFETFIADLGGFEKQIIFGLEASGPYSQLLLGWLLARHARVSLLNPLQIYRFRKARSLRNTKTDAIDAALIAQYMDQVPEALVQTEATDDLMTLAREYESITVEIARLKNQIRQQVYLLFNEFSSGLTLFSKHMLNLLYDFPSARAIARAERQDLDKVWASGRGRASSLTLDEIVQRAERSISQPSHSRETVLRSKINRLLFLQDEQSSLRDALRQAVYDQDPETYDLLISVPGLGQVTVSLFLAQIRSLDRFAGHKQLTAFAGLDPNTYESGQYIAPGHISKRGSPHLRRVLYQMAQSVQRYSITFHAYYAQLRERGKPFRVAIIACANKLIRVLFALHRTKTPFRDAQAAPIS

SEQ ID NO: 364049 - protein, 428 aa, unidentified
MDHSASLTDPIVAWIGLDWADQKHDVCLQATGSTEVEHLVVEQKPEALQAWVDELRRRFPHGPIAIALEQSRGSLFYALMNYEFLRLYPIPPKALADYRKALYPSGSKDDPVDAQLLLEFLRKHPQRFRPWVADDVETRQLALLNEHRRRLVDDRTALTNRLTTLLKGYFPEALGWAEDLRTPLAWDFLAQFPSLERAQQASRLDVLKVYRAHTRRPPEQLEALCDEIRTARPLTTDRAIIASSVLMVEILVEQLRVLGAGIERVEHQLADVFATHPDRAIFQSFPGAGKALAPRLLAAWGSDRQRFPTAANMQCFAGPAPVTVRSGKTKWVHRRYAGPTFLGQTFHEFAAQSRLKSPWAKAYYQQMRDKGADHHPAVRALAFKWVCIMFRCWQDRTPYDEARYQQALKRRGSPLATTLNRLATSARL

SEQ ID NO: 364050 - protein, 344 aa, unidentified
MDIFIIGIDLGKNSCSLAGLDASGRAVLRRRMRRSSLESFVKSLGRCVVAMEACCGAHHLGRVFAAQGHEVRLMPPEYVRPYVKAQKNDDLDAEAIAEAASRPTMRFVEVKSQVQSDIQALHRARERLVSERTALINHLRALLLERGIVAPQGRRNLEEQLSTFADEDGIEALSPRIRVLIEDLRAEWRALDERISVFDKEFVQMARNDETVRRLTKIPGIGTINATALAAAVGNARAFRRGRDMAAWLGLTPRQMTTGGKPRLLGISKRGNRYLRKNLIHGARAVLPYLVERETPLGRWARGLLARAHKNVAVVALANKLARIAWAVLAHGCASDAGCEMAAA

SEQ ID NO: 364051 - protein, 423 aa, unidentified
MLQETQETEEIIERVAALDIGKAEVMCCVRVPDEGRLGRRLQEVRACPTMTRSLLEMADRLRCLGVTRVVMEATSDYWKPVFYVLEAAGFDTWLVNARDVKHLPGRPKTDKLDCIWLCKVAERQMIRPSFVPPPEIRQLRDVTRYRADLVGARTAEKNRAEKLLEDAQIKLSVVASDIFGVSGRAMMAALIAGERDPKALAQLARTRMRRKITALQEAFTGRFTGHHAFLLAKMLGRVDAIDADIAELDARIEELIAPFSAAAARLDEIPGIGPVAAAIIIAEIGTDMSRFPTAGHLASWAKFAPGVKESAGKKKGKGSTGHGDRYLARVLGEAAAGAARTDTFLGERYRRIARRRGAKKAIVATGRSILTIIWHLLADPELRYADLGPGYYEQRINPERRKRTHIRHLEALGYKVTLEPLAA

SEQ ID NO: 364052 - protein, 341 aa, unidentified
MDKELYIGVDVSKKTLDLAYYDGETIDWKNAHILVSNDDAGFKKIGSWVAKVGKDFDTFLFCMEYTGLYNQNFRLWLESKEYIYGMVEPRKMHHFEPDLDDDQRSLDRIKTDELDAFRIAIYCEQNHKKILRNPSKLPSPVYFKLKRLLAERKQNTKQSTLYKQQLHDICAYDTDLSVERKKLLLKNMKENQKAIDKEIDSYMNEDASISKNYDLLTSIPGIGRIIALETIVLTENFTAISNPRKYACYIGIAPFKKESGTSVRKRTSVSKKGFSEAKADLSIAVLSAIKNNPSIRDYWIRKRKEKCGGIVLNAVKFKLVLRMFAVIKRGTPYVETDAYKN

SEQ ID NO: 364053 - protein, 343 aa, unidentified
MRHYAGLDVSVKETSVCIIDESGKVCRETKVPSHPEDLARALHDRAWCLERVGLEAGPLSQWLFSGLAATGLPVVCIETRHTKAFLQAQVNKSDRNDARGIAQMMRVNLFRPVHVKTLTSQKRRALLTARKLLQEKALAVDNDIRGLLRNFGLKVGPIGASKFETRIRELVEGMPELAEIIDPLLEARRKLRELFAVLHRKLLVIVRDDTVCRRLMTVPGVGPVVSMAFTATIDVPARFKSSKAVGAALGLTPVLNQSGESKRIGRVSLCGDGMTRTLLYEAAQVMLTRTTKWSWLKAWAMKVAARRGLQKAIVALARRLAVILHRIWVSGTEFRWTRDAQST

SEQ ID NO: 364054 - protein, 355 aa, unidentified
MNSVKYVGLDVHQSTISVAVLNAEGRLVMQSVIATQAAAILDFIAGQRGTLQVTFEEGTHSAWLYDLLVRRVARLVVCNPRQNALLKSGNKSDPIDARKLAELLRAGMLSPVYHGENSTGGLQQLVASYTALTQDTTRVMARIKALYRSQAIACAGKKPLGKRHRQQWLEKLTAAGQRQRAECLYAELDAVQGLRRQARQALVAENRKHAAAKLLRTMPFLGPLRAAVLLAKVQTPYRFRSKRQFWAYCGLGLETRSSADYVIQNGEVVRRRRALYIRGLNWNHSHPLKNLFQSAATTASTMQGPLREFYQARVAKGMQPALARLTLARKMAAIALILWKKGEVFEAKHLNSQAA

SEQ ID NO: 364055 - protein, 346 aa, unidentified
MEYVGMDVHKSASQVCILTEDGELKERRIRTEGSRLAAVLGGRPRARVLLEASTESEWVARCVESLGHEVIVADPNFAPMYATRSRRVKTDRRDARALAEACQLGAYRPAHRVSEARQRIRRQLVVREALVRTRTRYIGVVGALLRREGMRIPSGAPATFVDRIELMELDGRLKSAIAPILAVMLPLRRQVEYGDAELAGLAASDPVVRRLCTVPSIGPVTAASFVATLDGVERFGGAHQVEAYLGLVPRERSSGEKQGRGGITKAGHTRTRWLLVEAAWSILCRKRPEAEPLWRWADRIATRRGRHVAALALARRLAGILYALWRDDVDYDPAWVGRRDHRVAVP

SEQ ID NO: 364056 - protein, 418 aa, unidentified
MKEELIARLSRRYLALDIHKHYSIVAGVDFEGEVILEPVRVEHTDLSDWLERHIQSTDYVVIESTTNAWYVYDLLEPLAEKTLVANPIKVKQIAQARVKTDIRDTLILARMLAANMIPAIWVPPLEVRNLRYLLSQRRRLMGMHTQVVNRMHSVAHRHHLSHPKGKRFNEKNTAWQQDDELSDEEKFQLDLDRATEKHLSEQAGKITKKLARMSHEKPWAESMMYLMQLPGFGIITAMTVLAAIGDIHRFEDFKKLSSYSGLTPGVEQSGVKNRGKKITKEGRKDLRWAMVEVAQRAVKSDPHWGRRFQELCRRMHRNQAIVVIAHRLLELVWLVLTRRQPYRNFSHERIAYKYLTWSWQLSEEDRDGLTRQQFARYYLMRLGIGHDLERVALNPKHPRRLASEAELLALKPELTRIE

SEQ ID NO: 364057 - protein, 395 aa, unidentified
MTAVWAGIDSGKRTHHCAVIDGAGRMVRSQRVANDESALLELITSVLALAGEDQVVWATDLNAGGAALLIALLADRGQQVLYIPGRIVHHAAATYRGDGKTDAKDARIIADQARMRLDLQPVRSGDQISTDLRLLTSRRTDLVCDRVRAINRLRATMLEYFPALEAAFDYSKKAPLILLSGYQTPDTIRRVGTTRLTAWLKKRGCRGSATVAGKAVDAANAQRTVLRTEPVAAQLVAQLAGQIAAIDTEIAQLDEQISERFDQHRDAPILLSMPGFGPVLAATFLANTGSDLNAFETVDRLASVAGLAPAPRDSGRITGNHHRPRRFNRRLMRTCYLAALSSLKNSPASRAFYDRKRAEGKSHKQALIALARRRINVLWAMLRDRTTYREPLPAA

SEQ ID NO: 364058 - protein, 336 aa, unidentified
MRYIGVDLHTTQITVCYLKATGEFEIRKYQLVEMEKFVSSLEKTDEIAVEATGNTRWFREQVQEVVSRVVLVNPRQFEVVKNSCKKTDKNDAVNLARFLKADLLPEVRAKREEAEKVQSLVQTRTKLVRLKTSLINKIHALFVSNGRKLKKASLSSEKGLEKVLLCEWNAIERIELEIIIEQIRSLKVSIRKLDTAIETESVKLKGFESLISMSGIGSLSAGILLSVIGEVKDFETADKLASYFGIVPRVANSNETVNHGRITKRGNKTGRTTLVQCSLAAIKKSEYLKKYYEQVKARRGHGKAKIALARKYLGIIYNTLSNNWVFTDFNNFELAE

SEQ ID NO: 364059 - protein, 341 aa, unidentified
MGRSIGVDLHKTQFTVCFYQTEQAYTFKTYRVSRQGLTAFRKQLRTEDELAVESTGNTAFFVREIESCVKRVRIVNPVQFKVIANSVKKTDTIDALTIARFLSRDLIPEVRMRSKEESQRSSLIGTRDKFVKLRTALKNKLHNILNANGVVSKPEMFSSAVGLENVLQVPLETSYRFEVGLLVTEIRHLNEAIKQLDAELKRQGQQLPGHQNLTSIKGISDTGATIFLTTIGNLADFKDEKALASYFGIVPRVYQSNQTCHYGRITKRGNKIARTALVQSTLVAIRYSPYLRAFYEQVKARRGSGKAIIATARKLLGIIYNTLKHHWVFEDFATFKLATSS

SEQ ID NO: 364060 - protein, 332 aa, unidentified
MVAGTHGSLNKAGSTKMTQISTTAGIDTSRAKLDIAVHGGVEHWQVENTSVGWRRLAVGLSQAGVTRVGIEASGGYERGVVGYLRDKGLTVLVLQPIQVKAYARVHLRRAKNDKLDAVLIAACAATIDQPRIEPDERLAKLAQHLTFVEQIEEDIARFKVRLEHIDNPRLRRMVLADIARLKTRRSAELSRIVMALRAHEDLGRRLDLVLSIPGLGERTAIALIVRMPELGRVSGEEAAALAGLAPYDDDSGKHKGQRHIAGGRGRLRRSLFAAALPAAFRWNKAPIELYTRLTARGKAHNAALIACARKLLIYANTVVHRGKPWVERPATI

SEQ ID NO: 364061 - protein, 426 aa, unidentified
MTNSLFIGIDVSLQSNQICVLNFDQHKFFNLKFSNTPDGCEEAINKIKFIYDKFYFDKIVIVCEATGMYSFHLACYFSSHEYLNNFNTEVYQINAHDFAKYKDSFSDVEKTDPSDAYILADFARVGRTKALHPFRGSQYIALQRLTRQRYHISKNLVKEKLYVMNNIYLSFSGLIIADKKNRPFSNMFGATSCAIFDNFDSPDQIAETPVDDLLDLISKVGKNRTKNPIEKINLLNKAIRSSYRLDQTAYNGINIAVASSLSIIRFLESELKQVDKAILDTVNGLNSNAYNSLLSIRGIGKVYAAGILAEIGNIDYFKHNSNLAKYAGLYWNRTQSGKFEKEDKNFSQHANKYLRYYLIEATASCVRMNFPFIKNFYDSKYKEVTKHQHKRALVLSARKLVRLIFGLLRKNQYYKPIDSNNQPSLN

SEQ ID NO: 364062 - protein, 342 aa, unidentified
MEKVSIIGLDLAKRAFQARGALADGGVGFRKKLSRKQVLAFLAERPRCIVAMEACGSAHHWGRAIRTLGHEVRLIPAAYVKPFVKRPKNDAADAEAIAEAASRPTMRFVEVKTEDQQARAMLFRTRDILVRQRTQLINALRGHLAEHGVVAPQGPANVKVLAQEVESETTSLPLLVVELARVCLEQVDGLSERIAELEKLTVHEAARGATTRRMQTMPGVGPITAMAIETFAPPMTAFKRGRDFSAWLGLVPRQHSTGGKQVLGKTSKMGQRDIRRLLIVGAIAVVRWASRKGAADGTWLHRMLAHKPRMLVAIALANKMARSIWAMLTKNQDYEVPAAATV

SEQ ID NO: 364063 - protein, 332 aa, unidentified
MENIALIGIDLGKNSFHIHCQDHRGKAVYRKKFTRPKLIEFLATCPATTIAMEACGGSHFMARKLEELGHFPKLISPQFVRPFVKSNKNDFVDAEAICEAASRPSMRFVQPRTESQQAMRALHRVRESLVQDKVKTTNQMHAFLLEFGISVPRGAAVISRLSTLLEDSSLPLYLSQLLLKLQQHYHYLVEQIKDLESQLKRKLDEDEVGQRLSIPCVGTLTASTISTEIGDGKQYASSRDFAAATGLVPRQYSTGGRTTLLGISKRGNKKIRTLLVQCARVFIQKLEHQSGKLADWVRELLCRISNFVVTCALANKLASLAQARDGAETYEA

SEQ ID NO: 364064 - protein, 444 aa, unidentified
MALSGMILIREVADAPVIMGISKPADLKSPCGEVKIMNPLFVGIDVSSKSNVAYLMKPDGSKHSSFSVQNNLGGAKLLSERIVSALGSMQLSDVVIGLEATSIYGDSLVYALREDGSLGRFQRKIHVLNPKQVRKFKEAYPDLPKNDWVDAFVIADHLRFGRIAKEVYMDDYRYQALRTLTRARFDVIQSLTREKQRFANYLFLKCSGIAQNKDIQNTSATTIALMERFETVDELANADLNELTAFISEAGRGRFADPDATAKTVQAAAKGSYRLPRTVNDTVNQAMAVSISSMRAMKEQVKVLDKAIEQQFEIIPNTLTSIPGIGKVYSAGIIAEIGDVHRFESQASVAKFAGLVWHKHQSGDFEAEHSQMIKSGNRYLRYYLLEAANSVRRCDSEFRRYYDLKFKEVNKYQHKRALALTARKLVRLVFRLLKDNRLYIPPEG

SEQ ID NO: 364065 - protein, 353 aa, unidentified
MKYYTSTTQFNCGIDLHARQMYVCVMDRDGKKLVHTNIRNNDFEFFLKLVAPYRQDLTVCAECMFGWYWLADACQAAGLHFVLAHALYLKAIHGGKNKNDRIDSEKLAHLLRTNLIPPAYVYPAAKRPLRALLRQRILYVWRRSELLSRIQSHQLAYNRPTSRQNLYNRDAWTEQLLASESDPVRQLALQNDLALIGHYDAQLASLERALLKLTKQTASRDFNLLQTTPGIGDYLGLTILHEIGDIARFPTVKDFLSYCRLVKGTVASAGKLKGLRGAKLGNPYLRWAFGEAAVIAKRDGVLGPLAQRLEARLGNKFKANTVLAIKLARAVYFMLKHKTAFDPDRLVATLSKN

SEQ ID NO: 364066 - protein, 328 aa, unidentified
MVAKVSDVIVGIDVSKETLDAYCAKGQRKQGRTFANSPDGWKLVRAWLKAMGSKQVHVCMEATGRHSLGVALALREAGHVVSVVNPAQIRDFARTKLGRNKTDKVDAALICEYAELFKPEPWTPPSPAMRRLCELQTMRAGIIRSRAEWNNRIGSGLGDSTATKLAAATIDHFTSQLEAIDRAIGETIEQDAELRGRRDLLLSVIGVGETLAASLMAEMPEPGVLRRSGEMVAYAGLNPSHHRSGTSIDRPTRISKIGNATLRSSLYMPALSAMRFNPAVAILVARLKSAGRLKPKQIVVAAMRKLLVLCFGVLKTGKRFDLAIAMPA

SEQ ID NO: 364067 - protein, 371 aa, unidentified
MEKGTTYVALDDSKRKIVAGILHPGATTAELRELPNDPPHIRRLFERLQREGPVVACYEAGVSGYDLYRQITGLGVPCQVMAPALTPRRPGQRVKTDCRDAGKLVHLFRAGELTPIHVPNEAEEAGRDLVRCRDDVRRDVLRWRHRLLRLLDRHGRIYRAGKNWSHGHWRWIREQRFALPALQRTFEASLFALEQALTRLAELDKEVVALAETAPYRDPVGWLRCFRGIDTLSAMTLVVEVVDFQRFERPRQLMAYLGLVPSEHSSGDAQRRGALTKAGSSHARRVLVEAAWHYRHRPGLGPALAARSHGQPREVVAEAWRAQQRLHRRYRHLVGHGKRPPIAVAAVARELVGFLWAAMTRRESPTIPAAS

SEQ ID NO: 364068 - protein, 412 aa, unidentified
MNPVVGLDVSKGESQVQAFLDKGKPYRKSFSIKHTLDGLDRLLEFLREIEKLADGKQPSVILESTGQYHMPVIQFLEEQQYVYIIVNPLISHRARSTNLRKVKTDAIDAYQLCELYYKEELEPYKKRGIHLLNLRNLTRQQETVSSTAVQTKLQLQSILDQIFPEYRGVFGDLYSKISLQILSIFPTSKEVLSVSESDLTNKIAELCTTRSEKWAKEKAIKLREAALRNPFQNNLYQSHIFNLRMFINIVLQYQEHLSKLAAEIDALAKEIEEYEIIQSIPGVGEKIAATIISEIGEIERFNHPKKLVAFAGIDPSVYSSGRFTASINRITKRGSSRLRQALFMAVQCGIRDARKQKSSEEIIPRNKKLRKFYDKKREEGKPFRVAIIACANKLLHWIYALLKRKEAFQNAV

SEQ ID NO: 364069 - protein, 402 aa, unidentified
MQYLGIDIGKRAHEAALLDQDGNHLGKTVRFSNSHKGAEKLLDLMNEHECLPDNTLIGMEATGHYWLSIHTFLKKLGFDIIVFNPIQSDSFRNFYIRKTKTDKVDAFLIAQVIRMDVPNTSYIASEDTIKLKQLTRFRVSMVDQTSDIKRQIISCLDQVFPEYERLFSDMFGKTSRKLLLESPLPEDLLNIESTHLTKLLKEASKGRFTEEKSMLKVDEIKNLASDSFGIQIASDVFKMQIQLLIQQIELLESQIKDVESKINELLEKDDHHLTTISGIGSITAATIIGEIGDIKRFERPNQLLAFAGLDASIHQSGDFTGTNNRISKRGSPYLRRAIWQAAFVASNKDPALSEYYQSLRARGKHHGTAIGAVCRKLVNIIFAVWTNDKPYEVRHHSNKEQE

SEQ ID NO: 364070 - protein, 348 aa, unidentified
MAVVAQEFEYVIGVDTHAATHTLAVVAAATGAVLSKGQFPTSPAGLARAADWITRHAPGKRLVGIEGTGSYSATLTRLLIERGQDVCEVKPPARTARAGKGKTDDIDAVAAARSVLSVEADHLISPRADGIRAAVSVLLAARKSIDGRRTADRNVLTMLLRTYELGVDARRSLTQAQLEQIAAWRTRPSDDAAAATIRGEARRLAKAVQAADTELEDNHKALEEHVRQLVPGLLEIPGLGPVTAGIVVSAWSHHGRIRTEAAFASLAGAAPLPASSGNTIRHRLSRSGDRQLNRALDVIARVRMSNDPATRAYVERRTAEGRTRREIRRCLKRYIARQIFRQLHALTA

SEQ ID NO: 364071 - protein, 409 aa, unidentified
MLFVGDDWAEDHHDVELQDPAGRRLARARLPEGVVGIARLHELVAAQLGADDGPEQVVVGIETDRGPWVQALVAAGYQVFPVNPRQVARYRERHGTSGAKSDAGDAHTLADMVRTDRHQLRAAAGDSDQAEAIKLLARAHQTLIWDRHRHLLRLRAALVEFFPAALAAFPDLAAADALELLQAAPDPTSAARLSRARIAAALTRASRRGVPAKAAQVQQALRAEQLPQPERVVAAYAATVGAAVAVIGTLNAQIEALAGQVEAHFGEHRDAAIYRSQPGLGGVLGARVLGEFGDDPGRYRDARARRNYAGSSPVTKQSGKKKVVVARFVRNDRLADPLHQQAFCALTASPGARAYYDQLRARGTGHHAALRQLSNRLVGILHGCLKTRTHYSEATAWSHRTSDAATAAA

SEQ ID NO: 364072 - protein, 342 aa, unidentified
METAVTIGLDLGKSVFQVHGVDAVGTVVVQRRLTRGKLLGFFAKQEPCLVGMEACAAAHHWGRELSKLGHRVRLMPPSYVKPYVKRQKNDAADAEAICEAVTRPTMRFVEIKTCEQQGTLVLHRVRLMLMRQRVQLSNAIRGHMAEYGLVAPVGRNGLRRLIAILGSPDDDRVPEVARTCLAPLVYQFGLVNGQVLENDRRVRTSARSTELGRRLMEVPGVGPVLASAMVATVPDPTVFKSGRNLAAWIGLVPRQNSSGGKEKLGGITKQGDRYLRQLLVAGALAVIRYAQRHGAKRPWLVHLLARRTPKIAAVALANKMARMIWAMMMTGERYREPMVAAA

SEQ ID NO: 364073 - protein, 411 aa, unidentified
MQAYYVAGIDVHKAMLAVVVSEVKPGESEFQRRRFGSTRKQLRELTEWLAEWGVQEVVMESTARYWRPVWVALEETGIKRQLAHARSNGARRGRKSDFRDAERLVHRLVAGELVLSYVPDDEQQGWRWLTRTRYQLVCERARVQCQIEGLLEDAQIKLSSVITDLLGASGRRILEALAQEQGQHDAAKLAELGHAKLRATREELTDALDGRWLNRHRFLLGLHLDRIRQLDCQIEQIQQQTATAMQCCQEAVARLIQVPGIRTEGALQILAEIGPSAAAFPSPEQLASWVGVCPGQQESAGETYSRRSAKGNWQMRRLLSQAAHAATHAKGSLFEGLYRRLVVKIGPQKAIWAVAHRLCRLIWKILHQGVEYREQGSPTASPKSIRRRQLKLIADFRKLGFQVQFTPINPV

SEQ ID NO: 364074 - protein, 416 aa, unidentified
MKIVRPICCGMDVHKNIIVATIGITNKKTRITEYIQETFSTLNHDLLNLKQWLINHKCFDACMESTGKYWIPIFNILEDEINIYLTHPKYVKAIKGKKTDKKDSKWICDLFKHDLIKFSFIPPKEIRALREISRYRYKLVGMRSSERNRYQNCMTVSNIGIGSVFSDPFGKSAQAIMKEVLESDIIEDEKILKCIHGSCKNKDKILDSIKHCNIETDQRFKMNESMTHMEELQVHINNCEIEMMKRAAPMFDRFMHITQLPGISTLSAILIISEIGVDMKQFESDKQLACWAGLAPANNESANKKKSVRISKAGQYLKPLLVQCALGAIKDKEGYFGIKYSRIKKRRGHKKAIIAIARMMLVSIYHMILTGETFNPSDYESFRNPKPPIKQQDLTEESAIEFLKKSGFDVSKLTKL

SEQ ID NO: 364075 - protein, 366 aa, unidentified
MSKHSKEPAEKAGRYVGIDLGDTKSRVCTVDKLGQVVLQEWVTTTPQAFLERFSNRANLHIAMEVGTHSRWASEALMRCGHEVIVADARQLALITNSDAKSDKRDARTLAQLVWADPRLLSPIKHRAEELQQDLTLIRQRDNLVETRTRLIVSVRGVVKASGARLPDCLTGSFPQQVAEAIPEPLRAVLAPTLEVIDQVNEQIYACDIMLEHWARTRYVESARRLKQVGGVGTLTALAFILTVGDKERFSRSRDIGSFLGLRPRLGQSGDSNPQLRITKAGDGYLRKTLVQCAQHIVGPFGQDSDLRRWGLKMVADGNGSKRAKQRAVVGVARRLAVLLMSLWRSGETYDPLRHSRSVEKEAEAAA

SEQ ID NO: 364076 - protein, 386 aa, unidentified
MPQMDDLSHSLTAFDQDSTVIAVIEMSLKSWLVAGLVPGVNRAPLKKLEADEGSVLRLLHRWLEEATKAGKLITRVVVAFEAGRDGFWLARWLRTHGIETYVIHAASVAVSREHRRAKTDRLDTEMLKRAFLGWLRGEPEHCQMAAIPTLAEEDARRPNRERDCLVRERTRIINRMKSALVRLGIRGFNPKLRKAADRLDDLVSPLGEALPPNTRAELRRDLARLALLREQIKTIETARLEQLAQAPSEGPHAMVHLIARVVGVGVETADMLVHENLLRNLRDQRALARYAGLTGSPNESGSQRREKGLARSGNGRVRRGMIQLAWRFLRFQGDSALAQWFQARTETVKGTRKPMIVALGRKLLIALWRFTTTGMVPDGVVLRPAA

SEQ ID NO: 364077 - protein, 340 aa, unidentified
MGDITTIGLDLAKSVFQVHAVDEMGSVVMRKRLRRSQVLAFFAEIPPCLIGLEACATAHYWARELIALGHEARLMPPNYVKAYVKRNKHDVADAEAICEAVRRPSMRFVPIKTAEQQSALMMHRARDLLVRQRTMLVNALRGHLAEFGLIEAQGLHKVAKLIAIVTDENDGRVPYIARQVLQVMINHIEDIQVRIVGLEKQLLAWHKSNPVSQRLATIPGIGPIIATAIAATVADPNTFRSGREFAAWLGLVPRQNSTGGKARLGGISKRGDSYLRRLLVNSAHTVLLCSKQAKTDPWLTSLLTRKPRLVAAVALANKTARLVWALMSRQDTYRHAAATA

SEQ ID NO: 364078 - protein, 392 aa, unidentified
MRYVGIDIASEKHFVAIVDGASEVLLKSTPAGEDEAGYSKLFQLLGESSETLVAMEATGHYWKNLYAALAARGFAVALLNPVRTRRFAEEDLQRTKTDAIDALGIARFAAQKRPPASRMPDSATEELRELVRHRDRLVQEFGDKTRQLHRLVDLGFPEFKRYVRQLDSALSTAILADYPTAQAFTQVRPRGLANLKYDGQHLVGLELATTLIEAAKHSVGAHHGYAYRLQVKHACQDLDLLRQRLRDIDRDIGAKLDEHEIGSLLTTIDGIGPTTAAKLIAELGNPAEFISPAALAAYVGVVPATRQSGKALGTRAGITSMGHAELRHALWMPVLTAVRVNPWLRQHYRRLRANGKPAKVALIAAMRKLLHAVYAVARDRRPFSPHLAGEPA

SEQ ID NO: 364079 - protein, 414 aa, unidentified
MLKIVYPICCGLDVHRDFVYACIASTENGVTTYKSHRFSTFTKGLRELLSWLLQNNCKDVCMESTGKYWIPVYNILESDCKIVLAHPKYVKAIRGKKTDKKDAKWIADIFKHDLVSGSFIPPADIRQLRDLVRYNVKLTSYTTGEKNRAQNCLTVSNLKLDSVFSDVFGKASSNIIGQILANPSEKISDVSVFRTKGMKATDEEVLDAVDGEMCTEQAEKLRIIRDHMNSLELCKANFMSLILTTAEKYIDEINLVSTAPGLTAFSAISVIGEIGVDMSVFPTSKNLCSWAGLAPQNDQSAGKKKTTRISRAGVYIKPLLVQCALAAIKSKKHPEIVNRYNALKKRRGHKKAVIAIARMLLTAIYNILKKHEPYNAELYRKSDTPPEHRNVTVEEAVFILQRQGYTISSPASVG

SEQ ID NO: 364080 - protein, 412 aa, unidentified
MKDLLEISCGLDVHKEKIVACILTGPLGKPTRSEIRKFTTLLPDMIALRNWIVSKNCHHVAMESTGIYWMPIYEILEDAFSGDITLLVVNARHMKNVPGKKTDMRTSEWISTLLRAGLLNGSFIAEKRIREFRDLNRYRKSVIRDITSQKNRIEKFLQSSGFRLSSFISDIFGASGRNIILHLIEHGQIDKTALDSCLKTKTRNRIDEILMSVNGTLSEHQKAFLRILMTHYDSLKKHLAEIETSLEEDMAPFALQVEQLNSIYGISTTASCAIIAEIGIDMKPFKTAEHICSWAGLCPGNNESAGKRKSTSVTKGNPYIKSMLCEIAWVIAGKRNTYLSAWYWRIKQKKGAKKAIVALARKLLVIIYTMLKQGTLFDESCFETRRKHCEQKQLSRYIRELEKHGYHVEAQS

SEQ ID NO: 364081 - protein, 466 aa, unidentified
MLRKEWKVDEDREVQGGNSKQIAGLPVIRPEVAGIDLGSAQHWVCAPTVDRSAREVAAFGATTPELLLMVQWLKERKIESIAMESTGVYWIAPHEVLEAAGFEILLVDTRQLSRVPGRDKKTDAKDCEWIQRLHSCGLLRGSFRPPEAICMLRTLVRDKAILVAESSDWLRRMQKSLDQMNVRVHRAVSDIDGLTGMKIVRAIAEGERDPRKLAKLRDWRCRKSEEEISNQLTGHWREDHLFSLRQSLQMYDAIQQRVADYDREILRKLAQLQRQECRHQPPPNVNNPHKARAIKKRGEEPMREALYRMTGADLTSIDAIGVETVLVVVSEYGPTLSDFPTEKQFVSHATLAPHRPLSGGKPVKKKRRNTASTRVAAALRMAALSLRNSATALGAYYRKIARSRGGDVAVFASARKLATLIYRLLRWGQPYVDEGAEAFEKRYREIRIKSLKARAKELGYQLVASS

SEQ ID NO: 364082 - protein, 343 aa, unidentified
MQSITTIGLDIAKSVFQVHGVDAGGQVVIRRQLKRRYVLAFFQKLPSCLVGIEACASSHYWSRELQALGHIVRLMPPAYVKPYVKRHKNDAADAEAICEAVTRANMRFVATKTPEQQSCLTLHRTRHLLMRQQTSVINAIRAHLAEFGIVAPVGRQGVEQLLGVVADANDKRLPEVARACVAALGAQLQVLKAQILEFDRMIRAWHRSSETSKRLDQVPGIGPVLATALVASVADPRAFRSGRDFSAWIGLVPKQNSSGGKERLGNISKRGDRYLRSLFTTGALAVIRYAKIHGTKHRPWLTALLTRRPTKVAAIALANKLARMAWAMMAKGERYKEPAAFAA

SEQ ID NO: 364083 - protein, 356 aa, unidentified
MQHTILNFINQHFFVGIDVHLKQWKVTIRSAGIELRTFSMNPSPQELYQYLHKHYPGGTYHLVYEAGFCGFWIQRTFTELGIQCIVVHPADTPTSAKEKVHKSDPVDSRKLARELENGSLKAIYVPQVASEQLRSLMRLRFRLVQQQTRTKNRIKGFLRVNGISIPAVHLTNPRWSGAFILWLKSVHPASDAGGFTLDNLILQLEETRLHLSGVLRQLRREATSKNLASTVEAINTAPGVAFITTMTLVTEIIDVRRFSRFEHLCSFVGLVPSIYSSGDTTYTRGMSFRHNQYLRPLLIEAAWTAVRKDPAMTLRFNELCRTMSKQMAIIRIAKKLLRRIFHLWKQQDRYAYALVA

SEQ ID NO: 364084 - protein, 368 aa, unidentified
MNSIKFIGMDVHKKTITMAISDDVSYSQPRIYGAIANKPEELDRFCRKIKASSSKLHFVYEAGPCGYGIYRHLNAKGYECMVAAPSMIPRKSGDRIKNDSRDASMLARLYRAGELTGVWVPDEQDEAMRDLVRARQDAVTASIKAKQRLKAFLLRHQQTYAGKSRWSSAYFKWLSEIAMPHPTQQIALQEYIDTVHENLSRIDRLTDQVRLLVPEWRLSPVVSAFQALRGVSLIIGSTVLAEVGELSRFEKPSQLMSYLGLVPSEHSSGDRIRRGKITKTGNSNARKALIGAAWAYRMPARISRTLLNRQEEVPKEVCKIAWDAQIRLCGRYRRLTAEGKPHQKVVTAIARELSAYLWAISKQVQIDA

SEQ ID NO: 364085 - protein, 342 aa, unidentified
MTAIGVDTHKATLAACAVDLLGAPIAEATFANDPKGHVAFIAWARSKAPAATIGIEGSSSYGAPLARAAQQAGLCVREVPPHLSRAERGRTRRPGKSDPGDALAIARVTARETNLPPIRLPDQTTELRLLVEAREDLIGEATRVRNRLHAHLIILLPGYGGTVANLVAAHNRTTIGRRLRGNHAVQAELARSLLARLVVLGREVEGLTRRITAGVAGHPLLGLPGAGAITVARLIAEVGDVRRFRTADALAALAGVAPIPASSGQVQRMRLNRGGNRQLNRALHVIAVSQARFHPEAKAYVTRRIEVDGKTWREAIRALKRRLVRPVYRLLLEGSNLQLAAA

SEQ ID NO: 364086 - protein, 335 aa, unidentified
MNYYVGIDAAAESFTACVVTPEEVVRSAQPFENTVEGIYALKAWIEAADLPRAETLICVENTGVFTEALCYELHQSEYAVVLLDPHKVWKAFAEGAKTDPLDSRKIAEYGWRYLDQLTPWSPREAIVEQVKVLLQTREQFVEQKTAAKNSLTTLRRKYIQTPAANAALERTLSHLKAEIQDIEAEIHRLIHSNPTAAQMVALLMTAPGVGELMAFHFFVLTEGFAQTPSYRSLAQYLGIAPNARQSGAWSGPSRSRGYGPSTMRKLLYLAACSVRTHNKAYRHYFERKVAEGKPRRLVLNNLANRLLRVLCAMIQHRQPYIPNYVSVQPMLLTKS

SEQ ID NO: 364087 - protein, 400 aa, unidentified
MRVVFGIDVSKASSEVAILVNGEKVHGYTISNDAIGFARLLGDLRTVHKPEIIFEATGVYSRRLQTFLDDHGYAYTRLNPLEAKKQLDSLRVRKTDQIDAEKLAQSQFVLNRKPTYVQEEVYQNLRDLSRFYQNLTEDIVRAKNRLHKVLQVTFPELENILSTPSGEQYWNLVIAFPCKDFVLDLSKNELSKSIRQSTSKRISDKRVAYLAEKLTALANQSYCAVKKTSPILEEVHYYAKELLRLSEQRQAVLDQMVELAQPLPEYDILLSIPGIAETTATSIIGELGDIRRFQSANQINAFIGIDLRHYESGNFLAKEHITKRGNPYARKILFKCIHNIASVSHTNPCHIADFYEKRKRQSQTTSTKPHTIASIHRLIRTMYYLIMHNKLYDYASTQNR

SEQ ID NO: 364088 - protein, 373 aa, unidentified
METIITYVGMDTHKKEHSIALHYPGQEEIFRFTVKNTSSEISKMVKRILKKAPGEVRFCYEAGVCGFDLKRKIETLGCKCVVIAPSLTPIKPGERIKTDRRDALKLLMMFKAGLLTEVYAPDPQQEAARELTRLRQSARKDLMKARHRLLKFLARHGYIYHEGSHWTGRHFRWLGSLEFENPLIRDVFDSYFTEMQHCMQRLDSLDKEVEQLAESEPYKEIVGLIRCFYGIDTLTAISIITELFEFGRFANPGCLMSYLGLTPSESSSGEKQNKGPITKAGNKRVRRLLIEVSWHYRHPYHVSKALKQRRKDQPQWAIDIADRAGRRLRKRYWYLVNRGKMPCKANTAVARELAGFIWSVLREYHTRNMEKVA

SEQ ID NO: 364089 - protein, 296 aa, unidentified
MLIIGCDFHPRYQQIAMMHTETGELVERRLEHENGEARAFYASLPKPVLVGMEAPGYAQWFERMLAEFGHELWIGHASEIRAGVVRKQKTDARDAQHLLRLLLEKRFPRIWIPSPAERDARQLLRHRYKLVCFRVSVKNQLHGLAMSQGVCRKKKLFTAQGREELEKLSLGPWGSCRRQELLGMLDQLNPVIDELDRAVRQEAESRADAARLMIHPGVGPVTALAFVLTLGPVARFRRSKQVVSYLGLNPKERSSGDKQHTYAISKQGRRNAVELARGRAVNFSESRREPHKFGQR

SEQ ID NO: 364090 - protein, 370 aa, unidentified
MEERIKFFVGLDVHSETIEVGVAEAGRQPGRCVASIQHDVAKLLKVLARYGDPRQVHVVYEAGPTGYGLQRALGKRGYRCEVIAPSLIPKRAGDRVKTDRRDCKRLAELSRAGELTPVWIPDAAHEAIRDVARAREDAVNARNQARHQLKAFLLRHEVRYPQRTSWTKTFYRWLSTLSFESRGAQTAFTEYWQAVCTADERVGRLTDALVQSIAGWRFEPVVKALRVLRGIDWISAIGLVAEIGDMQRFSHPRQLMAYLGLVPSEHSSAERVVRGSITKAGNGHARRLLTEAAWNYRFRPRIGYGAQRRAEDLPQALRDLGWKAQLRLTGRFARLRARGVHQNKICVAIARELAGFVWAIARKQSQLSPS

SEQ ID NO: 364091 - protein, 468 aa, unidentified
MSENIRGTKELSTKKSKRVPKHLEHINLLAAGIDIGATSHFVAVPEGVSEVTVREFRTFTSDLYALADWLRQCGIQTIAMESTGVYWIPVFEILEEKGFEVKLVDARQVKNVSGRKTDVLDCQWIQQLHTYGLLNGAFRPTDQICELRSYIRQRSMLIQSASRYIQQMQKALMQMNVQLHHVIADITGDTGMKIIRAIDKGERDPSILAKHRDSRCKTSIDDIKAALTGNYRAEHLFALKQSLELYDYFQEKIQACDDEIAKTMAKFSTNSNVCDTPVEQLNPSKKKASKNSPSFNLGAELHRLTGVDLLAVPGINHVSALQIIGEIGLDMTQWKNAKQFASWLGLCPGNKVSGGKRLSGKTKPSNNRAAATLRMAAFTLYRSQTSLGAYLRRLKSQKGPMKAITATAHKLAKIIYNMLRDGVEYKEAGQTYYEEQYRGRVLRNLRKKAAEFGFNLVESTKTIKIKSA

SEQ ID NO: 364092 - protein, 339 aa, unidentified
MKVYAGIDLHANNNYLGVVDEDGKRLFGKRIPNDPGMILEALDPIKKELAGAVVESTFNWYWLVDLLMAEGYRVHLANPTKIQQYKGLKYADDKHDAFWLAEMLRLGILPTGHIYPKEERTVRDLLRKRGHLVRIRTSLILSLQNIIARNCGKQIKNNDVKRLREDRISPLLAHNEDLALAGEVSKEMIDYLTRKIRSIERFIEGKLPDKETYQYLHTLPGVGRVLALTISLETGDISRFSQVGNYSSYCRKVPSRWVSNDKRKGKGNTKNGNRHLAWAFSEASELARRDNAAARRYYDRKLQKTNRMAAHTALAHKLARAAYYIMRDQVPFDPEKLFV

SEQ ID NO: 364093 - protein, 340 aa, unidentified
MTITTVGIDLAKNVFAVHCVDQNGKTVLVKSRVTRAALPGLLAGLPPCVIGMEACSGAYYWARLFLQYCHEPRLMAAKFVSPYRMAGKSGKNDAADAQAICEAVRRPHMRFVPVKDESQQAMQCLHRTRQGFIEEKTATYNRLRGLISEFGVISPQSTDALRHIVFEQKNSLPLQVQQCVDDLLEHVARIEDNIAEYDRILSRMAKTDHRSQRLMELKGVGPTTACALVASIGNAHDFKNGRQLAAWLGLTPSQYSSGGKSKLGRITKAGDSYLRTLLVQGARSVLIGAEKRTDLFSRWVCSLVERRGYWRAVVAIAAKNARLCWASLHYGDDFRLYSAS

SEQ ID NO: 364094 - protein, 319 aa, unidentified
MSRRPRAVYVGIDVARDQLVGHVRPFDQRFVLANDAAGHRQLSKMLKSLRPHRIVLEPTGGYERLLLKALRDAALPAFLVNPHKLRAFAHSTRGLAKTDPLDAAALAHYAEIWEPPTPIARDPMAERLAEHLSWRTLLVERRTALANRSAQLLDPALRRRARIALAQINAEVALAETMLRRLVAAHPGLAELCRRLKTAPGIGDISAFALIARLPELGHLDGKRIASLVGVAPHPWDSGRLRGRRIIQGGRFELRRTLYMAALAAARRPGSLRTFFLRLHANGKPAKVALTAVLRKLLCRLTAMIRDQRDWHDPDTAAA

SEQ ID NO: 364095 - protein, 344 aa, unidentified
MDHFAGLDVSVKETSICIVDDAGKIVREVKVASEPEALLAVLKNPAYHFKRIGLEAGPLSQWLVSALAEAGLPVICVETRHMQAVLKAQINKTDRNDARGIAQMMRAGLYRPVHVKTLRSQKLRMLLTHRKLLQSKAIAIENDLRATLRNFGLKVGMVGTVRFEARIRELVENLPDLAALIEPLLIVRRTLREQFCILHRRLLAIVRDDEVCRRLMTTPGVGPVVSLTYRATIDVPARFRKSKSVGAVVGLTCAKYQSGEVDWDGRISRCGDEMMRTMLYEAAQAMLRSKKWSWLKAWAMQIARRRGMKKAIVALARRLAVIMHRIWVDGTEFRWTREQATTAA

SEQ ID NO: 364096 - protein, 339 aa, unidentified
MKLYTAFDLHSTNSYLAIINERGERVFKKKLTNDPEKILTVLKPFKRDVIGIAIESTYNWYWLVDILMEEGYHVHLANPAKIQQYRGLKHSDDQHDAFWLAEMLRYNILPEGYIYPSEQRPIRDLLRKRGQLVRLRTSLIISLENIISRNNGFSVKVNDVKALKTDRVTPFLECNEDLMLAGKASKETIDFLTRQIRSIESVVESKIELKEQYKKLLTIPGVGKILGLTIMLETGPIERFAKAGHYASYCRQVPSEWVSNGKTKGSGNKKCGNRYLAWAFSEAAECARRYYPEPRSYYNRKKQKTNSMIAHKALSSKLTKAAYYILKDGVEFIPEKCFC

SEQ ID NO: 364097 - protein, 493 aa, unidentified
MGACELESGDVALAAIPIRKMTIGIAQTLLLIIDWRIAMPKRTTGGRPELKAVNVGAAAIDIGSKMHMAAVNSACADVPVRSFGTFTQDLHDLADWFKACSVTSVAMESTGVYWIPVYEILEQRGFDVILVNARYAKNVPGRKTDVSDAAWLRELHSFGLLRGSFRPDAEIATLRAYLRQRERLVEYAAAHIQHMQKALMEMNLQLHHVVSDITGATGMRIIRAIVAGERNPDVLATYRDVRCHSSIETIRAALVGNDRPEHVFALTQSLELYDVYQAKMLDCDRKLEVLIAALNNKSAKSVGKLSEPRIKTKQVNTPTFDVRTALYGLLGVDLTEIHGLGPSLALKLVGECGTDLRAWPSAKHFTSWLCLAPGNKISGGKVLSSRTRRSSSRAAALLRLAATTVGRSDTALGAFYRRLSSRAGKSKAVTATARKIAVLFYNTLRHGMSYRDPGADHYEQQYRNRVLANLQRRAKSLGFVLQAIPGDADPAVS

SEQ ID NO: 364098 - protein, 384 aa, unidentified
MDQTTSTLSANTLHCALELSKNSWLLAIQFRDREQPSLYPIEGGNTDKLMAKLAAARDCWAKVNGALPAITLCYEVGYDAFWLARFLKARGIECLVIDPGSLQVNRRARRVKTDRVDVKMLLRTLIAWCRGERHVWSLVRIPSVDEEDLRRSHRERSRLVRERTAHINRIKGLLFAQGVRGINIKSQYKTLAVDQLVTGDGHRLPPRLVCEVAREIQRLAMVQEQIAKIERERDTAPTPCEATERKRRLLLRLKSIGPAISALLSREVYYRQFANRRQVGSFLGLTPSPYSSGEEERCQGISRAGSGHVRAIMIEAAWLWIRHQPKSALTRWFLERTAGQSTRMRKTMIVAVARKLAIALWRYVEHGLVPQGAILNPPTTGNAR

SEQ ID NO: 364099 - protein, 411 aa, unidentified
MEVVYEYCCGLDIHKKTVVACVVVPGPGKQPHKEIRTFNTMTADLLELGDWLTLQRVTHVALESTGVYWKPAWNVLEGSFTLLLVNARHIKQVPGRKTDVKDCEWIADLLRHGLLRASFVPDRPHRELRELTRYRTTLVRERAAEHSRIQKTLEGAGIKLGDVASNVLGRSGRQMLNALVGGTNDPMLLADMAKGSLRGKRSQLERALTGQFEAHQRFLLGQQLAHLDGLDQVIEQLNQEIAHRLEPVLDKAERLDAITGVGRRTAEVLLAEIGTDVKRFPTAAHLASWAAMCPGNNESAGKRKSGKTGKGNQWLRTALVEAAHAVAHTKNTYLYSQFHHVAARRGKKRALIAVGHSILTIVWHLLEHDCEYVDLGSRYLEERDRQQIQRRLVRRLEDFGYKVKLEATGAA

SEQ ID NO: 364100 - protein, 322 aa, unidentified
MSLPNQLCAGIDVSKATLDIAASSDFAQFTAGNNADGFDAIIVELRKHSVALVLMEATGGLETAVACALQAEGFSVAVVNPRQARDFARAMGYLVKTDRIDARVPAQMAGVINQHPERKRFIRELPDTERRALAAMVVRRRQLVTMWVAGRNRLHPSHPQSRESIDIIINALEDEIARVDENMNNHIRTYFKELAERLSSIKGVGPMTTAALLAEVPEPGHLSGREISALVGVAPANRDSGTMRGRRTIFGGRAGVRTALYMAVLVATRFNPVIKAFYTRLLSMGKPKKVALVACMRKLLTILNAMLRKSEEWDESYHHVTP

SEQ ID NO: 364101 - protein, 453 aa, unidentified
MEQPQEIEDEEYERTWERVAAVDVAKGSGVVCTRVPEQDRQGRRKTHVWTVQATKRAVIELADHLRGLQVQVVTLESTSDYWRIWWAVLEAAGLKVQLVNARHVKNVPGRAKTDKKDAVWLAKLTERGLLQPSFVPPPEIRRLREFTRLRADLVHERTRHWSRLEKLLERAQIKISAVLSKLTTGTARAMIEALIDGQRNPKVLAELAIGKARSKRAELAEALDGDWQPHHGELARILLDQIDALTAQIGTLTDRVRELIDQIPAAWGADAGGVTGPQAGAGPDAVIVPAVTRLDEITGCGLIAAQAIIAEIGLDMTVFGTPGRLVSWAKRCPQTRQSGKKTTGGKAGKGNPYLNAMLGEIAASASRTDTFLGERYRRLARRRGKRKALAAIARSILVIIFHLLADRTARFADLGPDWYDRHIDKQRKTRNLIRQLEALGLSVTLTPAETPAA

SEQ ID NO: 364102 - protein, 483 aa, unidentified
MKPKRVEKNQKASCHPTPNNWHKMNRKQRREMTRKIQSEDLSLEVVHPAAAGIDIGNESHYVAVPPTQDSQPVRRFGCTTSELKEMAVWLKLCAIRTIALQSTGVYWIAVYDILEQAGFEVYLMNARETKNLPGRKSDVQESQWLMKLHTYGLLRNSFRPSQEIRTMRTYWRQRNDLVRAAGRHIQRMQKALTQMNIQLANVLSDVSGMTGQAIVKAILAGERDPYQLAALRNWRVKASEEEIARSLEGNWQEDLLFVLQQEQDGYEFCQKQMAECDQRLQQYLPQLEDRSHGASLPEEKRKERLRKKKKGNAPQFDLRAELFRMTGTDLTQIDGIDVTTTMTILSEAGWDMSKWKTEHHFVSWLRLCPDNRISGDKIIGKGRLPTNNRVTNALRMAASTLRLSHTYLGAQFRRLRTKLGAPVAIKAMAAKLARLVYRMLRYGMPFIDRGAEFYDAQHRKLQINYLKRKAANLGFQIIEAPAA

SEQ ID NO: 364103 - protein, 343 aa, unidentified
MQAVTTIGLDIAKSVFQVHGVDVTGQVVIRRQLKRRYVLAFFERLPPCLVGIEACASSHHWSRELQALGHTVRLMPPAYVKPYVKRQKNDMADAEAICEAVARANMRFVPTKTPEQQSGLMLHRTRHLLIRQQTSVINAIRAHLAEFGIVAPVGRKGVEELLGVIADPSDKRVSGVVRACLAALGNQLLGLKKQILDFDRMIMAWHRSNQTSKRLNCIPGVGPLLATALVASVADPKAFRSGRNFSAWIGLVPRQRSSGGRDRLGSISKQEDRYLRSLFVAGAFAVIRYAKIHGTKYRPWVAALLARRPTKVAAIALANKLARMAWAMMAKGERYNYPAGLRV

SEQ ID NO: 364104 - protein, 368 aa, unidentified
MEDDITAFVGLDVHKDSIAVAVADAGRAAPRFLGTCGPRVGELLKTLSRLGEAAHTLLAYEAGPCGFALARELHRQGWRCQVIAVSKMPRRPGERIKTDRRDALTLASYLRSGELTPVTLPDARDEAIRDLSRAREDAVRARLKARQQLKAMLLRHGMPYTGKTSWGSTHERFLARIAFEHPAQQIAWAEYRSAVLEAGQRVERITAALREQIAGWRFGAAVRALMCFKGIDFVAAVALVSELGDLHRFEHPKQLMAYLGLVPSEFSSGQSRSQGSITKTGNAHVRRVLVEAAWCYRYSARMSRPVTERQQDQPRSVCEIAWRAQLRLCSRYRRLSARGMHANKVCVAVARELAAFLWEAARLVQQPT

SEQ ID NO: 364105 - protein, 356 aa, unidentified
MQTQVTKKIDFKGKDLYIGLDVHKKSWSVTILVEGMEHKTFTQPPDPLALYTYLQKMFPGGTYHSAYEAGFCGYGIHRELNDLGIKNIVINAADIPSSQKDQLQKRDPVDSRKIARALEKGLLRAIHIFDRDMEELRSLNRTRFYLMRDLRRSKNRIKSFLQYYSIPIPPEYDNNQWTLNFIDWLKQIQMKTLSGQDAFSNLISSYEYHRQQMLTLSRQIRVRIREYDNELYSLLKTISGIGPLTSSALITELCDINRFPHINHLSSFVGLVPRVKQSGETSYNGGMTFRCNEYLRTLLIESSWQAIRQDPALMQYYHQHIVNNKGQKVIVKVARKLLNRIRYVMKNRQPYVTGIA

SEQ ID NO: 364106 - protein, 344 aa, unidentified
MLYVGLDLSRKRLDWQALDPEGAVAAVGAVPPDRDGLVRLADRLDERPVLAVIESMTGARFVHDQLEFAGWDVRIADAVKARGIAPLACKTDRIDCWVLAELARRELVPEVWLPDPAVRAERERARFRLHLVKHRSSLKNRVHAILFQHGVPNGHSDLFGVGGRRLLERLALPEPWASTVQASLALIDTLDEQISGCERELRALGADHPYIPLLMTCPGIGWVLAYTIASEIGEITRFATPRKLVGYTGLCPRVDQSGERDRRGPLRKNGPSYLRWALVEAAHTACRHPAYAPVRERMRERHGQKRGSKIAAIEIGRRLSEAIWHMLTNSQPFAPAGAAASLAT

SEQ ID NO: 364107 - protein, 387 aa, unidentified
MPQLNDLSRSLVALDQDSTIIAVVELSQSSWLVAGVLPGIERQPRKKLEPSAERLLGLLHRWRDEAVRAGRNITRIALAFEAGRDGFWLARWLNARGVEAYVIHPSSVAVSREHRRAKTDRLDTELLKRAFLGWLRGERGHCSMARVPTIAEEDAKRPNRERECLVGERTRIVNRMKGTLARLGIRNFKPTLRKAADRLATLHTPEGMPLPPNVLAELQRAMARLGFVVSQIREIEQARQKRLEQQPETGPHAMVRQLSRVVGVGIETADMLVHEVLSRPMRDRKAVARYAGLTGSPDESGTKRREQGLARAGNARVRRGMIQLAWRFLLFQKDSALALWYRARTADSRVGTRKTMIVALARKLMIALWRFVTTGETLEGVVLRPAG

SEQ ID NO: 364108 - protein, 341 aa, unidentified
MGYYTGIDVSLEVSHFCVVDAAGKVVKEARVASEPEAIVAWFVGLGLEMEAIGLEAGPLSQWLYAAMTEAALPVVLLETRQVRDAFRSMPVKTDRKDARGIAQLMRLGWYRRVHCKSQEAQENRTLLGGRKMLQSRYIDIEMCLRGLLRGYGLKVGPTRPKTFEARVRDLVATVPGLTETIDALLTARASLLEQFRRLDSMVNRKAKQDERAKLLMSVPGVGALISLTFVSAIDDPARFRSSRTVGAHLGLTQRKYQSGETDVTGRISKCGDQEVRTALYEAANIILTRPVKGSQLKSWATRVANRAGMKKAKVALARKLAVVMHRMLSDGTYFDPKLAAA

SEQ ID NO: 364109 - protein, 348 aa, unidentified
MASPIVETRSITGGVDTHADVHVAAALDPIGGLLGVREFPASPAGYARLLGWMGGFGTVCLVGIEGTGSYGAGLARHVTTAGVRVVEVDRSDRQDRRRQGKSDPLDAVSAARAAQSGRARGAPKGRDGTVEAIRALMVARRSAAGERTQTINQARALIVTGPDDLRARFARPSVAALVTELASLRPRPGSTVGYATRIALRELGRRAEFPGAQLERLDELIVPLVTAHAPGLLALYGVGPHTAALLLIAAGDHPERLRSEAAWAHMCAAAPIPASSGKTVRHRLNPGGNRQANHALWRIVFTRMGSCPATRAYVERRTAEGKSKAEIIRCLKRYVAREVYPHLRAAAG

SEQ ID NO: 364110 - protein, 332 aa, unidentified
MQELQLAGIDVSARQLLVQVRNPQGAIQQLDLPNTEAGHRQLCKLLTQRGRRARACLESTGTYSLDIALAEHPGIELMVVNPRAARDFAKAFLHRSKTDAVDALVLLEFVQRMPFQPWQPPSPERLQLRALARRIGSLTQMSVEEKNRLHATEFGQPLHKDVRKDIQAHLRQLQRRLEKLEESAVDLIWANPELRQALLHLTSIKGIGRLSAILLLAEICVLPKDMTDRQWVAHAGLDPRHHESGSSVHKPQRISRTGNPRLRSALYMPALSAAQHEPNIRAYYQKLLARGKLPMQALVAIMRKLLHSIHAMLRDQVDFDGQKFFALETPTS

SEQ ID NO: 364111 - protein, 343 aa, unidentified
MEYYVGLDVSLKHTSICVVDRTGSVVREGVVDSDPVAISVYVKSKAPDALRIGLETGPTSTWLWIELKRLGLPVICIDARHAKAVLKMQINKSDRNDAIGIARIMQTGWFKEVHVKDIDSHSVRALLASRALLVKVKRDLENHVRGLLKNLGLVIGRAKFNVFAVRAEELIEGRPELIAAIRPLLEARNAVGRQVCELDRKVMKLARHDAQVRRFMTVPGVGPITALAFKATIDDPARFARSRSVGAYVGLTSRRHASGEVDWTGRISKCGDAMLRSYLFEAAGVLLTRVPKWSAVKAWGVRLAKRNGLRKAKVAVARKLAVILHRMWIDGTEFRWSKEEIAA

SEQ ID NO: 364112 - protein, 410 aa, unidentified
MRIIALDVHRSFAQLAILEYGKIRDAGRIDLERSRLLQFATRLKPDDEIIIEATGNTSAIVRLLSPFVGRVVIANPILVRAIAWAKVKTDKIDAAVLAKLHASGFLPEVWMPDEETETRRRVVAERTQLVSQMTRLKNRIHSVLHANLIPPYKGTLFSKRGRTWLEAQPLAEDQRRVVLRHAGELDRLGGELAQIDKCLAQTALQEPRVKRLMTITGVDVTVALSIVAAVGDIERFSSPEKLVSYFGLNPRVRQSGDKPAYHGRITKQGRAHARSMLVEAAWVISGVPGPLRAFFMRIRDKRGKHVAAVATARKLAVIVWHMLSKDEDYTRSRLALLNWKLRKLELTAGYPSHRGGRAKGSAADYSNKSVRDRERETIGNAEEVYRRFVATWKRQSPKGCSGAAHEMRRT

SEQ ID NO: 364113 - protein, 477 aa, unidentified
MAHSANTEFSSPAVAPARKAGRVHAHCARLRSPYAAQDKPFTSGSTNPDRKGCDILLKINYMSTLFVGIDVSSKSNAVYAMDFEENKYISSSFGNNQPGADELADMIAKCMQKHKNLDTIIVALESTSVYSVHIANFLSTCETLMPYKPYVFCVNPKATSNYRKSYIGMEKTDPIDAFLIADFARVGRTKKLEPWRGGQFIALKRLTRHRMHLSECITREKTYMVSNLYLKFSELQLLEGDNKPFSNIYGATSSAILTEFLSPQEIIDLSEEELLSFLAEKSRNRISDISRTSELLRKAARDSYRLDQCMYEPLNISLASSFNCIQAYQKEIKLIEQAIEKCINGMNPNAFLILKSIPGIGPVWASGMLSEIGDITAFHSSDALAKYAGLYWLKNDSGDFISEDNQVSKVGNPYLRYYLGEAANSVRKHVPEYTEYYAKKYAEVTKHQHKSRIFFDNTIYQSFRWCILFHFWLPPFS

SEQ ID NO: 364114 - protein, 348 aa, unidentified
MRFYTKQHKFYCGIDLHAQTMYICILNQAGNTVFHNNRKASPEAFLQAIEPYREDIVVAVECMFVWYWLADLCEQEGIPFILGHALYMKAIHGGKSKNDKIDSHKIATLLRGGTLPMAYVYPRKMRATRDLLRRRNHLMRKRAELLAHIQNTNSQYNLPEFEKKIASKANRDGLAEHFPDPAVKKTIETDLHLLDFYDRLLNDLELSIVRTAKKHDSHMWYLLRSIPGVGKILALILLYEIHDIHRFPRVQDFVSYCRLVKCPRESAGKKAGTKNSKIGNVHLKWAFSEAACLFLRGNERAQQYHDRLVSKHGKGKALSILAHKLGRAVYFMLKRKEPFNMETFFAQT

SEQ ID NO: 364115 - protein, 339 aa, unidentified
MSKLLKKFVGIDVSKLWFDVAVVKSPDVVQNIHKQFSQNADGFKKMVSWLVEQDVLLNDQTLFCMEYTGIYNTPLVNFLVKQQVQLWVEMPLRIKKSEGLQRGGDDRVSALKIAMYAYRHQDAKQLWKPLDSSIERIKLLIAQRDRIMNAVTQLSVPVQELAECGCIAEAKAMEKIQKSSLRQLQKAKDTIEQSIREIVADDTLIARRVNQVQSIQGIGPVTAVALLAYTKGFTSFDNAKQLACYCGVVPFSKSSGISVRYKPKVSPHANKKLKKLLHLCALSAIKNDKEIKAYFERKVNEGKNKMSVLNAVRNKLIHRVFAVIRDDRFYQQDYARNCA

SEQ ID NO: 364116 - protein, 412 aa, unidentified
MQYTYVGIDSHKDTHTAVFLDCFFEKLGEITFRNLPSEFPDFLKEAIKLQVPGTTLLFGLEDISMYGRILVTFLKKNNLQIKHVNSLLVAGERKNQSVTEKTDAVDAECAARVLLSKFDELSDVESDDKYWILRTLVMRRDFIVKHNTSLKNHLHSLLIQHYPNYSDFFPNIDIQTSLAFFMQYPSPSTLKNTTHEELAEFLREASDYRVGSGKTGTARAKEILNTLQDTTVPFQEVRDEAIRSTIRQMESNTKEIQHLERTMAEFLEQFECTLTSMTGIDVVSAAQMLSCIGDIKKFSTSAKLARYAGIAPITYASGKTDMQLVNKRGNRELNSIFYLLAVRLITTQSGKMLNPFFHEYYHRKLSEGKTKLQALKCVQRRLVNIIWAMLTKKEEYVNPPMLAAPKKEGVGA

SEQ ID NO: 364117 - protein, 361 aa, unidentified
MQSTTIIAFDQHAATTVAAVLLPGHRTSALHTLTSDNATILRFVERVRRERPVRCCYEAGPCGFELQRALSARAISCDVIAPALIPRRAGDRVKTDRRDAGQLAILYRAGALTAIHIPTNQEEAARDLLRCREDIRADLLRARHRLSKFLLRHGRRFTATKKAWSKRHDTWLRQQVWPIPALDQTHRAYLRAVDEAVARLRAVEQDLRALLTLEPLRPRVECLRCFRGIDDLTALTIAAELGDARRFATAPSTMAFVGLVPSEHSSGTKHARGGITKTGNAHLRRVLVEAAWHYRHHPFVGGALRQRQRGASEAVIARAWRAQHRLHRRYRRLAARGKPKQHIVTAVARELTGFVWAALTQ

SEQ ID NO: 364118 - protein, 418 aa, unidentified
MVISLAEKRRICMKQIVSVGIDVSKGKSTVCAMIHPNTIIKESFEVLHTVEEMSMLADYIGSLDGEIRIVMESTGHYHLPVAQFLYQKGFFVCVENAYIIRQFSRIMLHGAKTDPLDAKKLAKYGLAYWSELKPYKFHPSCYTELSLLSKQYQTYIKLLIAAKQNVIHLMDEMLPGFKEALDTASSVQFSKVKYVDFAKEFYHVDMIKSMGKEIFRENYKQWCKEKGYRFQSEKADELFHLAEDGIPTLPTEFPSTRLCMEVATEQVSQLGYALEQILSQMQNLAKTLPEYQTIRQMGGMGEKLCVRFIADIGDVRRFHNGKALVAYAGIDAPPYQSGQYTGTKRRISKRGNSALRKTGYEVMKSLKSHPPKTDTRVYDFIIKKENEGKSKKQAKIAGLNKFLQIYYAKVMEIYKNIA

SEQ ID NO: 364119 - protein, 402 aa, unidentified
MKKSSRMSVIHPHAAGVDIGAEFHVVAVPPDADAAPVRTFQRFTGDLHRMSGWLKTCHITTIAMESTGFYWLPAFEIPEAAGFNVILVNARDAKNVPGRKTDVNDAQWLQKLHSFGLLRASFRPEHDISVLRSYLRQRERLTEYRATHIQHMQKALMQMNVQLHHAVSDITGVTGLSIVRAIVSGERDPSVLIQYRDVRCKKTPEVLQQALTGNWQPEHLFAPEQSVAFFDFYQEKIRECDDQIETSLLQLSTGTEEPEGVLPSARHRTKQPNQLSFDVRPLLWKITGADLTQIHGFGPYLALKFVAECGTDMNRWPDASHFTSWLCLSPGNKISGGKVLSSKTRRSSSRIAAALRLAATTIGRSDTALGAFYRRLSSRIGKAKAVTATARKLAILFYNALK

SEQ ID NO: 364120 - protein, 361 aa, unidentified
MSSVTTTVADIYRYVVGVDTHAATHSYAIVAAPNGALIDQATFPTNTAGLRRAREWIGRRTGGDLDGVLVAAEGTGSYGAVLGDVLEAAGYRVVEAPTPRRERGRGKTDTLDAVLAARSTLVVPVTLLRDRRAGEIQAALQVLTVARDQLNADRLRCINALTALVRGHDLGIDARRALTTQQISTIAAWRRRDETLAAATARAEAVRLAKRIVDLDGELTDNRVQITRIVTTQAPELLDLPGVGAITAAVILTVWSHPGRIRSEAAFAQIAGTCPIPASSGNTIRHRLNRGGDRRLNRAFNTIVLTRMRTDPATRAYIDRRLAEGKTTKEIRRCLKRYTTRQIFRTLAAAHHDPEMITSAA

SEQ ID NO: 364121 - protein, 395 aa, unidentified
MFIVGIDVAKRSHEVCMITSDGQTVQRPFSIRNNCTGYNLMLEKIRKHTNIKSQIVFAMESTAHYWLALFTRLRKDGYHVILLNPIQTSAMRDMFIRKIKTDAKDSFIIAELIRFGRYAESNVAQDRLLALKELCRNRFYLVDMAGDLKRKLIALIDRIFPEYEAQFDTIFCKSSVALLKKYPTPQRLSNAHLDKLTELLWNSSNGHFGEWKARELRELARNSFGVEDCDGAYSTLILLMLDQIQSLSGKADALEKEISRLFQSFDTTVTTIPGVEPIIGAVILSEVGDISRFSSADKLAAYIGVDPSVNQSGEFQAAHAHMSKRGSPYLRRCIWMASQVAVQRDPMFRAYYEKKAAEGLKYMTIIGHVTRKMTAVVFAILRDHKVYEPVLPTAA

SEQ ID NO: 364122 - protein, 347 aa, unidentified
MVYVGIDLHRKRSQIAVLDQDGQQLLSRRIVNDPQILLSLLHELGDDAQIALEATYGWEWLADLVEEAGYELHLSHPLRTKAIAAARVKTDAVDARTLAHLLRTDLLPEAYIAPRELRDLRDLLRHRVALTRMRSALKNRVHALLARQGVQPTHADLFAPGGRRFLAELPLREPARRRLDSNLVLIDGFDREIKQTSREIDARAKQDPYVDVLCQIRGIGRYIAMLVIAEVAEINRFRSPRHLCAWAGLTPTVRSSDGKARLGHISHQGAPALRWALVEAAQHAPTGGGPLRAAYERIAKRRGKQVAKVAIARKILTLCFYGLRDGEIRCLAPRAGRARIGTTAVTR

SEQ ID NO: 364123 - protein, 363 aa, unidentified
MLKTPDRVVIAVDPHKASWTAAAVNASLQPLDIIRVPVSRDGYRALRRFARRWPDPTWAIEGASGLGAPLTARLRADGADVVDVPAKLAARVRMLSTGHGRKNDDADAVSVGIAALSARTLNTAAVHATVTALRAVVEHRDDLVKTRTQTINRLHVLLTHLVPAGARRELTADQAAELLRGVRPHDAAGKALRGLAADLVAEIRQLDRYIAKAAANIQTAVSASGTTLTELSGIGTLTAGKILGRVGTIKRFRSAAAFATYTGTAPIDVSSGDVIRHRLSRAGDRQLNLCLHVMALTQIRQDTPGRAYYQRKRAAGKSHKEAMRCLKRRLSDVIYRQLVRDETRLGAGPGGHSGAALLSSAAS

SEQ ID NO: 364124 - protein, 329 aa, unidentified
MTTTLGLDLAKASFDATLRLPDGTLHHRTFPNTTDGFTALTAWLTAHVTTPVHACMEATNTYWEALATFLDAGQHTVSVVNPARIKGFAQAEMQRNKTDKLDSALIAAFCAKHQPSAWHPLTPEHQQLRALVRHRDDLVQTRTQLEQRLTESQAGFIRESLTSCITTIKTQIAAVETQLKEHVAAHPSLQDDVRLLTSIVGIGLVTATKVLGELAPIANYTSAKAVATDAGVTPQEYSSGTSVRRKARMSKQGKAPLRAGLYMSALTTMRHCPGCRAFVDKLSARGKVKKVIIGAVMRKLLHIIYGILKHRTPYDPVKAWGDTPTHGKS

SEQ ID NO: 364125 - protein, 416 aa, unidentified
MKLFVGIDVSSEKLDVCFLTDDNQLSILSEISVANDIEGASFIREKILEFNNSYHVYQIVIGMESTSMYSFHPSMFFHEDEKLKKLNTLVTIENPFRVKQFSRMFDENKTDRNDALRIADFLRIQRFTTSPIKEEKYMALQRLTRTRYQLIKQLIRTKQHFLENLTYKCNTLAREMRDESTSLFSATLISLMTEDFTLDELAELPLEAFCDLLQEKGKGRFKQPEKIAKAIQRAITMSYRLGALAQESINVVLSVLVREIRALEKNIKELDKAIEQVIVVIPEYQCLTSIPGVGKVYAAGLIAEIGQIERFEDQTKLAKYAGLSWKVNQSGNYQSQNTPLTKQGNRYFRYYLVEAANSVKNYLPEYKAFYQSKYKEVPKHQHKRALVLTARKFTRLVDTLLRKHQLYTPPRSVIEK

SEQ ID NO: 364126 - protein, 399 aa, unidentified
MKSPCVAVDVSKGKSYYQGFIEIDKPACKATSIMHDLEGFRLMHETGQRLKETYGDVVYVFESTGIYHKALEIFLMNQEEKCIILNPLEASKIRKTDLRSTKTDVRDCKSIAKAYFMKDYRIHNQKDELYEKMQSMNGHYNFLVQQLREMKVHFRNALDSVYPRFDEVYPNPYLDIPMSILKRHSHPDELKSKRVETIMKYIMKDTKHRESKSMDEAKKLKSYIDKVSSGSRSSSYEVTILKTMVNKVSDQEIEIELCLDEMRDLIIDLPIYHQLMSIPGVGDNLAIRLIGELGDLDRFERSEQLVAYAGIDPRVYQSGQMTGEHLHITKKGNKHLRTLLFLAVSSNIRIGKQNSLLDFYNKKRQQANPLAYKAALIACANKLLRIIFGMYQSGMNFHK

SEQ ID NO: 364127 - protein, 350 aa, unidentified
MDKELYIGVDVSKQTLDLAYYDGESIDWKKAHIKVSNNNAGFKKIGSWVAKVSKGVDIVLFCMEYTGLYTQNFRLWLEEKHYIYRMVEPRKMHRFEPDLDDGLRSLDRIKTDELDSFRIAIYCEQNHRKILRKPSKLPPPVYFKLKRLLAERKQTVKQSVLYKQQLHDICAYDTDLSVERKNGQLKTLNDALKGIDNEIDMYIKEDADISKNFSLLTSIPGIGRVVALETIVLTENFMAIDNPRKYACYIGIAPFKKESGTSVRKGSSVSKKGFKQAKADLSIACLVCMQHIPNIRDYWERKRKEKCSGIVFNAIKFKMILRMFAVIKRGTPYVETDNYRNGKNKQPGVN

SEQ ID NO: 364128 - protein, 323 aa, unidentified
MQGKITSEHSAMGAVYVGVDVCKERLDVHVHPAGRSLSVANSRDGIRQLRRALATVEVALVVMEATGKFHRPAQRTLSEAGVLIAVVNPARARLFAEATGALAKTDRIDARMLAVMGQALDPQARPPAPARIEALQELVRARSATIRDLTGLKNRRSAAQTPCLRAELRRQIGNLERSVARLTAEIERRIADDPALARRHRILLSIPGVGPAVAAVLLADCAELGALSAKTAAALAGLAPTARDSGDTRGQRHIRGGRRSVRNALYMAALSAARANPDLKAVFQRLCANGKKPKVALTAVMRKLIILANTLINEDRLWSTKAP

SEQ ID NO: 364129 - protein, 315 aa, unidentified
MAQIICGVDVSSLSLEARIGRDGVGRSLANNPEGIAELAAFCQQHGVELVAMEATGGYEKQAFALLWAHRLPVAILNPRAVRRFAEGMGLLEKTDPIDAGVIAWFAAVKRVLACTPASATQQRLQALVTRLRQLTELQTAQRNQRRLVTEATVLATFSKLLALLASQIRGLEAAIAEIIAADPLWQKLDQTFRSIKGVADRTVARLMAEMPEIGTLSNKAIAKLAGLAPLAQDSGKKQGKRPVRGGRRGVRDILFVVAGVVRLYHPDFAAFHERLSAAGKPKKVLRIALAHKLLVRLNAKARQVRQAEVLAVAAD

SEQ ID NO: 364130 - protein, 336 aa, unidentified
MPLYCGIDLHSNNHVLCVIDDKDRRLLETKLDNDVLRTIEALSPYQKQLKAVAIESTFNWYWLADGLMEAGFQVELVNTAKVVQYSGLKHTNDRYDAFHLAHLMRLDILPTGYIYPKAERGLRDLLRKRIQLVQDRTRHLLRFQSQVQMHTGESVPANRIKTQKYRLPVIGDSNVQLALHSQLVLIRALSAQIKQLEQSILSQVEPVASFKWLKTVPGIGDILAEAILLETGDITRFKGPGNFASYCRCVDSRRESNGKKKGENNRKNGNRYLAWAFIEAANFAVRYSDPAKRFYLKKEKATNAIIARKALAHKLARSCYWVMRNQEAFNQDRIFH

SEQ ID NO: 364131 - protein, 390 aa, unidentified
MIYVGIDVAKDKHDCCILGPDTEELFPVFTIRNNSDGYGELFHKIESVSKDKSQIKIGLEATGHYSYNILGSLLDHGYHTFVINPLHTNLYRKGQSLRKTKTDKVDARSIAEMLVTDKTLKPYTGTSYHSEELKSLTRYRFELVKERAKMKTSVSRLVNILFPELESLVPTLHMNSVYRLLQELPGAYFIASSNLTHLKALLADASKGRYGREKAIEIRETAKSSIGSLMPAKSMELRQTIRRIDTLTSDIKEVEQSIQKIMDECGSPITTIPGIKYRMGAMILAEIGDFTRFSNADQVLAYAGLSPSTYQSGQLISSYARMEKRGSKYLRYALFNAAIYASVWDERFRLYLSKKRAEGKHYYVAISHVVKKLVRTIFRMEITHTSYQPL

SEQ ID NO: 364132 - protein, 430 aa, unidentified
MEIAKSPESPEEQLTIMSKAGKRMIVNSHAVTIGIDIGKYTHVAVALMPDGRFTRTFSIHNTREGYEALLERIRLWKEECGTGEVIIGMESTGHYWEVPARWLAGKGLKVVLVNALHTKRAKEIEDNSPGKTDAKDARIIAQLVCYGKYLSCVLPEGAMAELRELTRIRQHIVTELTQKRNYLRRLLDSVFPEIFTVFKKSWGKTLLHLIRLYPLPEDLIDAGLPAAAGRLRQECRNLAVKKLERLYVLAGSTVGVPVARGAYSSGIRNTAGRILTLQDERSRVEKQMEDLLAEVPESRFLLSLKGVGVVSAAVILGETGGLSRYTSSREVLKLAGLNLFEISSGTHRGRVRISKRGRPLLRHILFILATVQAKEGMPLNGEYRALLERKMPPVKALIALSRKLVRLLFALVRDERCYTEKISALMTKAA

SEQ ID NO: 364133 - protein, 365 aa, unidentified
MPQPNDLSRSLVALDQDSTIIAVVEMSQSSWLVGGVLPGIERQPCKKLEPSAERLLGLLHRWRDEAVRAGKKITRIALAFEAGRDGFWLARWLNARGVEAHVIHPSSVAVSRQHRRAKTDRLDTELLKRGFLGWLRGERGHCSMARVPTIAEEDAKRPNRERECLVGERTRIVNRMKATLARLGIRNFKPTLRKAAERLATLQTPEGMPLPPNVSAELQRDMARLGFVVSQIKEIEEVREKRLEQAPEIGSHAMVRLLARVVGVGIETADMLVHEVLSRPMRDRKAVARYAGLTGSPDESGAKRREQGLARAGNARVRRGMIQLAWRFLLFQKQSALAQWYRARTDRNFADSAYNRLPSNIHTSR

SEQ ID NO: 364134 - protein, 441 aa, unidentified
MPRRIGLDVHREFVQIAVLEDGVVRQAGQVAATPEALRGLADSLLSTDEVALEATGNSHAITRLIAPKVARVVISNPVKTRAIAEAKVKTDKVDAAILAQLLAADYLPGVWVADEATQVLRRQVARRAHIVKQRTRLKNQVQSILSRNLVPRPPVADLFGVKGRCWLSDQALPPDEELAVEALLRQLDFHGSELRLIDRQLGRIALGREEVKRLMTIPGVDATVALSIVAAVGDFHRFPRPEQLVSYLGLNPRVHQSGSQPASHGRITKHGRAHARGMLVEAAWVAVKTPGPLRAFYERIRSRRGMQIAVVATARKLAVLCWHMVIKQEDYAFARPSLTEQKLRKLELRAGMPSRRGQKGRAAAYSLKEVRRRERELAEQGEQAYRQLIAEWQAKTPKPKPGVAAANGTRVSRPSAGQAARQASVPEPALRSGVDHALTEA

SEQ ID NO: 364135 - protein, 339 aa, unidentified
MTTQICGIDIGKTVFHLVGLSKEGHIVVKKRFNRKQLLTYTVNLPACLIGIEACAGAHFLARALVAQGHDVKLMPAEYVRPFVKSNKNDYVDAEAIAEAVQRPTMRFVPIKNEAQLDLQALHRVRDRWIGRRTAVINQLRGFLLEHGITITAGPAHLKRQLPSILEDAGNLLSTRMRTLLMELREEWEKLEEQIEATNRELAQSAKKDDGCQRLLTIPGIGPLTATALTAAIGNGTAFRKSRDLAAWLGLVPRQHSTGGKAKLLGISKRGNPYLRRLFIHGGRAVLARVKREDHSFGSWLDRLEGRSPRNVVVVAMANKLARIAWSVLTSGRPYCATAA

SEQ ID NO: 364136 - protein, 355 aa, unidentified
MNSKKEIKIEALMSVGIDIGKDVFHLVGFDPDGNVVVRKKIKRMALEKTFEELPSCIVGMEACLSAHFVSRALRKMGFEPRIIPAIYVKPFNKGQKNDYNDAEAIAEAALRPNLKSVPEKSQDQLDLQALHRVRSRLVSRRTATINQIRAFLIEQGITVRKGLRALKNSFLTILEERKDEISPRMRKILIGLYGDWMWMDDRIDAVSTEIEQISRAEENCVNVMTIPGIGPMISTAMVAAIGAGDAFDRGRDFAAWVGLVPRQYSTGGRTVLGRISKRGSRYLRMLFVQAAKVILMRPHRWPDFSFGEWLIRAEPRMHRNKLAVALANKLARTAWSVLHHGTTFDAPRDEVAFGV

SEQ ID NO: 364137 - protein, 288 aa, unidentified
MNEAEDVAVGIDVAKATLDVAIRPSGEERQVANDPAGIAVVVAWLQRVQPSVIVVEATGGYEAPVVAELGVARLRVAVVNPRQVRDFAKATGRLAKTDRLDAQALVHFGQAVRPTPRPLRDEETQALAALVERWRQVVAMRTAEANRLGATRVALVRTHIQAHLAWLDTELREVDEELRQRLQVSPLWREQDDLLRSVPGIGPILSLTLLADLPELGRLSHAQIAALVGVAPLNRDSGTLRGRRAIWGGRAALRAVLYMGTLRATRCNPAPPSDHSTSASWQRAKRGK

SEQ ID NO: 364138 - protein, 421 aa, unidentified
MHVLYQRCAAVDIGKDVIAVAVRLPGDGPEHRQTIKRTFKTFYGVLKHAAGWLTAQQVTHVAMEATGIYSMPVYHALIEHGQFEKVLVCNAGHVRNVPGRKTDLSDAEWLVHLLECGLLRGSFIPPAQIKAARDVIRYRTKLTESRTSELQRLGNVLQDAGIKVDSVASTIATRSVRAMVEALIDGERRPVLLAELAKGRMRARIPDLQRALEGRFDDHHALMCRLHLDHLDHLEEMIARLDTQIQDMMQPFRAQRELLTTIAGIGPFAAAAIISEAGADIGETFPSAGHFASWIGVCPGNHESAGKRHSGKPRKGNQHLQHVLVECAWAASRTPGYLQSHYRWHVRKFGGARNATAKNKAIVAVAHKLAIIIWHVLATGKPYTDLGADYLDRRVDPAKETRRLIARLQALGHTVTIEPAA

SEQ ID NO: 364139 - protein, 353 aa, unidentified
MENLSTLTIGCDLGDRNSDLCVLDEAGDVVKTRRFSSTRNRFTKVFSAFPPSRVVIEVGCHSPWVSRLLEAQGHQVIVANPRKVALIYQDVRKSDRTDAELLARLGRVDPQLLSPIQHRGEAMQRVRTLLRARAQLVQVRTQLITSVRSLVKSFSGERLPSCSAASFHNKAAESMTEALRPMLCPMVASIETLTTQIKVLDARIEYCSRVEYPEAMLLRQVSGVGPVTALAFVATLDDPHRFKRSRQVGAFLGLCPRRDQSGNSDKQLGISKCGDPYLRKLLVQCAHQILGRFRPDTDLRRWGLAKAEHGGKNAKKRTIVALARKLAVLLHALWVGQTEYVPIGYRQPTRRAA

SEQ ID NO: 364140 - protein, 351 aa, unidentified
MTRMSLELRSLLPYPNSCLGASPHQQGRDTKMLSFCGIDVSKDRLDVMVLPEEQCCSVPNDAGGWGALVERLRSFSIAAIGFEASGGYERGIARALLAAGMSVRQVNPFKLRQFAKASGILAKNDRLDARMIASFVAIMPTRPAQRQTPMIEQLAAMLTVRRQLSDHKVATENASRLLEDAMLQRLSRRRVARLTADIDLLDQRLVEIVTADPALAHRFRLLTSMPGVGAVLACTLIALLPELGQMSRKQVAALVGLAPYDFDSGKLKGRRCIWGGRARVRHVLYMAALSASNWNPALKAFHDRLEATGKKPKVVIVAVMRKMITTLNAMLRDGTTWVDRYSGRRSAATAR

SEQ ID NO: 364141 - protein, 311 aa, unidentified
MIVGVDVSKGHLDVARHEHAGTARYTNTEAGIEALLGDLQATPPRLVVAEATGGYEIALVRALQRAAIPIAVVNPRQVRDLARARGKLAKTDAIDAQAIALFGAIMQPKPLPAPAPGREALAGLVARRRQLIDMMTAEKNRREHAEGVVSDWIDENLAAFKSQLANVDAAIALALEADTELTKRRDILVSVPGIATLTAAVILAELPELGHIGAKQAAALVGVAPINRDSGQYRGQRHTGGGRPSVRCALYMATLSAVRHEPTIKAFHHRLREAGKKPKVAIVAAERKLVSLLNALLERNQIWKPPQQHGC

SEQ ID NO: 364142 - protein, 456 aa, unidentified
MGKKKISLEVVNPNAAGIDIGSKSHWAAVGQNAQDVKEFGVYSDDNHGLCLWLQQHGVETVAMESTGTYWQNLFSSLTAFGLEVILVNGQQTKNIKGKKTDIKDCQWIQKLHTLGLLTGSFLPDSTTDTIRTYSRHRQGILEQSARTVLKIQKHLRLMNMRLDVVVKDITGLTGTKIITDLINGQTDGKELAKHRHYNCRKPESEIAKALQYNGRDDHFFALRQEWETYLHLQGQITRIDEQIKKQLVDIIDGDADKKQHIASEKPHKRKNKNTIRGLDMNQVSYQYFEGVDLMAIEGVNDATVMAIICEIGPEGIKKFGSAKQFTSWLRLAPNNRISGGKVLGHHLPKGSGRLKTAFRLAANAIGNLKEGHLSDFFKRINYKKGRATAVSATARKLAVIIWNMLVKGTPYNPPTEYLFLDQKRKLRLVSRIKKNIVKFELKPEDVGFGNMMNIST

SEQ ID NO: 364143 - protein, 342 aa, unidentified
MDEYDGRQFVGIDLHRQRSVIVRQTEAGEQLSAVRIVNDPVALGLQIEDAGPDPEVVLEATYGWYWAVDVLQAAGAHVHLAHPLGIKGFRYRRVKNDVRDAGDLADLLRMDRLPEAWIAPPITRELRELVRYRAKLVAIRSGLKAQVHAVLAKAGVLIAVSDLFGVGGRQRLAKVPLGSAYAERVRSLLELIDVLDNHEARFAGLIAQRLNTHRGYQGIQQLPGIGPTLAAVFVAEIGDVHRFAGPAQLCSWAGLTPRHRESDTVVHRGHITKQGSKLVRWAAIEAVQRHQTTAKISADKDRIEARRGKNIAKVAAARKLLTLVYYGLRDGHIRALDRARAA

SEQ ID NO: 364144 - protein, 370 aa, unidentified
MRMKRHPQYFISKSPRSGSRVGMTIGIDLGDVWSHYCTINEEGEVIDRGRFRTNPSGVDKRFRDLEPIRIAMEAGTHSIWISEQLRDLGHEVIVANVRELRAISHSDRKSDSVDAEKLARYARLDPEILRPIAHRTVAQQETLTLIRARDVLVRLRTGAVNSVRGLAKPCGYRLPASSTLCFAKRCLVMMPPGLAAALSPLLHQIGDMTVKIKEYDRAIKKLTETEYPETQALIKVYGVGNLTALTYVLTLGTKERFRHSRDVGCYLGLRPKRSQSGDSDPQLGITKAGNGYLRQLLVECANHVIGPHGKDSTLRRWGLSLGARGGSHARRRAVVAVARKLAVLSTSITASACWTLMSGGPLLSVIEPGW

SEQ ID NO: 364145 - protein, 346 aa, unidentified
MDIYIGLDVSLASTAVCVLSSHGKVVKEITALSEPDDLERVLRSLLGTVVAVGLEAGPLSQWLYRHLTEAGFDTVLMETRQVKGALKAMPIKTDRRDAEGIARLLHMGWFRPVHCKSISAQEMRALLSSRKAILQAIVALELSIRGVLRNFGLKMGRIAKGGLEDRVLELVDGNVMLQAAAKPVLSARAALRLELAGLEKRVRDHAKSDPVCRQFMTMPGVGPIVALTVKSAIDDPERFRSSKDVGPWVGLTPRREQSGERDIMGSISRAGDAGLRTVLYQAAMVMLHKGRPNWLTAWAWNVAKRRGKKRATVALARRVGVVLHRMWLDGSAFRFTQAEAAAVSGA

SEQ ID NO: 364146 - protein, 357 aa, unidentified
MNEITTVGVDLAKEVIAVCGADRSGKTVFTRVFRREAFAAWAVRLPPSVFGLEACGAAHHWARWLTSHGHKVHLMAAEFVKPFRKSRAAKNDRNDAEAVLTAVRQPNMRFVAGKSIEQQACLSWHRMRQGFSEERTALINRLRGLLGEFGVWRGRSAAVLTRALPELEHAAALPLMVRRLLGEARPHLARLDAAIAACEVEIKSHVKGNAVAQRLTAITGVGSLTAAAAIATVTDARDFKNGRQFAAWQGVVPCQDSSGGHTRLGHITKRGDTYLRGLLTQGARSALQAALTKEPLRRTRLQSWIVQLHTRVGYHKTLVAIANKHARMIWAILAKGEDYDPDAWRRWSRSAPATRTA

SEQ ID NO: 364147 - protein, 388 aa, unidentified
MIYVGIDIAKLNHFASAISSDGEELIKPFKFTNDNDGFHLLISKLDPLDKDSLTIGLESTAHYGDNLVRYLVAKNYKVCVLNPIKTSTMRKNNIRKTKTDKVDTFIICKTLMMQESLRFVTFYDLDLMDLKALGRFRQKTIKQRTRLKIQLTSYVDEIFPELQYFFKSGLHQKSVYALLKEAPTPEAVASMHMTHLAHLLKVNSHGRFNKEMAQQLRVLAQKSVGANDSSLSIQVTHTIQQIELLDSQLERVEAEMTEIMKFNDSVIMTIPGIGYINGGMILGEIGDIHRFSCPNKLLAYAGLDPSVYQSGNFQAKKTRMSKRGSKVLRYALVNAAHNVVKNNATFKAYYEAKMVEGRTHYNALGHCAGKLVRIIWKMMTDNVEFNLD

SEQ ID NO: 364148 - protein, 344 aa, unidentified
MTAVMIGVDPHKGSHTATALDATEHELACLRVRAGRRQVEQLLAWATPFEARTWAIESANGLGYLLGQQLVAAGEVVLDVPATLAARVRVLSSGQSNKNDPNDARSVAIAAMHAPMLAAVPVEDHRTVLRLLAKNHTDLARWRNKICCRLHALVAELVAGGISKEVVVSDAFALLESIHPEGVAAIERHRLAGQLADELVHVDDQLKLAKANIRTAVAASGTTLTDIFGVGPVVAAMLIGYTGDPFRFPTSGHYAAYTGTAPIEFSSAGRVVHRLSRRGNRRLNHALHIVAVTQIRHAHSPGRGYYDRKRAQGKTPREALRSLKRRLSDIVWRRLVDDARRAAD

SEQ ID NO: 364149 - protein, 343 aa, unidentified
MRLFVGLDVSLAKSTICVISEHGKILKEAEVPSEPEALARWAGTLDGTIAAIGLEAGPLSQWLHRSLTEAGFETVLMETRQVKGALKAMPNKTDRRDAEGIARLLHMGWFRPVHCKSISAQEVRAVLGARKAIQQTMIALEMSLRGLLRNFGLKVGAISRGRYEQRIRELAEGNPMLEAATGPMLRARASLRQELAGLERRVRQLAQDDPVCRRLMSMPGVGAVVALTYRSAVDDPSRFTSSKKVGPWVGLTPSRNQSGERDVSGGVTKAGDVNLRRALCQAATVMMHRGHSTWLRTWGARVARRRGAKRAMVALARRISVILHRMWVDDADFRSDTALPHAA

SEQ ID NO: 364150 - protein, 448 aa, unidentified
MESFYLGSDVSKGYADFVILDAKKQIVEKNFELGDSYAGHNELYEKLNKFMEDRPGAKLYAAVESTGGYENNWYNTLFKCQRAIDVSVTRLNPIGVHHSIKAGMKRNVTDKISAYAIAEFLIMQGENIRFDVDTYYAELRKMKAFVDMLTKQKVQCENQLESVLYSANPEVLVYCEEFKPAWLLLLLLQYPTADKLSRAHLESLKKIPFIKDKQAEQILEKAKKSVASSSGPVTEMLIKEMITQINHLEELIKKHKKAMAKNCKLEEVELLKSIPGIADYSAISLMLEIGLIERFESSKKLASFFGVHPVYKQSGDGKWGMYMSKQGRSAPRATLYMSVFSGIQYNPIIKDVYKKHVKNGMKKGAAMGVCMHKLLRVVYGILKSNKPFDPAIDLENQTYSTIKHSKINVKKDSAFYNIMVESPISGRQRKKRKAQLVSQDVESSKAGS

SEQ ID NO: 364151 - protein, 477 aa, unidentified
MKQAKSLSCAQAIQARGGQLSRKQRRELARQIQSDNLTLQIIHPHAAGIDVGKQTHYVAVPPDRDAEPVQYFDSCTEGLLQMVAWLKKCGITSVALQSTGVYWIALYDLLQEADLEVYLVNARYTKSLPGRKSDVQESQWLMKLHTYGLLPNSFRPPQAIRWLRSYWRQRQNHVRSAARYIQRMDKILTEMNVRLSSAVTDLSGATGLAIVQAIVKGERDPQKLAAYRDPRVKATAEELARQLQGNWQEDLLFCLGQELEAYRFYQTLITECDQELAKLLRTFPDRSAGVALPEETRAGRRKKKRGNTPQFDLRQLLYLMSGVDLARIDGIDVITAMTVIAEAGYDMSPWPTADHFVSWLRLAPDNRISGDKIIGKGKTPTQNRLTQALKMAASSLKASHTYLGAQFRRLRARRGPAIAVKAMAAKLARLVYNMLRHGMAYVDRGTEFYEQQQRERRVSALTKNAAQLGFQLVPVAA

SEQ ID NO: 364152 - protein, 325 aa, unidentified
MEEKTKYCGIDVSNETLDLYFLNQEGIHQHLQISNTVTGFRKMLKEAGTTTHFVMETTGVYHLNLIFFLQEKGCRFSVVNALQIKRYIQMHLERNKSDKKDAKRIYEYGVDRNPETYSMPDMAYFECRSLNNAIHDLTKEITKFSNQIHSLKKCPFDAKRIEKYFQKIIKKLQEEKLNLELELQEKLLEWDQETLELVSSVKGIGKRAAAELLIYTQGFKDMNSYKQLISYAGLSPTEHRSGSSIRGRIRICKQGGKQLPHILYMCALNAKKTNDHCRALFDRLVEKGKNKKAAVIVVCNKLLKIVFGVVKNREFYQDNYLQKTA

SEQ ID NO: 364153 - protein, 403 aa, unidentified
MNNVAGIDVSKGKSMVSVLRPFGEVVAKPFSIGHTGSELKELADYLKSLDGETRVVMEHTGRYYEPVARFLHDEGVFVSAVNPKLIKDYGNNTLRKVKTDKADSRKIARYGIDNWAELRQHTPMDTIRMQLKTLNRQQSLYTKTKTMMKNNLIALLDQTYPGVNALFDSPVREDGSQKWVDFATTFWHVDCVRNMSLTAFAERYRKWCKRHGYNFSQSKAVEVHTGAQDLIAMLPKDALTKTMVRQAIDALNAISASMERLKAEMQALAAQLPEYPVVMAMHGVGDSLGPQLMAELGDVTRFTHRNAITAFAGVDPGADQSGTHEAKSTRVSKSGPPELRRALFLVMDCLLKTQPQDDPVYRFMDKKRAEGKPYLVYMTAGANKFLRIYYGRVKEYLASLEEN

SEQ ID NO: 364154 - protein, 338 aa, unidentified
MALYCGIDLHSRDSWLAVLDEGLKVVQQAKVGNDLEAILHVLKPYREDLEGVAVESTFNWYWLVDGLMDAGHCVHLTNTWAVKQYEGLKYTDDRHDARWLAHLLALGILPEGYIYPKEERSARDLLRRRAFLVRKRTSFILAMRGAFECRTGLRINSNDLKKWKAKDVEAHMEDPTEAFSITCLLEPMHALSAQIKKIEKGALARGRLRPEFAPLETVWGIGKILALTIMYEVGDVTRFRKVGNFTSYCRLVNTARLSAGKRKGSGNPRNGNPHLSWAFSEAAHHAVRHYPEAQKFYQRKRTKTNGIIAIRALAHKLARASYHVMRDHVDFDPEKTFA

SEQ ID NO: 364155 - protein, 400 aa, unidentified
MRAVFGIDVSKTSSEVAILVNGEKVHGYTILNDAIGFNRLLGDLKTVHNPEIIFEATGVYSRRLQAFLEEYSYAYTRLNPLEAKKQLDSLRVRKTDKIDAEKLAKSQLVHNRKPTYVQEEVYQHLRDLSRFYQNMTEDLVRTKNRLHKVLQVTFPELETLLSTPTGEQYWNLVMAFPCKEFVLSLSQSNLCEIVRQSTSKRISEKRITYLTDKLIKLAKQSFCAVKNPSPMLEEVRYYAQELLRLSERRQVVLNDMVALAQPLPEYDILRSIPGIAETTATSIIGELGNIRRFQSTNQINAFIGIDLRHYESGNFLAKEHITKRGNPYARKILFKCIHNIASASHTNPCHIADFYEKRKRQSTIASTKPHTIASIHRLIRTMYYLITHNKLYDYSLTQNR

SEQ ID NO: 364156 - protein, 368 aa, unidentified
MIYCGIDWAEKTHDVAMVDHTGTLVAKRHITDDAAGYKVLLDLLAEHGDTEDNPIPIAIETSRGLLVAVLRTGRRKVYAINPMAAARYRDRHSVSRKKSDPGDALVLANILRTDMHAHRPLPDDTDLARAIAVLARAQQDATWNRQTIANQLRSLLREYYPAALAAVEPWKNGLCRPEAHALLKAAPTPNRAARLTRTQLQATLKRAGRQRGIEAEADRLQEVLRAEWAHQPALVEDALGEQMLALLIQLEAACTAADRLAKAVEEVFPRHPDADIYLSFPGLGAQLGARVLAEIGDDRTRFTDARGLKAYAGSSPITRASGKKSSITRRWVKNDRLNAAGYLWAFSAPNASPGAKAHYRHRRDDCGG

SEQ ID NO: 364157 - protein, 355 aa, unidentified
MGEGSWVGLDVHARSVVAGVIDQGSGEVRSLRLPLGDSTVAWLQTLPEPVRVVYEAGPTGYGLARACAASGISCVVAAPSRVRAAADRVKTDRRDAERLARLLRLGEITQVRVPTLEEEAARDLVRAREDARGDLMRARHRLSKLLLRHGLVYEATAWTRTHDAWLRRQRFEGGPLAVVFDDCYGRMLDAKSRRDVLDNAIVELAATPPYVDVVSRLVCLRGVSTLTAFALTVELGDWHRFRPRSLGPFLGLTPSEHSSGERRRQGSITKAGNSHVRRLLIEAAWHQRSAPRRSVTLERRRTGKPLAVQAQAERSCRRLHGRWQALETRGKPRSIVVVAVARELAGHCWALATMD

SEQ ID NO: 364158 - protein, 352 aa, unidentified
MEKLIRIGVDTSKSVFQLHGVNAAEEPVLRKQLRRVHFLEWFGKLEPTVIGMEACGASHHWARELEALGHKVVLLPPQYVKAYVVRGKNDKIDAEAICEAMSRPKIRNRFVAVKSAEQQAAQMLTGTRDALMRRRTQLSNAIRGYAAEFGLVVPKGLANLKPLLARILQSREVPPLAKEMFALRAAEYDHLGGQLRQVEKTLLAFHRNDEVGRRLAAVPGIGPIGATLLSVKVSDAKAFASGRNFAAWVGLTPRDHTTAGRFKTGGITRAGDEALRCTLVQGATAIIDQVLRGSPRHASPWIVELIKRKPRKLAAVALANKTARIAWKLMVSGERYDRGRAQGIAIALKEAA

SEQ ID NO: 364159 - protein, 342 aa, unidentified
MQISTIGLDIAKNVFQVHGISSSEEVVVRKQLRRSQVLAFFKALPPCLVGIEACATAHYWARELTKLGHRVRLMPAKDVKAYVKRNKNDAADAEAICEAVRRPTMRFVQVKSVEQQGQLMLHRTRDLLMRQRTQVINALRAHMAELGIVAAQGREGIKALLKIIASEADARLPVDAHSSLVVLAAELQALQTMIGSIEKRIVVQHRSNEASKRLETIPGIGVIGATAIAATVPDPKVFRSGRDLAAWIGLVPREGSTGGKQKLGPISKQGDQYLRRILVVGAHAVLKRARQQPEKYPWLTGLLARKPFRVVAVALANKMARIAWALLTKGGIYRAPALAAAA

SEQ ID NO: 364160 - protein, 311 aa, unidentified
MTDHNIGADISKSHLDAFLLEDGAAQRFDNSAMGFRALTKWLGKAPVARIVFESTGPYHKAFEAKLGETFPLVKVNPLQARQFAEAHGTRAKTDAVDARMLARMGVAFDLVPQVPCSKEILVLKDLNVARTGLIKDRTRLRNRAQTQDIAVLKRQTKARLAQVERHVVELDAEIAALIAAGQTPARNCDILCSMPGIGTVTAAAMLTLMPEIGTLERKQVASLAGLAPITRQSGQWQGKAFIGGGRKPLRDAIYVPAVVAMRCNPDLKAKYEQLRAAGKPAKVAIVAVMRKLIEMANALVKADRTWTPKTA

SEQ ID NO: 364161 - protein, 583 aa, unidentified
MSRRSKAVDLPILNARAAAIDIGARFHVVAVPSELCTEPLQTFQAFTRDLHRMAYWLSALGITTVAMESTGVYWIPVYEVLEDAGLEVIVTNAREARAVPGRKSDIKDAQWLQRLHACGLLRASFRPGREIAALRAYLRLRERHLDYAAAHIQHMQKALTFMNLHLHHVVSDVTGATGLRIVRAIIAVERDTKVLARMRDLRCKATHEVIEAALQGNYQPEHVFALQQALELYDFYQRQVEQCDRQIEQVLTRLAAQSPAPTAPLPKPRHRTKQPNAVDFDTRPLLHQITGTDLTQIHGIGPYLALRLVSECGTDLSRWPSAKHFTSWLSLSPGFKISGGKVLSSRTRRSSNPVAAHLRLAAVTVGRTDTALGAFYRRLAGRLGKAKAVTATARKIAVLFYNTMRYGADYKDPGADYYEAAYRDRVVKQLQRRAANFGFRLEAIEGSRGLVRPGDRNGTRQGFEFMKANQDTWPLATMARLLKVSRSGFHAWNQRRPSAHAQQDMDLLARIRAIYARSHGTYGMPRIHATLARQGIHVGRKRVARLMLEAGLRGVSRRRWVKNHAASTWGTTGSGSGAAPLPS

SEQ ID NO: 364162 - protein, 354 aa, unidentified
MLIIGCDFHTRYQQIAMAREETSELLVERRLDHESGEAQAFYRSLQSSQEPVRVGIEATGPIHWFERLLAELGHELWIGDSAKIRASEVRKQKTDERDAALILDLLLAKRFPRIWVPTPAERDLRQLLWHRHKLVRMRTMLGNQLHFLAMSQGLCRKKKLFTQKGRVELQHLGLAPWASRRREELLKLLDQLDSPIAELDGAVLEEARRRNDAALLMTHPGIGPVTSLAFVLAIGPITRFQRSKKIASYLGLNPSEASSGGKQRLGAISKQGNSMVRWLLVEAVYPAVRKDPALRQDYQRLKFRRGHAVAKVAIARKLAVRMYWMLRSGADYARLVRRQGSPGGTLVDASPSLG

SEQ ID NO: 364163 - protein, 409 aa, unidentified
MNKKVLRFYRLPFNWRGIELTRKPVAFSNSMEGFNSFYNTIVELMQKREREEALVGIEPTGHYWFDLGQFMGEKNIKFVMVNPHHVHKTKELDDNSPSKNDRKDPRVIAGLVRDGRYFYSYMPTGVYAELRNASNRRFVLVEEQTRAKNRLQKWIAVYFPEYKGIYTHIDAKGGLLVLKQAPTPEEIVRLGVEGIIKIWKDAKLRGNGHKKAMLILNAAMKSIGLKSGLTEARMEIQDLIEDYELQTKRLERVNDLIKELCQQVRYADKLLEIKGIGITTVAGFIAEVGDITRFDSTKELQKLAGLELVSDSSGKHNGKTKISKRGRKRLRYLLFEAAISVVGKNEEFKEIHSYYTTREKNPLKKMQSLIAVACKLIRVFHVILTKGISYDASKMLKDIRHQGEQLKAA

SEQ ID NO: 364164 - protein, 390 aa, unidentified
MEVLYQSCAGIDVHQANIVVCILHGPLTSTRPKREMATFDTTTKGLRACHDFLSQFHVEAVGMESTGVYWRPVWHALCDDFELILAQPAHMKAIPGQKTDKKDAHWIAKLTRIGLLPRSFVPDETIQELRELTRQRKHYVESRNRETNRIHKILQSGGIKLTTYIEDIMGLSGRNLLQLLVDGTPITPRIVHQSVYTSLKKKVPQLLEALDGYFSDHHRFMLKQSLEIYDFYQKQIELLEERMNVYLSQYEKHVEILDSIPGIDVITASVIISEVGVDMSQFPTSGHLASWAGLCPGNNESAGKKRSTKIRHGNSYLKKCLCQAAFAVKRQKGSPLAERYYQIQSRRGSQKATIALAHQLLKIAYILLKEQMTYPEFLAQKKTTRDELVA

SEQ ID NO: 364165 - protein, 391 aa, unidentified
MYFVGIDIAKRNHEACIIDSAGQSQGKTLRFPNSQTGGQKLIQWIQNVDPDLSSTEVALEATGHYWLALHSFLRKHGVTVHVINPIQSDAFRNMYIRQTKNDEKDAFIIAEVLRFGRYTTTELGSDEIVALRQLSRFRFSLVDSISDLKRQVIGLLDMLFPEYERLFSDLFGKTSSELLMKYTTPEEILAVDTEELAAFIAKHSRNRLGLDKAEEVKSAAESSFGIDSALDAFRLQLRLLLQQIRFTEEQLESLNVEIEKRLKAVDTNLVTIPGIGPVLAAAILGEIGDISRFPTGVKLVAFAGIDPTVRSSGEFTGTRNRMSKRGSPYLRRAIWLAANVAKMHNPVLKDFYDQKRAQGKHHLAATGAVARKMTYIIHAVLRDKKPYEPIA

SEQ ID NO: 364166 - protein, 449 aa, unidentified
MAKRIVGIDLAVTGLHRAAVYDSVSVAFVGKSFTFNRSYKGFMLLLHKATSGFSGEVLFVMEPTSGAWKPLSVFLMAKGYMVYLVKPQKVYDLRKFLKKHTKSDRIDAQALAKLPIIDPQGIYPLTLAQPDVEALNRYCRQRERIMRSISARKTRIQAYFTTINPLLMDCFGEHKYTHCCRAFLRRYADPFKVVKLGVKRLSNFLHNHAFGTPEPSLAEKIYEASRSAVSIYCEAQAKQMLSFSWEQFQEEVNIELDLMEYEEKKVKYLDEKIAVLYHKIDPGKVLRSIPGIGPVIAPSIIGVTGNPERFANIRAYKAFCGLVPRKKQSATLDIKGLRITKTGQRILKKGYCLAAETARRYDPEAACLYHRLRTKGRHHNQAICAVASNLAGRTYSVMKRNGLATETPAHNTVHLRYVIRDFEGKDIDLKQGRTLVVERYLTKANRESA

SEQ ID NO: 364167 - protein, 343 aa, unidentified
MQYVGLDVHRSRSSLCILDTDGKVVKEETLKGCWATVLDRLRAIQGAWSICYEASCGYGYLHERLTPMAHHVAVAHPGQLRLIFKSKKKHDRVDAQKLAKLLYLGEVPQVHVPGLDVRQWRKLIEFRQRLLGRRTSVKNQVRAILRGNDVQAKRWQWSKKAMRWLESLELPSCEKLAMEMALEEVGQLNERVKRVEAELAEIAARHPGVTLLMTIPGVGIRTAEAFCAYVDNIKRFARNRQVGSYFGLVPCLDSSAGRDRFGHITGDGPGTVRKLLAEAAWQGVRRDPTIKAFFERVMKGDPDRKKIALVATAHYLCRVMAAMLRTGEVWRGAGAGGGGPQNP

SEQ ID NO: 364168 - protein, 354 aa, unidentified
MKEYHIGVDMHKQSSQIGVIDGDGRKIENRRVSNDPDRLRDFLSDFPKGTPVTLEATTGYEWMCDLLTGMDFHVQLANPRKVRLIAEATIKTDTIDAWTLAQLERTNFLPTAYLPPEEIRTTRELLRHRLKLVCLRKGLKNRIHAALTKRGVLFYPVKDLFGKAGRAFLASLDLPAVYRTETDSYLALIDQINTFIAQREHEIKRQVKEHNPDAQLLITIPGISYFSALLLAAEIGTITRFANGKKLVSYAGLTSTLRESSDVVRQGHLKKDSNKYIRWILIEAVTAAVRYDPKLYALYRRILVRKGKLKARVAVAHKLLVSIYFMLKNRSPYQPKNFHAHVLRVSPCTSSGRQ

SEQ ID NO: 364169 - protein, 394 aa, unidentified
MQTIGIDVGKRQHIAAICHQGEREARKAVLRFASDRAGFAELERWLERQGPIARAVLESSGHYHLNLAAALQRVGVPVAVVNPLESKYFGKRRLQRTKSDPADARTLALLAMVDQPEVRDVLAGAELREAARFAMALVDELGRIDQRICRLVEIGFPELEAAYDDPTCVSALAVLRTAPTAAAAARKRTATLAQAERPGGGRRIGAKKAEQIHGLAQDTVAAPELADQIAFQMRLLIAQHDLLESQIAEAEAHLATLMDGELVRRLRTIPGAGPAIVGTLIAEIGDIRRFSEFDKLVAYVGVHPAEKSSGEKGKNPETSWRMSKAGNAYLRTALYRMAIVGIQHNPQIKAHYARKRAQGKSKMNAVGHCMKKALAIVWGVWRSGEDYAAPPSLS

SEQ ID NO: 364170 - protein, 465 aa, unidentified
MTPCQGKKFRTSDQLGDLAIQQRHAAGIDVHAAVHFVAVPAEDVPAAFVNPDPKLPTGVRKFATNTADLEALAAWLTACGVTTVAMESTGVYWIPLYELLARRGFTVMLVDPRQSRHAPGRPKSDVLDCQWIRRLHSYGLLTASFRPADDIVSWRGFQRQRDMLVRYAAQHVQHLQKALEQMNVKLTEVVSDIVGQTGLKIIKDIVRGERDPRELAKHRHERCKATEAQIARALYGNWRKEHLFALRQALQLYEFYQRQLRACDQEIDRCLRGLADKSGGAKLPPHPRRLQPRRNEARFGARALLFRMAGIDLTVIEGISEATALVVLSEIGTDLSGFRTEKNFVSWLGLCPQHRGTGGKIFSRRVRRGANRAARALRLAAQGCHHAKSALGAFYRRIQARCGGAKAVVATARKIAERVYRLLKYGQAYVAQGEAAYEEAYRLRTLKGLARKAQSLGYQLVPATP

SEQ ID NO: 364171 - protein, 316 aa, unidentified
MQSILNLGADVDSRFIVIACAAHSFALQRIANERAAMRTWLRGVPRGSRLGLESTGGYHELLADLAHAAGLQVFVLNPRVLRRYAQGVGQRGKTDRLDAEMIARYIANEHAELHGYLPPSKAQRALTRLVKRRAKLVTMKQTLTQSLRGVPGLSQDLNRVRRNLDRLIGQIEALMKSALRQLPAAQQAARRIATIPGFATLGSTCLGHTLTRLPYANSDAVIAYAGLDPRPDDSGRKQGRRRLSKHGPSELRHLLFACAMAATRTACWKPYYLVQRAKGLSSTAAIVILARKMLRVAYSMTKRNASFDPKLIVSTA

SEQ ID NO: 364172 - protein, 420 aa, unidentified
MSFKIFRKNCCGLDVHKTWIYACIGITDTNGRTDYKQTRFSSFSKGLKELSDWLAKYHCTEVCMESTGKYWIPVFNVLEKAYVSVILSHPKYTKPQKGNKTDRKDAKWICDLFMCDMVKPSFIPPADIRHLRDLVRYRFKLICMITGEKNRAQNCLTVSNLKLDDVFSDVFGKSSRSITEYILEHPGDLFDVTPFVDRRCKTPIEEIQAAVDGAISPEQAVKLRQCLNHIDELEKHLEEIEQEILRLSDKYQAALDLIRTVPGFDKNPMTAIQVLSEIGGDMSVFPSAKHLVSWAGCCPRNDQSNKKIKSTRISRAGSYFKPVLVQVANGLLRSKKHPEITDRYKRIKARRGHKKAIIAICRMLLTAIWHILSDLKPYTTEGFRESRPVNESKVLTTSQALNLLKQRGYIIKDDLTPAMN

SEQ ID NO: 364173 - protein, 342 aa, unidentified
MAKIIGCDFHPRFQQIAFLEQETGEFGERRLSHPEEAERFYRSLAGQAVRIGVEATGNFGWFQRLMQELGHEVLLGDATEIRASNPRKQKTDKRDARHILSLLVEDRFPAIWQPPVENDEMRQLLLHRCRMVRMRTRIKNQLDGMAKNEGWLSPRVWSPRRREQIEGLPLTGWRAERRRDLVALLEDLNRRIGPLDEAVRAAAEANGEARLLMTHPGVGPVVSLAYVLVIGDWRRFARGKQVGSYLGLIPVEESSGSKRRLGQVSKQGNSLVRWLLVEAAATAQRYDASWHRQYVRLSMTKHHGVAKVAIAHKLAVRLYWMLRSGENYEQVVERGSHAGRSE

SEQ ID NO: 364174 - protein, 312 aa, unidentified
MEAKFVGIDVSKARLDVDCLPVSTSRQFSNDAGGITALVEWLLGSGVERIVVEATGGYEIAVASALAAAGLPVVVVNPKRVRDFAKAQGVLAKSDRLDARVLALFGERIAPPVRALPEAAQRDLTELLDRRHQLVTMRAQEQARLATVLPVARGDVEQHIAWLDQRIRKHETVLLKRLRANEIWDAKVKLLDSVPGIGPVNVFTLVGRLPELGTLNRQQIAALVGVAPFNDDSGKRRGQRYIRGGRAEVRCALYMATLSAKRWNPVIAQMFERLIAKGKPFKVAMTACMRKLLTILNAILKSTQPWENRLTT

SEQ ID NO: 364175 - protein, 343 aa, unidentified
MKMAEYVGLDVSMKETALSIRRDGKRVWRGKCASDPKLIAEVIRRRAPGVARVVFETGPLSVWFYHALTAEGLPAICIDARHAQAALDMAPNKTDAHDADGLAQLAEVGFFREVRVKGFDSMLGRTLVAARNRLVQITTELSNQIRGLMKTFGLVVPAGKGSRFEAHVRALLADQEGLAPILLPLLEAWRAVRLRAAELGRQLVASARRSEACQILMSVPGVGAVTATSFATAVEDPENFRRSRSVGAWLGLTTRRYQSGEVDYDGHISRRGDTHLRGLLYEAATVLLTRTSAESSLRTWGLKLKERIGFKRAAVAVARKLAVVMHAMLRSGQLFDRTAGMAA

SEQ ID NO: 364176 - protein, 387 aa, unidentified
MAQVNDLSRSLTAFDPLSTLVVVVEMSKASWLVSGAVPGVERQPLKKLEPDATALLRLIERWRNEAVRAGRPISRIALAYEAGRDGFWLARWLIARGIEAHVIHSASVAVSRERKRAKTDRLDAAMLMRVFLGWLRGERGHCGMVAIPTMEEEDARRPSRERESLVNERSRITNRMKSALARLGVRGFKPHLRKAPERLADLRTAEGTGLPANIIEEFRRDMARLALVREQISSIEKTRAERLERAPDTGPHAMVRLLARVIGIGIETADMLVREILSRRLRDRRAVARYAGLTGSPDESGLKRREKGLAKAGNARVRRGLIQLAWRFLVFQKDSALARWYRMRTEGPSGARKTTMIVALARKLLIALWRLVTTGEVPDGVELRPAA

SEQ ID NO: 364177 - protein, 354 aa, unidentified
MIIIGVDYHPSFQQIAFCNQDTGECGERRLNHSDGEAKRFYRDLQQPGIRVRVGMETTGYSRWFEQLLAELGFEVWIGNAAEIKTQRVRKQKTDRNDAQLLLKLMREDRFPRIWVPSPENRDLRQLLWHRHRLVQMRTRILNQLQALAMNEGRHWKMKLWSEQGRAELEKLALAPWASRRRQELLELLDRLHPTIEDLTAAVEQEARKRPEVLRLMTHPGVGALTALAYVLIVGTPERFRRGKQVGSYVGMIPKEDSSGGKQRLGHISKQGNSLLRFLLVEAAQAAARINSEWRRRYVHLAMRRHRSIAKVALGRRLGIRLYWMWRNGCEYSASLEFGSYAGQLGTGHGVTTAP

SEQ ID NO: 364178 - protein, 350 aa, unidentified
MEPYDFGKGCIDYQYFRQCVGIDVAKNEFHARMCMFQIGLDYGDFSEDKIFSNSKTGFNQLVRWARKEFVKGQEFRFIMEATGSYHELLACHLHACGFTVFVVPPLKAHHFAQYYGFSVKTDRVDAYVLSILGCVERRIKPWLPPSPLLARLRSLTRTRYELADEKVSLSNRIEAVTHMKDPARESVKALEQSRDYIDGRIKMLEGKIEQTLKSDADLWRKCRHLQTIPGVGLNTCATVIAETNGFEFVISSKQLVSFAGLDVKIHDSGMLKGKSRISKKGNKFIRRALYMPALSASSCNPQQKQLYERLIERRGNAKGVKIYALTAVMRKLLVVMFSLWKNDADYDSSM

SEQ ID NO: 364179 - protein, 340 aa, unidentified
MEDISVIGVDLAKSVFQVHGVDARGEVVVRQRLTRAKLLPFFARLPRCLVGMETCASANYWARELIALGHEVRLMPPQYVKPYVKRSKNDASDAEAICEAVTRPTMRFAGVKSPEQQSVLVLHRTRSILTRQRTQIGNAIRAHLAEFGIVAPVGRQGLDRLMAIIGDESDDRLPQPARACLAMLVEQYRMVLAHLLETDRAIRADSRATELGRRLQEIPGVGPLVASALVATVPDPHVFKSGRSLSAWLGLVPRQHSSGGKERLGGITKAGDTYLRRMLFVGAMAVIRHAERHGTRRPWLMNLLSRRHPRVAAIALANKIGRIAWAMMTSGERYREPVAA

SEQ ID NO: 364180 - protein, 307 aa, unidentified
MKRKILYVGLDVHKNSTDVAIATDRSNGKVRSYGKIASTPDALNKLVKKLQVDDKQLRFVYEAGPCGYQIYRHLDAKGIHCHVVAPSMIPRRSGDRIKTDRRDAINLVRLSRAGELTSIYVPTTEDEAIRDLLRCRDDMKRFERKARQRLLSFLLRHGHQYSGKKNWTKGFYNWLATVKFSHSAQQITLQEYIELTNECSQRIKRITEQIQVHVEEWSRAEFVKAYQALRGVSHIVAATVVSEIGDMRRFPTPKQLMAYLGLIPSEHSSGKSVRRGPITKTGNSHVRRAMIEAAWTYKMQARIRLTL

SEQ ID NO: 364181 - protein, 476 aa, unidentified
MAVPNEDSKKPAKSKKPTNPNRARERSLAVPVPASAAPLTVVNPDAAGIDVHSNMHMVCVPADRDANPVRQFGAYTADLHEIVTWLHKCGVKTVALESTGVYWIPLFELLESEGFEVNLAEPGQLSRCGARPKTDVLDAQWIQRLHSYGLLRGSFRPPESVLALRAYFRQRQMLVRYAASHVQHMQKALEQMNVKLPEVVTDITGLTGMSIIRAILDGERDPVKLAKLRDARCHHSEEQIALALQGTWRPEHLFELRQAYELYQFHHRQISQCDQQLETELGRFPNRAGEKTRTVKPRGRGRKSNDVRFEAKGPLFQALGVDLTMIEGIDVGTVLAIAAEIGPDVSRFPSEKHFASWLRLSPPQNQSNKTNKRRDHRKSTSRVTIALRLAARSVGKTKTPLGMFYRRIRSRIGGLGAVKATAHKLACLVYRMLKYGQEYVTQSMEEYKAKMETSVLNALKRKAAAMGYQLNPLPAK

SEQ ID NO: 364182 - protein, 340 aa, unidentified
MTPIRIGLDIAKNVFQVHGVDDNGTVVIRKRLRRPDMLGFFASLPPCLIGIEACSASHHWARELIRLKHEVRLLPARYVKPYVQRGKSDALDAEAICEAVSRPTMRFATIKTAEQQAVLTLHRARELLVKQQTMLANLIRGCLGEFGIVAPLGIRRVSELIAVINDDADTRILPEARIDMRAAADQLCDLRTRIKEIEQAIRAWHRSNEASRRLATIPGVGSITATAIVATVANATEFKSARHFAAFLGLTPRQRSTGGRQRLGRISKQGDVHIRRLLILGGTSLVRNARGAGGSVWAKQLSARRPTRIVTVALANKAARVIWALLTRGEVYRAPQPQAA

SEQ ID NO: 364183 - protein, 342 aa, unidentified
MDHFAGLDVSVKETSVCIVDDTGGIVREVKVASEPEGLLAVLTNPAYHFKRIGLEAGPLSQWLFSALAEAGLPVICVETRHMRAVLKAQINKTDRNDARGIAQMMRAGLYRPVHVKTLRSQKLRMLLTHRKLLQSKAIAIENDLRGTLRNFGLKVGIVGRVKFEARIKELVENLPDLTVLVEPLLVVRRVLREQLGILHRRLLAIVRDDDVCRRLMTTPGVGPVVALTYRATVDVPARFRTSKAVGAVFGLTPSKYQSGEINRTGTISRCGDDMMRMMLYEAAHSMLRSEKWSWLKAWAMKIARHRGMKKAIVALARRLAVIMHRIWVDGTEFRWTRDIATA

SEQ ID NO: 364184 - protein, 411 aa, unidentified
MSKTLLVGCDVSSQLNTVCLMDPQGDTIGSQTFSNTLSGAEALESWLLKTLSENDFSELKIATEATSFLDLHLVDFLASSKQLAPFNPRIYQFNPKLVRNFKRVYPDKEKTDTVDAFVIADRLRFGRLPEPYESHQPYLPLRRLTRYRFHLVKAINREKAYFLTHLYLKFSAFSMEKPFTSVFGATSLAVITDFSPDELVRLPLEELTQFIIDNGKNRFKDPPKVVETLQRAARESYRLRPALASSIDRILATILQTIRALQEALKEVDRAIEKEFKAFPNTLQSIKGIGPVYSAGIFSEIGEIRRFPREDALAKFTGLTWRRYQSGNFEAEETRMSKTGNEYLRYYFIEAANALRVHNAEYRAYYETKFKEVTKHQHKRALALTARKLVRLVYVLLKKGQLYRANYQQEA

SEQ ID NO: 364185 - protein, 377 aa, unidentified
MKRIKFVGLDVHAETIAVAVAEQGGEVRSLGVIPNREESIRKLVKKLGPVEQLRFCYEAGPTGYIVYWQLTALGAKCEVVAPTLVPVKSGERVKTDRRDALKLARNHRAGELTAVWVPDAAQEALRDLVRAREAAKKDQLRAKHRLSKFLLRHGRRPPTGVKLWTLNYLTWVKQEVHFEQLAQEATLLDYLYEVEHGAARIARLDLAIEEAVKLTPPKMRAVIEALQALRGVAQVTAVTIVAEVGEVSRFPRARQLMGYGGIVASEHSSGESNWRGGITKTGNAHLRRVVVEAAWAYRHRPYVGETLRKRQEVVSEEIREIAWKAQHRLHTRYRKLMARGKEKGKVVTAIGRELLGFIWAIGVEAEAAQKKTERRAA

SEQ ID NO: 364186 - protein, 398 aa, unidentified
MTESSDYESVQVFIGVDVGKDTHHAVAINRSGKRLFDKALPNDENKLRSLISDLKQHGQILLVVDQPATIGALPVAVARSEGVLVGYLPGLAMRRIADLHAGEAKTDARDAAIIAEAARTLPHALRTLKLADEQIAELSMLCGFDDDLAAQTTQASNRIRGLLTQIHPALERVLGPRLEHPAVLDLLQRYPSPEKLASLGEKKLAAQLCKLAPRLGKRLAADIAQALAEQTVVVPGTNAAAVVLPRLALQLITLRKQRDEVALEVEQRVLTHPLYPVLTSMPGVGVRTAARLLTEVACRAFASAAHLAAYAGLAPVTRRSGSSIRGEHPSRRGNKALKRALFLSAFAALRDPLSRAYYTRKMSQGKRHNQALIALARRRCDVLFAMMRDGTFYTPQGS

SEQ ID NO: 364187 - protein, 418 aa, unidentified
MDHRPGCRKGIDKMEVLHERCCGLDVHKKSITACLLTSKRKEIKTYGTMTDDLLEMADWLVAEGCTHVAMESTGVYWKPVYNLLEGLEMEIILTNARHMKAVPGRKTDVKDAEWIADLLRHGLLRGSYVPNRESRELREVVRYRQKLVRERAAESNRIQKVLEGANIKLGSVATDILGKSGREMLGSIIKGTDDPAELAGMARGKMKSKREELEKALKGLIGEHQRKLLSVQMKHVEFLDEQIAGLSEEIKERMRPFEKALVAIDEIPGIGIRTAEQIIAEIGVDMSRFPTAEHLASWAGLCPGNDESAGKRKSGKTNKGNMHLKATLVECAQAIGHTKGTYLAAHYNRIVARRGSKRAKVAVAHTVLVIIYHMLKEGTAYQDLGGNYFEKRNETAIVRRMTRRLESMGFNVTIEKAA

SEQ ID NO: 364188 - protein, 410 aa, unidentified
MEVTFPHCAGLDVHKKTIAATVSHHPPEAAKAKTLTRTFGTFTDEITAMREWLVAEGVTHVAMEATGSYWKPVFNVLEDTFVTWVVNPGQIKAVPGRKTDVKDSAWIAQLLQHGLLRPSFIPDRAQRELRELVRYRKSVIEERAREVNRIQKVLEGANIKLASVLSNVLGSSGHAMLSALVMGEADPQKLAELADPRVRASCETLARALNGVITGNQRWLLGQQLEHLAYLDRQIARLDVEVAERTLPFEEARKLLETIPGVKNRVVDVVLAEIGPDVAPFPSAAALSKWAGVAPGNKTSAGKRLSGRTQPGNKLLRSTLVEAAWAASRTKGTYFQSQYRRLIIRLGRKKASLAVAHSILEVIWYILHRRTPYVDLGANHFNRIDEEAAARRYVSHLKALGYEVELSKTA

SEQ ID NO: 364189 - protein, 417 aa, unidentified
MKKHNNCPKKSEPTSKRAKSRGPVQRDPKEVLAELVGKLREKLDPRVVAASAGEEDSRGKVRPNLDRLTVGVDLRDQWSHYCILGLEGERLAEGQLRTTPRDITEFFEALNAARVVVEVGTHSAWVREVICSYGHEVLVANPRLMEGSKRRKRKNDRIEANKLARLGRVDPQSLHPMQHRSREVRQDLVVLRARDALVAARTELINATRGLVKSMGSRLPKCSSPSFAQKVEETVPVELRDALMPVVRMAAALSDCIQGYDEKIEKLGREKYEHTALLRQVKGVGPITSLAYVLTLENPDRFVKSRDVGPYLGLVPKQEDSGESQPQLGISKAGDTMMRRLLVGSAQYILGPFGPDTDLRRYGLRLCERGGKNAKKRAAVAVARKLAVLLHCLWVSGEVYEPLRQGMSATMTPAAAA

SEQ ID NO: 364190 - protein, 334 aa, unidentified
MNYNFFIGIDVSKKTLDFAVFKGKDLLFSWTSENDESGIKKFWTQLKSQQGFCVNEALFCMEHTGIYNHHLLSFLYSKKACVCLEAAVHIKLSSGLQRGKNDQIDAIRIAQYAYKNCTELRLWQPKRQVIQQLKHFSVLRNRVINARKQLTVAINETISFDKATANECKKLCKGSLKSLEVDIERIELKIDQVIASDPELKRLFSIVTSIQGIGKITATEMIITTNEFKNITDPAKFACYSGVAPFEHSSGSSIKGKSRVSHKANKTMKSLLHMAALVAINYNTDIKAYYNRKVEQKKNKMSVINAVRNKLIRRVFACVKNNRLYQKNYQPAIV

SEQ ID NO: 364191 - protein, 419 aa, unidentified
MKKSKPKKVKTVNEKTLIVAIDIGKNIHHGYFRGPDGQDIKPFPFINGQKSFEEFWRKILQFQREKHLEDIVVGFESTGPYAEPLFHFLAKKPVRLVQVNPMHTKRLKELTGNSPNKTDSKDPRVIADVIALGHALTVVVPEGPAAELRRLTQARERATKSRTAMINQIHHLIFMVFPEFMQVMKKITTKSAFYLLKNYPTGESIVDLGFECLSKLLKKVSLGRLKNERIKGIFDAAQNSIGIHEGKQSILLEINHLVSNIETEDQFIDHLEKQMSHYLKKIPYSQSILSVKGIGEVTVAGLIGEVGDFGQFKTIPEIMKLAGLDLYEVSSGRHNGQRHISKRGRSLLRRLLFFIAINTIRTNGIMHDRYRKMLDKGMPKVKAVVAISRKILRIIFALAHKNTVYMDNYDQVYHVNLAA

SEQ ID NO: 364192 - protein, 280 aa, unidentified
MQNVALIGIDLGKHSFHIHCQDQSGKALLRKKFTRTKLMQFLATCPSSVVVMEACAGAHFMARRISDIGHEAKLISLQFVRPFVKSNKNDFVDAEAICEAASRPSMRFVQPRTEVQQAMRALHRVRESLIRDKVKTINQIHGFLLEFGISLPIGDAVIKRLSLVLAEHEIPEYLSHLLMKSHAHYLYLVEQITELESELNQSIKADAAAQRIMTIPGVGPITASLLSSQLGDGKQFSCSRDFAASAGLVPRQYSTGGKSTLLGISKRGGKNLRRLLSLSC

SEQ ID NO: 364193 - protein, 330 aa, unidentified
MKNYQEVVGIDVSKKTIDAYCHKAQVHKEFVNDVSGYKSLLKWVSKSTKEYMVFYCFENTGYYSLKLALYLNSKDVVYVEESPLKIKRSSGIVKEKTDRLDASLIARYGWLYREELSPSTVKSTSQLELGRLLALRDQLVRNNAGLKGTLKELKNLLSSPTTDLGCISLKRSIDYLEKQVTSIESRIKEILFEDRAMQKNYKLLTSLKGVGLVVASQIIYHTGNFTRFDNWRAFSSYCGTAPFAHESGTSIHRRKQCHYLGDRKMKSLLSMASVSAIQHDSELRLYYQRKLAEGKDKMVAINNVRNKLIARAFAVVKRGTPYVELQKFAA

SEQ ID NO: 364194 - protein, 383 aa, unidentified
MNPVVGLDISKEESHGQAFLARGKLFRGTFHFEHTRDGLANLHQVLKDVESVSKQRPLLILEATGHYQSPVVQFLEEHHYIYIVINPLISNRLRKSQLRKVKTDAADAYLLGELYYREEFEPFKKRGVQLLNLRYLTRQYETLSKMCVSTKLQFQAVLDQVFPGYKGVFGAMYSGVSLRFLSEFPTSYLVLQTDEDTLRAKMKELLSSKRGRSEDWINQRVQRLVDAAKQNPFQQTMYASHLINMRVLITLILQYQEHLAELEQNIDALAEEIEEYELIQSIPGIGHKIAATILSEIGEVERFDHPKKLVAFAGIDPSVFASGKFTATRNRITKRGSRQLRYALVMAVQCGLIRSRNMRIKAFYERKRAEGKPHKSSSNRMCK

SEQ ID NO: 364195 - protein, 420 aa, unidentified
MTPLSNQQFTAYVGIDWADTKHDICLQAAGDIRREFDCIPHQVARIDEWAKSLQRRFGGPIAVALELAKGPIVAALQKYDFFTLFPINPSTLAKYREAFKPSRAKDDPTDAELALDLLLRHPERFAPLRPQSAAMRSLVSLVERRRDLVGDQNRLTNRLCDTLKQYYPQALEWFDDRGTVLFCDFLTRWPTFLAARRARSTTLEVFFHAHNCRHANLIEARLESIRAATPLTEDPGIVAPCRLYVLALVEQLRTVLTAIDRFDREIATVAGTLPDYTLFQGLPGAGPQLAPRLLAAFGEQRDRFHGTDELQKYSGIAPVTERSGKKSWVHWRWQCPKFLRQTFVEWAAQTINKSFWAGAYYRQQRAKGSTHQAAVRALAFKWIRILYRCWQTRTPYDETTYLNALSKRGSPLIRNLGLAG

SEQ ID NO: 364196 - protein, 323 aa, unidentified
MREFTGIDISKKTFDIYFEQNGQGTHVCFNQNKQDYKRFINLIGNERICIMEATGNYHVKLSRFLYENKLKVLVENPLKIKRFSQMRLQRNKTDKADSKMIYEYGKMVFIEKEIVGWKPDSNEIAELKQYDTVRQQFTKQLTALTNTQEAMGQLSDLQEQVDGALKLMIKHLKDALNQLDMQMQQIVETHHKDSYKLLTSIPGVGPKTATMMICLTDGFRKFDAKRVKPFISYIGMSPRTYESGTSVKGAGHITKVGNGRLRTLLYLCSWTAKRVNPQCAELHKRLFEKGKPEKVIKVAIAHKLVRQMFGVIKSGSSFSTVRA

SEQ ID NO: 364197 - protein, 424 aa, unidentified
MEEIPQPIGKAEAEPEFAAFIAIDWADQKHYWSLQVVGQKGLQRGTLDNTPEAVEAWIAELRMRLGERPLAMALEQRRGALVVMLSKYAHVHLYPVHPTTLAKFREAWYPSRSKSDPSDADLLLEILTTHRIRLRRLDPDTVEIRLLQNLVENRRKLVDERTALSNRLTDLLKLYFPQILGWFFDVTSVVVGDLLEQWPSLQDLQQAKPAKLEKFLRDHHCSDMEERLLQIRQALPATHDRALLDSAPYQVAAWVRQMAVLRDSIRQLEKRIAELAAQQQDWHIFQSLPGAGAALAPRLMVALGTQRDRYSSASELQCFCGIAPVKEASGKTQWVHFRWAAPKFLRQSFHEWAACSIAQCEWAHAYYDQQKARGKTHHVAVRALAFKWMRILHRCWRDRQPYREEIYLASLSKRGSALALAQHG

SEQ ID NO: 364198 - protein, 436 aa, unidentified
MRGCRCSMIMGFTKPIEHFNLQRKKVITMNTLYVGIDVSSKSNVVYLMLPNGDKHSNFSVANSHKGSTQLVKRILSALTSHSLDTVIIGLEATSVYGDNLVYFLREDATLAPFNRKIHVLNPKQVKKFHDAYNDLPKNDYVDSFVIADCLRFGRINKEVYMGDYRYKALQNLTRARFFAVQNLVKEKQRFMNVLFKKYSMMTQEKVFSDTFSTTALAVYDEFESAEALANMDLHELTDFIIEKGKNRFPDPDAVAKAIQKAARSSYRLPKTVNDSVNQVLSISITSMKALESQIKEFDKAIKAQMELLPNVLISIPGIGPVYSAGIMAEIGDINRFNSQAALAKYAGLAWKQHQSGGFESEVTRLIPSGNRFLKYYLCEAAFSLVRCDKEYSDFYHLKYKEVNRYQHKRALALTARKFVRLVFRLLKDNRLYCPAK

SEQ ID NO: 364199 - protein, 378 aa, unidentified
MNSLDTALQGKDTTTQGDLHVSFELGDRSWKLSCSDGVRSPSRYSVNAGDQVTVLDCLDKARARCGLDPQAKVHTCYEAGRDGWWLHRWLREQGIDNIVVDSSSIEVNRRAKRAKTDRLDADKLLALLLRFHRGERRVWSVVHEPTAKQEDARRTHREIGRLIHERIAHTNRIGSLLVMHNLRPGRIGGRTWQGWWEGHCKQVPPLLRAEIEREYARLVLAKQQLNALETERRHEVAEGAHPVVALLAKLRAIGPRGAWILDKELFGWRRFANRRELAGCLGLAPTPYASGTSEGEQGISKAGNKRSRALLVELAWRWLKFQPDSALSQWFHLRFGIAGKRSRRIGIVALARRLAIALWRYIECGEIPAGATLKTVEA

SEQ ID NO: 364200 - protein, 350 aa, unidentified
MIIIGADYHPGFQQIAFVDTGTGGLQERRLAHREEAETFYRGLAQPGRTVRVGMEASGHARWFERLLAELQFELWIGDAAEIRTKRVRKQKTDRQDAQLILQLLLEERFPRIWVPSGENRDLRQLLWHRHRMVQARTRIMNQLQAVALNEGLRCKKRLWRDSGREQLESFLLAPWASRRRHDLLELLDRLSPTIAELTQAIEQEVEKCPEAQRLRTHPGVGALTALAFVLIIGRTDRFRCGKQIACYLGLVPVEESSGERRRLGHITKQGNSLLRFLLVEAAQVTVRSDQEWRSKFFHLALRRGRKIAKVAMARRLAVRLYWMWRKGWDYEQLKKFGSHAGQPGHRHGVH

SEQ ID NO: 364201 - protein, 341 aa, unidentified
MQVTTVGLDLAKNVFQVHAIDAKGKVVVRRRLRRAKVRDFFAGLAPCLIGLEACGTAHFWARELRALGHEVRIMPPSYVKAYVRRGKNDAVDAEAICEAVTRPTMRFVPIKTEDQQSALMLHKARELLIRQRTMLVNALRAHMAELGMIAPQGKEKIEGLIAVIEDGEDESVPGLAKAALKPLVAQLRAAEEAIAAADAEIMAWHKGNEASRRLETIPGVGFRTASAIAANVPDPSFFRSGREFAAWLGLVPRQNSSGGKERLGRISKQGNRYIRSLLVLGATSTLRSARANRAPGADWVNGLLERRPPRLVTVAMANKTARIAWALLAKGETYRAPGAAA

SEQ ID NO: 364202 - protein, 301 aa, unidentified
MVIGKFELDVCIYEKQIHWQDENTEGGIKRILKRLAHYQVERLVMEATGRYEFDLAQAAHKKSIPVCIVKPLRVRKFAGAIEQSAKTDKLDAQLIAEFAFRVKPKTTPEKSKNLLAIKDLISRRRQLMTMRTQEMNRSQIMAKSLEVSCKRIVRYLDQEIKRIETRLAKHVEEQAEWTEKQVILKSAPGVGDTLVYTLLADLPELGSLNGKEVSSLVGVAPINRDSGKMRGKRRIQGGRHSVRTILYMATLSATQCNPVIRAFYQQLVAQGKHKKVAITACMRKFITMLNAMVRDRCEWAY

SEQ ID NO: 364203 - protein, 343 aa, unidentified
MEICTLGIDLGKNTFHVIGLNDRGKVVLKRCFARRQLLLFTSNLGSSLIGMEACCGAHMLGASLAAQGHQVRLIPAQFVRPFVKGNKNDYLDAEAIAEAVQRPRMRFVPIKTDDQLDLQALHRVRDRLISRRTSVINQLRAFLLERGVTYRKGRGYLKRQMPSIVEDAEVSLTPRIRDLLDRLWQEWKSVELEIEELSGLIQAIAQQDAACQRLLTVPGVGPLVSTAMVAAVGNGSEFRKGREFAAWLGLVPKQHSTGGKSKLLGISKRGNPYLRRLFVHGARSTFLHLNRENHRIGSWMNQLEARTHQNVAIVALANKLARIAWAVLAKGEPYCATPNLAEG

SEQ ID NO: 364204 - protein, 353 aa, unidentified
MKLDKYIGFDLHQATTVVAVLDAEGKVVMETIVATEAAAIIRLLRSLSGPLHVTFEETTQARWIYDVVRGYVKEVIVCDPRRNKLLGEGSKADKPDARKLAELLRAGLLRPVYHGHEATRELKELVRGYETLSADVQRMMVRIKAIYRAHGIRTPGSAVYQQKQREQWLQLLTAPGSRQRVSWLYEELDHLRPLRKQAKMAMVAEGGKHQAFGLLRTIPQLGPVRCAVLVATVDTPYRFRTKHQLWAYSGLAIVTYMSAEYEIKAGRVVRSRKPLATRGLNRNCNRRLKELFISAAVAGSRSEPYRSYVEGLQRRGIRTEMARLTLARKIAAVALRVWKKGETFDPKKLNSTT

SEQ ID NO: 364205 - protein, 404 aa, unidentified
MWYAGIDWANDHHDALVINEQGRQVGSLRVDHTPQGITRLNTFLEQIVGAESKEQMACIIETTHGLLIAHLLEAGWPVYPVNPRTVDRRRSASGAKTDTIDAYLLAKTGRADLADLHRLTPDSAKIAELKLLTRDQDALIQMQTRLVNQLTACLKAYYPVALELFTKLPQKSTLRFLQTYPTPQAAMAVSAEQIQEVLRQAKHSNPTPVAATIFERLHQPHLQADAVITRTKSRLMLVLVSQLLPLIEQIAQYDKEIATLFLTHEDHEIFESLPRAGKRLAPRLLAEIGDDRKRYQDASSLQALGGTSPVLFQSGMYSKAHRRLGCIKPLRNALQQFAWQTTQSEAWARQYYQRKRAEGKSHTVAVRALANVWVRIIFAMWLHHQCYETATFEQAQQQHARRVA

SEQ ID NO: 364206 - protein, 342 aa, unidentified
MRYFAGLDVSLEETSICIVDEAGGIVGEARVASEPETLVAFFDALGMTMERVGLEACSLAAWLHQGLSEAGIPAVCIETRQAKAAMGAMPNKTDRNDARGIAQIMRTGWYRAVHVKSPSCRSWRALLTARRMVLNKRRDVENGVRALLREAGLKVGTPSRKDFPARVRELAAGDAVLNALVESLLSVIRVMTDEVARLTKRVLDEVRVEPTCRHLMTVPGVGPLTALAFRATVDRPERFRRSRDVGAHLGLTPRRYQSGETDVQGRISRCGDELARTALYEAAHSLLIRSTKWCSLRAWGMQVAKRRGMARARVAVARKLAVILHRMWVDKSEFRWGKQAVA

SEQ ID NO: 364207 - protein, 334 aa, unidentified
MKSDIVHIGVDVSKENLDIYIPAKREGLRPTVMEFDNNTKGFRALRDIARKADATVCVEPTGGYELELIAFMHRFKVPVAYADALRVRQFARAEGSLSKNDTIDAALISRFADKIGVRLLEPADIDAVELKRKTKFRQTMIDSRKALICRLETEIDAEMRSMINEQIRHLDRLIAKLKQSCLETVSRNQTLDNLRRRFVEVGGVGDITAITILAGLPEIGTLSDSKLNRLVGLAPEEKQSGTKQWQRRIWGGRRDVRNALYMAAVASIMWNSVLGGYYHKKRAEGHPHKWAIVPTMRKLLSLLNRIARDPNFKPTPEPESTKRKAMSLRGVKAA

SEQ ID NO: 364208 - protein, 355 aa, unidentified
MNDEKYIGLDVHQATIVVAVMDSTGKLVMESILETKAATILQFFAGLRGTLSVTFEEGTWSAWLYDLLHSRVDKLVVCNPRKNALLKDGNKSDRIDARKLAELLRGNQLKPVYHGETGVRMLRELSRSYLTIVKDLSRVMNRLKAVYRSWAIPCAGRDVYYRRHRAQWLAKIREAGVRRRAERLYEQLDMLQHLRQQARRELLAESRKHTITAKLRQIPYLGPIRVALAVALIQTPHRFRTKRQLWAYSGLALETRTSAEYRFVEGQVRRSKKLLSIRGLNKDHNHDLKGLFKGAATMASVRPGPFQDFYQAALAKGIKPTMARLTLARKIAAITLTLWKKGENFDAEKLKSQAA

SEQ ID NO: 364209 - protein, 406 aa, unidentified
MAQGQPDKQSPAVVTKAWRKDVPNTASAPIVAIHFNTTLVLALETSSKNWVLAAHVPGTGQVKAKQVIAPSADALEAAIEGYRRRAAAGGQTVERVILVYEAGYGGFWLARWLKAHGIEVHVIQPSSVAVERKKRRAKSDNIDADLLLRTLLAWLRGEPRVCSMVPIPDETAEDARRPSREREELIRERISLTNRIGAVLTTLGIDGFNPLRKDRRKRLEALRTPFDQPLPEHAKAKIVRSIDRLELVMAQIAALEAQRDAVLEQDAPGAAERMVQALVLLRALGAQTATVLVYEAFVRHFSSGKALGSYAGLTGTPFNSGGAEREQGISKAGNQRLRATMGELAWLWVRYQPESALSKWFRERLGGAKGRMKKILIVALARKLLIALWRYATHGVIPEGAVLKPA

SEQ ID NO: 364210 - protein, 413 aa, unidentified
MKVFCGIDWASDHHDVAIVDGDGKLLGKARITDDAAGLQQLLDLLAEHSDSPSERIPVAIETSRGLLVACLRSTGRPVYAINPMAAARYRERHTVARKKSDHLDAMVLANILRTDADAHRQLPADSELVQAVAVLARAQQDAVWDRTQAGNKLRSHLREYFPGYLATVQPITGGFNAPLARTLLAAAPTPGQAARLTRTQLKAVLKRAGRQRGIDAEVERLHAALRIPQMHQLPLVEKAMGRQALSLLSKFEAACTAADELAEASIELFEQHPDAAIITSFPGLGALSGARVLAEVGDDRTRFADAKSLKAYAGSAPVTRASGKSHAVIVRRVKNQRLAAVGYVWAFASLTASPGARAHYDRRRKAGDRDTSAQRNLYNRLLGCLHHCLATNTPYSETTAFPVPPKLELAIVA

SEQ ID NO: 364211 - protein, 394 aa, unidentified
MFYLGIDVGKRTHVASVMDDAGKIVLKGFSFPNSTEGGHSLLTRLRAISDDPTHFLTGMEATGHYWLALFSFLDEADYFLHVINPIQTDGWRKGTEIRKRKTDIIDSVLIADLMRYGSFEDTTLANEEMFSLRQLTRYRAYLVGTAGDFKRKIIAVLDQVFPEYDTVFSKVGVFGKASKAVLLEYATPEAFNDITAEALAETLRLASRNRVGLIKAESLKTAALDSFGIRFAQDAFTFQLRSMIEQLNFLETQIKQTEEEINQLMTSINSVIETIPGIGPITGATILGEIGDIRKFSNPKKLVAYAGIDASVSQSGQFDATHNVMSKRGSPYLRKALFQVAVVASRSDPILKAFYDKKRSEGKHHLTAIGAVSRKLCYIIHAILTNNEPYEIRQ

SEQ ID NO: 364212 - protein, 360 aa, unidentified
MRAICGIDWASEWHDVRIADADSGEKIAQRRFAHDEAGISALVDELVACRVERVALERPDGLLVGRLLAAGLAVLAIHPNQVKAARDRFRAAAGKTDRFDSFVLCELARTDAHRFAALAPSGDETMALRALVRTREDLVGARGLGPKRLEGFLARHAYSGRRSVEGLLERLRSAPQAVIGELEADARRAAVLGLVAALEPIVSQISELTSQIRGAIRAHPDGPIFLPVFRDPNSVVCAAGLLCEIGDNRARYPHRDALAADGGQAPVAIESGKRRSAAFRWACDKRLRNHLAVLADSSRHHHPWANDIYQRARDRGCDHPHACRILGRAWTRILWRCWQDRVPYDPTKHRAATRHIQQGG

SEQ ID NO: 364213 - protein, 303 aa, unidentified
MVTIGVDSHKRTHTAVAVDGNGRKLADKLVSTSVEGHLELLRWARHWPDRTWALEDCRHLTRRLEADLLRSGERAVRVPPKLMAGARRSAREPGKSDPIDALSVARAALREPDLPMAQLDGVERELRLLVDHREDLLRDRTAHQARLRWFLVELGIREPKLRTLGQVGVLADVDRQLAGRSEPSARISRDLVARIGELTHAINGLAGEIRALTSAVAPTSLALPGCGFLITAKIMGETSGITRFRSRAAFANHNGTAPIPVWSGNTVRHRLNPGGNRQLNAAMHPRPKVHRRLAVGWSTARRS

SEQ ID NO: 364214 - protein, 344 aa, unidentified
MEGYAGQQFVGIDLHRRRSVIVRTTDRGDPLETVRISNDVDSLEKVMARAGEAPEVVLEATYGWYWAADALADVGAVVHLAHPLGVKAFSYRRVKNDVRDATDLADLLRMGRLPEAWIAPPATRELRELVRHRAQLVALRSGCKCEVHAVLAKCGVQVLMSDLFAPTGIGLLERLDAPAPYLARVGSLRRLIDDLDVEIDLFSRLIRGRLVADPGYRAVQTIPGIGPVLAAVFVAEIGDVHRFPGPAQLASWAGLTPKHHESDTHVHRGRITKQGSRLVRWAAIESVQALGPGTGAGRLKRRVGDRRGRNIGKTAAARQQVGYVYYALRDGHVRALTQRPRVAA

SEQ ID NO: 364215 - protein, 319 aa, unidentified
MNKIVIGIDISKHKFDATYRSANQKWKDKVFENSSVGFENLLKWMSEHKIEKAHIVMEATGRYGEDLANFLYISGHHVSIINPAQIKHYGRSLLRRTKTDKVDSHLIAEFAERHDLSCWKPLSSSLQSLKDQVRCLEAFKKDATQTSNRLESAKDAVVQKMLKDRQDHIQQQIEDLMIKIKTLVKDDPILTENVTLLKSIPGIGEISAINLLTELPDLSLFKCAKQLAAFAGLNPSIRRSGISVKGRETISKAGSKELRKIFFFPAMSIMRHPSSIKPFIERLKGKGKKGKVIVVAVMRKLLHGVFGVLKTQTAFKNYA

SEQ ID NO: 364216 - protein, 353 aa, unidentified
MQIVGALDVHRRQITFKTLAPASGEGSRGRISPAAREPLRQWLERFDGLEGEFVFEGTTGWRFVVEEIERAGHVARLADPAETAARRGRKRRAKTDNSDCDLMLGLLLAGELPEAWIPPVQILELRTRVRLRKTLIDQRTAWLQRLRAQLFHQGVPPGLKPRTAAGQAALASVELSPAGREAVELCSRMLDQLDRELAPIDRALQVFAQRQPGCRALIGQLYGVGAVTATAILAELGDARRFKSSDDAVRHCGLDVTVWQSDRKRAAGHLSHQGPAVLRWALFEAAQCAARRSSPDHAYYLQVAKRIDHNRACLSVARKLCRRAHHLLRELGDDALAGPSDPPSITQLVDVAA

SEQ ID NO: 364217 - protein, 412 aa, unidentified
MTAKDQFAAHVGLDWADKKHDVCVQFKNGDRIFHVIEHTPEALDIWLNELHQRAKGRIAIAVELKKGPVVYALQKYPFVTVFPVHALSLARYRQAFWPSGAKDDPQDAELALDLMLRYPHKIKAIEVDNPDIRLLQQLVEQRRLLVEDKRRFVNRLINTLKQYYPQPLEWFSHRDSSLFCELIIRWPSLQQLKRARSDTVRHFMNAKGGPAVAYTEQRVASIASAIPLTTDKTVIEANALMATALASQIKLTGDLIRTYDERIESLFDTLPDAELFKSLPGMGPCMGPRMLAALGDNRDRFNSAEEIQNYAGIAPVTERSGQKSWVHWRWQCAKFVRQTFVEWTAKTVNSSYWARLYYQSQREKGKSHQSAIRALAFKWIRIIYRCWKTRTRYDEAKYLLALEARKSPLLKP

SEQ ID NO: 364218 - protein, 343 aa, unidentified
MENVILAVGIDISMDEFHACLKEKTEGGTVKIKGTHSFSNDIQGFDKFTVWVLKREKQGTQVSYIMEATGTYYENLAYYLHDKGKRVFVVLPNKIKHFAKSMNIKTKTDKVDSGIIAQVGIERKLAIWKPMSANYKQLRDLSREMLSLKKEKSRAMCQLHAMEHSHDKTPSVLKIKESLIEFYSQSITQIKTEIAKLINADTELKIRIERIMKVKGLGMNTIVAVLCETNGFELFNNIRQVVSFAGLDVQMNESGTFKGKTRISKKGNARIRQCLFMPALSATVHNDKIKDLYERITERNPDIKRKGVIAAMRKLLIIIFVLWKNGEEYNPQHVWGINANDIG

SEQ ID NO: 364219 - protein, 318 aa, unidentified
MKKTFFCGVDVSKDKIDVCFLTSITSEKAKFETLPNNYDLIKVYFNSFKNDEILVVFEATSNYHLALQKALSDLNIRYNVTNPYKTSLFLKHLSTIKTDVSDSYGLAVYARTFKSEILPDKYNAEYLQIKSYNSTLNLLQKLNTQLKNFKQSQKNVNNSVIDDVIENLIKEIAKLQSMLQKLAFDLVKKTIPETEEIIKSNKGFGIDLALNLFPQLHFNRDKSEKQFVSFLGLSPRIFQSGSSVYKSQKINKMGSSNIRRILFMSALCAVRFNEKFKARYDRLIANGKKKMVAIVAVMCAIVRYLKSLFPFNAEIKAI

SEQ ID NO: 364220 - protein, 456 aa, unidentified
MNFEKTDANPYNRNVRDQQKLSTNQKYEEAPIMNLTQNDKIEQIKDETLVVGVDIGKETNYARALDNRGRELKKHVKFTNSREGFRAFDKWVSEISLANEKTDVIVGFEPTGHYWFSFGDHCKKLGHKLAIVNPMHVKRTKELDDNSPTKNDKKDPKTIAMLVKDGRYREVYIPEDIYQELREAVYEKERLTDLTVSINNQVIRWIDIRFPEFTKVFSKWYGHAALMALKNFPTPEKVLKAGVDNIVSKWKEEISRAVGRKHAERLVNAAAESIGRKTGIISSEASLKNLIDQYELIMRQMKEQEALMLELLLRVPNADKLLGIKGIGLIAVATFVSEVGDIRRFESPKQIIKLAGMNLKEDSSGKHKGKTRLSKRGRKRLRHSLFKAMITVLAKNTEFKAIHRRNITREINPLNKMQSIFALCGKLIRVFYAILSKGTEYDPNKLMIEIPSMKAA

SEQ ID NO: 364221 - protein, 320 aa, unidentified
MPASCGVGIDVAKDTLDVAWATESDARWRTTNDEAGWAALIDQLHARPPTVIVLEATGGYETGVASALSVAGLPVAVVNPRQVRHFAKALGRLEKTDTLDAGILCEFAVRIAPVPRPLANDELADLQALVTRRRQLVDMLTAERNRVPLARGAVRKNLRAHIAWLEKQVGHTDRDLRTRIEASPIWRGRDQLLQSVPGIGPTTAACLLAGLPELGTLSHRAISKLVGVAPLPDDSGTRVGYRRIQGGRADVRRALYMATVTAIVHNPTIAAAYRRWRAAGKRPKVALIAAMHKLLIHLNAILTDHTTWQPTPVPPSTTPS

SEQ ID NO: 364222 - protein, 356 aa, unidentified
MDSTKYIGMDVHKEATTIAVMNSAGKLVMESIVETKAVTIVQFLEGLRGELYVTLEEGTWAAWLYDLLKPHVTKVVVCNPRKNALLKAGNKSDRIDARKLAELLRAGLLSAVYHGETGLRTLKELCRSYLAISKDLARTMNRIKALYRSWSIPCGGTSVYAPRHRAEWLSKITEPGVRRRAELFYQQLDGLQKLRQEARGDLLAESRKHGATELLRRIPYIGPIRAAVLIALLQTPHRFRTNRQLWAYSGLALETHSSAEYHYVQGQLQRSRRPVALRGLNQNHNHDLKSIFKGAATKAGSAQGPFHDFYAALLAKGMKPTMARLTLARKIATITLIVWKKGVCFDAQQLKQQVSV

SEQ ID NO: 364223 - protein, 320 aa, unidentified
MKWLGIDIAKRKFDLAVLDNGKIRSKVFDNTPAGHEALLAWLAARGYTHEELHVCMEATSSYYEKLATFLYDAGIRVSVVNPLQIKAFGESLLSRQKTDRADAALIARFAEQHSPMLWCPAPREIRELQRLLARLEAVQQMSVQEQNRQHEAEGESLESVLRMLTQLKAEEEKLRQMIRDHIDQNPNLREQHALLTSIPGVGDQVSSHFMAWLRPERFDDARQAVAFVGLSPRHRESGDSVRGKSRLCKVGHARLRKILYFPAMSAIRCNTAAKALAERLKASGKNGKVVIGAVMRKMIHWMFGVLKSGQAFDPALALAK

SEQ ID NO: 364224 - protein, 405 aa, unidentified
MKHVIAFDVSMGKSYMVIYNGLKKCIYEAEIKHTKPEFEKLRARIDELIEGYEDQPYIVFESTGVYSRQLERFMRDNYYSYCLLNPLEAKKQCDALRIHKTDKSDAHQLALTHFSVSRREINGTDTLFQQLKSLSRFYSELDDELSVTRSRMHKVIQLTFPELEKLFTIKSDLFLNIVQLFPHPDFVQGLSKTIIKNKIRANTNKNISGAMAEKKAIALIEASQQSYPAVSSSDILCEQLRSYARRYQELLQQKEQYINDMVQLAEKRSEYKVILSFPGIGPNTAVRLIAEIGDIHRFENNKQLNAYAGIDIRRFQSGKTYFKDKINKRGNKHLRKLLFLIIQNMIKQRRYGRNHIVEYYDKLKTQPYNKCHKVASIACVNKLLKNIFFLISHNMNYDYGLASKS

SEQ ID NO: 364225 - protein, 319 aa, unidentified
MAVLGIDVSKATLDVALFDGKKFKTKVFANTPRAMPELVQWLVSHGAAGCAIGMEATGSYWELAAIALHDAGHPVSVLNPAQVNAFAQAELSRAKTDVADAKRIARFVGLHQPPAWTPPSVAIRSLQALVRRLDALLDLRQQESNRLDVAHPTVRASIETVLHALDDEIARLRQAIADHIDQDPDLRQRRDWLESIPGISTRTSAIVLAHLDAFSRCTTAKQWVAYAGLDCAIVQSGTSVRGRAAISKRGSAQLRRALYFPALVALQHNPIIKVFGERLKGNGKRGKVLLCAAMRKLMHLIFGVLKHHQPFDPQAGLAG

SEQ ID NO: 364226 - protein, 334 aa, unidentified
MDKQAVAGVEVSADVLVVALDNGQLRACEFPNNALGHQQMLRFLHKHATQVRACMESTGLYGLDAALVLHRQPGIEIMVANPRSVRHFGCAMMQRSKTDPIDAKLLAEYARRMPFQPWQPPSLKGRQLCALSRAIHQLTEMNTMQKNRLHAASVTETTPKIVLRELQRSLTHQQRSIQRLTREALQLIASDAELQKRFELLLSFPGIAQTSALQLLGELVLLSPDFNVRQWVAYAGLDPRQYSSGKSVEKKVRISKVGNRHLRRALFMPALVAVRRDPQFRAYYRYLLAHGKLKMVALVAAMRKLLHGIYGVFQTREPFNPHKLFTLPRIGETI

SEQ ID NO: 364227 - protein, 340 aa, unidentified
MKKVSTIGLDLAKNVFQAHGADASGAVIFRKKLRRAQVLEFFATQPACTVAMEACGGSHFWGREIGNYGHRVRLIPPAYVKPFVKRQKNDAADAEAICEAAQRPTMRFVAVKSEAAQGAAVVFRTRDMLVRQRTQIINALRGHLAEFGLIVAQGPAHVAKLIMAVQDPNQPLLEAARPILCVLVDMLDLLDQRIKLLDIAIARRAKEDEVARRLMSIPGVGPVIATAVAALAPPAETFKRGRDFAAWLGLTPLQHSTGGKQSLGATSKMGERTLRRLLIIGASSVVRWAARKGAPAGSWLASMIARKPAMLVRVALANKMARVIWALMAKGGTYRAPVVA

SEQ ID NO: 364228 - protein, 343 aa, unidentified
MDHFAGLDVSVKETSVCIVDGTGRIVREVKVASEPEALLAVLKNPAYHFKRIGLEAGPLSQWLFSALAEAKLPVVCVETRHMQAVLKAQINKTDRNDARGIAQMMRVGLYRPVHVKTLRSQKLRMLLTHRKLLQSKAIAIENDLRGTLRNFGLKVGMVGNVKFEARIKELVENIPDLAELVEPLLIVRRAVREQIVILHRRLLAIVRDDEVCRRLMTTPGVGPVVALTYRATVDVPARFRKSKAVGAVFGLTCSKYQSGEIDRSGRISRCGDEMMRAMLYEAAQSMLRSKKWSWLKAWAMQIARRRGIKKAIVALARRLAVIMHRIWVDGTEFRWTREQAAAA

SEQ ID NO: 364229 - protein, 390 aa, unidentified
MALFVGIDVSKDKFDACGIGEEGEKVFSLTATMDRKGFEKLIVHLKMKSSLLLGLESTACYHIALFSYLTAKGYKVVIINPLLISNFVKLQLRKTKTDKKDALTIARFLMLRREVLEKQTFSADLMELRDLARRRERLTDQVTKLKGNMKRILSVTFPELEQLTGIFTKSILQLLTRFPSADALRKADVDTIAAIVVPRSWGRKSRAWVETLMATASTSVGLSSPAKELILKQDASLLLYVEEQIKETTKLLMSVCNDRVKKDIEILTSIKGIGKTTAMNFLIEMGGDVRLYENDKKLIAAAGLDPSTYQSGKYEGASRISKRGNRHLRRVIWLMAKSTVLSNAPFRAYFYKRRKEGLPYKKAVLATAHKLIRVMFSMLVHQKCFEQGGK

SEQ ID NO: 364230 - protein, 388 aa, unidentified
MNTNTLQSVQSNDTGLDNTVYFIGQDLHSNNVYVTVMVNQVREDGTSYGKVVASRRITLRKGQKEYIDFMSRFCEGKQHIAVVESTYNVYWMNDLFEERGWNLLIADPSTVSRDKTKACNDKTDATFLADTLRNGSCHVTRLLPSEVRYPRDLVRTRQTLIQQRARAKTIIKNLWMNIKGYPLTTKEMNQFLDEYVETDEVNEAFGGKYRSGPKARFYFEEIIFLTKEIEILEEEIKELVPLKGDVLRLMREMKGVGEVCARILITEIGDIRRFGSAGSFVSYCRLAPTAKLSNGKSKGMGNARNGNAYLSWCMTEVANLMVRYNEQARKCYERLLKRDTQHLRVKAIRSVAAKIARALWNVLSKGGCFDVERCFGTDAKNFSRKIAI

SEQ ID NO: 364231 - protein, 326 aa, unidentified
MDTLTLGIDVSKKRLEVALLGGPQRQRGTFDNQKSGFAKLVRWLKKHQAKAAHICLESTGNYWLEVAFHLHQAGFQVSVVNPRRIKKHGEAIMQRHKSDRVDAQLIADFAAKHAPPAWEPPPPAWWQLRGLVRHRQALVRDRTREVNRAQAGSLEPAVAPMIEQHLTFLKQQIDALDKQIAQHIDHHPDLKQNHDLLTSIPGVGDITAATFQAEVPDVHRFDQASDLATYAGLTPAGRQSGSSLNRPPKLLKVGNRRLRTAFFMPALSAHRRNPITAALRQRLLERGKKKMTVVVAVMRKLLHLCYGVLKTGQPFDPNWCQSAKIA

SEQ ID NO: 364232 - protein, 476 aa, unidentified
MAKGSGSATSRRKTTRNAVRRKRAKKDARAVLGLPVLWADTAGIDIGATEIYVAVPADRDEEPVRCFGAFTEDLRNIAEWLKQCGVQRIAMESTGVYWIPLWQVLSDAGFEVCLVNARHFKNVPGKKTDVEDCQWLQFLHSVGLLRGSYRPDQAICGVRTLLRYRVELIRFAAEHIQHMQKSLEQMNVKLSHVISDLTGVSGLAIVDAILSGERDLRKLAKLRDPRIKASEETIMKSLEGDYRLEHLITLQHSLDLYRHYQQKIGELDQKMEAFMSDLPDRIDISKCPIPPWRKKSRAHKQHNAPAFDLRTHCYRILGVDLTAIDGVDEVTAHMVLTELGPDLSAFSSSSAFCNWLRLCPDNGISGGKILWRRTKKGKNRLALALRNAAQTLHGSDSPLGNYYRRMKAKSGPPAAITAAAHKLARIIFHMITARQEFDPAILAQQDEKQRQKREAKVRRQARELGYNLVPVQSAQA

SEQ ID NO: 364233 - protein, 324 aa, unidentified
MNMKTVIGIDIAKKSFDVCISDNSDTFHFENSAKGFDELLNLDSVRKQQISLFVIEATGNYHRALVDVLELNGFAVAVVNPRLIKNFSRAMGIRSKTDIQDARVIREYGVRMEPPIRQKCDSELLRLKAMASRRRQLVASRTMETNRLEAQTDQEIKSDIRRHIHWLTSEIKRIDAVLAERIGKMPMLKEKVKLLREVKGVGPVVMAGLLTQVPELGTLDRRKISALIGLCPYSRDSGNFRGKRTIWGGRSDIRSMLYMAVLSAIRYNPEIKAFYENLIARGKVFKVAITACMRKLITIINAIVRDGEKKTVGQAISIQKSCVH

SEQ ID NO: 364234 - protein, 262 aa, unidentified
MELYAAIDLHSNNSVLVVTDAEDHVVLAKRLQNDLRFIVTALRGCSGDIRAVAVESTYNWYWLVDGLRTAGFEVRLVNTAAVKQYDGLKRGDDFSDAKHLAQLLRLGILPQGYICPAELRAVRDLMRKRAQLVRQRSTQILSIHCLLARNLAKSVKGDDIKKLADADIDALGLLEDQKRALRANVAVMRCLEEQVRLLERAILAKGRLRAEFHALKTVSGIGDVLALTIALETGDIRRFASAGKFASYARMVDSRRESNGKI

SEQ ID NO: 364235 - protein, 372 aa, unidentified
MNNTTVYVGMDVHKESFTLCDYLIETEKASHTRRTPADYKEVLKYLEFLRTIYGNDTNFICGYEAGCLGYTLYHQLTNHNVNCVILAPTTMLEPRSGKRIKTDKRDAELIGKCLAQHNYSPVHVPTATDEETKEFLRMRDDHKLALKKVKQQILSFCLRHDYRYEGKSHWTAAHVNWLKSLKPEALYKEILDEYLLTYTNLSDKLERLDKRIEELASKDEYREPVKKLCCFIGVQTHTALSVLVEVGDFNRFASANQFAAYLGLVPGEDSSGDDKSRLGITKAGNRHVRQLLTEASQSYSRGQIGHKSKALKARQTGNSPQVVAYADKANERLRRKFYKMVLGKSKKHNVAKTAIARELACFMWGMMTDNIA

SEQ ID NO: 364236 - protein, 290 aa, unidentified
MAQVRSWAGLGVHASRVLAATMDRQSGELVVRRLAGMTSEIVSFCAGLPGRVRVAYEAGPTGFGLVRALEAAGVECVVAAAGKIERPASDRVKTDRRDAERGLRLSMIGGLHPVRVPTPEEEALRDLVRAREDVRGDLMRARHRLSKLLLRPDVRFEGGAWTQHHRRWLAGLELAGRGAQVTLHDYVGAIDALLVRRDGLEATIEELVPGSPWAETVARLRCLRGIDTLTAVGLCAEIGDFGRFARAGHVMSFLGLVPSEHSCGQSRRQGQITKSGSGHGRRLLVEAAWP

SEQ ID NO: 364237 - protein, 383 aa, unidentified
MNDLIRIGVDTSKSVFQLHGVNAAEQPVLRKKLRRRQFIEFFERLPATRVGIEACGASHHWGRELSALGHEVVLLPPQRVKPYVERNKNDAADAEAICEAMSRPRMSFVPVKTAEQQAALMLVGVRDQLVGRRTQLSNAIRGYAAEFGLVAAKGTDKIEPLLVRIASDENLPPLAKDLFATLGNEYVRLKPELRKIEARLMAWHRGNELSRRLAEIPSVGPIGATLSVMKVGNPHAFRSGRDFSAWLGMTPKDHSTAGKVRLGGITKAGDEALRSVLVAGATSVIQQVRKGRGRPSPWLVALVKRKPPKLAAVALANKTARIIWKLMVSGERYNPQRAPQRFVPPTDSLAPGTRRQGQAACGGDLRSALTACALRAPSAPPSA

SEQ ID NO: 364238 - protein, 376 aa, unidentified
MKNLIFVGLDVHAETIAVAVAEADGSVRSLGVIPNRAESVGRMIRKVGKPEQLRVCYEAGPTGYVLYWQLSELGVKCEVLAPTLIPVKAGDRIKTDRRDAEKLARCYRAGDLTAVWVPDAAHEALRDLVRARLAAKRDQLRARHRLGKFLLRHGRRTPEAMGAWTDKHLAWIKTVHFEHSAQETTLLDYLHEVEHVAERLVRLERSIDTTIETLPVKLRAVIEALQSLRGIAQISAVTIMAEVGELSRFEHPCQLMGYSGAVSREHSSGPRVCRGAISKAGNAHLRRIVIEAAWAYRHRPAVGTTLAARQRRSDPALIATAWKAQHRLHQRYLRLIGRGKSKQQTVTAVGRELLGFIWDIGVQVERQTQLPLKQVV

SEQ ID NO: 364239 - protein, 403 aa, unidentified
MNAVGIDVSKGKSMVTILRPFGEIVSSPFEIKHTSSDIHSLIKLIHSIEGESRVVMEHTGRYYEALAHQLSAADLFVSAVNPKLVKDFNNDSLRKIKSDKADSVKIARYALDKWQSLEPYSITDELRAQLKVMNRQFHFYVKQKTAMKNNLIGLIDQTYPNANTYFNSPTRSDGSQKWVDFVSTYWHVDCIRKMSLNAFVEHYQNWCKRKKYAFNKSKAEEIYTKTKELVPVFPKNEITKHIIRQAIDQLNSTSVTVETIRTLMNETASKLPEYSIVMQFKGIGPSFGPQLMAEIGDVTRFTHKGALTAFAGVDPGVNESGSYAQKSVPTSKRGSSNLRKTLFQVMDVLIKTMPQDDPVYQFMDRKRTQGKPYYVYMTAGANKFLRIYYGRVKEYLSVLPDPS

SEQ ID NO: 364240 - protein, 451 aa, unidentified
MANSKTRADRIISRQLSHCTVEAAHLSAVGIDVHHDQLICCFQKLDPIAGELTSEHRSFGTTIPQLLEFAAWCRVRESSVILMESTGVLWFSPYRSLEDVGFDNDTLALVNARDVKAAVGRKTDAQDAKRLAEYARLGKFHKSFVPSRPFRDMRMVSRDIIRLSDDISRQKNRYNKNLNSVGCRATSVFSDVHGKAAGKILDAYIRGDRDFEEIVRSARKQLRATQQEILEAINFAMSDALRELLRSSYEHLQYLIARRDSQIALLDRTQAPYQEYLDRLMTIPGVKELSARLLFCEFTNEQQSFPDAAHFASWLGLCPGNNKSAGKSSSGKTPKGNRWARKTLTEVAHGIGLMKRGALKALFQAFKERRGARRAVVAIAHKVAMIMFAMIWDGSEYVETTCSALRDTRVKRLLQTSKNLREQRTVITLSGQIVDKDTGELIGQLSVDAAT

SEQ ID NO: 364241 - protein, 346 aa, unidentified
MNSMNYIGLDIHKKSISCCVRQADGTIIQESTITATRHALDGWMRQLPDPWIAGMEATLFTGWIYDHLVSGGALVKVAHPAMLQAIAAGKKKNDRVDARKIADLLRCDYFPECHMASREIRDRRRVLRYRNLLVRQAVQMKNKVSGLLMEAGVPYNQQKVHQKKYFAALLQTQKQEMPPSMPELLRLSRSTVEALTGMQRQLIRALESDALLAARVERLASIPGVGRVVALTWALEMGDISRFASVKKAVSYCGLCGAEKSSGGKTERTPISKQRNKHWQTMLIEAAKLAPRWNAELALVYEHAKQKGNRNRATLAVARKLVAYLMAVDREERPFDTHLSVAGNAA

SEQ ID NO: 364242 - protein, 320 aa, unidentified
MQTPAVVLNIGVDVAKDEIVVACSESSFPVRQIANQRVALLAFLKNLPTGSRIGVESTGSYHELFAEAAHQLGFAVFLLNPKDTRHYAKAVGLRGKTDRVDAELIARMIAHEHTKLHAWIPPTPQQREMDRLIKRRATLVALREAVEMSLHELDGFAVDLKALRTRFNQLIARLDLRVKALVEADPERKQNFARLCTISGVGPVIGTALVNTLERVPLKSADAFVAFTGLDPRADDSGRHRGKRRLSKRGPAELRRLLYMAAMSAINTKTWRPLYEHYRAKGLSSTATLVILARRIARTAWSIYTHKTQFDPARLTRSLT

SEQ ID NO: 364243 - protein, 317 aa, unidentified
MSFGKETTFANTLAGFTALLVWTAKQQVVAAPQWFVVEATGVYYEELAYFLADKAQALSVLLPNKVKHFAQSTEQKSKTDQLDARLLCRLGLERALPTWQPPTPALRQLRVLSRERQSLTQQAVRLKAQRHACQHSYQPDARTLGRLVTRLQLLSQQLKAIGQDLAALLAAEPELARKLAHLTSVPGIGLTTAIVVVAETSGFELMENERQLASYAGLDVVQRQSGLSAGATRISRRGNVRLRTALYLPAVSSLRFNPQQLAFYARLRARQPSGKPGVIAVMRKLLLLCYSLWKNDCAYDPHYHPAHCLKKEVAPTS

SEQ ID NO: 364244 - protein, 341 aa, unidentified
MKNLFIGVDFSKEKVDVAIIFADGLTETAPRVFNEFKTTVSGYKQLVKWVEQNSYGIDSSLWLFCGENTGDYSKGLCNFLYGKGYDMWLENAKSIKDASGLRRLKSDRADASMIAEYAMRNYDKAVMYEPLSESLVQLRELFLYRQMVVRHRCSFQVRRGEKRLTMEKSPVKTMISQSGRHIVSELNKEVEKIDKRIAELIKSDEELTEVFTIVTSVPGIGTQNAVCLMVYTDNFRRFNYDSRKISCYYGIAPFGKDSGTSVHSDPHVHYMANRQIKAMLTQAALAAVNFNPVMARYYMRLVERGKKKQVALNNVKNKLVHLVTAMVRNRQTFTPEYKISA

SEQ ID NO: 364245 - protein, 342 aa, unidentified
MEHYAGIDVSLECSSVCVVEATGKIVREGKIPSEPEALIAWFRSLGFATERIGLEAGPLSQWLYAAMKQAGLAVELLETRHVRDAFKAMPVKSDRNDARGIAQLMRLGWFRPVHCKSMAAQETRAVLAARKLVQSKLQDVENSLRGILRGFGLKVGKTTQRSFAGRIRELVANHASLETIAEALLSVHAVLLREFKIFEKQVRSMARSDAKARLLMSTPAVGPIVALTYASAIDDPGRFKSSKRAGSHFGLTPRKYQSGETDVTGRISKIGDASVRTALYEAAHIMLIKPVKGCSELKSWAMRIARRAGMKKAKVALARKLAVILHRMLANGTSFNAAVAAA

SEQ ID NO: 364246 - protein, 408 aa, unidentified
MKTLHRRCAGLDVHKKEVVATLRLVTRGKVSYEVRRLATTTRGLIELAEWLEQAGCTHVAMEATGVYWKPVWHILEGRFELILANAAHIKGVPGRKSDVNDATWISDLLAHGLIRASFVPPQPIQELRDLTRTRKQLTREIVQHTQRIHAVLEEANIKLSSAITDMLGMSGRRILKAIVAGESDPARLSELGGPRLAASRLELSEALHGRVREHHRFLLDQHLKTIEQLEETITAFDARIEVALQPFRDAVERLKEAPGLSETSVQILIAEIGTDMGQFPTDGHLLSWAGLVPRLDESAGKRRSTRVRKGAPWLKPVLVQCAWAASRKKNSYFQAQFLRLKARCGPKKAIIAVAASILTTAYHMLADGTCYQDLGADHFARRNPARAAAKLANRIRNLGFEVEIRPAA

SEQ ID NO: 364247 - protein, 340 aa, unidentified
MKLYCGIDLHSNNSYVVLLSEDGKIVYQKRLSNDINVIIKELHSYQDSLAGIVVESTYNWYWLVDGLQAAGYTVKLANTTAIQQYSGMKYTDDKTDAIWLAELLRLGLLPTGYIYPAEERGLRELLRRRMILVRQQTLCLLGIQGIITRYENVRLSGSKIKKLKDDEEKLLGYLKNGDVCLAVQSQLKILNCIMEQIDILEKTILSKIKKRRDFELISKVPGIGPILAMTILLETGEIKRFSDVGNYSSYCRCVESKRISNAKKKGENNSKNGNVYLGWAFIEASNAAIRHYPEIKKYYQRKMNKTMRVVALKTIANKLSRAAYFILRDGATFDMKKLFF

SEQ ID NO: 364248 - protein, 400 aa, unidentified
MRTVFGIDVSKASSEVAILVNGEKVHGYTMPNDCIGFSRLLSDLDSVYQPEVIFEATGVYSRRLQTFLENNDYTYTRLNPLEAKKQLDSLRVRKTDKIDAEKLALSQFSLNRKPSYVQKSVYQELRDLSRFYQNLTEDIVRTKNRLHKALQVTFPELETLLSAPTGKQYWSLVTAFPSKDFILDWSEADLTKVIRQSTAKRMSDKRVSYLVTKLLELAKQSYCAVKIASPMIEEVRYYAQELLRLTERRQVTLDNMIELAQPLPEYDILLSIPGIAETTATSIIGELGDVRRFQSANQINAFIGIDLRHYESGIYLAQEHITKRGNPYARKILFKTIHNITTAGHYHPCHIAEFYEKRKRQSQVISTKSATIAAMHRLIRTIHYLIVHNKLYDYDLAKSY

SEQ ID NO: 364249 - protein, 392 aa, unidentified
MTIQAQVSVQSQVFVPRNYQVFAGLDVDKHSIAVTFCNHEGLLRSIRLPYSAAQLLNYVGKHFTGERLAFVYEAGPTGFGLYDELVAEGHPCLVVAPSMVPTVAGARVKTNRLDSKKLSEGLRGGQLRSIHVPSARYRELRHLVQLRDTHVQQLTATKCRIKALLLYEGIAFPSDEGKEKQWSQRVVKELLELPCSESVRFKLDQLVGTLHFNFNSAAAAQKQIRHFCQKDEELRQSIAWLKSLPGIGEIIATHLVARLGDPSLITNVRQIAGFLGLVSSEHSTGDKQNRGEITRAGDSRLRNKLIQSAWVAIRQDPELREFYQRVYQRHPKKVAARKAIVAVTRKLTTRIYAVLKEQRPFVLREVSTAPLTTEETAGHRGRLDGQQKQHSR

SEQ ID NO: 364250 - protein, 394 aa, unidentified
MKLVGIDVGKNSHHFCVMDKETGELNVTPSSFSNNKEGFDFLINSLKPYSKKSILLGMEDTGHYHVALLKFLLSNGYTVALINPKTTDLTRKMEGGITKNDKLDTITICDVLDTPERKKQYRITKVDRFDFYEQRQLTRHHHDLKEELNVYCNRLQKSIDLVFPEFNTLFSSKYGVVYMNLLKTFGNAEIIASTDIRTIRKCFEIKGRGNRISLTPEKLKECAKNSIGISSEVETIQIKHLVSQIMLIKEQIAEIDKKIEEFSIKNNSPILSIPGISHFSGTSILAELGDIGNYSKPSQIIKFAGVAPYHYESSQYNAQHTVITKKGSKYLRKTLYQIILPVIKYNPVFKKYYLLKISQGKGHRCAQGHCIRKLLRIIYHLLETGQSFDPALLR

SEQ ID NO: 364251 - protein, 394 aa, unidentified
MNRIVYIGMDVHTSNYTLCSLDPGYGVEKDNYFAEVQFTNNFVTNVVNYVSNLKKKLKDCEFVCGYEAGCLGYSTYKDLTKVGIKCVIMAPSTMAVQKGGKKVKNDRRDARVIAQCLAYQTYKEVYVLSEHDEAVRGYLRMRDSHNKALKRIKQQIIAFCTGHGLFSPTKSNWTVAHLKWLKDLKFNDPVEQEILNEYLSSLTFLSDKIKAMDVRIEELASEKQYCENVKKLRCIKGIETNVALTLLAEIGDFNRFSKPTDFASYLGLIPGEQSSGDKVRGTGITKAGNSTLRRKLTESAKGYWRGRIGIKSATFKKLEKELPKEVTEYALKANTRLQRKFFNMTHVKGKNMNVAASACAREMACFVWGLITNHYDKAPAVPKTDEELLDLNLG

SEQ ID NO: 364252 - protein, 352 aa, unidentified
MKKQRKDVGFGQGLFVGIDLHKRNWHVSVRTVDAELFSGSIPGNWRALRRLLERYEEYEIEVVYEAGRFGFWLYDRLMEHGVQCIVTPPSLVPQGYGNRVKTDRRDSRKLAHLLARGMLKRVWVPTEQERYHRQVSRRRRQLIGDRVRTQNRIKSELQLYGIYLEEPKGKWSRVYVENLHRIRFKNRWMQERFDRLLKLYEFLTKQIDEQTQLLRELSETELYRQKVEILQSVPGIGMIIAMEILLELQDVSRFQRAEQLAAYVGLTPSQYSSAEKIRMGRITGIGKNSLRTALVEASWKLINKDGAMNEKYNRIKAKAGAKRAIVAVARTLLLRTRRMLIDGNSYAIGLIA

SEQ ID NO: 364253 - protein, 430 aa, unidentified
MKKKNHSNEKLEAITFKTLIVGVDIAKHNQWARFVDCRGMEHDKALKFENNRNGFNAILARIYEICKKEDFNKAIVGMEPTGHYWKAFANFLLKQAKITVVLVNPYHTKKAKELDDNSQTKSDKKDALTIARLVKDGRYFETYLPHDVYAELRGLTTTRHSMNKRKKSIINTITAVLDEYFPEFESVFRHPFKGKASMHLLKVCPIPKSVLELGEEGVLEEIKKAVKKTVGRKKAAQLIEAAKDSIGVDYGEYAARFRIQQLMEELELISSQLEALETEMAETLKKTGISEYLLSITGMGVVSLATCLGELGDPLRFEDARQMSRLAGYNLIEDSSGKNKSGTCISKRGRKNLRSVLYQISLTMVATNKEMRQLYDYLKTRENNPLKKMQALVVISKKVLTLIYTLSKKKEYYQPELVFGEYRKSQLSAA

SEQ ID NO: 364254 - protein, 352 aa, unidentified
MILVGCDLHSRKQQVAALDTDTGEVLEQELAHTGDAVEQFYRALPRPVTVGIETTGYTLWFHTLMQQLGHTLLIGEAAKIRAMVVRKTKTDRRDARHLLGLLKDDRFPRVWIPDPATRDLRALVTHRARLVRMRTMVKNSLQAIALNARVALGPSLWTRRGLAQLQALPLPIHTARRRAESLELLTWLTIRIDGLDARIEEAAAADPGAQLLLTHPGVGPLTALSTVLVLGPVTRFPSSKHVVSYVGLAPAVDASADKYRLGKITKQGNALLRWVLGQAAPLAARRDAELKRRYFAILRRRGRPKAKVALARMLLVRLYIMLRDQIDYEEFRRRGHPRPSRNDLAPATGSMP

SEQ ID NO: 364255 - protein, 373 aa, unidentified
MKKVRFLGLDVHADTIAVAVAEPDGEVRSLGIIPNRAESVRKLVKKLAPAEQLQACYEAGPTGYVLYWQLTALGVKCEVVAPSLVPVKAGERVKTDRRDATKLARSYRAGDLTAVWVPNQEHEALRDLVRAREAAKQDQLRARHRLSKFLLRQDRRVPSGFKVWTQRYQDWVKEHVHFEQAAQEYTLLDYLHEVEHMDDRIRRLDLAIAEAVKLAPPGMQEVIQALQALRGIAQISAVTVVAELGKISRFDKARQLMGYSGAVSSEHSSGKRMQRGQITKTGNAHLRRIAMEAAWAYRHRPAIGPRLRKRQEGLSEEVKEIAWKAQHRLHKRYCNLSAAGKEKQKVVTAIGRELLGFIWAIGVQAERDSKRVA

SEQ ID NO: 364256 - protein, 419 aa, unidentified
MKNMTSEKSFAAFIGIDWADQEHTYSLAVAGSSRIERGRLQHTPEALHAWAEQLHKRFAGRPVAILLEQKRGALVWALQEHPFITLFPINPLTSAKLRQAFFPSGAKSDPLDSDLLLDILRHHRDRLRPFQLDEVQTRLLERLTQDRRGAVEQRKSCVQQITAALKEYFPLALEVLGKLECNLAARFLLKWATLEELQAAQPHLVRKFFHGNNGRFQIEQRLKRIQQAQPLTSDPAIIEAGRRKVQMLAQLIITLNQYIADYQKRIETLFQRHPDRHIFQSFPGAGAALAPRLIAAFGMDRSAFADALSVQNRSGIAPVRVSSGKTAIEKMRVVCPKFLRQTFHEFAATSVRYCAWARTYYQAKVAAGKKHHTIVRALAFKWIRIMWACWQNQEAYEETRYLRALTRSGSPFAVTLKKT

SEQ ID NO: 364257 - protein, 504 aa, unidentified
MPWAASPDFSVFLPPGLSRGTTWHRDAVLDKADDSWTKKYFTNKETVMKHYYLGADVSKGYSDFMLLDAKKRRIEEDFQLDDTFDGHQKLYHILSSLCDQHPDAQIYAAVESTGGYENNWFEALVKFQSSLPLKTARLNPCGVRNNSKAGLERNITDPISAENVAKYMIEHPENVRYQQHDPFCSLRKQWSFIKMLSKQKTQLLNQLESNLYGANPEILGHCKNGVPKWVISLLLRFPTAAKLAKAKKSSLASIPYVTEQKAKALIQSAKKSVASAGDQITAQIIKATVKQIQQLTQTIEAQEKILTKMCSIPQVQLLKTFPGIGDISAIGLILEIGSVERFATAKKLSSYFGLHPIFKISGDGKGGFHMSKIGRIVPRQILYMVAMVAIQCNPLIQEIYLKHTEKGMKKKAALGVCMHKICRIIYGMLKHNKPFDPNVDRKNRTKSLKNKTKIRQDKTRRYQSFDSKAPISARQGKKRKERKQSQSDNIANNGIIKASVPVSV

SEQ ID NO: 364258 - protein, 355 aa, unidentified
MNDAKHIGIDVHWATISVAVRDSRGNLGMEAILETKADTILEFIHGLRGSLWVTFEEGTWAAWLHDLLLPQVTRVVACDPRKNALLKVGNHNDRMDARKLSELLYLNKLSPVYHGEQGIRTLKELARSYITITRDLTRVMSRLKAIYRSWGIPCAGQQVYAPRYRAEWLAKISEAGVRRRAELYYQQFDALAALRQGTRRELLAEARKHPAMRLLRQIPAIGPIRAALLIALIQTPNRFRTKRQLWAYCGLALRTYTSGEYRFVAGQLKRSKKVLAVRGLNINHNHDLKNIFKSAATRAASTVGPCQDFYYACVARGVKPHLARLTLARKIAAITLLVWKKGVRFDAEHLKQQAA

SEQ ID NO: 364259 - protein, 367 aa, unidentified
MMGWMAPLRHLSAKLLSDRISSEWEPSMGEVTTIGLDLAKHVFQVHGVDAEGATVLRKQLRRAQVLAFFSRLPPCLVGLEACATAHYWARELRALGHEVRLMPAQYVKAYVKRNKHDAADAEAICEAVVRPTMRFVPVKTADQQAAVLLHRGRERLVRQRTGLVNALRGHLAEFGVIAPQGLRNVGKLIAIVRDERDARLPDLARQVLQVLAAQIEQLEAAVAAIEKQLMAWHKSNPVSQRLASVPGIGPIIATAIAATVVEPSGFRSGREFAAWLGLVPRQNSTGGKHRLGGISKRGNQYLRRLLINGASANLLRSKATNADPWVIGLRRRRPSLVVAVALANKTARIAWAVMHRQENYQRMAAAA

SEQ ID NO: 364260 - protein, 444 aa, unidentified
MEQRYRIVERSQHVRMPGESQEKLMSQNQPEIQYAAFLAIDWADEKHVWSLQDANSSTCERGEVDHMPEAIEGWVAQMSQRFADRPIAVAVEQSRGALVFLLSKYEQLHIFPVPPAMTANLRKAFYSSGAKNDPTDADLLLDLLQRHREKLRRLSPDTEATRLIQNLVEERRKLVDEKTAQSNRLEAHLKIYFPQIPRWFGDVGTPLVCALLERWPTLEALQKAGPGTLRSFFRKHNCHKEELIESRIKAIGEAMPALKDRAVVEAKVPVVKVVVQLIQDLHEGIEGLNRQIQEAAEAHPDFFIFDSLPGAGAVMAPRLLAAFGSQRERYQNAAEVQTLAGIAPVTESSGKSSWVHFRFACSKFLRQSFHEWAALSIPQSQWAHAYYELQRRRGKKHHAAVRALAFKWIRVIYRCWKERVAYDEKVYLAALAKQKSPLLAATER

SEQ ID NO: 364261 - protein, 410 aa, unidentified
MIKENYIYVGIDLHKETHTAVMIDCYNQKLGEITFPNRPADFPKLVTKVKKCNTDAKEVVYGLENAYGYGRPLAVWLIDKGYFVKDVNTAISHRQAKHRGAMYRKSDSDDAEAIALATLNMLDKLPDACPNDAYWSLGQLVHRRDNIMKQRTRLVNQLHEQLCIAYPSYKSFFNDISRPTALYFWEHYPSKKYLKGKSVEDLRAELVPVSHNKCSTKTCEKILDAVASDKVKNNAYQDARDMVTLSIVSDLQHYDSQLAEVDKMLEQMYKMLGCTLTTIPGVNVITAVKILAEIGDIKRFSNANKLAQFAGIAPLHLSSSGKGKDVATKQGNRRLQATIYFLAIQMVQVSSKGTPRNPVVRAYYEKRKAEGKTSQQALICISRRLISVIYGMLKNGTEYRMPVVESAGEK

SEQ ID NO: 364262 - protein, 368 aa, unidentified
MEGRRFVGIDLAKRTYEACALGTGDYRERWNGRTDECGRSRLAARLLAGDVVAMEAGVTTFETARTIVTLRPDVRVVILNPGKLAVIYASMKKTDKEDAFKLAWLVQAFPEAYLPTVPLPSMEELQMRRLSKAQVFLKQERTRLINHLHALFVSDGITSMSKRLLATGKSRRMAVKRLTPLHETLASQILSVIDEVEVRLSEIGDLIKGMLEGHPDEATILLSIPGVGPMTAAAFLAYIGDGSRFANASQVSNFAGLVPRIDSSGETTRYGHITRSGNSIIRRAAVQAAWAAIRSYAGGVFRETFERIKARRGSSIAIVAIARRIVELMYSLLKSGELYRYGSEEDRLRKLRRYKIELVGTGGLDATT

SEQ ID NO: 364263 - protein, 340 aa, unidentified
MSLYGGIDLHANNSVIVVINEQDEVIYRKRLPNVLPTILEQLAPYHTEMQGLVVESTYNWYWLVDGLMEADYRVHLANPAAIQQYSGLKYTDDHSDARWLAHLLRLAVLPEGYIYPKAERAVRDLLRKRAHLVRQHTANVLSVQNIMARNTGGRFSVKRIQELTKQELTTLLTEETQVLAVTSSLVVLDCLQQQIKTLEQTVHKRLQHTPSYEQLLTVQGIGTILAQTITLETGAISRFPSVGHYASYCRCVDSTKISNGKRKGTGNVKNGHPYLAWAYMEAAQFAMRFQPEAQRFYQRKLAKSRNNTVLARKAVAHKLSRACYYMMRDLVPFEATKAFG

SEQ ID NO: 364264 - protein, 348 aa, unidentified
MKFYVKQHKYYCGVDLHARSMYVCIIDEKGTIVKQKNMESGPEEFLKIIEPYREDIVVAVECMFAWYWLSDLCRAEGIPFVLGHALYMKAIHGGKAKNDRIDSHKIAALLRGGMIPMAYVYPSEMRATRDLMRRRNHLMRKKAELLAHIQNTNHQYNLSPFHKSICYKGNREGIAERFGEECVRKSIEVNLSLIDHYDKLLRKLEYYINQKAKAHDPESLFRLLSVPGIGQTLSLIILYEIHEINRFPRVQDFVSYCRLVKPSKESAGKLYGHSGAKIGNAHLKWAFSEAAVLMLKQSPEIKKYKARLVKKHGKAKALTILAHKIGRAVYYMLKRKEVFNLEDFLKKK

SEQ ID NO: 364265 - protein, 440 aa, unidentified
MNQGDRTRLEEFRQFRKEIRGSAEYLVVGIDVAKDKHHAFFGTATGRTLLRRLVFENNLEGFGKLLLQAEAMKVQGGLTKVVFGMEPTGNYHKPLGEHLIRCGHKVVLVSGVAAHENRKTLDGRWDTNDTRDAANVADLVSQGKCLFYEFPVGALQDLRNLLSLKRRFKRVEHGYRVRIRNHLVAKYFPELDRYYDQSPSTSLAIVRWCLDPSVIAGLEYKEFVQRVGTGRRRVSQERRLQAIWKLAMDSVGCEGGPTVEFEAQVMVEGLRQIRESLRQIEEKIHETCSQFPEYECLLSIPGFGPDVASKILGAIGNPFRFQNGRQVLKLAGFDLSAKRSGKKSASVIPVISRKGKADLRYALYQAALIASLRNPEFIEYYTDKIRGREREPGIKIKMRVKLAAKLLLIAWTLMKKKESFHPSHVRSAGPSFSAGAGRER

SEQ ID NO: 364266 - protein, 391 aa, unidentified
MVCVGIDVAKDKHDCCILDSNGMVRADCFTIPNNMDGFKQLLQTIRNCTKKSDKIKVGLEATGHYSYNILGFLLDNGLPTYVINPLHTNLYRKSLSLRKTKTDRVDARTIATMLLSDVDLKSYTDIAYHNEELKSLTRYRFDKVQERAKLKQSVSRLATILFPELEGLVSSIHGTSIYALLSEYPGTKQISEVHLTKLTNLLTTASKGRYGKEKAIQIREAARASIGSVMPAKSLELKHTIKLIQELASEINEIEDSIQKIIDELNPPILSIPGMGVNSAAVILAEIGDFSNFSSPDKILAYAGCSPSTYQSGKLTNCYAHMEKRGSRYLRHALYNATKYVCYWNPVFAEYLAKKRAEGKHYNVALSHAMKKLVRLIYALQKSGKAYLAAA

SEQ ID NO: 364267 - protein, 363 aa, unidentified
MKIMVGIDLHSNNALCGLMDENGRRLVHQKLPCDLASILQLLEPYKDRIATIAVESTFNWYWLVDGLQDHGYHVVLANPARMQPYSGMKYTDDVSDAYFLAELLRLNLLPTGHLYDRKTRPVRDLLRRRLLLVRQRTTLILSFKSLNERTLGQRVPLARVKAMKSEEAQSRFTDPADQLLSGQQIILMGHLTDSIMKLEQHILGVVGKWSTYQRLQELPGIGKILGLTIALETGDAQRFADAGNFASYSRCVKSLRTSNGKKKGENNRKCGNKYLAWAFVEAAHFACRYDDQCRRFYDRKKQQTNPVIATKSLACKLAKAAWHVMKDDVPFDAARVFGPARKSDFGETGREPAKGSGHPSQQD

SEQ ID NO: 364268 - protein, 376 aa, unidentified
MKRHGEAFVGIDTAKARNAVAVAESGRGGEIRYLGEFDNTPDVVIKLVRKMADRYETVHFCYEAGPTGYGLYRQIRSLGHECAVVAPSLIPRRPGDRVKTNRRDAQTLCRMLRADELTAVWVPDETHEAVRDLVRTRAMAVEDYRRKRQHVTSFLLRHGRTFDGKASWRGRHLRWLDGQNFAHPAQRFAYQELLNAVRITADRIERLETALVEIVPHWTMAPVVAAFQAMRGVAFSTATTLVAEAGDLRRFDHPRKLMAFLGLVPSERSTGEKRRQGGITKAGNARARSALVEAAWTYRHSAGLGVGHQRRQLDLSEKVRDIAWKAQARLCARYRRLAAKGKRVTVVTTAIARELAAFLWDIARHVDPAPLEVATP

SEQ ID NO: 364269 - protein, 409 aa, unidentified
MAAVMIGVDPHKGSHTAVVIDQAEMALDQVKVRACTAQAERLLAWAAAWPERTWAIEGAGGLGHLLARQLVAAGERVLDVQPELAARVRLLAAGDVNKNDPDDARSVAVAALRSAACPQVRAEDHAAVLKVWAKRHRDLSRSRNQVTCRLHAVLCELVAGGVSKQIRAAAAARLLDQIQPCGAVQAARRDLAGQFLADLRRIDAQRRDTKKTLAAAVRTCGTTVTEVFGVGPAVAATVIGDVRDISRFPGPDCFAAYNGTAPAEVSSGNRKVYRLSLRGNRRLNHAIHMAAVTQIRYRHTKGRAYYDKKLAEGKTAKEALRALKRQVSDAIYQHLKADARRAAATAGPGGHPGNGSVASAAGSHPEHRLFGPATPGPESTLRPRPGPSKATRPGSSRRTRRSVPSHTSA

SEQ ID NO: 364270 - protein, 369 aa, unidentified
MNTTTFVGLDVHARSIKAVALDAMTGEVRSATFGYDAAEVAGWVSSVDPSAKCVYESGVTGFDLQKRLSSMGIDCVVGAVSKMIKPSADRRRKNDRNDAEFLARMLSVGNVVEVWVPDDECEAARDLTRALDDAREDLKRCKQRLSKFLLRHGLVFSETNAKGQRRKNWTAAHWAWIRSISFPDKADDEVLAYYIDAARQAMEDKARLERLVEAEASKPRWKKRVDSVRCLKGIDVTSAADLVFEAGEFSRFKNARSFAAWIGLTPSEHSSGESVRQGGITKAGNKHLRRVLVESAWHYLGCSPHSKDLAKGQAPDPGARRHAAKGVRRLVGRRAAMLERGVHKNKANVATARELACWCWAIGRMVENG

SEQ ID NO: 364271 - protein, 257 aa, unidentified
MKQAKSNMFIGVDVSKNSLDVAVGPSGETIGFANSEDGIALLADFIKPLAPTLVLFEATGGGEMNAVRHLAAQRLPLVVLNPRQVRDFAKATGQLAKTDAIDIRILARFGEAVRPEVRPLKPLELRKLEALNTPRRQIVEMITAEQNRLVSAPEWTRPDIEELIAIFKKRLAAINRDLNQLIRKSPLWQEKDKILQSFPGVGPVMASTMIADLPELGTLNRRESFALVGVPPLNCDSGIYKVKRNIWGGRAAIRSVL

SEQ ID NO: 364272 - protein, 429 aa, unidentified
MQNESTPGARGPVFCGVDTHADSHWLCVLDWRGRRVLSRRFPADAAGYEALAGAIAAAGEPACVAMEGTSSYGAGLTRHLASLGMPVREALSPARMQRRRPGQGKCDESDAERAARAAMSGSRLGTPKSQDGWVDGVRCMLAARSGAVKARTSAINTARSLLTTAPEGLRSRFRGMGGPRLMEELPSVRAEGALGAALGALADLWAAARDAALDMELAIEASLEENCPALLAMYGCGPVSAAKLAVAAGDNPGRLRSEASFAAICGACPIPASSGKTVRHRLNRGGDRQANSALHEIARQRVMRDPETAEYAERARGRGKSDREVMRCLKRYVAREAYRALMHPHEIRRPEDASELVAARRAAKVSQVRAASILGTSEKYISMLERGQRELKPIRRAYEAWVEAGLPLDWDRQAFEAERKMDSKKHLAK

SEQ ID NO: 364273 - protein, 435 aa, unidentified
MEEVTDEPLYRDRVCGIDIGKAQLYATIRVPSDKNPARRASETRSFATTKRGVLALADWLHCWQVPAVVMEATGDYWKGPFYRLEAEGFECVLADAKQVKHLPGRPKRDTSDSAWLAACFERGAVRPCFVPDPEFRIIRLHTRYRRDLTDERTREKNRTEKLLESAAVKLSSVVTDLHGVTGRDIMDHLIAGERNPKVLAQLARARARRKITELEHALDGAEFFTEDHAALLTAMLERIDGLNAQIARLTAVIERLLAPYEEQLQQAESQPGWGRRSAQDTLAETGPDMSKFPTGSHLSSWAGRTPLDSQSGKRTGRARHKKGNKYLGAITGETAVAAGKTQTREGARYRKLARSRGKAKAQVAVGNTQLKVYHKLLSNPGMRYQDLGPDYYERQAATRRKIAYHVREIEALGLEVTLARIPEPDPDGPASTQAA

SEQ ID NO: 364274 - protein, 414 aa, unidentified
MNADTNKVERVIGFDSHPDTFTAAILRGSTPLSAIVEKTFDKVPLGQLCRWAQKHTTENDLIVLEASGNSFHVVRVLVKIQRKALVLESGHLGKLKEGHASNDKISAVRIAKAYLSGTARTVWVPDLKTQERRDLLHIHRKAVKRTTQMRNRLQSYLSDNGVRLSKGTRLTQPETQDKIRKAHDWLPRQWQLIEGMLMELQHAEKQRAHWRSLIAQEVLADPLLLSIVRLGGVRDMIAFALGAVVGDIKRFADPKKLVKYIGLNPAFDDSGKEQWTGGIGNRGRKDLRCLLVEAAQAILRSSHTPLARWGKKLLGRKGAKNLVVAAIARKLAVAAWYLMMGHWTALEEIDERLSQKIGKIITEVGATRLDKLGKTRKAFREEICQRLTSGRTYVLDLKRKFVPKRTVQLTPAPA

SEQ ID NO: 364275 - protein, 355 aa, unidentified
MESTKYVGLDVHKEATTIAVMNSAGKLIMESIVETKAITIRQFIQGLHGDLHVTFEEGTWAAWLYDLLKPYVTKVIVCDPRKNTLLKVGNKSDRIDPKKLAELLRNGSLSEVYHGENGVRTLKELARSYLTISKDLGRVMNRVKAVYRSWAIPCAGTQVYALCHRSEWLSKITEAGVRRRAEHYYQQLDALQSLRREVRKDLLLESRKHNATKLLRQVPCIGPIRAAQLVALMQTPHRFRTKRQLWTYSGLGLETRDSAQYCYVEGQLQRSKKPQQLRGLNSNHNHDLKNIFKGAATMASVSAGPFHDFYQALLTKGMRPTMARLTLARKIAAITLIVWKKGARFDPQHLKQQAA

SEQ ID NO: 364276 - protein, 375 aa, unidentified
MRQDRAGEVIASYYGIDLHKDQITWHCIHKTGNGETARENGRISTDRILEELVPMLSVNDSYLIVEASGSSFFFYSLVESHCKKALVVNPVAFRELYMTGKKTDRIDAKKLAERLKYHIECGDTESGFPEVFVPDAEIVKIRKMVTAYELVVKQGTQIKNQAKSIFRSKLMSVAVDIMEKGLDEALNDKRIDEADRSILIMLKRIYDTLMEEKEEIKKQILLLGSFRFREEVKLLMSIPGISLMSATVFMADICTVDRFKSEKKMTSYLASVGTVDSSGGITRNGGLSRRGRRTSYRYILQGLEHIVNGNKDFQKFKERHALTRSNKVRAAIVRKTFVSMYFMLKNKETYRYLNEAIYTRKIRDLKKYGIDFKCA

SEQ ID NO: 364277 - protein, 350 aa, unidentified
MEQISRIGMDTSKHLFQLHGVDAAEKPVLRRTLRRRDMITFFERLAPTRVAIEACGASHHWARLLRGFGHEVQLIAPQLVKPYVKRGKNDAADAEALCEAMSRPTMRFVPVKTAEQQAALMLVKLRDRLIRNRTQLVNAIRGYAAEFGIAGAKGIAPVTTLLARLQADVPLPALARELFAMQAGEYAQVQAKIAVVEAKLLAWHRADPCSQRLAGVPGIGPIGATMLTMKTPAPEAFRSGRQFAAWIGLTPKDHSTAGKARPGVITRAGDEGLRSVLVVGATALIRRVREGRCRDGDRFAAWVGKLLERKPPKLVAVALANKLARVAWKLMITGEAYAVKPVSTGAASAL

SEQ ID NO: 364278 - protein, 342 aa, unidentified
MKKASIIGLDLAKRSFQAHGALADGSVAFRKKLTRERVLGFLAEQPRCVVAMEACGSAHHWGRAIRDAGHEVHLIPPAYVKPFVKRQKNDAADAEAIAEAASRPTMRFVAVKSEEQQARAMLFRTRDLLVRQRTQLINALRGQLSEHGVVAPQGPANVAILAQAIDDMTPSLPLLVVELARVYLDQIDRLSEKVAGLEKAIACEAKRGAMTRRLQTMPGVGPITAMAIETFAPPMEVFRRGRDFAAWLGLVPVQHSTGGKQVLGKTSKMGQRDIRRLLITGAMVIVRWACRKGAQEGTWLHRMLGRKPRVLVAIALANKMARSIWAMLTKGEDYRVPGAATL

SEQ ID NO: 364279 - protein, 332 aa, unidentified
MENFYFTGVDVSKKKLDFCVMFEGKVVHEEETANHQSAIMSLLHHFEEDYGIDNTRMLVCAEHTGQYTFPLACACKTVECKLWLENAAEIKYSSGVQRGKNDKVDAKRIAIYASRFQDKVRYYEHPTEDIERLKQLESERTLYVTDLAKYKGQMKDQKDYMPKALYERKMKRLQALMDDLEEAIQAITDEMDEVIASCPVLFRQQELLMSIDGVGRVVATNMIIATEAFTRFDDPRKFNCYAGVAPFSYSSGSSQHSKARVSHRADKVMKRLLHLAAVAVTHRVGGELKKYYERKVAEGKNKMSVINALRAKIVARMFAVIKRNEKYKPILS

SEQ ID NO: 364280 - protein, 429 aa, unidentified
MPQLWAGIDAGKTEHHCVVIDGNGTKLLSQRFKNRETAILTLMGDVASLPGGTDVAWATDLNHGGTGLLQTLLSSHAQPLFYISGRVVHHASGAYRGEAKTDAKDAVIIADQARTRRDVTLMRQADDVTAELRLLSARREDLVHDRTRAVNRLRAILVHYFPSLEGAFNYATTRGPLVLLTRYATPSAIRQTGESRLASWLKGQGCWKSAAVAKTAVEAAREQTSVVAGEDAAARLVSRSARDLLRIRDELAELEAEIDAVLQDSSSADLLVSLPGFGRRLAADFLAATGTDLAAFETPDRLASFAGLAPVPRDSGKISGNHHRPRRYDRRLLNACFQAAFIASRNCPVSRSFYERKRGEGKSHKQALIALARRRINVIWAIFRDQTSYHPTGAEPAAFASGTIADGSAARGLGAGGNPWEGIGNRHSW

SEQ ID NO: 364281 - protein, 318 aa, unidentified
MQAQAAAVYVGIDISKASFDVDSYPVAQPACFTNDEPGRAAAANYLRGLQPSLIVVEATGGLEAPLVGQLATAGLSVAVVNPRQARDFAKAIGVLAKTDRVDAQMLARFGQAVKPAVRPLKPEETLALEAMLTRRRQIIEMITAESNRLSSAAPRIAKQIRQHIAWLEKRLDEADQDLDGMLRQSPVWQHKAQLMTSVPGVGRVTAVTLLAELPELGALPRREISALVGVCPYSRDSGKYRGRRSIWGGRAVVRAALYMAAIVASRHNPVIRAFYQKLVAAGKLKKVALVACMRKLLVILNAMLKHGTPWHHQPQLAA

SEQ ID NO: 364282 - protein, 333 aa, unidentified
MWHVGIDLHRETVVIAGVEDSGRVFDAVSLPMRDEKQIVETMKKLRPFRAVVEASGTYRWLYDLLSVLGTVFLAHPFRLRAMVLRRSKTDKLDAMLLAQLLRINQVPLAYVPPEEYHRLREATRYRVRLGREMGHLKGAIRGLLARHNMEAPFRVPFGKRGLRWLERQEFPGADQWLRDDLVARLRWVRGRIAQAEAAFEELRGKFPEVEAILDIHGIGLYGALLIVGELGEVDRFRTEKQVGAYAGLTARVNQSGGHCYHGHITKQGSSWLRWALVEAAMKVIRKDRKLANFYTRVRKRSSAKIARVAVARKLGCICWQRLRRWHREQALAA

SEQ ID NO: 364283 - protein, 394 aa, unidentified
MFYLGIDIGKNTHVASMIGEDGKSAFRAFSFSNTTEGGELLLAKLSGITPAELVIGLEATGHYWLAVYSYLRDRNYKLHVINPIQTDGWRKGVEIRRRKTDVIDSVLIAELIRYGDFIEARLPEEAVLSLKNLTRFRSYLTDSISDLKRKVICVLDQVFPEYQSIFSNVFGKTSKEILLQFSSPADLEDVSADTLAELLAALSRKKLGIEAAEKLSVAASNSFGVSFCRDSFTFQLRMLIEQVKYIESQVKDTEAEIESIMTNLASPITTIPGVGKTTGAVILGEIGGIERFDNPAKLVAFAGIDATVLQSGEFEGTSNRMSKRGSPYLRRALYQASLIAATGRNPDPILRAFYFKKMAEGKHHCTCVGAVSRKLCYIIFSVLKENRPFEVRIP

SEQ ID NO: 364284 - protein, 314 aa, unidentified
MSENPEIFVGIDISKDTLDMGFQPSGQTVRLPHDAQGITEATRRLHEAEPRLVVLEATGGLETELAASLMAAGLAVVVVNPRQVRDYAKATGQLAKTDRVDALVLADFARAIRPELRPMKDALTRELDALVTRRRQLVEMRVQESLRLGRASKVQEKSLKRHIAWLDKRIEEIEADLRQRLRASPAWRAKDGLLRSIPGVGDTTSATLLAKLPELGTLDRKGIAALAGLAPLANDSGKQRGRRVIWGGRADVRCVLYMSTVAAIRCNPVLRAFADRLKAAGKPAKVVIVACMRKLLSIMNAMLKSNLPWNPKIA

SEQ ID NO: 364285 - protein, 370 aa, unidentified
MQNQNTKSVSGNGNNGASVERKSDRVLKLGLDLHYRQVTVAMQEEDGRIKAVGKMGHEAFVSWLEKKRKEGWEIYSCYEAGASGYWLHRRLVEMGVKNLVVVPKAMNQAGQKQKTDRRDAGELCDALDRYLRGNGKALSPVAVPTVEQEEKRALIRYHRQIMADRSRYEARGKGLLCAQGIEVQGKWWQAKGWKELHSDPRLKDWMKEQLEGWRGKLLGAEQQQQKLRGRIEALAPTILPKGVGAYSAVVLEYEMKGLARFKNARAVSSYTGLCPGIHSSDGRGKEGSINRCGNAVVRWNLVEMVWRLLKWQPHYEPVRQLAAGLVRSKRAKKRLVVKAARQLAIDLWRLRTGQITPQKLGLVMQCNPIK

SEQ ID NO: 364286 - protein, 429 aa, unidentified
MNYTQNEKIEQVTDSTMVVGVDIGSQIHYARAFDNRGRELTKRVFSFHNDLEGFNSFNLWAETLKTENKKTAVLIGCEPTGHYWFAFAKYVNDHQKRLVMVNPFSVKKIKELDDNSPKKTDSKDPKTIAKLVVDGRYSIPYMPEGIYAEIRDLVYSRDRIMKQHNISANRIQRWLAIHFPEYLGLYTRFDAISGLAVLEKAPLPKDVIALGVNGIRKIWHDKKMRGRGVTEDRAKTLVEAAHNSVGLDGGIGTKSELYMLLEEHRLWTSQLEAVNKVLEEMILKVPHVEKLLAIKGVGSITIAGFIAEVGDIRRFDSPKQIQKYAGLELVENSSGKHKGRTRISKRGRRKLRKILYQVMVPLLARNKEFRGIYDYYVTRVKNPLKRRQAMVAVSCKLIRVFYAVLTKGVEYDRFKMMSDIHRKSDIIAA

SEQ ID NO: 364287 - protein, 375 aa, unidentified
MRSVALDFGGNVSFGEVANGKVIRRTSVKDFWDLEPELGPQTAKAKVAVEACREVWFLVEQLRRWGHEPLVVDTTRSAKLGIGHHKRKNDRIDAEVLAHAVERNLIPTAHVLSPHRQSLRHWQSVRRALVETRAQYIVCVRGFVRAANLQRLPRCEPESFAKLARKTPMSANTRELITALVDTIADLSERIAQVDKRLEAISSEEPATLLLRTTPGVAAVVSTAFVSVIDEPSRFKRAHQVEAYLGLVPSEHTSVHRQLGSITKQGNKYLRALLIQAAWSIMRTRFTDPLRIWAQRIAQRRGKKIAAVALARRLAGILWAMWRDGTVYEPARVGQVGAQGVERRAQQELAVAAAMRRAGLKGQRRIATSRRAQMS

SEQ ID NO: 364288 - protein, 312 aa, unidentified
METKFVGIDVSKLTLDFDCLPVGAPQQFANDAEGIVALVDLLKGSGVERIVIEATGGYETAVASALAVAKLPVVVVNPKQVRDFAKATGSLAKTDRLDAKLLALFGERIMPPLRTLPDEAQRALADLLDRRSQLVAMRAQEKARLASVTAIARKNVQQHIVWLDKCIAKLDGDLEERLRKSPVWCEKATVLGSVPGVGQVTTFALLARLPELGQLNRQAIAALVGLAPFNDDSGTRRGARYIRGGRADVRCALYMATLSAITHNKPIKEMYERLTASGKPFKLAMTACMRKLLTILNAMLKKNQTWKIQPSS

SEQ ID NO: 364289 - protein, 418 aa, unidentified
MKYALGRVLPDVPPGGVSAGIDWGTASHAACVVGAAGRVADEFAVADDRAGLAALTARLRRAGAAEAAIERGDGPLVDALAAAGITVVVITPRQVSRLRERHVASGAKDDGFDAFVLADALRTDRARLRPLVPDSPQALALRAAVRARKDLVAQRVAACNRLRAHLLTAFPGAAGLFSALDSRLSLAFLDAFPSRASAAGLDEAALAAWLATVPRRGGCAPAAVLARRLAAAVPGTGHDAHLAAVTRALAGTVAALAARIRDLETAVAAQLAAHPDAEVFLSLPRAGTLRAARLLAETGDSRARYPDARALAGAAGVAPVTRRSGKWTSHEFRWAANAHLRDAWTDWAGDSRHASPWAAALYDAARQRGKDHPHAARILACNWISVIWPCWQQGVPYDPAKHRSLQEILTRQQQPPRQ

SEQ ID NO: 364290 - protein, 415 aa, unidentified
MSLKIVYKICCGIDVHKTFVVACIASTNDKGITSYESHRFSTYTSGLKTLLQWLLNRNCKDVCMESTGKYWIPVYNILENDCSIVLAHPKYVKAIRGKKTDKKDAKWIADLFKHDLVAGSFMPPADIRQLRDLMRYRFKLTCFQSSEKNRLQNCLTVSNIQLGNVVSDTFGKSAQAILDKLLENPADTSFDLEPLVYKSLKKKLPQLRDAIDGYITPEQAGKLKVIKSHYENLESRKAELEELILALAAPYQQELAILQTAPGIRSDFTAIGIISEIGTNMEAFPSAKHLCSWAGLTPTNNESAGKKKSVRVSKAGCYIKPLLVQCANAVVTSKKHPEIRNRYLRLKKRRGHKKAIIAIARMLLTALYHMLKNGENYNAELYRKSYLPPVDREITVEQAIIIARNQGYKIKSATA

SEQ ID NO: 364291 - protein, 377 aa, unidentified
MKEQTFVAREFEIFGGLDVDKKSIAVTFMSHQGILQSFSMPYRAENLLSYVGKHFAGKKVAFAYEAGPTGWGLYDRLTAEGHLCVVAAPSMIPKVPGQRVKTNRLDSQKLSEHLRGGQLKSVHVPSQSYRQLRQLVQLRDTFVQDLVATKLRVKALLLLEGLEFPPAPAGSQWSLIVRGKLKKVSCSSAVRFKLDQLMESLESTEKRVVQTIKEIRRFYQQDPELCQAMRHLKSIPGIGEIVASHLLARIGDPQQIGNVRQLAGFIGLVPTERSTGDRVARGHITRSGDGRLRSKLIQAAWSAIRQDPELREFYRSVYQRHPRDRAARKAIVAVARKLTTRIYAVLKQQRPYEVRKIVHSAPLTQEETSPQGTTRRR

SEQ ID NO: 364292 - protein, 356 aa, unidentified
MQTQVTKKIDFNGKPLFIGLDVHKKSWSITIVVDGTEHRTFTQPPDPESLFSYLHRMFPGGTYHSAYEAGFCGYGIHRRLTDLGINNIVINAADIPTSQKDKLQKRDPVDSRKIARSLEKGSLHGIHIFDRELEELRSLNRTRFYLMRDLRRSKTRIKSFLQYYGEPIPVEFDNNQWTLKFVCWLKQVKMQTPSGQDAFSNLISSYEYHRSQLLTLSRQIRERIREYDRELYTLLKSVSGIGPLTASALITELGDINRFSNIDQLSSYVGLIPRIRESGETTHTGGITFRCNSFLRTLLIESSWQAIRMDPALMQYYQSHLINNKGHKVVIKVARKLLNRIRYVMKNRQPYIIGVA

SEQ ID NO: 364293 - protein, 372 aa, unidentified
MKESSKTTIYVGLDVHKESIAVAYAPEDRGAEVVARGTIGPRQCDLDKLIRQLQSKGATLVFVYEAGPCGYGLYRYLTRRGFACHVVAPSLIPRRPGDRVKTDRRDAITLARLMRSGDLTSIYVPRVEDEALRDLSRGREDTMQDLKRSKRRLKSFLLRHDIRYEGRATWNAAHLRWIAQVVCPTPPQQIVFQEYVRAVTEQQERLQRLETELHEAVKTWRLYPVVEAIQALRGIELTGAVILIAELGDLTRFDTPRKLMAYLGLTPSEYSSGDHRRQGGITKAGNSHARRALVEGAWAYRYPAKVSRHLQLRLEKVPAEIQAISWKAQVRLCKRYRQLSARGKHVNQVVVAVAREMAAFAWAIARLVPVAP

SEQ ID NO: 364294 - protein, 332 aa, unidentified
MNMNQQVRVAIGAERPSAGVDVSKQHLDACWGEHELRVGNDAAGWGELTAKFKASQVELIVIEATGGYERGLVCALQEAGLSVARLNPRQARDFAKSMGVLAKTDRVDARCLRDFADVLARHPDRLKYITPAADSQREALAELMTRRRQLVEMRVAESNRLELAAKRARRSILSVIRTLDKQLATIDRDAQRHIDDHFDGQRKLLDSVKGVGPVTTLTLLAALPEIGALGRRAIAKLAGLAPIANDSGPRKGQRHIRGGRGQVRAVLYMATLSATRSNPVISAHYQHLLASGKPKKVALVACMRKLLTILNAMVRDGLPWDSSRHTQAQNVA

SEQ ID NO: 364295 - protein, 369 aa, unidentified
MGEYSEAFVAFDVAKIKHAVAVAEGGRTGEVRFLGEIENREGPIERTVKKLAGRHGRLHFCFEAGLTGYGLYRQLRALGHDCMVVAPALIPKRPGERVKTNRRDAVTLARLHRAGELTGVWVPDAVHEAVRDLVRARQAAADDLRRKRQQLLSFLLRHGRIYSGSGHWTLAHRRWLANQAFEHAAQQIVFQDGIDAIEDAIARLRRLEEQLVAIVPSWSMAPVVEAYQAMRGASFLVAVTFAAEIGDVRRFDNPRQLMSFLGLVPAESSTGDTVRRKGLTLAGNRRARRALVEAAWTYRYPARVSETLRARLEGLPKAVRDIAWKAQVRLCARYRRLSATGKKLPVVVAAIAREMAAFLWAIGREVAPG

SEQ ID NO: 364296 - protein, 413 aa, unidentified
MLKIVYPICCGMDVHKSFLVACIASTDEHGVTTYKSRRFSTFTKDLKLCADWLKGNNCRDVCMESTGKYWIPIYNILEPSCKIVLAHPKYVKAIRGKKTDKKDAKWIADIFKHDLVSGSFIPPADIRQLRDLVRYRWKLNNFIVGEKNRAQNCLTVSNYKLDDVFSDVFGKAATNITSYLLEHPNEPLPDISNFRTKGMKATDAEIRAATDGNMCAEQAEKLRIIRSHIHDLNRCMANLESLIISTVEKYTSQLSLVMSVPGIQTFSAISVIAEIGVDMSVFPSSKHLCSWAGLTPQNNESAGKKKTTRISRAGAYIKPLLVQCALCAIRAKRNPEIRNRYLSIKKRRGHKKAIIAIARMLLTAIYNILKKNEPYNAELYTRSNNPPTHRTVSVDEAIFILQRQGYLVTPATS

SEQ ID NO: 364297 - protein, 357 aa, unidentified
MTKHKYVGMDADQSTCVIAIEDNKGNFVREAYVPTNASELIEFFKGLDGRVHVAFEEGTQAAWLYELIEPLVEDVLVCDKRGEKVRGNKGDRVDAYKLAKQLRQGELRRVYQGVRGHRELKELIRGYDYTIQDIVRTKTRLKAAFRGRGVKCAGQSVYKKTDRDDWFRKIDLEALLVRVSGLYEQLDCLTKLRKKAKDAMIAEAKKHPSYKLLVTLPGLGPVRSAQILGIVGTPHRFRTKRQFWPYCGLAVVVHESSEYEIVDGQRRRRKRPVRTRGLNKNFNRTLKAVFKGAAKTVIATDPFKPYYQRLIDKNIRPEMAKLTVARKISAITLAILKSGKEFDPIRINQAVSDSGDQ

SEQ ID NO: 364298 - protein, 376 aa, unidentified
MTMMHHRQIRYIGLDVHKATISAAIAEESGAPTSYGRIPNDPAAMRTLMTRLGGPQVELRVAYEAGPTGYALHRQLTSMAISCMVVAPSLIPKQPGNKVKTDRRDALKLARLLRSGDLTPVWVPDEAHEALRNLVRARADAKADQLRAKHRLSKFLLRQGCWPPVGVRNWSKRYVTWLHQLEFEHLPDRVVCADYLTEVTAAGERIKRLEVALYECAQSSRQVALIHALQAFRGIAFLSAVTLVAEAGDLRRFRTAPQFMAYAGMVPSESSSGGKQQRGSITKTGNSLLRHVLGEAAHHARHAPRVTSKVKQRQTDLPADIVDLAWRAQVRLHTRYRHLSGRIGALKALTAIARELAGFVWAAGQVLQEEEVPTAA

SEQ ID NO: 364299 - protein, 341 aa, unidentified
MSDYSYFCGIDLAKNHFSLHAVDQNGKVILHKSVTRSKLLTTIANMPLMRIGVEACGGAHYWVRTLNKLGHDTRIMAVKYVIPYRTKGKNYLNDAVAICEAVQRPSTRFVPVKSPEQQAILSVHRMREHWVRERTALMNRMRALLSEFGLIIPVGRSSLLKHVPLMLEDAENELPHLARTVIADAYHHLGELNQRIADTEQVFDSFAKVSANVQRVMKVRGIGPQTATAILASIGNGSQFDKSFDFCAWLGLVPKQYSTGGKPRLGRITKHGDKYLRTLLVHGAGTVIANLGDKQDKLSQWCRVVLERREMNRAIVALAAKNARIIWSLLHNQTEYENYAA

SEQ ID NO: 364300 - protein, 338 aa, unidentified
MKTYAGIDLHSSNNFTGIINEQDQRVYRKRLPNRLDAILAALEPFKDNLEGVVVESTFNWYWLVDGLMEHGYKLHLANPSAIKQYEGLKHTDDKWDSFWLAHMLRLNILPEGYIYPKEERPVRDLLRRRLMFVKHRTAHILSLQSMISRNLGANMSCSAIKRLDQEAAESLFESPHLVLAAGSNIAVINFLKERIKLIEKAVRSHTELREEFKYLLTVPGIGYILALTIMLEVGEIARFPEVGDYSSYCRCVKAERFSNGKKKDENNRKNGNRYLSWAYVEAANFAIRFSPHAQAFYQRKTAKTKPVVAIKALSNKLARATYYIMRDQVPYDPKRLFA

SEQ ID NO: 364301 - protein, 338 aa, unidentified
MTTGLAAGTYELFVGIDIAATTAEVSTQRPGAKASRSFTMDQTPEGLHRLVHTLQAPGNEPSHVLVVMEATGSYWMSLATRLVHEGFRVSVIHPSQAHHFAKALLKRAKTDAIDAQTLAQLAMVLQPEPWMPPPQIYYALQQRLAQRDDLLNLRQQVRNQLHALDQHPKVIASVRTRMENLLVLFQSQMDEVEGEIAAALNQDSAWAAAAERLQSIKGVGWVTAAWTLVTTLNFTTCDTVDALTAYAGLAPMPRQSGSSVWHRPSIGHSGNGRLRTAFYMATLTAARFNPAIKAFYNRLLEAGKPEKVARCAAARKLLHIAWAVVKKDQPFDPNYAQG

SEQ ID NO: 364302 - protein, 364 aa, unidentified
MKRKVYVGMDVHKETIQIAYLTSNTKEMVKEQQIKHNEVHIKKFINKLKTEWNEIHCCYEAGVTGYPLYRYLKSLGVNCILVAPGKIPRQSSDEIKTDKRDAIKLARLLRSGDLESIHVPSEEDEAVRDYLRSRDSLRLDLGRNRQRLMKFLLRKGNVYSTTKYWTVSHYKWLNNLHFENEILHETFNDYYSRVRVQEENLKAMDQKIQEIAKSEAFRERVGILRCFRGVDYLTAMFLLSEVNDFRRFKTAGSFMSFLGLVPGEYSSGSRRKQTGITKTGSPRLRRILTEAAWQHRFPGTGSKIVAARRTGQPALVVALAEKASLRLHKKFRNLQLRGKTPQVMITAVSRELSGFLWAAMNLVA

SEQ ID NO: 364303 - protein, 411 aa, unidentified
MRVHHNVCCGIDVHKKSVTACLMWGPADKEPQFEIRRFGTMTRDLQMLAEWLKQAGCEAATMESTGSYWKPVWNVLEGQIAKLILANAQHVRALPGEKTDRKDGKRLAELTRHGQVRPSYVPPRAILELRDLTRYRSKLLSAGSSERNRIQKVLEDANIKLGSVLSDLFGVSGQKMLQALIRQDTVDTAKVAQLAHWSLKPKMEAIQQALDGKLRDHHRFLIDASLQHMRFIEEQLMRLDEEIQRRLQPYQEQYALLQTIPGIKETGAARILSEIGPDMSPFPDGDHLSSWGGACPGNNESAGKKFQSKIRKGNPHLLAALTECAWAATKKKDCHFRNKYYRLKSRRGSQRAIIAIDHAMLKCIYVVLSQRQPYQEPKPTSLTEAQKQRKASSLCRQLRALGYDVTIQKAA

SEQ ID NO: 364304 - protein, 370 aa, unidentified
MINATTFVGLDVHARSIKAVAIDVMTGEVRSGSFGYDHVAVADWVRSLPQPAKCVYESGVTGFDLQKKLDAMGVDCVVGAVSKMIKPAADRKRKNDRNDAAFLARMLSVGNVVEVWVPDDECEAARDLARALEDAREEVIRSKQLMSKFLLRHGHVFDEPTPTGRRKKNWTAAYWAWAKSISFAEKADGEAFEYYIDRVKTACEEKARLEKLVAAEASKPRWKKRVDSLRCLKGVDVATAADLVFEAGEFSRFKNARSFAAWIGLVPSERSSGESERKGGITKAGNRHLRRALVESAWHYRSCSAHSKELAPGQDPDPAARRHAAKGVRRLVERRAALLERGVHKNKANVATARELACWAWAIGLMAETA

SEQ ID NO: 364305 - protein, 357 aa, unidentified
MAKGITTEHGITIGIDVGDRFTEAYAMDDHGEWVESWRMATKQEALRSGLSRYPGARVVLEVGCHSPWMSRQLQEEGFEVIVANARRVRLIAESDKKNDRSDAEQLARLGRLDPELLSPIVHRSEQTQRDRVLVLARDGLVRARTQLINQVRGFAKSLGSRLPSSSSESFPKRVRGAVSDDLFPGLSTMLAMIEQLTFEIRSMDREIERLSRERYGETGRLRQISGVGPLTALTYVLTLEDPRRFAKSRDVGAYLGLRPRQRDSGGQHPQLRITKAGDALLRRLLVTSAQYILGPFGPDTDLRRFGLRLAERGGKSAKKRAAVAVARKLAVLLHRLWITGEEYQAVGYGAAARARAA

SEQ ID NO: 364306 - protein, 397 aa, unidentified
MYIVGIDIAKRKHEAAVIDGEGAVIIKPFSFTNNCSGYNRLLAMLTKAKLPLDEVSFAMEATGHYWLALFTRLQKEGFRVQVINPVQTNSIRSFYIRQAKTDPRDALLIAEVIRFGHFSESTLHPENIYELRELCRGRHAIVSMQADVKRKVVALLDQVFPEYETAFTNMFGDTSMAILQTCPTPKELSEMPLEELCHLIEVSSHKRFRMAKAQELQALARNSFGFAMAGDVFSTMIRLYAKHLDFLKQQVREMDRKIAEIMDTLDTPITTITGIGPTLGAYILSEIGDISRFSSAAKLAAYAGIDPTMRQSGEYNGVRNRMSKRGSPYLRHAIWLAASSAVLHDPALKLYFQKKRDEGKPYMASVGHACRKMVSIIYAVMRDNKAYTPYIPNEISA

SEQ ID NO: 364307 - protein, 311 aa, unidentified
MNNTIGIDISKDTLDAHRLADGQHKQFLNGKTGHAQLVKWIGKQSDPLIIFEATGAYHRQLERVLCTHIIPFVKVNPKQARRFAQASGKLAKTDRVDCEMLAKMGAALQLMPKPFTAENLYDLRELLSARRALIKDRTAAKARKATVINALIKQQLEKRLRQIKNDIAKIDALMLDVAREDQYMSERLDILFSIPGIGVITALMILVDMPEIGALNNKQVASLAGLAPMSQSSGKWMGKARIQGGRPNLRNAIFMPALVAIRHNADLKTKYDRLVTAGKEKKVAITAVMPKLLVLANALLRDNRKWAEKAA

SEQ ID NO: 364308 - protein, 449 aa, unidentified
MKKRVSLEVVNPNAAGIDVGSKSHFVAVGQTKNDVKEFGVFNEDLQEICAWLTEHQIETVAMESTGTYWQSLFTVLQEAGFRVILCNGKFTKNIKGKKTDVQDCQWIQKLHTIGLLSGSFLPDQATEQLRTYCRHRSNLIDNAADTTRKMQKYLRLLNLRLDVVVKDITGLTGLKIINAICAGETCPQKLASFRNGNCKKSEEEIAKALHTNGRQDYLFALKHEYFMYQTLQKSIEECDVQIKSMLDDQINSDENKKQLYIDKKVHKRVNKNTPKNIDLNLMAYQYFDGVDLFAIEGVSHATVLSIISEVGLEGFFKFPTGKLMTAWARLVPNNKISGGKVLSHKVPKGSTRLKIALRNAAQAIGQLNGTPLSDFFKRIHSRKGPVAAITATARKLLVIIHSMVTKKQPYRNEHNYEFLDQKRKRKVQEMKKLIHKFNVSTEELGLQFQ

SEQ ID NO: 364309 - protein, 343 aa, unidentified
MDQHIGLDVSLKDTSISVRENGKRVWRGKCPSDPKLLAELIRKRAPHAKRVVFETGPLSVWFYHALTAEGLPAICIDARHAKAALDMAANKTDANDADGLAHLAEVGFYREVRVKGFDSMLMRTLISGRRQLMKMRVQMSNQIRGLLKTFGLVVPKGTGSVFERNVVSLLDGEEGLARIIFPLLKAWSDIRLRVAELTKQLVVMAGADQRCRLLTSVPGVGTVTATAFAAAVEDSINFKNSRAVGAWVGLTPKRYQSGEVDYEGHISRRGDAKLRTLLYEAASVILNRSSDTNALRTWALALKERVGFKRAAVALARKLAVIMHSMLKTGELFDPNAGAAGTA

SEQ ID NO: 364310 - protein, 343 aa, unidentified
MVVYYIGADVHSNNTELGIERKGRIVQRHSVPTSIRAIRQVLASLQGVKHLVVEEGPLAGWLYRNLKDHVDTMVVCDPRRNRLITAGGDKDDRIDAAKLAALLRGGYVHAVYHSADAARVSLKRWVALYHDRVKDATRAINKIRGCSRIYGQRVPRRALRSPAIRRAWLASLETDLAEQLRLLWMSYDTNATQVRRARQQLARRASRFPIIAAWSALPGMGPIRSTTLFAYLDTPWRFQKKTQLWKYCGVGLQRSTSGQDRYGRDRPARLSLAWAVNKQLKNVMMGAAMSAICSRANVFRQQYERRLADGAVAKNARHAVARKMLTVMWGMWKNQRPFDPGCC

SEQ ID NO: 364311 - protein, 483 aa, unidentified
MTAQTHYINIGIDLGIKAKNCAQIRDENGRKIEHDYSFYTTKEALDKICAKAQATSPEAKIRFIVEATGMAWFPIAVYGKTHNHSVVRVKAQKVKDLRNFYDRNKKYDGLDTKTLTMLPTVDPDGLQEVYLAPAKVFTLSRRCRQRERLVDTITAQKNRISSFFDWVFPGVMKCFSDPFGTVAKMFYRYYANPFKVKDKTPEELAKDLSALTNEKVDLTVSKAICEVAARVCALYENSGEYVDFEELSRELLLELELLEAYQIQLKEVELEVKRLYDEVHPGKHIESLPGISEKLGASLRSVIGEPHRFDGEKSCRAFIGFIPRQDSSGNMDKKGLPMSQAGPNWGRRDFYMAAEVGRQWDPQLAKVYYEEMVYKGHCHTQAVCAVAVRMISRVLRILKDSRDYEFRDISGRRISKKEAKAIVKERYTVSEEVRRRLRNRKKRERDNFHKGLSRDNRDTPNIRSQNNNSEVKRKRQGVILKCL

SEQ ID NO: 364312 - protein, 343 aa, unidentified
MKLIRVGVDLAKNVFQVHGIDQSEKAVWRRKLTRENWLKVLRQSVEPGCEIGMEACGGAHHWARRLQEQGFRVRLVAPQFVKPYVKSNKNDANDAEAICEAMGRPHMRFVSVKSIEQQDIQAVHRIRAELIKQRTAKANQIRGLVAEYGLVAPKELGHLRRALPCWLEDAENGLSGRFRRLLHGLWGDLQALDERLSELDREITLVAQSDPVARRLQQLRGVGPIIATALVAAVGNGEQFAKGRQMSAALGLTPRQQSSGGKERLLGISKRGDVYLRALLIHGARAVISTAKDKDDRLSQWVRRLSARSHPNVAAVALANKTARMAWAMLRNGTDYRPRMVSS

SEQ ID NO: 364313 - protein, 418 aa, unidentified
MQTELSQFTAIIGIDWADKKHDVCVQDMATGRRRAGQVRHRAEELDDWARSLHRRYGGPIAVALELSKGPIVSVLQKYDFFVIFPVDPTTLAHHRKAFTPSGAKDDPTDAEFALKLLITHSEHFTALKPQSVEMRTLMTLVEQRRQLMNDRVRSTNRLRSALKQYYPQALEWFDRIDTRLFCDFIRRWPSLSQAKRARRATLEKFFREHNMNRKALLNQRIEAIKSAMPLTTDEAVIVPYRLRAQTLVAQLEVALESIRQYDDEIAALAPQHPDYGLFDVLPGAGPSLAPRLLVAFGEQRERFKNAAELQKYAGIAPVTKRSGQSTWIHWRWQCPTFLRQTFVEWAAQTINKSYWAGLYYYQQRAKGCSYQAAVRALAFKWIRILYRCWETRTPYDEARYLKALQERGSSLLKMAEVA

SEQ ID NO: 364314 - protein, 422 aa, unidentified
MNTSNNSNNPSSPERIPPAAWIGFDWGDAEHAFVLQDQAGHRQRDKIQHSAENLHGWLKQIGQRYGGRPVAMAIEASRGAVIHALLQYPWLSIYPVNPVTSARYRKAFRPSGAKDDLPDAEVLLDLVRHHADKLRPLEPQDPLTLKLACLVEARRKIVNRRTAMLNELTSLLKGYYPQALKLMGSLDSELAVAWLRRWPDLISLKAARPATIKRFFYQHQIRSKTLVEERLALIAQALALTTEDARVSVAILQLEQLLDQVEVFQKHVALFDAQIKRVFASHPEAAFFRELPGAGPQLAPRLCVAFSASYADPASMQKFTGVAPVREKSGSQIWTHWRWGAPVFLRQTFVEWAGQTVRYSQWAKVYYQHMLKKGKKHAAIIRSLAFKWIRILWKCQQARTPYNEACYLKQLIHRKSPHALKP

SEQ ID NO: 364315 - protein, 328 aa, unidentified
MDRISVGIDVSKASFVVAVTPTGERWVSDTTPVAIDALVTRLRGRTPAIIVVEATGGYERALVAACGAAGLPVAVVNPRQVRAFAQALGHTAKTDDIDADVLAAFGDRVQPAPRPLADAATQALAALVVRRRQLIEMIGRERQRLEQAPPTGRITRDLRNHIRWLERRVSDVDDEIGTAIQASPIWRVHEDLLRSVPGVGPITARTLLAELPELGTLDRRAIAALVGVAPFNCDSGQHRGQRHIWGGRASVRATLYMAAVSAARHNPTLATFYRRLRDAGKPAKVALVATMRKLITILNAMLKHHTSWTGAVASTPASLAKRAGAATV

SEQ ID NO: 364316 - protein, 340 aa, unidentified
MEITTIGLDLAKNVFQVHGVNERGKAVLRKQLKRDQVAPFFANLPPCLIGVEACASAHHWARKLQALGHTVRLMAPQFVKPYVKSNKNDAADAEAICEAVSRPSMRFVPIKNVEQQSVLSLHRVRQGFVKARTAQANQIRGLLGEYGLVVPQGIAYIAQRVPALIEDAENELPGSFRLLIQRLLEHLKALQQQVDEIEAQIKAWHRNSEASQRLEKVPGIGPLTATVLVASVGDAKNFDNGRQFAAWLGVVPRQHSSGGKPTLLGMSKRGDAYLRTMLIHGARSVIYRATQRADADSWLVKLTTRRNKNVAAVAMANKTARTVWALLAHGREFKAGYTAA

SEQ ID NO: 364317 - protein, 354 aa, unidentified
MPETAQKAIAVVGIDIGKNSFHVVGQDERGAIVLRQKWSRGQVEARLANLPPCLIGMEACVGAHHLSRKLKALGHDARLMPAKYVRPYSKGQKNDFKDAEAIAEAVQRPTMKFVATKTAEQLDLQALHRVRERLVSQRTGIVNQIRAFLLERGIAVRQGLRFLRIELPRILAAPPEVLSPRMVHTIEDLAGDWRWLDERIERLSEEIEALARMDAACERLMSVPGIGPIISTATVAAIGMGDGFSKGRDFAAWLGLVPKQISTGDRTILGKISKRGNRYLRVLFVQAARVVLVWPQSWERHGLKPWIEAARKRLHHNVLAIALANKLARIAWAVLARNRNFEARRIGDAVAQPA

SEQ ID NO: 364318 - protein, 339 aa, unidentified
MENNNNLYYKHYLSIDWSQQDVSIARMRAGSNQPETKMFPSEIKKIKEYLKGLQGKKILTIEETAGSHWLYVELLESVDKILICDPYRNSLLKEGAKNDKIDARKLCLLLRSGLLKEVYHTSNEDYKIRKLASAYIALVKSGVRIKNQNSALYRGEGLKYKKDKIKKGEEILSFVEGQQKRAIKLYEEEKKKYEEVFKELKKKNEVIKMLCQVSGIKETSGVKIYSVVIDARRFENKYKYWAMCGLVKHDRESGGKNYGKKNPRYSRILKNVYKSAALAAIGGNNDIREYYEVLLQKGYPIAEAKNQIARYIAKVTYAVMKNKKPYKAYQWRELNKQKS

SEQ ID NO: 364319 - protein, 363 aa, unidentified
MFSERTSVGLDVHARSVAAAAIDGVTGELVQARLSPSHDEIRSWVQGLPGPVAVTYEAGPTGFGLSRALNAVGVRCVVAAPSKLQRPSGDRVKTDAKDAIHLARLLRLDEVTAVVVPTVEQETARDLVRAREDCRGDLMRARHRLSKLLLRQGIVYSGGKAWTGAHDAWLRQIGRQSFESVPLQLTYQSDYDAVLSVQARRDRLDAAIEKIATDSEFTPIVRRLGCLRGVSTLTGFALAVEIGDWHRFTGNTIGAFVGLVPSEYSSGQSRVQGSITKTGNTHVRRLLIEAAWHHRARYRPGKTMRDRWELATPAARARGDAGNQRLHQRWTRFNDRHKRHVIANVAIARELAGWCWSLAVLEE

SEQ ID NO: 364320 - protein, 336 aa, unidentified
MIYAGVDIAKTDHVIGAVDERGAEMCRPMPFKNTEAGLERAVAWLEGLAGSPSDVVVGMEATGHYWMACYSFLVARGYSVAVINPMQVKAVRKLKKLDKVKNDRIDARLIAETLRIGRYDETRLATDEVASLRSLSRYLQSLRGMAAELKTQCVCLMDAHFPEYAGIFSDMFGAGSRAVLSRSPLPFELARRRADSLARDIAEASRRGGKSAGYAARIKAAARSSIGVRLGQEAASFQVKSLIRQIEFADSECAKVEARVRALLDEVEPLVLTIPGVSYATGAQIVSEIGDVSRFRNAPALVSYAGLNSSVSQSGQFDSVGGPITKHGSPYLRRAL

SEQ ID NO: 364321 - protein, 348 aa, unidentified
MPEYIGIDLHKQTSYVTKMDAQGKILEQRNLRNDPETLRGYFAQQPADTRFAVEATGNWMYLYELIEERDPDLVLAHPLKTKAIASARIKTDKIDSTILAHLLRTDLLPAAYIPPRAVRDTREVLRYRAALVRVRTSLKNRIAALIAKTGLRPPTKTAVGVKSRRFLATAPVRPCYRLALDGYLRLLEHLTEEIQRVTEVITTQVEQDPQAQLLCTMPGIGAYSALLILSEIGDIRRFPDGRHLCSYAGLVPSVYASGGKTRLGRLTKQGSKWLRWILVECSVHAITGAPQFRSLYTRVARKHGPNTGRVAVARAMLKTIYAMLTNREAFRPIVKETAGQRHRVMTPA

SEQ ID NO: 364322 - protein, 320 aa, unidentified
MQQLGIDIAKDKFDVALVIDANADPIRFKMKSFSNSIGGFAKLTDWIGAKASGPVHVCMEATGSYWEQLAEHLCDAGLLVSVGNPAPIKKESESWSMRNKTDEVDARMIARFCLAKRPRPWVAPAPEVRQLRDLVRHLQTLEDEKQAHLNRLGVTTSEAIVGSLEQLIGFLDEQIRLLEEQISEHIDRHPRLKRACELLSSVKGIGMKTAAVIAAEMPDVSNFSSSKAAVAYAGLSPKRMTSGKFVGQTKLCKMGNSRLRKALYFPALVAVRFNPVISEFYLRLRRNGKTKMSAIGACMRKMLAIAYGVLKTDTPFKVPV

SEQ ID NO: 364323 - protein, 347 aa, unidentified
MTESVFAGIDLHSNNVMIGIVDQSGQRLKFQKLECDLQKVDQLLSSFKAQLKNVAVESTYNWYWLVDGLQRAGYPVVLANPAQIDQYSGLKHGDDKSDAFFLAELLRLNILPRGYIYDAQLRPLRDLLRRRLSLVRQRSALLLSFKSLYTRTTGQDLELRTVKSMGPLEASKLYEHPANQLIAGIQIEHIGQLSQSIGRIEKVVLKVSQKLPYYEKLTTLPGIGIILGMTITMEVGDISRFADAGHFASYCRTVAAQRFSNEKKKGENNRKCGNKYLAWAFVEGSQFAKRGDKQCRQWYDRKAARCGSIVATKALACKLSKAAWFTMAQNTVYEPQRMFGGGPAVKS

SEQ ID NO: 364324 - protein, 471 aa, unidentified
MIKSVGIDLGGIGEHKVRCLDERAQMCDGFSFDTTRAGLAKLEERVFSNGSNPVIIFEPTGLAWLLVAVYLKSRHPDSRLVRVQAQKVVALRKYLNRSSKSDKIDSLTLAKMPFIDPEKLEEIYFPPGKIYAIQRLARQRRRLENDIAGRKKRIGSIVDGHFPGIRSTFSDSWSAHARAFLRSRLNPLAVVRSGEKALCAFLTKARRHCKIEASVESHGVYLACREVATLYKASSSVGTIDDDFFSALQDEISRELRLMEIEETESAAIAKRLEKLYMELHPSDNLRTIPGVGDHTAPIFLATVGDPARFHSQSSFANYCGIVPGANQSSGSEAKGLRMTKAGPAIMRWALFQAGYIGRSHDPQLACVYYREMVHNGKNHMQAMGAVMSHMSARVLAVLREDKPYELRDKDGRLVSREEARKIILTRYQVPEEIRRERRRRKTPGSPRLQKKLREMLVPREYEAAVAPQSG

SEQ ID NO: 364325 - protein, 351 aa, unidentified
MAQKQNVVIGIDTHKDFHVAAGVDELGRVVGTLKFGVNRNGSKTLLAWASSQGELLRAGVEGTGSYGANLCRFLVQADIEVIEVNRPNRQLRRAKGKTDFVDAEAAARVALAYEQPCVPKSQDGYVEAIRALRVARNSAVKARTQVINQIKSLLVNTSEELNIKTRGLNNKKLIGHLGGLRPSNHSVESATKLALRSLAKRAGYLSKEIASLDHELAMLIETNAPRRLLDLPGVGIDVAGALLVAVGDNPERMRSESSFAALCGVSPVCASSGKTQRVRLNRGGNREANKALWRIAMVRLSHDQRTKDYIAKKTTEGKSNKEAIRCLKRYLAREVYSTLVQSTPGEWLVAA

SEQ ID NO: 364326 - protein, 377 aa, unidentified
MHDNNKTELSSLEETRPEFNPGKGAIKLGIDVHQHFYVVVMQQGGSNPKPAQRFQKEAFLCWAAKLARIHPGQLHGVYEACGFGFGLQRQLAALGISCHVVCPQKLDEHNKRVKTDGRDAKALCLKLDRYVEGNPAALARVRVPSEEEEQLRALHRVREQLVKARKQLEAQGRSLMVNHGIEPVTRWWKRRTFAALGVPEWMKELLSHSQPLLLALEEQIRALTLQLEAAAAPNQPRGLGRMTSVIIEREIGNWARFANRRQVGSYTGLCPGEYSSGQSRYQSCITKHGNPRLRAALVELAWRLVRFQPDYKPVIKWRHTLAKGALATGAARKKAIVAVARQLAVDLWRIRTGRLTPEAIGLIEKDSSRGTERTCRA

SEQ ID NO: 364327 - protein, 327 aa, unidentified
MIYLGIDVSKNKLDLCLLPGNGKKKTKTLKNHPDAARDINDWLLRQKCHPEQVMAVLEATGIYHENVAFGLHENTPVTVCISNPQRDREFARGMSILTKNDSVDAHVLALYGELKRPDAWVPPAPEVRKLRELLRLRDSLQADVQRAENRLEKAHSTRTAHEIIESLERTRKAHMDELKRIEALISDHTDNHPGLKEDRELLESIKGVGSVVSTTMLSVLRSCPFRSASQVAAWLGVVPVEKTSGSSVRGRARMSKTGPAEVRAKLYMAAVVAIRWNAPAKALYQRLIAKGKASKAALGAVMRKLVHQCFGVLKTRMKWDENYAATA

SEQ ID NO: 364328 - protein, 338 aa, unidentified
MVVIGIDPHKGSHTAVAIDEDEQKLDEVLVRADKRQLERLLAWAEAFEKRSWAVESANGLGALLSQQLVGAGEEVFDVPPTLSSRVRVLGTGKSQKNDPNDALSVAVAALRSSRLRLVVAEDHVAVLRLLWNRHKNLTSLHTQAVCRLHALLAVIVPGGMRRRLSADQASAVLAGIRPRTMAEGARKSQARDLVGDVRRLDAQMKASKRTIAEAVAAVPTTLGELSGVGPIATAIILAHSGDIRRFPDADAYASYNATAPIEASSGPRKRHRLNPRGNRQLNHAMHIIAFSQLSHAGPGRDYFERKIAEGKTQKEAVRALKRQISNAVYRQMMRDAQR

SEQ ID NO: 364329 - protein, 370 aa, unidentified
MKDHNEVFVALDVAKTKNAVAIAEGGRDGEVRYLGEFTNTDASLRKLVSRIAAKYDCLTFCYEAGPTGYGLYRLIRSLGHDCIVVAPSLIPLRRGERIKTNRRDAVNMAKLLRAGELTPVWVPDQRHEAMRELVRAREVAQKDLRAKRQQVSGFLLRIGRHYPGRKTWGKAHLNWLASQKLDHLEQRIAFEELLLAMRQAKERSDRLEQAIRDNVAEWSLAPVVVALQAMRGIDLITAAGLLAEIGDLSRFAGPRQLMGYLGLVPSEHSTGECVKRGRITKAGNIRARRLLVESAWSYRFPARVSKEKQAKVEAAPRSVREIAWKAQTRLCGRFRMLSRKGKKSTVVATAIARELCAFIWAINREVTSVV

SEQ ID NO: 364330 - protein, 404 aa, unidentified
MRSIGLDVHKRFAEVAIIDPNGGPRRAPRIPVTPAGLHAFAQQLGPNDQLVLESTSNAFPIAELLAQHAGRVVISNPMRTRAIADAKVKTDHVDAAVLAQLLAADFVPAVWIPDERIRALRRAVSRRHSLVRVRTRLRNQVHAVLIRNLLDCPHSDLFGRAGLRWLAAAALLSDERAQVEAALRLLVAVDAEIARAERTLAQAAIDDVAVRQLLTIPGVGPTTAIAVRAAIGDIHRFPRPTQLAGYLGLVPTVRQSGERAARTGRITKQGPAHARGILVEAALSAITVPGPLRAFYWRVQRRRGPQVAAVATARKLATLAWHMLSHGEDYRWTPVELTRRKVRALETAAGIPAARIRRPGAAQRRIHDQENLAQAEAGYRALITERARGGAVAAKGTRLNGSRA

SEQ ID NO: 364331 - protein, 321 aa, unidentified
MNKDTLYYGIDISKDVFDVMNEKGVHYQFKNNCTGFKEYLRLLDNQSHCVMEATGYYHYKLAYFLLENAIKVSVENPLSVKRYIQMKLSKIKTDKSDAKMICEYAKNVDLRLWKGDSKDQQACLQLTRSLSVYTKQSTALKNKIHGEEVLGIPSKDVYRSLKRLLKSIQKEMGILEKKLHELVKKEHRELLTLVESIPGIGRKTGILLLVLTDGFERFNSASELCSYAGITPVIRQSGSSVRAKARISKIGNKKLRNLLFLCSFNACKYNKACKALYDRIVAKGKSKKLALIAVCNKLLKQAFAIAKSRIPYDENYRSTLA

SEQ ID NO: 364332 - protein, 372 aa, unidentified
MAQSTALFVGLDVHKDSIAVAHAAGGSAEPPVFVGAIGPRQADLDQLLRRLQGKTSALTFVYEAGPSGYGLYRYLTAKGLPCQVVAPSLIPKKPGDRVKTDRRDAVELARLLRSGDLTAVYVPSVEDEALRDLCRARDAARVTGKDAKLRLKAFLLRLGRHYVGRATWNDAHRRYLAKVVCPTPAQQIVFQESVRAVDEQIDRIQRLDAELLERAPAWHLYPVVQALQALRGVQFLVAITVVAELGDLTRFDNPRQLAAFVGLIPSEYSSGGSRRQGGITKAGNGRARRALIEAAWAYRHPAKVSAHIQSRIDHLPKPIQDLGWKAQVRLCKRFRRLVARGKHPNVAVTAVARELIAFMWAIAKEVAVRVPA

SEQ ID NO: 364333 - protein, 270 aa, unidentified
MLGEVFVGLDVHKSTTVATVLDREGKRIDQAKLSSKDSELVEYLNRFPGLKHVVLEACNVWPHVYDAAQSTGADVVLAHPFKVRVISEASLKSDKVDSSSLARLRLLNSVPMAYAPEPPVRNLRQLVRDKVFYISKERDVKNHIYSILLRKGIPYEDGILALKRKRESLRELHLPEIDRGLDMLVSIEEGCKDLDKEVHEAFLASKEAQLLRSIPGIGEITAVALVAELCPIDRFPNIEKLCSYAGLVPTNHQSGDASYQGHLKPDGLCR

SEQ ID NO: 364334 - protein, 363 aa, unidentified
MVETRSVVTASKHQKEKRSMDHFAGLDVSVKETSICIVDDTGKIVRELKVASEPEALLAVLKNPAYNFKRIGLEAGPLSQWLFGALAEAELPVVCVETRHMQAVLKAQINKTDRNDARGIAQMMRVGLFRPVHVKTIRSQKLRMLLTHRQLLQSKAIAIENDLRATLRNFGLKVGMVGKVRFEARIKELVENLPDLAALVEPLLIVRRVLREQMVILHRRLLAVVRDDEVCRRLMTVPGVGPVVSLTYRATVDAPARFRKSKAVGAVFGLTCSKYQSGEIDRSGRISRCGDEMMRVMLYEAAQSMLRSKKWSWLKAWAMQIARRRGMKKAIVALARRLAVIMHRIWVDGTEFRWTREQVPAAA

SEQ ID NO: 364335 - protein, 356 aa, unidentified
MEYGAIDLHKKESQIRIVRESGEIVDRRIATTRDRLTTMFWGRPPMQILLEASTESEWVAQHLETLGHEVIVADPNFAPMYGHRSRRIKTDRRDVAALADACQRGCYRAAHRRSAAQRTVQSRLNIRRELTDSRTRAISVARAITRGAGFHLRSGSTESFLNRITALELPSSLTETLSPLRNMIEALNEELARADDTFAQLVAEDPVVTRLTTLPGIGPITASAYVAALDDASRFGRAAQVASYLGLVPGEHSSGEQQRRGHVLRSAHPQVQSRCSSRPPGGWGDRTPPGLPVSEPGPKALLVGAGRRLPWSHWRDALRASCSRCGETGYRMTPHGFDQLERRWPRRSSTARRGRS

SEQ ID NO: 364336 - protein, 446 aa, unidentified
MKKSSRMSVIHPHAAGVDIGAEFHVVAVPPDADAAPVRTFQRFTGDLHRMSDWLKTCHITTIAMESTGVYWLPAFEIPEAAGFNVILVNARDAKNVPGRKTDVNDAQWLQKLHSFGLLRASFRPEHDISVLRSYLRQRERLTEYRAAHIQHMQKALMQMNVQLHHAVSDITGVTGLSIVRAIVSGERDPSVLIQYRDVRCKKTPEVLQQALTGNWQPEHLFAPEQSVAFFDFYQEKIRECDDQIETSLLQLSTGTEEPEGVLPSARHRTKQPNQLSFDVRPLLWKITGADLTQIHGFGPYLALKFVAECGTDMHRWPDASHFTSWLCLSPGNKISGGKVLSPKTRRSSSRIAAALRLAATTIGRSDTALGAFYRRLSSRIGKAKAVTATARKLAILFYNALKYGQKYVDPGADYYEERYRNRVLDGLKRRAKSLGYSLQQDPELCV

SEQ ID NO: 364337 - protein, 393 aa, unidentified
MFIVGIDVAKRSHEAVIINDSGNVVKKAFNFTNDFKGFSKLLEAIHSVSAEPTDFIIGMESTAHYWLALYSNLRKVHYTVRVLNPIQSNALRGLYIRQIKNDERDCFIIAEVIRFGRHPIGELPPPKLYELRELCRARTFIMDMVADLKRKVIALLDQVFPEYETIFANIFGDTSSELLRNCSTPEEILAIDIKKLAKLLEAPSRKRFSTKKAHEIQEVAATSFGIVLGFDSMSFLIKQHIEHIQYTEKQIDIIDEKIATIFSQFNTYLTTIPGIGLTLGATIFSEIGDITRFPSSAKLAAFAGIDPSIQQSGEFMANHNHMSKRGSPYLRRALWQASTLAIMRDSALKTFFDKKRVEGKSYMTAIGHVTKKLTNIIFAVLRDLKPYYDNDKT

SEQ ID NO: 364338 - protein, 390 aa, unidentified
MDQLIERCCGLDVHRDTVVACVRGPGPNGRRQHEVRTFGTTAVELLALRDWLEAHAVTDVAMESTGVYWKPVFYVLEEAFTCLLVNAAHIKQVPGRKTDVKDCMWIAQCLEHGLLRGSFVPPAPIRELRDLTRHRKVLIQERTRAANRLHKLLEDAGIKLASVATNILGVSGRAMLEALVHGTTDPAVLADLARGKLRKKLPALRQALAGRFRPHHAFLVSQLLAHVDYLDEAITTMSEEVEGRLAPFAAQLTQLDTIPGINTRTAEVIIAELGVDMSCFPSDRHLASWAGICPGNNESAGKHQSGKTRKGNRWLRMTLIEAAGAAIRTKDSALGARYRRVMRHRGHKKAVVAVAHAMLRAVYHLLAEGTTYREPGADYYDRHHKRLTST

SEQ ID NO: 364339 - protein, 310 aa, unidentified
MERIFIGIDVAQDRLDAHVRPSDESFAVARNSDGMAALIERLRTLDPYLVVLEATGGFEVTVAAAVVAAEIPLAVVNPRQIRDFARATGQLAKTDALDAKAIARFAEAVRPQPRPVPDAQARALGELVARRRQIIEMMTAERNRRRQLTSRRLVKSVDRLLTVLQQELSELEQDLDEGIRGTPAWRERDELLRSVPGIGNVVARTLIADLPELGRLDRKQIAALVGVAPINRDSGKMRGKRTTWGGRAKVRCILYMAALVASRYNPLLKAFYQRLTSAGKAKKLALTAVMRKLLTILNAMIRDNTRWQSA

SEQ ID NO: 364340 - protein, 337 aa, unidentified
MTTLTFGLDIAKNVFQVHGVDGQCKLRLQRKLRRGEVLRFFARLEPCLIGIEACHSSHYWGRELSKLGHQVRLIPTQYVKPFVLGGKNDANDAAAVCAALRRADIHSVAIKSAEQQSVQSLHRMRERLIHERTAKSNQIRSMFAEEGFVFATSIGKLRSSVASLVGNPNATVTPLLRRLGAMYLEQIATLERWLAELTTQLRDIFSQREDCQLLASVPGIGPVVATALVGTVGDPRQFKNGRQFAAWVGLTPRQRSSGGKVRLGRISKRGDTYLRTMLVQGARAVMRFMGRRADRQALWLQRLVQRRHQNVAVIALANKIARIAWAVLARRIAYSPA

SEQ ID NO: 364341 - protein, 343 aa, unidentified
MEFYVGLDVSLKQTSICVVDQTGSVVREGVVDSDPEAISVYVKSKAPDAVRIGLETGPTSTWLWTELKRLGLPVICIDARHAKAVLKMQINKSDRNDAIGIARIMQTGWFKEVHVKDIDSHSVRALLASRALLVKIKRDLENHVRGLLKNLGLVIGRAKFNVFAVRAEELIEGRPELIAAIRPLLEARNAVGQQVSELDRKVMKLARHDAQVRRFMTAPGIGPITALAFKATIDDPARFARSRSVGAYVGLTSRRHASGEVDWTGRISKCGDAMLRSYLFEAAGVLLTRVPKWSAVKAWGVRLAKRNGLRKAKVAVARKLAVILHRMWIDGTEFNWSKQEIAA

SEQ ID NO: 364342 - protein, 347 aa, unidentified
MIIIGCDFHTRTQQIAMLDTETGEGVEKRLDHESGEAKRFYEELKEPALVGIETTGYTRWFAEMLADLGHELVVGEAAKIRAKDPRQQKHDRRDAELLLNLLVRGDFPRVWLPSAEERDVRVLIEHRHQLVELRTRAQNGLQAIALSYGLRRRGRLWSARGQDELKKLPLREGMGRRREDLMRLVRQLDAWIQELDKCIEQEVARREDAQRLMTHPGVGPQTALATVLVLGPVARFPDDRHLTSYLGLIPQEDSSAGRQRFGHLTKQGNRLLRFLLVEAAQTASRYDPRLRRAYRRLAFRKGMALAKVAVARKLAIRLYIMLRDEIDYAEFCRRGSQAGMLGDVALA

SEQ ID NO: 364343 - protein, 351 aa, unidentified
MPCKKDVAVVRAIGIDTGKNTLHMVGLDEKGAIVLREKVSRGRIAARLVNVPPCLIGIEAGMATHYLSRELLALGHQVKQVPPAYAKPFRQGHKNDFRDAHAVAEAVQRPSARCVPIKTDDQLDLQALHRVRSRLIGDRTAVINQIRGFLLEHGIPVRQGPRFLRQQLPQILATRTDVLSPRMVRIIADIVDDWGYLDERIERVTDEIEELARTEVSCGQLMTVPGIGPIIASAMVAAIGNGTAFAKGRDFAAWLGLVPKQMSTGDRTILGRITKRGNRYLRMLFIQGARAILLHPTSWAKHSFGPWLTAAARRLHRNVLVVALANKLARIALIVLVQGRSYETRIEPAAA

SEQ ID NO: 364344 - protein, 413 aa, unidentified
MLCIGIDWADDKHNICVRDPRDRRILAELVISHDAAGLKQLDQLVADLSFKPTECLVAVETRHGLLVGYLLQTGYIIYPISPLAVDRYRDRHRLSGAKSDQIDARTLSDILCVDLEYHRPIPADSPLAQEIQLVSRQRQALVREQTRLMNQLTACLKAYYPVALELFSGLDCAITWAFLRRYPHAEAAAQASLEELKTFFAQQGYTCKRKIPGIYARLQAPAIPVVEWQVRVFQRQMLLLVDLLATLVPQVQAYERELGRLLDQHPDAFIFHSLPNAGDVTAARLLGEIGDCRDKFESANAIQALAGSCPVTTQSNKRRIVKFRKGCCKPFRDGLQQFARLSARGKKGSSWAKGYLSDQLALGHSVSRATRALGNRWLVIIHRLWKDRVAYEEKIHLRNRVRRGHQVAAENLS

SEQ ID NO: 364345 - protein, 288 aa, unidentified
MEHTRFVGLDIHKERISIAVAESGRSGAVEYLSEIANEPGAISKLCDRLRRPGKPLAFCYEAGPCGYGVHRQLTRLSHRCDVVAPSLIPTKAGDRVKTNRRDATMLARLHRAGELTPVWVPDADHEAMRDLIRLRGVVRQIVTRARQHLQGFLLRHGRKHGRGTAWRMAYRRWLSTLAFEHPAQQIAFQDYVDAVMDAEQRLQRVEEQIFSLLPEWTLRPVVDALQAMRGIALINAVVLVTEVGDFTRFSNPRQLMAYFGLVPGERSSGETIRRGGITKTAAHPTTLS

SEQ ID NO: 364346 - protein, 359 aa, unidentified
MHTMLAGAVQFVIGVDTHRDTHTAAIVEATSGGVVDHISVPTDAFGYRRLKAFADKHAASTRVWAIEGTGSYGAGLTTSLLEHGEWVVEIDRPARPARRDGAKSDDLDAVRAAREALSREHLAAPRARGDREALRVLMAARQGAVVARTKAIGQLKALIVNAPQSLRDQLRRGTTDEQLQRCARLRTLPSHSIEHRATIRAIRGTARRALALEAEAAEYETELEQLVVAICPVLIAQPGIGTITAAQFLMSWSHAGRIRSEAAFAALGGAAPIPASSGAVTRHRLNRSGDRQLNRALHTVALSRLRIHAPTKAYAARRTQEGKSAREIKRCLKRAIAREVYRLMETHAAAVAASLPKAA

SEQ ID NO: 364347 - protein, 347 aa, unidentified
MNGRTIGLDLAKNVFQVHGVDEHGKVVLRKQVTRHQVAAFFANLPPCLIGMEACGSAHHWARKLQSMGHVVKLMAPQYVKPYVKTNKNDAADAEAICEAVTRPNMRFVPIKNVEQQSVLALHRVRQGFVKARTAQANQIRGLLAEFGLILPQGIGHIVNQAPGLIEDDRNELPGSFRLLIQRLLDHLKALDKQVSELETQILAWHRQSELSKKLEQIPGIGPITASALVASLGNAKNFDGGRQVAAWLGLVPRQHSSGGKQNLLGISKRGDTYLRTLLIHGARAVIFHATRKTEPDATCNWVNQVVNRRNKNVAAVALANKNARIAWALLAHDRQYQAGYIPTKLCA

SEQ ID NO: 364348 - protein, 340 aa, unidentified
MPLYGGIDLHANNSVVVLLNEQDQVVYEKRLPNHLPTVLDLLDPYRAEIMGFVVASTYNWYWLVDGLMEAGYRVHLAHPAAMQQYSGLKDTDDHSDARWLAHLLRLGVLPEGYIYPKAERAVRDLLRKRAHLVRQHTANVLSVQNILVRNTGTRLSIKRIRELTKQELEGLLPEVAQVLAVTSSLAVLACLSHQIKTLEQTVHKRLKHTPSYEQLLTVDGIGTILAQTIALETGTIGRFPTVGNYASYCRCVDSSKIRNGKRKGQGNVKNGNRYLGWASMEAAQFALRFHPSAQRFYQRKLAKSNNNTTLARKAVAHKLSRACYDSMRDRVPFDALKAFG

SEQ ID NO: 364349 - protein, 343 aa, unidentified
MKLIRVGVDLAKNVFQLHGVGRDERIVWRRRLARDRWLETLLEKLEPGCEIGMEACTGAHHWARQLQREGFTVRLIAPQFVKPYVKSNKNDATDAEAVCEAMARPSMRFVAVKTLEQQDIQAVHRIRSGLIEQRTAKANQIRGLVAEYGLVAPRELGQLRIALPRWLENAENGLSSRFRRLLSGLWDDLKVLDDRVCELDREIAAIARNDPRAKRLQRLRGVGPIIASALVAAVGDARQFANGRQMAASLGLTPKQHSSGGKERLLGISKRGDRYLRSVLIHGARAVIRTAKGKNDRLSLWITGLAARRHPNVAAVALANKTARIAWAMLRNGTDYQPELVRG

SEQ ID NO: 364350 - protein, 344 aa, unidentified
MTYYAGLDVSLRSTHICVIDDDGELLAEGKTDSEVADIIAFLDEVDIEITEVGFEAGTLTQYLTYGLQFAGYEVVCMEARQVKAALSAMRNKTDKNDARGIAQLLRSGWYSRVHVKSIESHQIRALLSSRKAVLAKCIDLEQEIRGLFKVFGIKLPARLGHGSFDPKVRPLIEADQELSQSLLPMLDARLVLYRTFLKLEYRVRNLAKQDPICQRLMTAPGVGPITALTYKAGVDDPTRFRRSRTVAAHLGLTPRRFQSGEIDFDGHISRAGDANVRSTLYVAANSMMTRSSQWSPLKAWGMKLAQTRGHKRAVIAVARKLAVILHRMWIDDTQFRWSTEAARS

SEQ ID NO: 364351 - protein, 344 aa, unidentified
MTSMHFIGLDIHKKTISYCVKEVSGTVLSEGTIAATRAQLDDWVKTLPVPWTVAMEATMFTGWIYDHLLPHAAAVKVAHPLMLRAIAAAKKKNDRIDASKICDCLRCDFLPECHMVSAEVRERRRTLRYRKLLVRQNVQLRNKVSQMLMESGVVYNKQKLHKVGYFKELMETNPDISRELKPLLAICRETIVRIGKTESALIRSLRRDPLLHARVERLMTIPAVGPITALTWVLEVDDVARFHSVKQAVSYCGLCGAERSSAETIKRMPISKQRNKHLQSVLIEAAKLAPRLSPELALVYDTEKQKGHANRASIAVARKLVAYLLAVDRSGREFVVAGERRAAA

SEQ ID NO: 364352 - protein, 374 aa, unidentified
MTITANESPTTVSEVILGIDTHKDVHVAVALNQLGRRLGELTVPTTTKGYEKLFRWAEGFGPVCCAGVEGTGSYGAGLARWLKAAGISVMEIERPKRRHLRHKGKSDPIDAEAAARVVMADDTAGEPKSGDGQVEMIRTLRSVRQSAVKARTQAANQLQALLVTAPESLRHRLRELTTRDLVDTCGRFRPGSEPDEMHTATKFSLRSVARRYQLLSEEIAELDEQLDRLVAKAAPQLTALPGIGTDHAATLLSVAGDNPQRLKSEASFASLCGVSPIEASSGKVVRHRLNRGGDRDANRSLHLICVVRMRHDQRTREYVARRTAEGKSKREIMRCLKRYIAREIYRLLAPRAAASPPTASVSQAAYPRKVAAQP

SEQ ID NO: 364353 - protein, 435 aa, unidentified
MPERQDVFVGIDVSRRNHQCSFVNNERKPVCKTLKINEDREGFQTLKEKMCAIAHEKGSVRFLIGLEATGHYHQNLVAFLQSIDNLDVRVSCINPVQTKRFIQMLMLREQNDKVDSRAIAEFMCVQRPDQTSKKRSEMRPLRDLSRLRDQLVSQKTAHINQLHALMDQVFPEFEQVFPDIKNEPLAWAVLHCYPCPRNILTAKTSRLMTVQNRKGGRYLGEEKALQLKALATQTIGSSKGEVYVFQIKVLTQNLRSLHQQIEDTEKEIENTVNSMDLPPWKTIPNLGVLTMATLLGDVGDPRLFGTAKKFSSFLGLTPRGKQSGSSVNRKGHISKCGPSHIRQKLYMCVVSALATKKNPLILDVYNRLVSKGKPKNLAIVACMHHLARVIYGVFKYNQPFDPEFIVAKRSLGLPQNGNFSTSIHGINIPRPINKI

SEQ ID NO: 364354 - protein, 389 aa, unidentified
MGKVVMGVDPHKRLNAVVVVNAKGKVLARQQFSNSAEGFRELRSFARQWRPRTWAIEGCNGVGKHLAQRLVAVGERVVDVSTRRAALVRVFAGGNGRKNDDLDAHSIALVGLHTPDLPEVREDNRSAASRLLANRRKELVDLRTQCVNRLHRDLVGLIPGGAPRALTAAKAKALLASVRPRDEVGRLRRRLAADQLADLVGLDNKLAAVEAEIRALVKRTPTGLPSIYGIGPVITATILGEIGDVARFRDRHHFASYNGTAPDDKGSAGRPVHCVNLKGNRRLNHAIHMAAITQIRNRRSPGRAYYDRKLAEAKTKKEALRCLKRRISDVIYRQLIADAERQAMAGPGGQTGTTLQSSVTGPTPTTGSSDKPQPGPTPETTPTPLANTA

SEQ ID NO: 364355 - protein, 340 aa, unidentified
MGSVLRKKRSRHSMSAFVCGLDVHKDSTYATILDPSEKIVNQTRMSNERVLSYLSHFSVCKVGMESSNQIAPLYRKLASKGYSVVVSHPKETRYIAEAKIKSDRVDSKAIAELVRLDALPLAYFPDEETAILREKVRRRAFLVRSRVKLRVKIKSALTYEGLKWPSDNGLFTRKGVEWLHGLNLQPVESYVQVMKPLDDEIMLLSKELRGMAEEDVELLMTIPGIGYYTALLMKSEIGDVNRFPFGERLCSYAGLVPSTHASGRTVRHGGITKEGSRWLRWVMVEAAQTHVHKYDTSITRAYNRIAEKRGKRIAVIAAARRLLMCSYSVLKNKRPYYDQA

SEQ ID NO: 364356 - protein, 431 aa, unidentified
MLKINPLSTLYVGIDVSSKSNYVCALDFFKNKYINSSFANNQPGAEELALKILECLNQHPDLTMVVAALESTSVYSIHIANYLSSCEELMRFKPYVFVLNPKCTANYKKSYIGLGKSDPIDAFVIADYARAGNIESEPWRGSQFLALKRLTRHRLHLVECMTREKTYLVSNLYLKFSELQMLEGDDQPFCDIYGATSSSVLMEYLSPEEILASSEEDLIAFLAEKSRNRIKDISKTADLLKKAARDSYRLDKALYEPLNVSIASSFNCIETFKREIKVIDNAIEKEIKGLNPNAFIILQSIDGIGPVFAGGIIAEIGDITAFHSSDALAKYAGLTWKFNQSGDFDGEDTPMIKAGNRYLRYYLGEAANSMRKHNVEYGTYYRKKYNEVPKHQHKRALALTSRKFVRLVYGLLARNQLYSGVSLDTSIKNSN

SEQ ID NO: 364357 - protein, 340 aa, unidentified
MSTINVIGIDIGKSTFHLVGHDSSGREVCRKKLSRPKLVLFLANTKRTIVAMESCGGSHWLARKCQEFGHKALLIPPQYVKPYVKTNKNDFIDADAIAEAATRPSMCFVSIKTESSQVISVIQRIRSSYLKDRTACMSRIGSILLEFGMSFPKSHAKMKALFQWIADFGEPIPALLLLELRDHHEYYLKLNQLILTQDKKLKEIVDHDERAQLLKTIPGVGNLTASRCLSDISNAADFKNGRHLAAWIGLVPRQFSTGGKPRLLGISKRGNKGLRELFIHGARAVLARPENAIATFGNWILELLSRKPYNVVVVALANKLARIAWSVLSTKQAFEVRVQA

SEQ ID NO: 364358 - protein, 378 aa, unidentified
MNRIIKIGMDVHTTNYTLCIFEPSFEHDGTVHCITQVKPEIKNIIHVIEAFKKKHENEELNIVCGYEAGCLGYSLYHELKEKGVECVILAPTTMKTEKGGRKLKNDYRDAKMIAECLAYGGYSAVHVPTELDNSVKEFIRMRDDIKENLKRIKQQIIAFLTRNGKQFNGKNYWTKKHIDWINTISFSEPLLQDTLKEYMIEYNHLCDRVETLDKQIEEISVKEEYVEKVQQLQCLIGIKTHTALSLIVETSDFNRFKKGNMYSAYLGLIPGDDSSGGHENKLGITKAGNSHLRRLLVEAAQGYTRGKVGFKSKDLKARQEKCSSEVVAYADRANERLRRKYYRMILRGKKYNVAKTAIARELACFVWGIMTNHIDLCS

SEQ ID NO: 364359 - protein, 411 aa, unidentified
MDSVLYVGIDTSLGAHVVCAMAADGQVVARTTVPNDQAGAEQFVAWLHPHAAPYARLAIGVEATSVYHVPLMEWLTQTPDLQRWQPTWYVLNPKVVQKFRETYVDRGKTDRADAALIADVMRFGRVTPWTPPDPRYAALQVLTRHRRQLSHLITQEKNRALVQLFCVWGQYAHTEEPFFSNVFGVASQTVLERYTPDTLAAIPLADLVAEIAAAGRQRLKAPDDIAQTLHRLARRAFRLHPDEQDARHQSLVLHLDTIRALEHQQQALDKVIARDMQAFRQTLTTIPGIGPVYGAGLLAEIGPIERFPSENALAKYAGLTWRPHQSGNFDADIRPLTRTGNVYLRYYFIEAAERVRVRDPQFKAFYEKKYHEATHHAHKRALVLTARQWVGVVYGMLTRGQIYDERKLMPH

SEQ ID NO: 364360 - protein, 321 aa, unidentified
MTYVGIDVSKVTFVVAYSSVKTNKTRTFKNTVNGVHEFVQTISASEHNCVLEATGNYSALLVYLLSEAGITISLENPLKIKNFARVMLTVTKTDEIDARLIALYGEKMQPAPYKLRSDAILVLKQKRTVLRQLKKQLVATRNLKGSMEVLPFFDPKCKKTIEKTITFLEKQIKEMEEELASLAQGEYKKQMDLLTSIKGIGVTLAAALIVATGGFSYFDNAKQLTRYLGLSPTYQQSGTSVNVKGHINRNGDSSLRSQLYVAAFSSLRCNTECKACFDRLRSNGKPAKVVVIAVANKLVRQAFAVVTQGKPYVDGFKSEKP

SEQ ID NO: 364361 - protein, 475 aa, unidentified
MRAKPKQTPEPEEIPDAEHELVIERVCAIDVAKASGKVCVRTPGRRRVSRVWDVSAMTGAVAELAEQLVELGIEKVTVESTSDYWRIWYYLLEAAGLDVQLVNARDVKNVPGRPKTDKLDAVWLAKLTEKGLLRPSFVPPQPIRQLRDYTRLRVDLIGERVRYWQRLEKLLEDALIKVSSVASKMDTQSVRDMIEALIAGERDPRRLAGLARGKMRPKYAALVEALTGQFDDHHAELARILIDQIDALTVQIAALTTPIEQRLAVMLGDQEPSGSAGGPTGADWRGTRPEQTVGTRSTSSIELSADTLAECAALTTIERLDEIPGIGPQTAQAILAEIGLDMTRFPTAAHLVSWAKLCPRTIQSGAKQRSGKSGKGNPYLKGALGEAANAAAKTDTFLGERYRRIVKRRGKLKALVAVARSILVIVWNLLTDPTARFHDLGPDYHTNRIATERRMRNHIAQLIAMGYRVTLEPAA

SEQ ID NO: 364362 - protein, 347 aa, unidentified
MMTIGIDTHKATLAVSAIDGTGRETGARTFPNDRQGHVGLLRWAQAHGSERRFGIEGSGSFGAALARLLVAAGEAVVEVPAILTERERRHLRRAGKSDPGDALAIARVALREAGLGPIPMPGITEDLKLLVDARDQRVGERTRIANRLHAHLVVLAPGYKREIRNLTAARHLAAVADLLDRLGGVRAELARAELARLRELEAESVVLEGRIRSLVRLTGSSLPTITGVAAITAAKLLGETGDPRRIHSTPAFALMSGTAPIPASSGQTSRHRLNRGGNRQLNRALHTIALVQARTDPRAQAYMARRMAEGKSWLEALRCLKRHLADVVLRTMLADLERSAKPAAMGA

SEQ ID NO: 364363 - protein, 307 aa, unidentified
MAVSGLSPKELTKEAPNIMLHVGLDLSRRRLDFDLLCEDGSRIERGAAPPDADGLRGLVRRVDVYQEPVCAAIESMNGARFVHDRLEELGWQVELADAQKVKGLAPLACKTDRIDAWVLAELSRRDLVPAIWLPSPTVRQERERARWRLHLVRHRTALKNRVHATLIAFGKPCPVSDLFGSRGRQLLARLDLPDPWAQTVSASLSLIEDLDVQITDCERELRVLGADHEYVPLLMSAPGIAWVLGYTIAAEIGDINRFASPTKLCGYTGLCPRVNQSGEHDHRGSITKNGPKYLRWALIEAAVHAVC

SEQ ID NO: 364364 - protein, 410 aa, unidentified
MTLFCGIDWAESHHDVAIINDTGTVVVKARIGDDAAGFARLLDLFAEAGDTAVNPIPVGIETDHGLLVSALRATGRTIYAINPLSASRYRARHQVSGAKSDAADAVMLANIVRTDADAHRPLPVDTELAQAVRVLARAQQDAVWARQQLGNQLRSLLKEFYPAALDAFAGQPEGGLARRDARTVLAAAPTPALAATLTRARLRTMLAKAGRRRNVDHDVDRLYGVFRSDRLRQPPAVENAMGIQFSALLSQFEAACAAADDLAEAARTHFEQHPDAEIITSFPGLGLLAGARVLAEIGDDRTRFTDPRGLKAYAGSAPITRASGRKTVVSHRHIKNRRLAAVGPIWALGSLRASPGARRHFDARRAAGDWNHQAQRHLFNKFLGQLHHCLQTGCLYDEHQASPPPLAAAA

SEQ ID NO: 364365 - protein, 376 aa, unidentified
MTMIGAERPDTEIGVILGVDTHLDFHVAVAMDHLGRRLGESSVPTTVKGYEVLLSWAEDFGPVRYAGVEGTSSYGAGLARHLRASGIEVLEVERPDRRRRSSRRNLQKSDSSDAEAAARAVLAGQTSGVPKSTDGTVEMIRALRKARCSAIKARTQAANQLQGLRVTAPEQLRRRLRGLSTKELVSVAARFRLADGPNDVPTATKFALRSVARRYETLSAEIAELDAHLDRLVAQAAPELVSLPGIGTDSAATLLIVAGDNPRRLRSEASFASLCGVAPIEASSGKVVRHRLNRGGNREANRALYMICLARMRRDRRTQEYVARRTQEGKSKREIIRCLKRYVAREVYRVLISCGARSLPTGPKEEAQIAAGSNAA

SEQ ID NO: 364366 - protein, 337 aa, unidentified
MQATTIGFDIAKSSFQVHGADERGKTVLRKKLARGRVLEFFANLPPCVIGMEACGSAHYWARELVKLGHEVRLMAPQYVKPYVKTNKHDPADAEACCEAVQRPGMRFVPVKSEQQQSCLMLHRIRDRLIAERTGTINAIRGHMAEFGIVAAQRRAGLKDLLAIVSDLGDERLPPLARELLVDQAEHLRAIEARIADLDGRLVRQTRDDEACRRLTEAPGVGPVIATAVVATVGDASLFNSGRSFAASLGLTPRQHATGGKERLLGISKRGNGYLRRQLMHGARSLVRVAKGRNGQPWAWINELLARRPFNVVVAAVANKLARIIWAMLSRGEGYGTA

SEQ ID NO: 364367 - protein, 346 aa, unidentified
MEHYVGLDVSLKLTAICIVDRTGKIVREGVVASDPLLIAAFVKSHAPYVVRVGLETGATSTWLWTELNKMGLPVICIDARHAKAALKMQINKSDRNDAIGIARIMQCGWYKEVRVKDLDSHTIKALLVGRALLVKIKRDIENQIRGLLKNLGLIIGRAKMNVFAVRATELAGHRPDLAAVVEPLLKARDAVGQQIANLDRKVLRLARNNAQVRRFMTVPGVGPITALCFLATIDEPTRFRRSRSVGAYVGLTTRRYASGEIDWTGRISKCGDKMLRSYPYEAANVLLTRVAKWSALKAWGVRLAKRNGLRKAKVAVARKLAVILHRMWIEGSEFRWSSKEAASQPA

SEQ ID NO: 364368 - protein, 411 aa, unidentified
MRIIGLDIHRAFAEAVAWQEGKLKRIGRIDMRRDQLTAFAASLLSTDVVVVEATGNAAAVAAVISPHVRRVVIANPMQVRVIAHAKIKTDTIDAGVLAQLYASGFLPEVWIADEATQALRRQVTRRNQVVRQRSRLKNIIQSILHAHLIPACPVADLCGPKGRAWLSEQVLPDDERFAIERHLREFDRLADDLRVIERDLARSALADESVARLMTIPGIDMVVALALTAAIGDIQRFEAPEKLVSYLGLNPSVRQSGPGPAHHGRITKQGRGHARGMLVEAAWAAARAPGPLRAFFLRVSSRRGQHVAAVATARKLAVLIWHLLHKGESYLWARPALHAKKMRELELKAGHPAARGQKGAAHAYNLKSHRDQERRWVEQAEAAYARFVAGWNPRGPRSGKVRTGALKEERQ

SEQ ID NO: 364369 - protein, 405 aa, unidentified
MDDKLDYVMAIDVAKGKSMFYILSIHGEVVLDTIEYEHTLSNFGLIDLKIREERIKQKLAVFMESTSIYHYPVMRYFLEQGYKVIVVNPNLVKKSSTTFRRTKTDRLDSIKIAETYFKEEIKSNAVKTGRLYDDLQAANRQLLSIEKALTAIKNRYTRLLDICIPEHEEFYTSKGDKYNKKYITLFQYLPHSEYIQRTRVDRITNILNLPFEWDYKKRLTKEAIKLKGISKNSYPGVSKHSNEVENLGQTISILKNLINHHEQAKQRLISLGKQSKEYKYINSIPGIGEQSASQVIAELGDISRFRNYKQINAYCGLEPSIYQSGKAFYNGHITKSGNGLARKVLYTTIMGIIKSSRSYYPEHPINVYYTKKKENKSTKESVVASSTKLIRIIFSLCKNELTFTR

SEQ ID NO: 364370 - protein, 401 aa, unidentified
MKQSNATQQAVVERAVAQRVSAAGNVHAAYIGLDVHKVSISVAIAETGRQAPEFRGEIPNEPKAIDKLVRQLSERFAGQPLLFSYEAGPCGYGIYHQVQASGHDCEVVAPTLIPQRAGDRIKTDRRDAQMLARLSRSGELTPVWVPTPEQEAIRDLTRAREDMKAGELRARQRLNAFLLRHSKIYPGKSKWGPAYFRWLEETVRFDTPVQQIVLQEYVDHVKEAQRRVAGLEKQMEAALPTWSLAPVVESIQAMRGVSLITAMTVLAELGDITRFDSPRQLMAYLGLVPSEHSSGGSRRQGGITKTGNGHVRRVLVEAAWSYRFPARKTRIIEQRAEKTSPTVQAIAWEAQKRLCGRYRRLSATGKAKQQVTTAVARELAGFLWAIACEAMGKPHGSRATA

SEQ ID NO: 364371 - protein, 348 aa, unidentified
MTMVCGLDLHRRQITFDALEVESGQVWTGRLWQPDRQRFRRWLRDDVAERAHGGPVSIAVEGCTGWRYVVEEVVAAGFEAHLAEPADTQAARGRKRRAKTDRSDCRLLRELLQDGRLPASWIAPTIVLEWRERARLYKTLVDQRSTWVQRIHAELYQHGVPLPETSIRWAKTRELLEDDGLEISPAGRQRVLTAYRMIDAITIESRPLKADLQRFGRRQPGCRALVEHQYGIGGLLAVTMWSELGDCQRFARSEQVVRHSGLDVTVDQSDRRRAGGFISRQGPQTLRWALYEAAKNASHQRSPDHDYYADVKDHLNGKLATISMARKLARRCFHVLRAVDPDLVYATA

SEQ ID NO: 364372 - protein, 375 aa, unidentified
MEGAPMLDTTTFIGLDVHARSIKAVSLDVMTGEVRAATFGYDAGAVAEWVRSVDPRARCVYESGVTGFDLQKRLSGLGVDCVVGAVSKMIKPSADRRRKNDRNDAEFLARMLSVGNVVEVWVPDDECEAARDLTRALEDARDDLSRSKQRLSKFLLRHGLVFDERTPTGRRKGNWTRAHWSWIESIRFAEGADNDVLAYYVDAVRRAAEEKARLEGLVEAEARKPRWRKRVDSLRCLKGVDTASAADLVFEAGEFSRFRNARSFAAWVGLTPSEHSSGESDRRGAITKAGNKHLRKTLVEAAWHYLTCSGRPKDLARGQAPDRGARRHAAKGVRRLVERREALLARGVHGNKANVATARELACWVWAVGLMAEEA

SEQ ID NO: 364373 - protein, 402 aa, unidentified
MNAVGIDISKGKSTVAIMRPFGEIVASPFEVNHTDSELRDLTHRLLSLSGETKVIMECTGSYHLPVAFTLHDAGLTVCAVHAQLVHDFGNNTIRKVKTDKADAIKIANYGLSNWLALPEYVPEDDTRHMLKTFSRQYNKYGKLKTMLKNNLISLLDQTFPGVNELFTSPPRKSDGHEKWLDFAASFWHCKCISNMSQKAFVERYRKWCRRNGYNFSASKAEDVYIESLGHCSVMPMNETAKLLVTQAIAQISSVSETIFAISREMKRLAESLPEYSVVMEFRGVGEILGPQLIAEIGDIYRYRKKSSLVRFAGLEPVENQSGQYQGTEKISKQGSPHLRKTLFQVCDCLLKKAPADDPVFQFLDRKRAEGKHYYSYMTAGSAKFLRIYYARVKRFLDGYYKA

SEQ ID NO: 364374 - protein, 403 aa, unidentified
MAVRKMWVGIDVGKGFHHACAVDENGKVVFSRKVANGQAAIEQLIARTAGKATEVVWAVDMTSGAAGLLLTLLWATGAPVLYVPGRLVNRMAGAFPGEGKTDAKDAKTIAETARLRGDLTPVTSPDEVVADLKVLTARREDLMADWVRGVNRLRELLAGIFPGLERAFDYSTRSALILLTGYCTPAAIRDADAPGLTHYLRENGAWPKAIPSMVDKALAAANEQTVALPGEAITAPLITRLAAQLLELDREIKDLDKQITERFGEHPAAGPITSVDGFGPILGAQLLADTGGDLRTAFGNSGRLAAYAGLAPVPRDSGRVRGNLHRPKRYHRGLRRVFYLAALSAIKVKDGPSRAFYQKKRSEGKIHTQALIALARRLVDLIWALLRDGREFHNSPPLTANAA

SEQ ID NO: 364375 - protein, 405 aa, unidentified
MYNAVGIDVSKGKSTVAVLQPGGTVVRKPFDVTHSSCELKSLTDYILTLDGETKAVIECTGRYHEPILRALSDAGIFVSAVNPHLIKNFGNNTIRKVKSDPADSKKIARYTLDNWAELREYSSMDTTRAQLKTLNAQMAFFTKQKVAAKTNLISLLDMTYPGVNDLFDTPTRDDGSEKWVDYAASFWHVDCVRKIGLKAFTGRYQAFCKRHGYNFQKSKPEELFNASKELVAVFPKEQEYKDMIQMSIKQLNIISANVESTRQAMNRLASTLPEYNIVMAMRGVGATFGPQLIAEIGDISRFNHREALTAFAGVDPGVNESGKFKSNSNKASKCGPARLRKTLFLIMSSLLQTKPEDDPVYRFLDKKRSEGKPYHVYMTAGANKFLRIYYGKVKECLRTQSETQG

SEQ ID NO: 364376 - protein, 416 aa, unidentified
MNAVGIDVSSRKSTVAVLRPLGEVVCLPFDVSHDADGLASLAEKLKALDGETRVVMEHTGRYYEAVAKALHEAGFFVCAVNPLLIKEYGANSLRRVKTDKADAVKIARYALDNWADLRDFTPMDAIRYDLKTLNRQFQLASKQRTASANNLIALLEQSFPGIRKCFDSPVRSDGTQKWVDFAHSFWHVDCVRKQPFAAFCERYRKWCKRHAYLFKLSNAEEVYALAKRAVVLTPKAKVVKVLVQEAANQLSSISRSVEVYRAEMDRLAAMLPEYPVVMAMYGVGKSYGPQLMAEIGDVRRFERKQALVAFAGIDPMPNQSGDKNVRSNKSSKRGSPYLRKTLFNVIRTYLQCAPQDEPVFQFLNRKRAEGKPFYVYMLAAANKFLRRYYAKLRDFFASLDTLQPVAPIPTILKATL

SEQ ID NO: 364377 - protein, 411 aa, unidentified
MELLLREVPGDRLVVAIDPGKVCNRVWLTTGERGLIGEPVSLPVLRDGVEELGRLIAASGVGGAPVIGIEATGALHRAWAAELERRWPGSLRTFAPSETQAARAQLGSRRFKTDDRDCAALVWLLRQGAGRPSAPSTIDALLGAVRHRRQLVDARRVLQQRLHDQLNALCPGLSAPVGHGRVLELEDPSGQAALACAIAFAGRAPTARSLLARAPGRLTEANARFWVQRWKRLLPPPADAELRAQRLGRDVERWLGLRRDISALEDDLAELLARSDGQILTTLPGVAVVRAGAFAAHTLPIERWPTPEQLYSATGLAPASYQSASITRRGRISRQGLAEHRDTLMGIAWGLSQHSPAFRQRDRELRARGLRPIQARVALARHACRLCWRLLQTQQPYDDRRYDRARRDRGR

SEQ ID NO: 364378 - protein, 322 aa, unidentified
MAMLSFGGIDVSKDRLDITVLPDEQCSSVSNDAAGWLELIEQLRGSSITAIGVEASGGYERGVVRALLAAGMSVRQINPFKLRQFAKASGILAKNDRLDARMIASFVAIMPTRPAQRQTPMIEQLAAMLTVRRQLSDHKVATENASRLLEDAMLQRLSRRRVAGLTADIDLLDQRLVEIVTADPALAHRFWLLTSMPGVGAVLACTLIALLPELGQMSRKQVAALVGLAPYDFDSGKLKGRRCIWGGRARVRHVLYMAALSASNWNPALKAFHDRLAATGKKPKVVIVAVMRKMITTLNAMLRDGTAWVDRYSGRRSASTAR

SEQ ID NO: 364379 - protein, 452 aa, unidentified
MVKMSTKKYSNKEMLHAMLPNAAGVDIGATEIYIAVPNGRDNKPVRHFGTFTADLHNAAKWLKKCNISSIAMESTGVYWIPVFQIFESYGFDVVLVNARHVKNVPGRKTDVQDSQWLQYLHSVGLLRGSYRPTQEVCAVRSLLRHRNGLVQTSSSHVQHMQKSLTQMNLQIHNVISDITGVTGLAILDAILSGERNPKKLAALKHGRIKAKTATIIKSLEGDYHPEHVFTLKQSLNVYRYYRQMIAECDQEIEAHLNEFDSRIDVDKKPPPPPTSSPRRGKGNEPDFDLRTHMYRIIGTDLTQVDGISAVTAQMFFSEVGNDVSKFKNRRHFTSWLNICPGNKISGEKILSSRTLPGKNRLAQALKMAAMSLSHSKSYLGNYYRRKRAKNGAPNAITDTAHKLARIIYHLVKTGKQFDESIFHKQETAHQKRVLKNLKTKEKTLGFQLVPCG

SEQ ID NO: 364380 - protein, 410 aa, unidentified
MLKIIYPICCGIDVHKKFVVACIASTGDRGITTYRASRFSTFTSGLRKLSGWLCSNSCTDVCMESTGKYWIPVYNILEHTCQITLAHPKYVRAIRGKKTDKKDARWIADLFKHDLVVGSFMPPLRIRQLRDLMRYRSKLTSFASSEKNRMQNCLTVSNIQLASVVSDTFGASSMKIINHLLENPDVKDFDFAPLLHGSMKKKADDIRLATCGMISLEQRQKMHIILGHYSGVQKCKADLESLILSLAEPYTRQLNLVSTVPGIRNPFSAIAIISEIGTDMSVFPTAKHLCSWAGLTPQNDESAGKKHSVRISRAGVYIKPLLVQCANAVVRSDKHPEIRGRYLSIRKRRGHKRASIAIARMLLTAIYHILLKDEPYNPELYKKAEVLPKTRSITVDQAILLAKRCGYSVA

SEQ ID NO: 364381 - protein, 355 aa, unidentified
MKYLKDIEKFINDKTVFCGIDIHKRHWDLCFYCDSHPLERLRISGHYTALEASLKKYRFASSLHVVYEAGFTGYYLYRLLQEAGYHCIITPPNRIPDEGGKIKTDRKDADKLARYLAAGLLKSVYVPPADIESDRRIVRKREDCVRKLTRIKNQIKSFLKLHGTLIPENMDRYWSKTFLIWLKALGFPHVNDRFFLDQLLLEYHFLHTQLIGLTQYLREMSRSLKYRESYHCLSACRGVGLITAMTYLLEIFDFNRFPNESKFSAYLGLSPGQKSSGEHVRLGHITREGNTMVRGVLVKSAWTVIRHDPHLRDKYERIKSRGTNGKRAIVAVARSLAIRLRRCLLDGVPYEVAVC

SEQ ID NO: 364382 - protein, 359 aa, unidentified
MIYHPGFQQIVFVETEIGELSERRLEHREQAEAFYRELKQQNLEVRVGMESSGHSRWFERLLHELGFELWIGDAAEIRSKRVRKQKTDRQDAQLILQLMIENRFPRVWVADAENRDLRQLLWHRHRLVQMRTRVMNQLHVVPLNEGLRRKKALWRPAGRKELESIPLAPWASRRRQDLLDLLDQLTPKIQELTRALEEEVEKRPVTRLLMTHPGVGPLTAIAYELVIGTLERFHCGKQLASYVGLVPEEKSSGDRRRLGHISKQGNVLLRFLLVEAAQVTVRSQQEWRNKFLHLAMRRGRKIAKVAMARKLAVHPYWMWRQGCEYGQTQKLGSHAGEPGHRDGVQSITDVMIGHPAPSK

SEQ ID NO: 364383 - protein, 406 aa, unidentified
MPEETIGWFAAVDWGSEKHQACVLDARGGVAGEREFPHSGAGLTELADWVQSITGEAGVVAIAVEVPHGPVVDVLLDRGFMVHSINPKQLDRLRDRFSVAGAKDDRRDAYVAASGLHTDRHLFRRVQAADPRITELREWSRLAEELKQERVRLGNRLHHQIWRYYPQLLELTDDVAADWFLDLWAIAPTPAKGEHLCKAAVEQLLKRYRIRRIDAEAVLRNLRQPAIKVAEGVAAAASVHIRSLIVRLHLVNRELRDAERKLDEFCASFEGDRQDDVAILRSLPGIGRINLATLLAEASGPLSRRDYPALRTLSGVAPVTKRSGKSHIVIMRHAAHSRLRNAVYHWACAAVRHDPKSRCRYTALRQRGHSHGRAIRGVADRLLNIACVLLQRQTPFDPEHEQPAAA

SEQ ID NO: 364384 - protein, 356 aa, unidentified
MDSVYYLGLDVHKKTISYCLKQSDGRVVQEGVVEARRGALERWLEQLPRPWKGAMEATLFTGWIYDFLLPHAHSLDVAHPAMIRAIAASKKKNDRVDARKIADLLRCDLLPVCYMAPAEVRELRRLLRFRNLMVRQAVRMKNKASGLLMEVGAEYSKEKLDQKRYFQQLLDSVEHVPESVKQMLRMSRAARDLFEESQRRLVAALLKEDLLRERVARLQSIPGVGQILALSWALEVGEVERFQTVGQALSYCGLTSAQISSAGKEHRAPISKQRNKHLQWVLIEAAKVAPIWNPQLKLVHERERARGNANRATLAVARKLVAYLLAVDRSGEPFRLRPAAEGAAESQAEVAATAAA

SEQ ID NO: 364385 - protein, 350 aa, unidentified
MYYIGVDYHKKYSYIVVKDEEGRREQKGMVNNTRQGFQEFLEPYQPGKAVLEATRNWGLVYDWLEEILDDVALAHPLKVRAIAEARIKTDKISADILADLLRCNLLPEAYAPSKETRETKNILRQRMFFVRIQTMVKNRIHTILDRHPEVLFDAPDVSDLFGASGIEWLKQVVLPGEDNRLLVSELELLEVLKQKISRSDGIVKELARQDSKVKLLRSIPGLGPFFSVLVAKEIDDIGRFSSPKKLCAYAGLVPSTYASGGKVFHGRITKQGNKWLRWALIEAVPHAVRNDPDLHAYYERIRVKKGKNAAKVASARRLLTIVYRVLTQGRLYERRTYKRNDLAPVALMRA

SEQ ID NO: 364386 - protein, 353 aa, unidentified
MKYVGIDWAYRTAQWCALAPGGEIAGEGRIAADRGGLARLVLELGDEVKACLEMMSGALWVRDELGACGWQVEVADARKVKTVAPLAAKTDKVDARLLAELSRRELVPALWLPALDERALRERLRRRMHLVRLRTSAKGRIFGLQTQWGVRVSLARLRRGDGLALLEQAGMPAVWRRSVSECLALVDFLDARIAPLDAELRPFAKADPRAVLLDTIPGVAELLALTIAVEIGEISRFAGPEKLVSYGRLAPRVHQSGQARPRSGPLSKSGSRLLGWAAVEAAQQAWRETNPWHDLYTDVSRRSRNNNSAKAAVARKILIAAWHMLSRNQPFKPAPRCTGGTAVPASSRLALAA

SEQ ID NO: 364387 - protein, 368 aa, unidentified
MIVIGTDTHKRTHTCGAVDAFTAAARGELTAPARPGSFGMLLRWARALDAERVWAIEDCRHVSGAFERFLIARGERIVRVAPKHMAGARRSSRERGKSDSIDAFSVARAALKEGIENLPGAHLDGAALDIRLLVDHREDLIAARTADQQRLRWHLHDLWPELEIPAGALDTRKWLGKISGRLARAQQTTRVRVARELVRQITARTSRIRELQAELAALVESYAPQLLAERGCGPLTAAKLIGEIAGADRFATDAKLARTGGAAPIPASSDNTSRHRLDRGGNRQLNCALHRLAINKGKWDPDTAAYLARKQTDGKSRKEALRCLKRHLARRVWKLLQTPAPAAAPTAAPATTPPTIAASAPTPMPCLT

SEQ ID NO: 364388 - protein, 351 aa, unidentified
MFVGVDIHKDTHTAVGLSPFGEKLFEKTIGNYEEDFVSLIGKVEEIACSSGLRPSFGLEDCNGFGERIAGFLNISGYPVTYVPPVLVDNRRKYETHPEKSDSLDAKGVAEVMIQRIDRLPAYTLTEEAKNNRDIRELSLDREYLVSEQTRLKNQLHTILHRIWNTEYRDKFRDSFSVKGLRYWLKNIPKGISGFLHHSMKRKIRRLQAIREEIHEIEDEVKQLLNKSGHTLHTANGCGLVIASMIVGEIGDISRFHSPGALAKYAGCAPREHSSGKTFHHRKSRSGNRRLNCAFHRMALSQISRMGNEKARTYFRRKISEGKSKQQALVCLRRQMVNIVWMMMKHKTQYFT

SEQ ID NO: 364389 - protein, 418 aa, unidentified
MKVVYPICCGVDVHKTFLVATIITSEGITPHYSKKRFSTFNNSILQFKQWLIDNNCFDVCMESTGKYWVPVSNLLEDTIHVTVANPKWVKAVKGNKDDDKDSRWIGDLFRLGLVPGSYIPEKSIRILREYTRYRFKLVSCKTSEKNRFQNAFTVCNVALDSVVSDMFGKSASSITDYLVSSDSFDPVYCSSLLHKSLKKKADTVIESIEGYQMTQEQKERIVMVRSHLEFIQQSIAKLDEKLDKMVAPYESAISLLCTIPGVDRTSAITIISEIGTDMSQFASSKRLCCWAGLTPGNNESAGKKKSVRITRAGVYLKPALVQVAHAAVKSDKAPYYKIKYERLYKRRGKKRAIIAIARMILTAVYNMFVTGEEWNPSDLYKIDMPQEMLEKQKEKAIKQALKLLISNGVIKESDISIA

SEQ ID NO: 364390 - protein, 473 aa, unidentified
MAATRISGLNRQQRKELARRLQVADPGLDVVHPNAAGIDVGNSTHYVAVRPDRDSESVRRFDCFTADLYRLADWLQQCGVTTVAMQSTGVYWIPLYEILDARGLDVYLVNARHTKNLPGRKTDVQESQWLLKLHTYGLLRNSFHPTAEIRVVRTYWRQRGDHVRAISTCIQRMQKALTQMNIQLANVISDLSGWTGMRIVRAILAGERDPHTLAALSHPGIQASRATIAKSLEGTWQADLVFILQQEVTMYDAYQQRIAECDQALQDHLNGFANRHPEAPAAGAAPSATPTRRRSDPKPRRRKAGSHAPPFDLGSELRRISGVDLTRIDGIDVSVAQTLISEIGLDMARWPDEHHVASWLGLCPDNRITGGKVIRRGTRHVINRAATALRIGATTLLRSQSYLGAQYRRLRGKLGAPKAITAMAHKLAALVYRMLRWGHEYVDKGMQYYEERHREQQIRLLKKRASALGLVVV

SEQ ID NO: 364391 - protein, 360 aa, unidentified
MNQTNRKDDQYVVGGVDTHKDIHVAAVVNELNQVVSSESFPTTRHGYKKMLTWMSSFGKVSRVGIECSGTYGLGLLRYMQSSGIDVLEVTAPDKSDRRKRGKDDTLDAENAAHAAFSRHRTVTPKTRDGMVESLRILKSCRRSAVAARTVALQMIRTSIVSAPEELRDTLRHMTRMNLVRTLASTRPDLTNYKDITTAYRITLKSLARRYVELHDEIADLDKMIATIVKSLAPELIEQNAVGYESAAQLLITLGDNPERLRSESSFAALCGVSPIPASSGKTSRHRLNRGGDRAANSALHIIAVGRLRTEERSQEYIKKRTADGLSKMEAIRCLKRYIAREIYYLLKNRNTIINSIQITT

SEQ ID NO: 364392 - protein, 343 aa, unidentified
MQSITTIGLDIAKSVFQVHGVDAAGQVVVRRQLRRRHVLAFFEKLAPCLVGIEACASSHHWSRELYALGHTVRLMPPAYVKPYVKRQKNDVTDAEAICEAVTRPSMRFVPTKTSEQQACLMLHRARHLFIRQQTAVINSIRAYLAEFGIVAPVGRRGVERLLEVVADTADQRLPEIARACVAALGDQLQALKAQILKFDRCIIAWHRSNATSRQLDELPGVGPALATALVASVADPKAFRSGRDFSAWIGLVPRQNSSGGKHKLGSISKQGDRYLRSLFTAGALAVIRYAKIHGTRHRPWLTALLARRPTKVAAIALANKLARMAWAMMARNEHYKEPAALTA

SEQ ID NO: 364393 - protein, 351 aa, unidentified
MNRGITVGMDMGDKNHIVCEMDAEGAVVTRAGVTNTAKGLRKYFGGREPCRVAMEAGTHSGWVSRILQELGHEVLVGNPRKLRAIWDSDEKNDVRDAEMLARIARFDPQLLYPIRHRGQEAQVDLAVIKARDMLVRVRTTLIAHARGTVKAIGQRISSCSADAFHRRLLEEMPAELAQALEPVMKSIEDLTCRIGHYNKVLEKLSQEKYPETEGLRAISGVGPVTALAYVLTIEESARFDKSRDVGPYLGLTPKRDQSGQTDKQLRITKAGDAYLRRLLVGCAQYILGPFGPDCDLRRFGLKLAARGGKNAKRRAVVAVARKLAVLLHHLWKSGVTYDPLFQERRKQKKVA

SEQ ID NO: 364394 - protein, 358 aa, unidentified
MRIIGVDLHARQQTIAMLDMKTGEVVEKTLQHEGEKVREFYAALPAPVRVGIEATGSMHWFLNLMEELRIDCQVGHPAKIRTAETRKQKHDRRDAALLLKLLAEDRFPSIWMPSTEHQDLRALLFHRHQWVRMRTIVRNSLQAIALSNGLRRGSSLWSQGGQHTIESLPLAPHAANRRTELQTFHRQLDEQIEKLNEQIREQALQSPGAQLLMTHPGVGPITALATDVFLGDAARFGNGKALASYVGMIPSEYSSAGRQRLGALSKQGNSFLRFLWGEAAMHAVRKDPTLKRFYRRKLIQKGLGKTRMAAARKLGIRLWIMLRDQIDYEEFCRRGQMRQKNGGAYAGIPESDTGPAEQ

SEQ ID NO: 364395 - protein, 346 aa, unidentified
MPKARMESKPSSMIVVGGVDTHADTHTVAALDQVGRRLGCAVFPAHRAGYRALADWLAGHGEISAVGVEGTGSYGAGLTRWLSAHQITVVEVNRPNRAERRRRGKSDPVDAEHAAAAVLANTATAVPKARTGLVESIRLIHATRAGAVKARTAARNTFTNTLRTSPDAVREQLQPLTRARQLTAATGYRATGDDPDSTVKRCLRRLAVRISQLSEEINAADHELDRLTRELAPTMRSRPGFGPETTAQLLITAGDNPDRIGSEAALAGLCGVSPVSASSGRTRYHRLNRRRGPASQPGPAHDHPQSAPAPPTYACLSGLAQPPGPSHPAPAPGAEALPGPRGLPAA

SEQ ID NO: 364396 - protein, 316 aa, unidentified
MQPLSVCVGIDISKAQLDLVVEPGGESLTVPYDDQGLATLILRLSQIAPRRIVVEATGGLERVLLRALVDAALPVIAVNPRQVRDFAKATGQLAKTDALDAAVLARFAGVIQPPERTLPDPQTQELAAVLARRRQVLAMQRAEQNRLDRASTRVRKRIEAHLWWLNAELARLDEDLDDMIAQSPVWRDRENLLRSVPGIGPVMSRTVLAELPELGLLNRKQVAALVGVAPFNRDSGRLRGHRTIWGGRAPVRTALYMATLVATRWNPVIREFYRRLRTAGKPPKVALVAAMRKLLTILNAMVHHRTPWRSAVVQGA

SEQ ID NO: 364397 - protein, 466 aa, unidentified
MTPRRGKKVHQSANAERLQVTHPHAAGIDVHSAVHFVAVHPADVPASFVPVNGRLPKGVRKFGAFTCDLEALAAWLKDCHVETVAMESTGVYWIPLYELLQSQGFEVILVDPRQSKHAPGRPKSDVLDCQWIQRLHSYGLLTGSFRPADDIVAWRGYQRQRDMLIRYAGQHIQHMQKALEEMNVKLTEVVSDITGVTGMKIIKDIVRGQRDPLQLAKHRQEQCKASEAEIARSLYGNWRAEHLFALKQALQLYQEYHRRLRECDECIEACLRRFADMSGGKELEPKPRRRKRRANAVTFGARELLFRMAGVDLTVIEGIEETTALVILSEIGTDVSRFPTEKNFVSWLGLCPNHRGSGGKIFSRRVRRGANRAARALRLAAQGCHRAKNALGAFYRRIQARCGGPKAVVATARKIAERVYRLLKHGAEYVRQAEKIYEEAYRLRTVKGMARKAESLGYKLVPVATK

SEQ ID NO: 364398 - protein, 355 aa, unidentified
MNDAKYIGLDVHQATISVAVRDSAGKLVMEAILETKAEAILSFLRGLRGSLHVTFEEGTWAAWLHDLLQPHVTRVLVCDPRKNALLKAGNKNDRIDARKLSDLLYLNKLSAVYHGEQGIRTLKELARSYITITRDLTRVMSRLKALYRSWAIPCAGEQVYSARYRAEWLAKISEGGVRRRAELYYQQFDSLAVLRQGVRRELLAEGRKHRTTKLLRQIPTIGPIRAVLLLALIQTPNRFRTKRQLWAYCGLALRTYTSGEYRFVGGQLQRSKKVLAIRGLNRNHNHDLKNIFKGAATRAASTAGPFQDFYQACVSRGMKPHLARLTLARKIAAITLLVWKKGVRFDAEHLKQQAA

SEQ ID NO: 364399 - protein, 344 aa, unidentified
MTPSSPTYRLFVGIDVAATTCAVAWMRPNAQPTRAITIKQTPAGFADLQGQLLAIEPDPHAVLIVLEATGTYWMRLASTFVDAGFVVSVINPAQAHDFAKALLKRSKTDAIDAQTLTELGARLQPERWTPPPQVHTELQQRLVHRDGLVAARTQFRNQLHALVQQPVVIASVQTRLETLIATLDEEIATVEHEIAAAMEQEDAWAAAAARLATVTGLGRLTIAWILTTTINFTLTVTPDAAANYAGLAPQLRQSGSSVRGRPRVGHGGNARLRRALYMATLSAVQHNPVIKAFYSRLCATGKPRKVALCAAARKLLRIAWAVANNDQDFDPAYAARKCAEKAAT

SEQ ID NO: 364400 - protein, 354 aa, unidentified
MRETGMSKTITETIGVDLGDKYSAYCVLDQGTGEEVASGRIRTRPEDFKRFFASRDSARVVMETGTHSPWASRIVTPSCAETYVANSRTLRFIYGNTRKSDETDAESLARVGRADPKLLSAIRHRGALAAEDLTVIRARDAMVRSRTRLVLTLRGLVKSWGARLPSLSTESIGLRTREHLPDPLQARLTPLLHSIELLTEEIAQYDREIRQMARERYPETSTLSQVWGVGDLTALTFVLTLEDPSHFTSSRTVGAFLGLVPRRDQSGETEKELRITKAGDALVRTQLVECAQRILQTNAPDTDLKRSGERIAARGGKVAKRKAVIAVARKLAVLLHALWRTGEIYNPLRSERAA

SEQ ID NO: 364401 - protein, 424 aa, unidentified
MKYKMQQKQNQLIERITDRHLVVGVDIAQQFHVARAVNYRGIVVGDPLTFENNEEGFNRFLEWINKLKGKNNLDAVIVGMEPTGHYWINLSKWLSNQNIDVVTVNPHLVKRNKENRDNTQSKSDKKDALVIADMVKNGYYSNVRSTPESFEKLRVLMSNRDVIVKRLVSSINQLNRWVDVVFPELRQVFKDVKGKGAIATLRLFPTPFELRSMQPQDIVTKWKSVMKRQPGLKKAYLLIDLAKRSIGSHQAHDAYKLHLEQLLEEFDLATTQLERVEREVTNVLQQIPFAMKLLAIKGISEISLAGILGEAGDLSGFAHGNSLLRHAGLHLSEASSGKWKGQIVISKRGRSRLRRFLYLATMSLVMNNSEFKALHSNNVKVKKIKKMKSIMKLVGKLARIFVGIAKRNESYSPEKLQPFSALAA

SEQ ID NO: 364402 - protein, 443 aa, unidentified
MSRKRRTHLRGKRGQAFADKIRGIPLECILCVSIDVHKYFHVVTIHNALGEIVTPTFEIDIFQAGFEQLCQATDEASVRMKALVVLTGLEPTSHYFENLARHLRQRPQPVTLINSYAVKKNRDQQMMHHEKDDEIDTAAIGDLLRRGEGTPFKPASGVYLQLQHLDRVRLSKVKIRTMLQNQVLGHLDRIFPGLVIIAKEAKARYTPLFATDFWKCQTMQHLIRVCPDPRQLATMSPQDLIDAFHAHRYAMGPVTAARIIAYAQKVLLPDAELIAIRCELLAHDLALLEEVEGHIAQLEDRLRTLLAETPYQIWVKLKGISDIQVASLAAAIGDPANYSYAAQVFRRSGLVSGRNDSGIRQRKGKGKRVTKVGDVYLRRALMNALATLILHQPVLWQYYNKLKKSKPAGVARVATARRATGILWATLRDQQAKTLILKKGATM

SEQ ID NO: 364403 - protein, 466 aa, unidentified
MELFINLKSGIMVKKKMSLEVVNPNASGIDVGSRSHWVSVGQNSQDVKEFGVYSSDYYDLCKWLSKHKVTTVAMESTGTYWQNLFSTLVAYGFEVILVNGRQTKNIKGKKTDILDCQWIQKLHTLGLLSSSFLPDSTTDIIRTYSRHRQNIIKQSTRTVMKIQKYFRLMNMRLDVVVNDIVGLTGTNIINDFINGEKSGKALAKHRHHNIKKSEDEIAKALQYNGREDYYFALKQEWNTYIHLQKQIDEVDVQIKNHLSEVIDNDDNKKQHIASKKPYKRKNKNTIRGVDMNQISYQYFEGIDLMAIEGVNDATIMALISEIGLEGIKKFETAKQFTSWLRLAPNNKISGGKILSNHIPKGSNRLKIALRLSANSIGNLKEGHLSDFFRRINYKRGRATAISATARKLAVIIWNMLVKEIPYNPPTEYLFLDQKRKMKLVSRIKKNIAKFELNPEDVGFSLNTVIQ

SEQ ID NO: 364404 - protein, 322 aa, unidentified
MEAVYAGIDISKQWLEVGLWPGAETFRLSNDASGVAELAERLRALGSRAVVLESTGGWEVLAASELHAAGLTVAVVNPRQVREFARSLGTLGKTDRLDAVVLAQFAQSSHSNGRLVARRLADEAERELKALVVRRRQLVGMLVAETNRRERAPKVVRQSIVQTIKGLKRAVAQVEQQLKQVLAGSPPQQRKATLLTAVPGVGPQLTFTLIAELPELGQLGRRQIASLVGVAPHPYESGKFKGRRMIWGGRASVRTMLYMAALSAVRHNPLLRTSYQALLARGKSKKLALVACMRKLLTILNAIARDSSPWNPSHHLDFLHSR

SEQ ID NO: 364405 - protein, 320 aa, unidentified
MSNLLEEIWIGIDVSKTQLDVAVGQNGETWSSGNDSQGVAKTVEHCRQLQARLVVVESTGGLEKQLVAELYLAQVPVALVNPMRVREFAKSAGLLAKTDKLDARLLARFAKAVQPAPTCLPSQDEQVLSAMISRRRQLIDMRTAETNRLPTAHISMRPSIEHLLAYLNQEITDLEAQIEQFIQTHAEFKAKDELLRSVPGIGPVTAAIMISDLPELGKLDRRRIAALVGVAPFSDDSGFRKGKRRIKGGRPALRTVLYMATISASRFNPIIREFYDHLLKMGKLKKVALVACMRKLLTFLNAMIRDLKPWNPPSMATIAT

SEQ ID NO: 364406 - protein, 382 aa, unidentified
MQASTVATPTADYCGTIFVAIELSQKSWLVTLHSPDRDRISRHKLEGGDHAGLLGLIEKTRIRAEQKLGSAVRVASCYEAGYDGFWLHRLLLAAGIMNLVFDAASIPVEQRGRRAKTDRIDGELLLRTLMAHLRGEPRVVRIVQVPSMEQEDARRASRERERLVKEQTAHSNRIKALLRLQGMAVGYPRRRDWLHWLAQQRDWQGHSLSPHLLAEVTREHARLMLVREQLAALEQAQAAQASPVPQAMAERRDQLQRLKALGPSFATTLTSELFYKDFDNRRQVAAYCGLPPSPWRSGGIDREQGISKAGNPRARVKAIELAWLWLRHQPESELSRWFNTRTAGAGKRARRIAIVALARKLIVALWRYLTTGLVPAGATMKA

SEQ ID NO: 364407 - protein, 366 aa, unidentified
MKKQTSEVISGEGLVKYVRRVLNLGLDVHYWQVTVAMQEDGGRIKSAGKMGHPEFLNWVLKKLEEGWEIYSCYEAGASGYWLHRKLVELGVKNLVVVPKAMGRGGKKQKTDKRDAGELCDSLDRYLRGQKKALSVVAVPTEEQEEKRALIRYHRQIMKDRGRCEARGKGLLCAQGIEVRGRWWQGDTWLALTSDPRLKDWMKEQLVGWRSKILSTDEEQRALRQRIAALAPALLPKGVGAYSAAVLHYELRGFDHFKNRRQVGSITGLCPGVHLSDGRGKEGSINRCGIGIVRWTLVEMVWRLMIWQPQYPPVRRLASGFVKSKRAKKRLVTQAARRLAIDLWRLSTGQTTPEKLGLVMQYHPPAN

SEQ ID NO: 364408 - protein, 402 aa, unidentified
MWYVGLDWADTHHDVEVLDEHGHRVGTQRFAHTHEGLNKLKAWLLQIAKDPEQLACIVETNHGLLISFLLEAGIPVSPVNPKMANQLRKTAGAKTDAIDAHWLAKMGRFDFEELRRLEPDSPTVAELKTLTRDQDTLIQMQTRLVNQLTACLKDYSPAALKLFAKVQQRSTLVFLQTYPTPHEARAASMEEITATLRTGKHTRPRQVAPKIFEELHRPQLEASEIIVRAKSRLMLSLVKQLLVVIEDIARYAAEIGTLFLTHPDQQIWSSLPRAGKRLAPRLLAEWGDERARYADATSVQTLAGTAPVPFQSGNFAKAHKRFACLKPLRNALHQFAWQSTRQEVWALDYYRRKRAEGKTHSMAVRALANVWVRIIFAIWSSGTCYQTAVFEQAQQQHARRAA

SEQ ID NO: 364409 - protein, 418 aa, unidentified
MSDTFAWYVGIDWGSEEHHFCLLDANGRVCGTRVVAHTADAVYAALQWVREQTGAAPEVVAVGLETPRGALVDTVIEHRFAVFALNPKQLDRFRDRFTAGGAKDDPRDAHAVADALRTDRRAFRAVRPDDPPVIHLRELSRLVEELQVEEGRLANRLREQLYRVDAAWLTLSPAADEPWLWTVLADSPHPDTWRQLPRGRVTAALRAHRIRRLTADAIVTTLRRPRLSVAAGVGDAVAARIAALVPQLILVHQQRTTTERQIDQLLETLAPAEATTGDRHEHRDVEILRSLPGVGRMVTATMLAEASGPVADRDYAMLRAYTGAAPITKRSGKRVFFVQMRYACKHRLRQAVYHWARTSIQHDHAARAYYDALRARGHHHARALRSVADRWLRILVAMLTTRTLYDPSRLRSSASATA

SEQ ID NO: 364410 - protein, 378 aa, unidentified
MDIEDIEVFIGIDVGKTDHWATALSRDGRKVFDKPLPNDEARLRSLYGKLADHGNLLVVVDQPATIGALAVAVAQDMGITVGYLPGLSMRRIADLTPGSAKTDAKDAAVIAGAARSMPHTLRAINASDEDAAALSMLTGFDLDLARQVNQTANRIRGLYTQIHPTLERVLGPWLEHDAVLEVIAAWPTPADLKRAGRTRIDARLKKHGCRRHAAWAGQIVSALKHQTVVVAGTDAAAVVLPHLARQLIALHSQRADVAAQVETLVQAHPLYQVLTSMPGIGVRTAAVFLAETLGKTFDTGAQLASYAGLAPVTRRSGSSIRGEHVSHGGNKRLKRAMFLSAFASLRSDPVSRAYYQRKRDQGKPPWARPFSPWPTAAS

SEQ ID NO: 364411 - protein, 328 aa, unidentified
MKAFIGIDVGKEKLDISWLRDVVKSKKKTKIFKNNPQGYQELVAWLIKNTNLEAQDIVITTEPTGVYSEPLMYFLYEQGFILLHVNPGKAKQYASSLGLVHKTDKSDATMLARYGHDQQHSLLSWQPEPVEARELKVMTRRLEALEQDLRREENRYEAVGFSGASTRVTQSIEDMIAVLKTEMGKLKNDIDEHIDRHPQLKKNRQLLQSIKGVGDVISRMMVSLMACKQFKNAKQLACYLGLIPKLNESGKRAGKTTLSKEGPGYIRAKLYMAAVVAVQHNPDIKAQNKRLVEQGKTKMQAIGAAMRKLTHICFGVVKNQTEYQPQAI

SEQ ID NO: 364412 - protein, 398 aa, unidentified
MKTSGLDVHKDSIFCAIYDGKRHSSVKEFSTTTNSIRSPGEYLQSEKVKKVAMESTGTYWVPIWDILYEMGFEQKLVNPLHIKQMPGRKSDSKDAQWIAGLLHKNLLKGSLVPSPLIQELRTYTREYRTLTQEVTKVLTKIDRILVMCGIRLSSCISNMHSKSALQIVDALIRGETSPDKLVTLVYGNRRNKESGKLKECLTGNMKEHHRIKLMTCKQQYDLFELQITFYLSKMQELCNEHFSEDIANLTTIPGVSHISAMIIIAETGGEMSAFENSGKFTGWTGLRPRNDETAKKMKSTATTKGNKHLRAIIVQVGWGAARNKGSYFMDKFQKQAIRKPRKKALVAIGRKILVIIWHLLKEKTQYNPNLVHIYDPVKVEHKIKYHQREIEKAKKLIV

SEQ ID NO: 364413 - protein, 325 aa, unidentified
MHGVDDNGKSVLVKPKVARDQLCELVAQLPPCLIGMEACSGAHHWARRFSQFGHTVRLMAPKFVTPYRMSGKRGKNDAADAAAICEAVTRPHMRFVPVKSEHQQIILCLHRTRQGFVEERTATYNRLRGLVAEFGIVLPQKVTGLRRTIGDHLEDLPGYANQCVGDLLAHADHLDERVAEYDRLIAQAARADARSKRLMERPGIGPVTASALLASIGGGHDFKNGRQVAAWMGLVPWQYSSGGKARLGRITKAGDPYLRSLLVMGARAILSGLGDKQDGFSRWARSLQERRGYWRAVVAIAAKNARLAWAVLRYGEDFRLHPSAV

SEQ ID NO: 364414 - protein, 382 aa, unidentified
MQASTENPLTAGHNGTIFIAIELSQKTWLVTLHSPDRDRISRHKLEGGDHEGLLALIEKVKARVAEKLGSVPRVVSCYEAGYDGFWLHRLLQAAGINNFVFDAASIAVEQRSRRAKTDRIDGELMLRTLMAYLRGEPRVVRIVRVPTVAEEDARRASRERDRLVKEQTAHSNRIKALLRLLGMDVGTPRRKNWLAWLEQQRDWQGHPLPPHLLAEVKREHARLMLVREQIAGLEQAQLVEAATVPAAMNEQRQSLERLKALGPAFSTTLVNELFYKDFRNRREVAAYCGLAPSPWKSGGIDLEQGISKAGNHRARLKAIELAWLWLRHQPDSALSLWFRNRTANAGKRARRIAIVALARKLIVALWRYLSTGLVPDQATMKA

SEQ ID NO: 364415 - protein, 417 aa, unidentified
MTDETNASPCRYVALDIHKHYCVIAAVNRDGQIVLDPVRIEHEDLEAQLQKKILPSDQVVIESTTNAWHYYDLLILLAAKVLVANPIRVKQIAYAKVKTDIRDTLILARLLAANLVPTVWVPPVEVRNLRYLLSQRRRLVGMHTQTVNRMGSVAHRHHLNHPKGKRFIEKNTAWQQDDELSDSEKFQLELDMATGEHLDGQAKKIAEKVASLSHQKPWAESMTYLMQLPGFGVITGMTVLSAIGDITRFESSGKLSSYSGLTAGVEQSGTKNRGKGITKEGRKDLRWAMVEVAQRAVKSDPYWKSRFQALERRVHRNQAIVAIAHQMLELVWHVLTYKQAYRHFSEERIAYKYLTWGWQLDEEARGGLTRQQFARYYLMRLGIGHDLKRIALNPKYPRKLATEAEVLALKPELNQTR

SEQ ID NO: 364416 - protein, 563 aa, unidentified
MPAVSDRAHRRTDQRQQRFRQQAEEAAKLVSLPVTSSQAAGIDVGDRSHWVCVESTPDDSDTVREFPAHTPGLRQLVAWLKLCAVTTVALEATGVYGHVLFLTLLEAGFHVITTSAKFTRQIQGRPKTDKLDCQWIQRLHRHGLLPSIFQPDDATQTLRDYVRQRANLVRLSGQHIQRMQKALELMNLKLTNVLGDITGVTGLKVIRAILAGERDPQALSKLRDRRCKHTEAEIATALDGRYRDEHVLELRCCLGVWEKYQETIALVDESIAKQLQRMKKQTLLPPLSPKPRVRGKKPHDPGFDVRTALYLVTGVDLTAIDGIDEIHALTLISELGTDFSKWPTVKHFASWLGLCPNFKKTGGKVQSSKTRRGKGRAAHALRLAAWGLMRSRGYLGAYLRRQRSRLGAPKAVTATAHKLARIVYHLMKYGEAYVQEHEEKYAAEVRERQEKQLRRRARELGSIVLRLEVETEAPPLPSEETKAAESGRLPLEEWRRRERSEAVLGVGEGTRPPIRNSLKSRHFGRINPRFLGRPALHVRGHLAQADRLTRPRRTRPRHLRSTP

SEQ ID NO: 364417 - protein, 468 aa, unidentified
MRRHLPKPNDGATLAQRNARVSLKPGKSRAALTITHPNAAGIDIGNTAHFVAVPPDRDDEPVREFPSFTVDLNAIADWLKACGVDTVAMESTGVYWIALFELLESRGFTVLLVNARHVKNVTGRKSDVLDCQWLQQLMTYGLLSGAFRPADQVCVLRSLWRQRAMLLRSQGREVQHMQKALTQMNVQLANVISDVVGETGQKILRAIVAGERDGQVLGSMKNARIRASVDEIAKSLQGNWRAEHLFVLKQALGAFDFVGKQLAECDIEIEQQLKTLQVHEGEPAKGKQRGRARNAPKFDLRTQLFKMCGVDLTRIDGIDVTTALAVISETGVDMSRFKTVGHFTSWLGLCPGTKITGGKVMNGKTKRCANHAAQALRLAAAALRASQSALGAYFRRMCARMDKPKAIAAAAHKLARLIYTMLTKGQEYTDQGQDYYEERYRERVLRQLSQRAQKLGMKLVATEQPEPA

SEQ ID NO: 364418 - protein, 347 aa, unidentified
MLADQLDYVIGVDPHRDVHTVAVVEVRSGGVVFETSIAADSNGYREALVLVEEHAPGRRAFAVEGSGSFGAGLTRLLTAHGEQVFEVGRLRRERRSGGKTDALDAIRAARTVLGQSNPARPRAGGQREALRALMAAREGAVNARRAGLCQLRGLLVAAPEPLRSQLRPLTRGRLLKQLAAVRPDRHRDVELRGTLQALRSLTRRVQQLTAEERDLATQIETIVRELAPHLLEQPGVGPLAAAQLLLSWSHPGRVRSEAAFARLAGCAPIPASSGQTIRYRLDRSGDRQLNRALHMILVNRRRWHEPTIAYIARRRQDGKTTREANRCLKRYLARNLYRLLEHPPMTA

SEQ ID NO: 364419 - protein, 337 aa, unidentified
MLYSGIDLHKRTVVIATVDETGKVQSEASLPATRSAVARYFHWLPEPTTATVEATSSWYWLRDLLDQQGVPLTLAHAKFVKAIAYAKVKTDAVDALTLAQLHRADLIPRAHMVSPELRPLRDLLRTRLHLVEKRTSAKNSVQRLLEKFNVPEPGRLPEATLQASLYAEQIELLGDQIHRVEQQLQPQLIPNPDVQRLLWIPGIGKIVAFTLYLEIDGIERFPSVRQFFSYCRVVPGAKNSAGKTRHVRRKDGNRYLKLALSHAAVRAIQYFSEIKHFYQRKARQKNPAIARTLVQKELARSVYIVLKEQVDFNHTFKGQPLSKRKASKWPRQASPDV

SEQ ID NO: 364420 - protein, 391 aa, unidentified
MQALLTCCCGVDVHDEMIETCILKGLGDEPEIIRKQFGTRPLELKEFAEHLTEQGCSTVAMESTGVFWRPVYEIIEDNCSCVDDIVVTNAAHMNNVPGRKNDEDDAEWIATLLRHGLLDASFVPERIFRDLREASRLYKKFVGERSRYTNRIMKLLQAHGFKLSNVLSDILGASGRNILHILAERGSLSAHEVATCIRGRTKHSYKEIHSAVSGSLNPNEQNLLSILLSKIYTAERDMSTIIALMTDMASEFERQLDIADSLPGIDRLAALLILAEISAAPHLSFDSAAKLCKWAGLTPRNDMSAGKTKSKRILPGNPYVKSILCQAAWAAVKSRNNPFRDWFWSHRHRGDKKAIIAVARKLMTTLYALLRDDALYDNEYSVRYTAKTYTT

SEQ ID NO: 364421 - protein, 346 aa, unidentified
MENYAGIDVSLELSSVCLVDATGKIVKETKVESDPKALIALLNGLGVAVTRIGLEAGPLSQWLYAGLTQAGFEAVLLETRHVKAALSAMTIKTDRKDARGIAHLMRMGWFRPVHAKSAGSQEVRALLTARKLLQDKLKDVELSIRGILRGFGLKVGKVTTKTFETRIRQLVSGQPTLEQIAEAMLSARASLQRQFNMLHKAILKVVRKDKVCRQLMSVPGVGPIVAITFKTAVDDPNRIKRSKAVGPLFGLTPKKYQSGETDVTGGISRVGDAMVRTILYEAANILLTRITRFSALKRWGMDVAKRRGMKRAKVALARKIGVILHRMWIDGTTFRWTKSQSTAARA

SEQ ID NO: 364422 - protein, 350 aa, unidentified
MSIVAETVEHVVGIDTHARTHTYCLVHTRTGAVVDTATFPTSKSGNARAISWIHRRSPGSVLAAVEGTSSYGAGITAALLEQGFDVAEVRPAARSAHAHAGKSDLLDAEAAARSAIGRDYNTLARPRQTGARAALRVLLASRSIIDQQRTANRNALTALLRSVDLDVDARKPLTDAQIRVIAAWRIGRGATAAAASGIARREARRLAVTVLEQTELLKDNHRQLHQLTEQLAPGLQDLPGLGPVTAAIIVCAYSHHGRVRSEAAFAALGGIAPLPASSGNTSRHRLSRSGDRQLNRAFDIAVRTRMSYDPATRAYITRRRTEGRTNREIRRCLKRYVCRSVFRQLQASMA

SEQ ID NO: 364423 - protein, 410 aa, unidentified
MTVITITQNTPVLVAIDIAKARHEVLIAVPGKKRRRRLTVLNELADFTRLITALKDYGRPVRAAFEATGNYHRALAYHLATAGFEVKLVSSVALARTREALHNSWDRNDPKDAQVILHMMEIGNEQFYHDPLVRGTNDIQELSKTHDIVSKSKTELWHRVLTHYLPLYFPEADRFHRSSRSDWFFAFLERYPSPHFISAMSKDAFTADAWDVVGRKVAKERLLADIYETSKVSVGLPVALDSDAISMFRLVLGEGRSLIAQRNQIEDRAVALLKDLPDYQLLTSIPGIGPINALTILAEAGDLRRFVHHRQFLKFCGMDLATIQSGTFRGQTKLSKYGNARLRRTLWMAGQVAILQRANSFRDKFERYIAKDRHNTHLRRKAYTAIAAKMARTVHGIIKNGKPYRPFFEG

SEQ ID NO: 364424 - protein, 365 aa, unidentified
MRKLNDKQNYDISFEGENVYIGIDVHLKQWHVCVRTSAISRRPFTQCPDAAVLRAYLDREFPGAAYYSAYESGFCGFSVHRELERRGIKNIVFNPADIRDTQKERLRKTDAVDCVKICRNLMSGDLTPIYVPDETVESHRELLNYRSRLIRLRTAVKNRLKGYVNKHGIKYPTELVSPNRHWSRAFLDWLETAAETGLCRTSARLVKDNIAELRHTNDLVREVDKEILSVLLGYYPEMDLALRSIPGIGRLCSAALCAYIVDINRFESDDRLAGYIGLVPDVRSSDEKAVVLGVTLRGNRMLRSMMIECAWRSIALDPALSMAYTNYIRRGLKPNNAIIRIARKLVNRIRYVLRAGNKYETRKLK

SEQ ID NO: 364425 - protein, 393 aa, unidentified
MTTTREQQSSVPNVRLHLAFDLGWSEWKLAFTIGHGQSPRLRTIRARDQEAVLREIARAKERFGLPAETPVVSCYEAGRDGFWLHRWLLAQGIANVVVDSSSIEVNRRSRRAKSDRLDAGKLVAMLLRYHAGETKLWSVCRIPDVADEDRRRLHRELIELKDERTRHINRLKGLLANQGVALAAVDASFPEKMQEIRLWDGSELAADLKGQLLREHARWQFVDRQVRDLEGERSKRIRRDDTPQVSQVRRLLGLLGVGLNGAWLLVFELFGWRRIRNRKELGSMVGLTPTAYQSGSSSHEQGISRAGNRRVRRVLVELAWCWLRWQPNSALSHCMCGASAKGGHRGARPQVAHRLVALARARGVAGGCPRVPVAAEGERRAERDGSGVNGLRW

SEQ ID NO: 364426 - protein, 283 aa, unidentified
MHRTKVGVDLAKNIIQVCTLHGKKVTSNVEMSTDEFSLWLAQSKPVTVAFEACSTSNYWYQQAIKSGHDARLISAKLVKAVRQNQKTDKNDALAIAQTLFLPEVSFINGKSIEQQQLQSIQRLRELAIKSQNASQKQIVSLLLELNIRLPNTQGGILRGLEGVLEDGEINLSDTFRATLSIAKVQLENMISAIGEYDKYSEQSIQSLPDCKKLLKLEGVGPVNAVNLYIALGASQSQPFKSGKNASACIGLTPVQHSSGGKEVMGTIGKYCKNGSLRLLAATY

SEQ ID NO: 364427 - protein, 473 aa, unidentified
MRRVGDESGDALLMSLTGSSPNDMEEGVVSKGSGLSRGDKRRNAKLAELRRLVPADHVIVGIDLADKKQAVVVCDHDSQVLARKTVKARAWELGPVLEWAQRVAHKHGFCGVTVGCEPTGHRWMVLNQLATQRDMTLMCVNPMLVGRAREAEDYTRDKSDDKDAMLIARLVAQLHCYRPERAEETWARLRQLGARRERLVTEATACVQQLRDLLECVWPGVLEAAADPFGSSNWCAAVAVVLDRCDGRPERLKGRGLARFEAAVVRELGRWGGQRRRRAIIEAVFVALVDPAGVMVQRRGVLERARWVLSDWRAASIRLAEVEARMVEVLDELELTELVTSIPGVSAVGAAAMLAETGDPTRFDSPRALVKHAGLCPRDNASGTFNGRARISRRGRPRLRLAAWRATWGALQHNPVMLARYRYLTTRDDNKLTDGQARAAIAAALLRWLHVVVTQRVRWDGAIAAAQVMPVAA

SEQ ID NO: 364428 - protein, 415 aa, unidentified
MTDERRWYAGVDWASESHHVLLTDGDGRKIGEKIFKHGGEGLAEMAAWLMAMSGVAEPTQIHIAIEVPHGPVVETLIERSFKVHAINPKQMDRFRDRFTLAGAKDDSRDAEVMASALRTDPRCFRLLAVADPVVIELREWSRIAEDLGAERNRLTNRLREQLWRYFPAMLDLESDLGAEWLLDLWETAPTPHKAIRIREATVAKVLKRNRVRRFDAAHVLDVLRKPPVQVAAGTTEAASAHITTLIARIRLVNQQLREAHRQLDALTARLIPSEETGLGQRKQHDVAILASLPGVGRIVLATLLAEAFDALQRRDYAALRSLTGVAPVTKRSGKSCIVVRRQACHDRLANAMYHWARVAVQHDPRSRSKYAALRSRGHSHGRALRSIADRLLNVACAMLKTGTTFNPSLATEKSP

SEQ ID NO: 364429 - protein, 361 aa, unidentified
MKDQSTALDFTGEDIYVGIDVHLRSWTVSIYTAHLEHKTFRQDPSPEHLMRYLRRHFPEGRYHGVYEAGYCGFWIYEVLREAGMDMMVINAADVPTTDRERTYKHDSVDSRKLARSLRSGELRPIYVPSRAALEDRQLLRTRGRLISKQTRVKNQIKAMVRHFGITFPEEFARRHWSAPFIAWLQELREQGMQQRSGSLALGLLLDELHSLRRQILEATRGIRTLSRSDHYRSHVEHLLTIEGIGLISAMILMTELVDIDRFQTFDQLASFVGLVPGKHASGDSDPSQSLTNRRCAQLRFILIESAWVAARRDSRLTQDFERLVKRMKKTNAIVRIARKQLSRIRYVLKNDLPYVSQPLAA

SEQ ID NO: 364430 - protein, 424 aa, unidentified
MSYRIAGIDVHKKMLAVVVSDVEIESEYQFERRVFGGNPEQLRSLAAWLVEQKAEEIVMESTAQYWKPVWETLERYWRPLCERREGARRRSGALHLAQALSNRGRRGRKRDFVDAERLVKRLVARELTLSFVPDAEQRLWRTVTRKKYQLRRDVVRLNNQLEALLEEAHIKLSSLVSDLLGVSARRMLKALADGETNPAALAALAHERLRATPEQLCDALGACTELKPVYRRLLKMALEQLQLLEQQIGQLDQELATLLHPHQDAVQRLAEVPGFAVDSAQQIIAEVGPTAETFPSEKCLSSWVGACPGEEESAGVNYSHRSPKGNRHMRRLLNQAANAAIKVKGSVFEIIYRRCVTRLGHNQTIGVIAHRQCRLIWLILHQGTRYEERGPAVTIRSRYQRTWRMIRQLRNLGYRVELPNPQPS

SEQ ID NO: 364431 - protein, 347 aa, unidentified
MKNYVGLDVSLTNCAVCVLQEDGTRVFEGECSTDPDEIIKTIYLHAGCVERIVHESGPLSIWLSRELDRRGVPVVCIDARAAHKALSARMNKSDRSDAEALAQLARTGWYREVHIKSENSDRLRLLLSARERLVRIRMDIEGQARGILKTFGVRLGVVRKGRSRRDFRDQLSEIVSGDPILEVVFASLIKVHETVCHETTDLDAEIQKYAKDCPLARRLTSVPGVGPIVALSFIATIDDATRFRRAVDVGAYLGLTPRRYQSGETDWSGRISKRGDRSMRKLLYEAANILIQRVAKFSPLKGWAMRLVQRKGLKKATVATARKMAVILTRLWRDGTEFAWTKEALPA

SEQ ID NO: 364432 - protein, 431 aa, unidentified
MAQAKPQVIDDEEHERVYERVAAVDVAKDSGMVCTRTPHRSRPGARQSTVWTVKARMTAIRALGRQLTKDGIEMVTLESTSDYWRIWLYVLEACGLAVQLVNAAQARNLPGRPKTDKLDAMWLARLTEMGLLRPSFVPPAAIRALRDYTRARTRLVQERTRCFQRLEKLLEGALVKLSSVASKLTTESAKDMIKAMIAGERDPHTLAALARTRMKAKHDQLVEALAGMFDDHHGELAQILLDQAAFCDARIAQLTARITAAVAAMPAAWGVDADGTTGPDAGTGPDAAALPAVQRLAEIPGVSPDLARSIIAEVGLDMSRFPTAAHLVSWAGLCPRARQSGPRTRAGKKNQGDSWLRNSLGQAAIGAARTTTTFLGERYGRIARRRGKAKAQVAVARSDRKLPPTWRQQPVILGSVTARVCGDLGGLRRVV

SEQ ID NO: 364433 - protein, 342 aa, unidentified
MEKVSIIGLDIAKRSFQAHGALADGRVAFRKKLSRGKVLAFLAGQSRCVVVMEACGSAHHWGRAIRSLGHDVRLIPPAYVKPFVKRQKNDAADAEAIADAASRPTMRFVAVKTVEQQARAMLFRTRDLLVRQRTQLINALRGHLSEHGVVAAQGPANVKVLEEAVEDQPTSLPLLVAELARVFLDQIEGLSKRISELEKVTVHEAACGETKRRLQTMPGVGPITALAIETFAPPMDVFKRGRDFAAWLGLVPRQHSTGGKQVLGKISKMGQRDIRRLLIIGAMAVVRSALRKGAPEGGWLQRMLARKPKMLVAIALANKMARSVWAMLTKGENFRVPVVAVS

SEQ ID NO: 364434 - protein, 345 aa, unidentified
MEPMYYIGLDVHKRKISYCVKDGSGKVYSEGSLSATRLDLDVWLKTLPHPWSVAMEATMFTGWIYDHLKPHAAALKVAHPLMLRAIAAAKKKNDRIDANKICDCLRCDFLPECYMAPTAIRERRRTLRYRNLLVRQMVQIKIKISALLMESGVSYNKQRLHKAGYFRELLATNPDIDEGLGSLLRLCRETVVRLQKTESAMVRSLERDSLLIDRVERLMTIPAVGPITALTWALEVGEVQRFSSIKKAISYCGLCGAERSSGSTVQRTPLSKQRNKHLQTTLIEAAKMAPRNSPELAMLYDKEKQKGNANRATLAVARKLVAYLVAVDRRQKEFLTVERENRTAA

SEQ ID NO: 364435 - protein, 452 aa, unidentified
MAQRNRDVSLKPGKARALSITHPNAAGIDIGSASHFVAVPPDRDDQSVREFPSFTVDLNALADWLDACGVDTVAMESTGVYWIPLFELLESRGFTVLLVNARHVKNVSGRKSDVLDCQWLQQLMTYGLLSGAFRPSEQVCVLRSLWRQREMLLRSQSRHVQHMQKALTQMNIQLANVITDVVGQTGQRILRAIVAGERDGHVLAAMKDVRIHASADEIAKSLQGNWRAEHLFALKQALQAFDFLGTQLAECDVQIEAQLQSLQVHEGEPAKGKKRSRSRNAPKFDLRARLFKLCGVDLTRIDGIDVTTALAVISETGTDMSRFASVAHFASWLGLCPGTRITGGKVMSGKTKRVANRAAQALRLAAAGLRTSQSALGAYYRRMCSRMDKPKAVAAAAHKLARLIYTMLTKGEEYVDQGQAYYEQRYRERVLHNLAQRASKMGMQLVAVQQPS

SEQ ID NO: 364436 - protein, 354 aa, unidentified
MKYHTSTTQFNCGIDLHARQMYVCLMDRDGKKLVHTNIKNNDFAFFLKLVAPYRHDLTVCAECMFGWYWLADACQAASIHFVLAHALYLKAIHGGKNKNDRIDSEKLAHLLRTNYIPPGYVYPAAQRPLRALLRQRLLYVWNRGDLLSRIQSHQLAHNRPALRQTRYNRDPWEEQLLAQEENPVRQFALQNDMALIRHYDAQLATLEKELLKLTKQTASRDFTLLQTVTGIGDYLGLTLLHEIGDIARFPTVKDFISYCRLVKGTVASAGKIKGLRGAKLGNPYLRWAFGEAAVIAKRDAVLGPLAQRLEARMGGNKFKANTVLAIKLARAVYFMLKNKTVFDADRLVAALSRN

SEQ ID NO: 364437 - protein, 412 aa, unidentified
MNNPQDYLFVGVDTHKAQHTAVVINCFHQKIGFAQTPNNPADFDSFLTKLKTLIHNDEKLVFGLEDTQGLGHSLAQWLIKKDYTVKEINPVQTKRERKQSTSPDKSDKVDAEAIANVLLTEYDKLPVIKNDANFKAVRQLNNQRKNLIKEQTRVKNRLHNLIHQQYPEYKKFFSDPFGKTALAFWKKYPHPNELKHIGEKRLNNFLKKQAKSISNDKASHILSLVDKDKPQDISTETRESLIPMLIKQLKLIRQNLEKINHLLKKSVEDSQYKLTTMPGIDFKLAALFISNIKNIDRFDSADQLARYAGLAPVEYSSGKSHKSTSKKYGCRDLNHAFYILALQQIGSYKNGRIKNPVAYNYYQKKLKEGKSKKGSLTCLQRRLVDIIYAMMRDRSVYELPEIPNYEILNRAV

SEQ ID NO: 364438 - protein, 347 aa, unidentified
MLNTNLIAIDLAKSSFHVCNLTKNNKVTVDRSFTAKKLKEWLIKQPLSTVAIEACGSAHYWAQFVQEHGHTAVLLPAKAVAPFRQGHKTDRNDALAIAIAAKQPMIKTVAVKSREEQALQSIERMRKHHSDEITATGNLLRGLVYEFGITIPKGHSALKREIPLILEDGENLLPNVLRQQLANMYQFYLATQTELEKVEKELFSLINKNKSCQKIMALEGVGPVNALGLTLSLGKEGKSFKNGREASACIGLTPKQYSTGGIVTLGGIGKNRGNKQLRSTLIQGALAVIKVLQKREPKTQKEVWLKALMGRAGMRKAAVALANKNIRTAWALLNCGTEYHPSTIMAG

SEQ ID NO: 364439 - protein, 427 aa, unidentified
MSTLFVGIDVSSKTNAVYAMDFEENKYISSSFGNNQPGADQLVNMIAECMQKHKNLDTVLIVLESTSVYSVHISNFLSASEVLMPYRPYVFCVNPKAASNYRKSYIGMEKTDPTDAYLIADFGRVGRTKKLEPWRGGQFISLKRLTRHRMHLSECITREKTYMVSNLYLKFSELQLLEGDDKPFGSLYGATSSAVLTEFLSPQEIIDMPEEDLLTFLAGKSRNRISDLSKTSELLRKAARDSYRLDKCMYEPLSISLASSFNCIHAYQKEIKLIEQAIEKCINGMNPNALLILQSIPGIGPIWASGILSEIGDITVFHSSDALAKYAGLYWPKGDSGDFTSEDNKMSKAGNPYLRCYLGEAANSVRKHIPEYADFYARKYAEVTKHQHKRALALTSRKLVRLVFGLLVKNQLYTGEKLDTEYNIESN

SEQ ID NO: 364440 - protein, 414 aa, unidentified
MKLQFDRVCGLDVHRDTVAACVRLPGSGAERQEFVQTFGTTTAELLALRDWLGAHGVTHVAMESTGVLWKPVYYALEGAFTVLLVNAAHIKNVPGRKTDVKDCQWIAQLLECGLLSASFVPPPEIRELRELTRYRAELIHERTREVQRLHKVLQDAGIKLSSVATNIMGVSGRAMVEALIQGTRDPGVLAELAKSGLRKKLPQLREALRGRFGSRHAFVAGELLAHIDYIEEAMERLTERIEECLRPFAREVEILQSIPGVKGKTAAKVLGEIGVNMKQFPSSKHIASWAGICPGNNKSAGKHKKCGTRKGNGWLKAALVEAAWGAVRNRNTAMSGQYFRLRSRLGPKKAIVAVAHSLLVIMYECLSHGKKYEELGADYYDKLNAKLLRDRYVNKLRRMGYTVTLERAVEDPAA

SEQ ID NO: 364441 - protein, 357 aa, unidentified
MADLETTVIGGVDCHLDTHHAVALDTHGRRLGDQSFPTTSHGYHQLLAWLQHFGRVHAVGVESTASYGAGLTRYLVGAGLTVIEVNQPHRQVRRRRGKTDALDAEGAARSVLAGEATAVPKDTTGSVEAIRQLRLARASAVKARTAALTQLGEVIATAPAALRERLSGPASLHARATRCARLRADQARLQLPLEAAKFVLRSLSQRILALDAEIARFDAHLATLVASVAPRTTALLGVGTLTAAQLLITIGQNAARMGDEAAFAHLCGVAPIPASSGKTNRHRLNIGGDRQANAALYLIAVCRLRYCERTRAYAARRTHAGRSKRDTLRCLKRYIAREVFHTLRADLAALTAQPAPA

SEQ ID NO: 364442 - protein, 319 aa, unidentified
MAAFKSEFEVKRLKCAGLDVHKKVIVAAIIDTHPETLEASYKVKKFSTMNDDIPAMKDWLLENNCKDVCMESTGKYWIPVFNTLEPHMDNTVLTHPKYVRAIKGKKTDKRDAKWIANLFRFDIVKSSFIPPSDIRAMRELSRYRLKLSYMATSEKNRYQNSMTISRIRLDSVLSDPFGKSASAIMGYLLSTETIDDEKVLSMVDSRVKASSEDILRSVHGFKILAEQKFKMEHAQSHLDMINASIAEINSEINKLCAPYKKQVDNITTVPGFTSLSASYLIAEIGTDMSVFESDKHFISWCGVCPASNNSADTALTIKL

SEQ ID NO: 364443 - protein, 340 aa, unidentified
MKQIKRIGIDLAKSVFQVHGVDAHENVVLRKQLKRAKLRAFFAQCPACQIGMEACGSAHYWARELGKLGHTVHLIAPQFVTPYRKNDKNDGNDAEAICEALGRPTMRYVPIKDEEQQAVLCVHRARSLLVEERTALANQLRGLLAEYGLIIPQGVARLRAALPGILEDAENGVPMLAREVFADFTERLRGLDTHIAAYDRRITHLARTMTAAKRLMQVEGIGPLTATALVASVGDARLFKNGRQFAAWLGLVPRQHSTGGKSRLGRITKRGDVYLRTLLVHGARSVLMHRAEKTDAKSRWGAALQARRGFNKAAVALAAKHARILWALLAHEADYKPATA

SEQ ID NO: 364444 - protein, 350 aa, unidentified
MKTKHPIIIGIDTHKATHVAVAIDTQGARLAALSIPANTKGYLELERWSCGLGSVQAFGIEGTGSYGAGLSRSLLAQGHHVVEVTRPNRQLRYTQGKTDSLDAEGAARSVLSGHANARPKTQTGSSEMIRHLKVVRDTAVKSRSQALVTLKTLIINAPADLREVLDQIKGKIGLIRHIAAFRPGEILNTLASAKAAMRALARRWLLLNEEILGHDKELERLVTKRAPDLMESHGIATLTVAEMLILVGDDPTRIRSEAAFAKLCGVCPIPASSGQTHRFRLNRGGNRQANAALYRVAIVRMRSHEPTLAYVKKRTKDGKTKSEIIRCLKRYIVREIYSQLCVPRTIKIAA

SEQ ID NO: 364445 - protein, 335 aa, unidentified
MDKMEACGIEVSAAELVVAWGGEKKEVREQRFANTAAGHKMLLRALTRGGKRVRAVMEATGLYGLDVALVLSEEAGVELMVANPRAVRHFAQAMMQRSKNDRLDAAVLWEFAARMPFHRWVRPGANTLALWAIARRLEVLTKQRTAEKNRQHAAQISLAAPAIVRKEIARSLLELQRAILRLRREALRCVAAEAQLQQRYELLCSIPGVGSVSAIQVLAELAMLPEDRDVRQWVAFAGLDPREYSSGTSVRKHTRISKVGNRHLRHALYMPALVACRHEPHLRGFYEHLLARGKKKRQALVAVARKLLHAIYGMFRSGQRYDGFRLFVLPAAINT

SEQ ID NO: 364446 - protein, 338 aa, unidentified
MEVAVIGIDLAKDVFQVFGVDARGRAVLTKRLRRPQLAPFVAALSPCLIGLEACASAFHWARQFQARGHTVRIISPQFVKPFIRGNKNDGNDAAAICEAVQRPNMRFVPLKSVEQQDVQSLHRARQRLVNHRTALISQMRGILLDRGIVFAKSATRARRFLPLILSDPTSELSPLMRETLASLLELLRELDARVKRFDRQIADVFQASPVCQRIAQVEGVGPKTATAVVAAVGNAHDFKNGRHLAAWLGLVPRHRASGDRITLGGISKRGDQHLRTLLVHGARAVVRTAVRKTDARSQWVNALVARRGVNRAIVAVANKNARIIWALLARQEDYRRAA

SEQ ID NO: 364447 - protein, 348 aa, unidentified
MDHIAIDLGSRESQVCVRTATGEIVEERRVGTRSLGPYLAKRPRSRVVLETCAEAFAVADAATAAGHETVVVPATLAPSLGVGERGVKTDTRDARNLSEASCRMSRLPAVHVPAKTSRDRKAMCGMREALVQTRTKLINAVRGWTRPQGLGVVRSGSAETFPSRVKEHVASRSGSIPSYVERLLTVLDTLSTEILAADEELKTAAVSDPTCQLLMTAPGVGPVTAVRFAAAIDDVGRFADAHRLASYLGLTPGERSSGQKQKRTGLTKAGPNKLRWTLVQAAWVARRYYKDHPMVAWSLEVENRRGKPIAVMALARKLAGVLYAIWRDAVPYDKSHRAPVTRAATVGA

SEQ ID NO: 364448 - protein, 341 aa, unidentified
MNVKTIGIDLAKNVFQIHGVDEHGKRLFNKQLRRAQMASFFANIPPCLIGMEACASAHFWANKLISMGHNVKLMAPQFVKPYVKTNMHDAADAEAICEAVTRPNMRFVPVKTAEQQAVLALHRSRQSFVKQRTAQANQIRGLLAEFGIVVPRGIQQLQRRLPELVEDADNPLPVLFRTQLSLLQHHMAYLFDVIATLDKQIEQCYRQNALCQRIGKIPGIGPVTASALIATIGKANNFENGRQLAAWLGLVPRQHSSGGKQVLLGISKRGDTYLRTLLIHGARAVLQSAKHKQDAVSSWANQLMARRNNNIASVALANKNARTVWALLAKEREYCAPIISA

SEQ ID NO: 364449 - protein, 359 aa, unidentified
MDVSKERPKTTAGLDLGERYSYLCLIDTQSGEVIEEGRLRTTPEAFSRRFASERPMRIAIEAGTHSPWVSRLLEECGHEVLVANARKTRLIYTNKRKTDEIDAQNLARLARLDPKLLYPLRHRGEDSQAHMAILRSRQVLVGSRTQLVNHVRGAVKSFGGRLPKCPARSFHNKAAEHIPEALRPALGPVLETIRSLTELIRDYDRKLETVSKERYPETELLRQVEGVGPLTALTFVLTLEDPYRFEKSRSVGAYLGLVPARDQSGGKDPQKRISKEGDEMLRKLLVGNSHYILGPFGSDSDLRRHGEKIASRGGKNAKKRAAVAVARKLAVLLHHLWISGEVYDPLHNTHRRQEREEAA

SEQ ID NO: 364450 - protein, 367 aa, unidentified
MKKVSTAATKQSRNISQQQLTIGLDLGDRNSWYCVLDETGRIQLEQRVRTTAKVLQEVFGAMPRSRIALEIGTHSPWISRLLSELGHEVIVANARKVRLIGESRKKDDRLDAQTLARLARIDPQLLYPVKHRSVQAQADLMTIRARAGLVRARTALVNTARGLAKSYGERLRGCNVRNMNPEKAESLSPELQAALEPLLNAIESLSERIVEYNERIENLAQQSYPQVALLKQVKGVGTLIALTFLLTLEDPHRFRKSRDVGGYLGLQPGRRKSGESEPQLHISKEGDPYLRTLLVQGAQHILGPFGVDCDLRRWGLKLAERGGRNGKKRAIVATARKLAVLLHHLWVSGEVYEPLHNSNQVTVTAAA

SEQ ID NO: 364451 - protein, 401 aa, unidentified
MQEPLQHNSIDVFVGVDVGKGQHHAVALDRSGKRLYNKALPNDEAKLRALINELKAYGQLLFVVDQPATIGALPMAVARDEGVLVAYLPGLAMRRIADLHAGEAKADARDAAIIAEAARSMPHTLRSLRLADEPLAELTMLCGFDDDLAAQVTQTSNRIRGLLTQIHPALERVLGPRLDHPAVLDLLERYPSPAALAETSEKTLANRLTKLAPRMGKRLAAEIVQALGEQTVVVPGTQAATVVMPRLAKQLAALLQQRDEVASEVERLVHAHPLYSVLTSMPGVGVRTAARLLTEVAHKTFASAAHLAAYAGLAPVTRRSGSSIRGEHPSRRGNKVLKRTLFLSAFAALRDPLSRAYYSRKIQQGKRHNQALIALARRRCDVMFAMLRDGTFYQPQTAPNA

SEQ ID NO: 364452 - protein, 339 aa, unidentified
MAHMIVGVDIAKNVMQVHWVDPESGEIVNRSIKRAAFLEYFANRKPCLVGMESCSGSQHWARRLIEMGHRVKLMPAKFVKAFNIRNKNDAADARAIWMATQMDCREVAVKSEAQQAILALHRMRQQLVKFRTMQTNSLRGLISEYGEVMGVGRAALDKAMVGVLERLSGRLPAILIDTLREQWKGLDDVDRQIGQIERRMREWMKGDQAVKAIAAIPGVGLLTATAAVATMGHAKAFKSGREFAAWLGLVPGQTGSGGTIKLQGISKRGDTYLRTLLVHGARSIIYRAKEPGLWVEQMKQRRPLNVVIVAMANKLARIIWAVLAHQQPYRKDYVSTRPA

SEQ ID NO: 364453 - protein, 350 aa, unidentified
MWYSGIDQHKAYCVITTYGPEGPRVKQARVASTPLALQQYFAESPGPQQAVVESTGAWYWLADTLAGVGVELVLAHATRVKAIAAAKVKTDKVDSNTLPLLLRADLIPAAHMIGPAQRAPRDLMRTRLRLVAKSVSAQNSIDRLLEKFNARDVGELDELYQLQARCHAAQIQLLENQIRTLERALHPHLIPNADVQRLLWVPGLGKVSAFTIYTEIDGIARFPTARQFFSYCRLVPGADNSGGHTRHRSGSKAGNRYLKLAFSHAGIRAVQYYPEIRGFFKAKARKKPIRIARTLVALELARIVYHVLTKQEAFNGRFKDRPLSRHKQAQWPRRASPPVLTETPQGGSRA

SEQ ID NO: 364454 - protein, 410 aa, unidentified
MNCTQNKKIEQVKETTMIVGIDVGSEKHYFRAFNWRGIELTRKPVAFSNSMEGFNSFYNTIVELMQKSELEEALVGIEPTGHYWFDLGQFMGEKDIKFVMVNPHHVHKTKELDDNSPSKNDRKDPRVIAGLVRDGRYFYSYMPTGAYAELRNASNRRFVLVEEQTRAKNRLQKWIAVYFPEYKGIYTHIDAKGGMLVLKKAPTPEEIVRLGVEGIIKIWKDAKLRGNGHKKAMLILAAAMRSIGLKAGLTEARMEIQDLIEDYELQTKRLERVNDLIKGLCQQVRYADKLLEIKGIGITTVAGFIAEVGDITRFDSTKELQKLAGLELVADSSGKHNGKTKISKRGRKRLRYLLFEAAISVVGKNEEFKEIHRYYTTREKNPLKKMQSLIVVACKLIRVFHVILTIICTI

SEQ ID NO: 364455 - protein, 312 aa, unidentified
MTYVGIDVSKAALDGADATGQAWQHANDGAGIAATVAQLVARAPTLVVLEATGAYHVPLTAALAAAGVPVAVVNPRQVRRFAESVGQLAKTDRLDAALLARFAATVRPVARPLPDAATQELAALVDRRRQLVEMLTMEHNRLAVARRSVQPSVRQTIRALERALRALAEETDRWIQDSPLWRAREDLLTSVPGIGPQTARMLIARLTELGALSAKEIAALVGLAPFAQESGRWRGGRRIRGGRADVRTALYMATLAAIRCNAVVRAMYRRLVAAGKPKKLAITACMRRLLVILNAMVKHQTRWQASPTPTTA

SEQ ID NO: 364456 - protein, 402 aa, unidentified
MNCVGIDVSKGKSMIAVMRPFGEVVVSPFEVLHTDSELSELARLLKSLDGETRVVMEATGNYHAPVAWLLHDAGLYVSVVNAMLVHDYGNNSLRRAKTDKKDAVKLANYGLDHWLTLPRYIPEEDTRLMLKICYRQYQQYSKVQTMLKNNLISLLDTTFPDANRLFTSPPRADGSEKWVDFVATFWHCECVCGRSEKAFTTQYQKWCRKHGYNFNENKALDIYASACGHFGVMPKTDTTKLLVEQAISQLRATSAALAALKQEMQSLAASLPEYPVVMGMFGVGPTLGPQLLAEIGDVRRFHSKKALVAFAGIGAPPYQSGQIDVRSRSISKRGSASLRRTLFLVMSVILQCAPIDEPVYQFMDKKRSEGKPYRVYMMASANKFLRIYYASVKAYLESLEHD

SEQ ID NO: 364457 - protein, 409 aa, unidentified
MSTNACSNVFAGLDWAVHTHAVCVIDASGTVLERFEIAHDREGLSELMRRLARFGARVRIAIERPSGLIVDALVEAGHHVFPIHPNAVKASRPRYRSHGAKSDASDAYLLADLLRTDGHRWRELSPQSDSIRALRALVRARDDLVATRVALGNQLRSQLEAFWPGAACIFYDITSPIGLAFLQRYPSPTSAARLSEAALRRFCRSQHYSGRRSPAELLARLDSAAAGLAGPLTADAAGQLVRSMVAVLQPLVEQIAELTRRIERFVESLPDGQIIMSFPRAGHVCAAQILAELGDVRERFPTLDQLAAEAGAVPVTYQSGKTRSVAFRWACNHRLRQAITCLADNSRHANEWARSIYSAARARGCDHPHAVRILARAWLRVIWRAWTDHTTYDPARHLGALKLASSEQG

SEQ ID NO: 364458 - protein, 353 aa, unidentified
MKTKTESGTGLPTIIGIDIGKEVFHLVGFGADGKITFRRKIRRLGLKDAFERLAPCIVGMEACLSAHFVSRTLRALGHEPRIIPAIYVKPFVKGQKNDYNDAEAIAEAALRPNLHFVQEKSQDQLDLQAYHRVRSRLVSRRTATINQIRAFLIEQGIAVRAGPRALRNSLFAILENRKDEISPRMARLILDLYQDWCHLDERIDAVTGEIEELSRVEAKCQRLMSVPGIGPVISTGLVAAIGTGEAFDRGRDFGAWLGLVPRQYSTGGRSVLGRISKRGSKYLRTLLIQAAKVLLMRPHNWPRYSFGVWLKAASERLHRNKLAVALANKLARIAWSVLRHDKAFDTHLETAAI

SEQ ID NO: 364459 - protein, 434 aa, unidentified
MTTSLFAGREALRNVDVAIGAVGEAGQKRDRRMHVIETGDIDVFLGLDVGKGEHHATAVTPAGKKAFDKRLPNTEPKLRELFAKLQAKHGTVLVVVDQPASIGALPLAVARDMGCPVAYLPGLTMRRIADLYPGEAKTDARDAFIIADAARAMPHTLRSVDLEDETIAELEMIVGFDDDLTGEATRVANRLHGLLTQIHPSLERVLGPRLQHPAVLTMLERFGSPAQIRKAGRRRLVTLLRPKAPRMAERLVEDIFTALDEQTVVVPGTEAAALIVPSLASSLQAVLDQRKLLAGRIEELLEAHPLSQVLISMPGIGIRTGARILIEVGDGSSFPSAAHLAAYAGLAPATRNSGSSIRGEQPSRRGNKQLKRAFFLSAFAALGDPASRAYYDKKIGQGKHHTQALLCLARRRADVLFAMLRDGTFYEPQPATAR

SEQ ID NO: 364460 - protein, 380 aa, unidentified
MDVHSTNYTLCAMEPTIGSEDRVFGEVQIAPDYKEVICFIESLKLKLGFYNDYSIECGYEAGCLGYTLYHQLTGAGIKCVILAPTTMLSQQGQRIKTDKRDAHLIAQCLCYGGYHPVYIPTGEDDAVKEYLRMRDDHKLALKKLKQQINAFVLRHGHQYDGTKWTIKHVVWLKKVELDPMYRETLDEYMASYEEQEAKIERYDKRIEEIAAEARYQENAKKLGCFLGIRTHTALSLIVETGDFKRFAKGNTYAAFLGLAPGEHSSSKSVNRLGITKAGNTHLRRLLIEAAKGICKGAVGHKSRELRSRQIGQSAEVIAYADKANTRMRSKYYKMIRHGKKKNVAVAAVARELACFIWGMMTGNISINSGAGTSVPAVSQG

SEQ ID NO: 364461 - protein, 345 aa, unidentified
MAEVSTIGLDIAKAVFHAHGADARGQMVFSRRLTRAKLLEFFAAQPRCVVALEACGGAHHWAREIASLGHEVKLIPPAYVKPFVKRNKNDAVDAEAICEAAQRPSMRYAAIKTEAQQAAGMVFRTRDLLVRQRTQLINAIRGHLTEFGWVAPKGPLHISVLASLLDEGEEIGASLPEAARSMFLVMTGQLEQLNEQVALLDKEIARRAREDEAARRLMTIPGIGPITATALLALAPPAEGFARGRDFAAWLGLTPRQHSTGGKERLGAISKMGERTLRRLLIIGSSAVVLQASKRGAPRGSWLDQMLARKPRMLVTVALANKIARIIWAVLMKGEDYRAPVAAAA

SEQ ID NO: 364462 - protein, 362 aa, unidentified
MRIIGCDLHTRQQTIAMLDTTTGEVVNLTLTHEGNNVREFYSTLPRPVRVGIEATGSMMWFVNLMEELGIECQVGHPAKIRAAEPRKQKHDRRDADLILTLLVGNRFPAIWLPSKELLDLRSLLRHRHQWVRMRTRVQNALQAIALANGLRRGPSLWSHDGQNTIASLPLTPHTAYRRSELQALYAKFEAEIEKLNQRVEEQACGRPGARLLMTHPGVGPVTALATDVFLGDAARFADRKALASYVGMIPREYSSGGRQRLGGLSKQGNPLLRFLWGEAGAHAVRRDPELKRFYRRKLNQKGFGKASVAVARKLGIRLWIMLRDQIEYKEFCRRGQKQQKSSDACAGMPETRYGATSHRPVD

SEQ ID NO: 364463 - protein, 423 aa, unidentified
MEIVTEEEVYYERCAGIDVHKKLLVVCLRIGRKSEIREFGTLTHEIRGMAAWLKDNGCQMAAMESTGSYWKPLYNIFEQEGLPAMVCNAYHIKNVPGRKTDVNDAQWIARCLSQGLLKPSFVPDRQQRELRDMTRFRKSQIEERARNINRLQKFLEGANIKMGSWLSDVEGKSATQLLELVIGKPDFTVDDVAVRMSKNMKSSPDEIFLALEGSMTPTQREFFEHVMNIIREQTAQIEFTDGMIQRMLDDNYKAAVAALDVIPGIGKVSAEQIIAEIGIDMSRFNGPDKLCKWAGVCPGNNESAGKRKSGKTPPGNKTLKSTLAQCAKSAKNKKDSFFFAQYGRLVSHCGKNKATIAVAHSLLIAIYFVLSGNDFKDLGADYYNKFNREKKINSHIKQLSKLGFVIPNDVLRDAIIASMQETA

SEQ ID NO: 364464 - protein, 347 aa, unidentified
MNFYTQQHKHYCGIDLHARAMYVCILDQSGTILVHKNLPTTPEAFLRIIAPYRDDVVVGVECIFTWYWLADLCAKEGIAFVLGHALYMKAIHGGKAKNDKIDAHKIAVLLRGGMLPQAYVYPAEMRATRDLLRRRCHLVRKRAELLAHIHNTNSQYNLPEIGKKLAYKANREGVEEHFPDPSVRKTIEVDVSLIDHYDKLLGEVELYITRSAKAHDVQTFSRLQSVPGIGQILALVILYEIQDITRFPRVQDFVSYCRLVKCAKESGGKRLGTSGKKIGNVHLRWAFAEAAVLFLRHNQPGKAYFTKLEHKHGKAKALTVLAHKLGRAVYYMLTREQAFDLNRFVTA

SEQ ID NO: 364465 - protein, 341 aa, unidentified
MEKATIIGIDLAKRVFQVHVAAKDGRPVLRTRVSRAQLLGLLAKQPPAIVAMEACATAHEWGRAISGLGHDVRLVPPIYVKPFVRRQKNDAADAEAIAEAASRPTMRFVALKTEEQQARSMTFRTRDLLVRQRTQLVNALRGHLAEHGIVAAQGLAKVKVLATAMQDTGSLHPLVRELGQRYLDHIARLDVEIAELDKRLRQLSKEDETAKRLQTMPGMGPITAAAIEAFAPPMATFKRGRDFAAWLGLVPRQHTTGGKPRLGRTSKMGQRDIRRLLIIGAMSVVRWAVRKGAAEGSWLGRMLAKKPRLVVAVALANKMARSVWAMLSKGEEYRGSALASA

SEQ ID NO: 364466 - protein, 286 aa, unidentified
MNSEKYIGLDVHQATISVAVLDSTGKLVMESILETKAATILEFLAGLRGTLSVTFEEGTWAAWLYDVLNPHVTKLVVCNPRKNALLKDGNKSDRIDAHKLAELLYLNKLSSVYHGETGVRMLRELARSYLTIVKDLTRVMCRLKAVYRSWAIPCAGRDVYYTRHRDQWLGKIKEAGVRRRAERLYQQLDMLQQLRQQARRELLAESRRHSITARLRQIPSLGPIRSALAVALIQTPNRFRTKRQLWAYSGLALETRTSGEHCFVQGQLRRSKKQISIRGLSHPGTT

SEQ ID NO: 364467 - protein, 396 aa, unidentified
MMTPDDIDVWVGLDVGKSAHHAHALDHDGNTLYDKPLKQDEKAIRTMLGKLSKHGRVLLVVDQPNTIGSLPLTVARNMGIAVAYLPGTAMRRTAQLLPGDAKTDRRDAHVIAWAALKLPETLRDAGPDDETLAALKLLAGHDEDLAHESTRHVNRLRSLLLQTHPAFERALKGERITRDATLALLERYGGPMGVKRAGIEDVKDWAKSNGLRAGRIIDDMFKAIGEQTVTVPGTLMAETIIPSIAHDIKTIRDRRREVDRQVEKLLEDHPLLTVLTSMPGIGVRTASNILLGIGGDIANFKSSAYAGISPVTGQSGTSIKGERPSRRGNKRLKNALWQTAFVASTKHPPSVAYYKRKREQGKHHNAAIICLARRRCDVIYSMLKNGTLYQEPALVA

SEQ ID NO: 364468 - protein, 323 aa, unidentified
MQGKIERSAPAKIYVGIDASKAWLDVASTPISTSFRVANDKRGHKALMKKLSGLEVAAVVIEATGKYHRGVHICLHERGLPVCVVNPYRSRKFADALGELAKTDKIDAMVLARYAELVEPEAQAPAPKAVAEMAELVHARNTAVAAQTALRNRLGAAHSSLLKRELRIPLRSSAAHIKRLEKAIRVVITDNAELTRRYKILTSIPGIGPIAAAGLVGLMAELGTLSSKQVAALVGVAPMNWDSGQMRGRRAIKGGRPAVRRLIYIAALSAAVRGANPDLKVFYDQLRRRGKASKVAIVAAMRKLVILANTLIAQDRQWSPKPT

SEQ ID NO: 364469 - protein, 322 aa, unidentified
MSVSNQRCAGIDVSKSTLDIAISSIAQPFTVPNEDGGFNQILKELKRSETQLILMEATGGLESGVAGYLQSESFDVVVINPRQARDFARAMGYLAKTDQIDARVLLQMAKVINQHPAREKYIRPLTDAHRQLLAAMVVRRRQLTTMLTAERNRLHPSHPQNQESIRFIISVLKSEMARIEAEMSAYISKNFSELSALLSAVKGVGAATVAVLLAEVPELGTLSRREISALIGVAPVNRDSGTMRGRRTVFGGRASVRTALYMSALVGTRHNPVIKEFYTRLVAAGKPKKVALTACIRKLLTILNAMLKNNEAWDPLYHQHAS

SEQ ID NO: 364470 - protein, 428 aa, unidentified
MTASSSSTPSPMWVAIDIAKTHHVVLVEHPDGRRRHFRIANTLEDFTKFSAFLSHSEGSCRIAFEPTGDYHRPLAYFLRAQGFSVALVSSVAVARTREALYNSWDKNDPKDAQVILHLLKTGTTQVYHDPLEHGYLDLQELAHTYQQISLRKTQLLHRLLTHYLPLYFPEAERYQHSSRAEWWTRLMLLVPCPAAVRKYSQEEFIAVARRLEAHKIDKTRWLADFYQTARTSIGLPVPEGSEAIRMFRLVLQEYLHLCRLRDDLEAQVVEYLSDHPDFRRLQTIPGIGPILALFILAEAGDLRRFHHSRQFLKYCGLNLSTAQSGQFRGITKLSKRGNARLRYAFWVAGTVAVRVKQNSFCRKFQDYIRPDPLNPDRRRKAYTAVAAQMARVAYAIVKAGTDYRRFPEATMPGGRIPSRRAVEAITTS

SEQ ID NO: 364471 - protein, 400 aa, unidentified
MYFVGIDWADKFHQVCILDAKRKMVLEFAITHSYSGFSTLMRELEKLTKDRSQIGLICETKHNLLISFLLKEGYTVYCVNPKAINRFRDTKRASTAKSDSFDAFCLADFLASNKEMLKPLPHDDEKVKKADSLYRFRSRLVRQKVSIQNSLKSHLKSYYPRSLELFGLDTKIFASFLKKYPTPESLGRETKEGFVNFLKEMRYTQSVRINKLAEIIKQEQIKVDKTVAESASTFTLMILAQLELVTFQIANIEQQIEEFISSFEPARLITSIPGAGAVVAAGIIAGLGEPGRYSSASAVQCLAGTAPVTRQSGNYKYVRMRKSCNKHLRNASQHLAFSSISYCKWAKEFYNMQRKKGKSHHGALRTLANKWFRIIFAMLKNNTPYNESCYLANKQRFCTA

SEQ ID NO: 364472 - protein, 358 aa, unidentified
MQSVTRVGIDLAKMFIQVHAVDAVGKLVCNKQLSRDKFIAWCNQLPAGCLVAMEACSGSHAWARKLIALGLDAKIIAANHVAPYRLEGKGGKNDANDAAAICEAASRPSMRFVPVKTLSQQGMLCVHRYREGVKEERTANINRIRGLLAEFGIIAPQSPNKLRERLAEIIEDADNDLCGIARMVIQEAFSHWDEIDKQLEWCAQRISAHVKENQQAQAAVQLMGVGPVTASAAVVTVGDFKQFKNGAQFGAWLGLTPRQNSSGGKTKLGRITKRGDVYLRMLLIQAAKAAVMTAHKRDDPISRWLLQLREKSGWQKAAVAMANKNARILWAVMTKGCDFDPRYVSVKPSGGGSIAADI

SEQ ID NO: 364473 - protein, 424 aa, unidentified
MQYARIQVLPDIPPGGVCAGIDWASKDHVACVVDMAGRVTDRFSAAHDKAGIAGMIARLRRSGAAEVAIERSDGVLVGALLAAGLTVVVITSRQVRNLRSRYGAAGGKDDRFDSYVLADTLRTDRARLRPLAADTPATIALRSAVRARKDLVAHRVAAANQLRAHLAVAFPAAVGLFSELDSVLSLAFLARFGSQDAAAGLDENAIAGWLNSLPARGNPAPPGVLCARLRSAPPGATGGHGAAQAGVTAALAAALAGLAAQIKALETQIAGQLAAHPDSHIFTSLPRAGTLRAARLLAEIGDCRSRFPDPWSLAALAGTAPVTRRSGTHISHTFRWAVSHQLRDAVCDFAGDSRHANPWAAAIYHDARDRGKDHPHAVRITARAWIYVIWRCWQDGTAYDPAKHNAFQAILARKAAAAGDGQGQ

SEQ ID NO: 364474 - protein, 300 aa, unidentified
MKIPSNARAIERYVALDIHKEYVMAGGMNAAQEWVLRPRRVEMERFRAWAISNLRMGDAVVIEATTNVWDIYDIVVGLVSRVVVAHPAAVEQIAEARVKTDKQDIERLLRLLIAGIVPEVWVPPVHVRELRALISYRWRLVKMSIMIQNRLHSLLHRHNIHPPEGGLDTEKNRSWWEQQEFSPLETLQVKQELATLYQVERHKREIEQELGRMSNSEPWASQAAYLMQLPGVGVVITMTALAAIGDIGRFESPKKAGGLCWLGCGRARQRQGASRQEDHQVRTQGVALGDDRGGVAGGLA

SEQ ID NO: 364475 - protein, 384 aa, unidentified
MSKDSIIFIGLDTHKSFIQVAVLQEHRGANPQQLGRIKSNKSALIKLAKQLQSKYPKATLHFVYEAGPCGYWTYRLITSIGHCCYVVAPSLIPKKPGDRVKTDKRDAVKLAKLLKAEELTPIYVPEAEDEAIRDLSRARETAMKDLKDAKFQLKGFLLRNNIQATVNDNWSKKHLRWLTDLILPHHCQQIVLQEMIITINERIQRLQRLDNELLHQVKNWRYYPVVKAIQAMRGVRLLVALGTIAELGDLRRFDHPRKLMAYLGLVPTENSSGGKTRRGSLTKCGNSRARRLLVEGAHTYKHKANISVELQLRQEGLPKEIVDIAWQAQQRLCRRYQRLLQKGKHRNVVVVAIAREMIAYIWAIAREVVISDVDPKTRIARLPA

SEQ ID NO: 364476 - protein, 341 aa, unidentified
MNSIYYIGLDIHKKVIAYCIKRIDGALIRQGTVAAERKALNRWLAELPGPWYGAMEATLFTGWVYDFLKPYAVELKVAHPAMLKAITAAKKKNDRADAEKIADLLRVNLLPECHMMPEELRELRRVLRYRNMIVSTAVKMKNKMSGLLMEVGAVYDKKRLHGKKYFGALLERVEDVPDSVKGLLKLSRNGFEMFDDIQKQLVAALRKNRMIRERVERLMSIPGVGELTALTWVLEIGEVSRFNSSRQIISYCGLCSGQHESAGKEQRGPISKKRNKHLQTKLIEAAKLAPHWNEQLALLHEKELARGNKNRATLVVARKLVEFMLAVDRRETNFELLKEAA

SEQ ID NO: 364477 - protein, 368 aa, unidentified
MKKVSTAVAKQSRNISQQKLTIGLDLGDRNSWYCVLDEAGQVQLEQRVRTHAKALGEVFGAMPGSRIALETGTHSPWISRLLGELGHEVIVANARKVRLIGESRKKDDRLDAQTLARLARIDPQLLCPVKHRNAQAQADLMMIRARAGLVRARTGLVNTARGLAKSYGERLRGCNVRNMNPEKVEGLSPELQRALEPLLSAIAELSEQIREYNERIEKLAQESYPQVALLKQIKGVGTLIAVTFLLTLEDPHRFRKSRDVGCYLGLQPGRRNSGRSEPQMHISKEGDPYLRTLLVQGAQHILGPFGVDCDLRRWGLKLAERGGRNGKKRAIVATARKLAVLLHHLWVSGEVYEPLHNSSSRAIVTAAA

SEQ ID NO: 364478 - protein, 449 aa, unidentified
MMEPVEVPDEEHEQILERVAAIDVAKATGMVCTRVPHDSRPGRRLTRVWEVPATTNAIIELGECLAGLGIERVTLEPASDYWRPFYYLLEAAGLDVQLVNAREARGVPGRPKSDKLDCVWQAKLTERGMLRPSFVPPAQIRQLRDYTRLRVDLTRDRSRHAQRLEKLLEDALIKLSTVATDIMGVSGRAMIEALIAGERDPQVLASLARGRMKVKHAALVQALTGRFDEHHGELARMLLDSYDALTAQAGKLTSRIEELIAAIPEARGVDAGGATGPGAGEGPDAAVRSAIARLDEIPGVGRHTAQVILAETGLDMARFPTAAHLASWAKLSPRTIQSGARSRGGKTGQGNPYLKGVLGEAAAAAAKTDTFLGERYRRIVRRRGKLKALVAVARSILVIVWHLLADPAATFHELGAGYYASRTDKDKKTRNHVRQPEALGFTVTLAQAA

SEQ ID NO: 364479 - protein, 312 aa, unidentified
MDKAPTFVGIDVSKRRLDIHSRPSGESSTFGYDDESVAALIERLVAVAPALIVLEATGGMEVRLAAALAAAGLPVAVVNPRQVRAFARAMGQLAKTDRLDAAVIARFAEAVRPPVRPLPDEATRHLGALVARRRQLLEMLVAERNRRHAADPALYERIDAHLRWLEEALAEIEQDLDKAVRESSIWCAKEELLRSVPGIGPVSARTLLAELPELGSLTRRQAAALVGVAPFSRDSGKMRGRRTVWGGRARLRACLYMAAVAAARGSNPVISGFYKRLRLAGKPAKLALTACMRKMIVTLNAMLRTNTAWKQA

SEQ ID NO: 364480 - protein, 347 aa, unidentified
MEQFIGLDVSLKDTFISVREGGKRLWRGKCVSDPKTITQTIRTHAPNAQRVVFETGPLSVWFYHALKAEGIPAICIDARHAKAALDMAPNKTDVNDADGLAHLAEVGFYREVRVKSFDAMLVRTLVAARRQMLKMTVQLSNQIRGLMKTFGLVVPKSAGSVLEGHIRNLLATNPGLERILLPMLEAWRSMRVRVAELSKQLIASGRASEQCQLLMSIPGIGVVTASSFIAAIEDPANFTKSRSVGAWIGLTTRRYQSGEVDYDGHISRRGDNHLRSLLYEAAMVTLTRTMADSALRNWGLKLREKVGFKRAAVAVARKLAVIMHSMLKTGELFNRSPDIAAARRATK

SEQ ID NO: 364481 - protein, 322 aa, unidentified
MNNEKLCCGIDVSQNSLDVAYQNNLGEIFHIKVGNNNKGFETILEHTGTGYHFVMEATGVYYVRLAFFLHAKQCAISVVNALSIKRYIQMQLERNKSDKKDAQWICRYAIDQKPALWEMPDTAYFESKQMYNTIRQYSEQIKRINNQLHSLRILPVQNKETIKSLEKMKVLFEKEIHLLEGKLEVLLIKWKPEQVKNISSIKAIGKRATAMLIIYTQGFKYTENHRQLISFAGLSPREYSSGTSINGRPKICRKGGKPIRDVLYMCAIKTNAACKALYERLKSKGKSGKLALIAVCNKLLKQVFAVVKNNTLYQPNYCSARP

SEQ ID NO: 364482 - protein, 365 aa, unidentified
MSTITIGVDLAKSVFSVCEMDGAGHVLRRRDLKRDAFAVWLAQVPAGTVVAMEACSGAHHWARRCLDYGHQPRLMAAQLVKPYRLSQRSKNDRNDAEAIATAARQGNMRFVPVKDIDQQARLAWHRVREGYKTESLAIGNRIRGLLAEFGIVVAKSDLALRRALTELDQHAVLPDEFKELIRSVAIHWAQVRTAIDACDARIDAHARMDERCMRLRAIVGIGPITADAVIATLGSAKDFRNGRQLAAWLGLVPTQCSSGGHTQLGAISCRGDAYLRTLLIQGARSSLQRAKAVSVEKSMPEQIWIRQLACRVPFGKVLVAIANKHARQLWAMLAHDDPYDAEAWLKHPMVQRSAGKHAITVAAMA

SEQ ID NO: 364483 - protein, 375 aa, unidentified
MSNFITFYVGVDEHKDSLVTAVASSNEPGCRPAVRLTQSKLVKMLTELSKEGEVCVVYEAGPGGFALQRHLEGKGFDCRVAAPSLIPRIVGKRQKTDKIDAAHLALSYRAEQLTFCRVPSAAQERTRALVRCREDISEDMRRTRLRILSFVRTMGLATQARNWTIAHRDWLKALDLEGELSEVLGEYLAKLDYEESRLKSLDQRIAEIAQGPVYAEAVSHLCCLKGINTLSAMVLLTEIGDFNRFSSPRQLMAFLGLVPTEHSSGQTRRLGHITKTGNTRCRRILVEAAYSARHKPAPSYPVRKRRIGQPPGVVAIATKAATRLNARYWHLAQKKNTKVAAVAIARELCGFVWAIMAYSRNENQNNELIGSPTQG

SEQ ID NO: 364484 - protein, 351 aa, unidentified
MPRKSSVCTVTAIGIDMGKTTLHMVGLDSYGAIVLREKVSRGRIASRFANLPPCLIGIEAGMATHYVARELAALGHEVKQVPPAYAKPFRQGHKNDFRDALAVAEAVQRPTTRFVPPKSNEQLDLQALHRVRSRLVSQRTAVINQIRGFLLERGIIVRQGLRFLRQLLPDILAKRTDVLSPRMVRIVSDLAGDWRQLDDRIEIVTDEIETLAKADDSCRRVMTVPGIGPIISSAMVAAIGNGSAFSKGRDYSAWLGLVPKQMSTGDRTILGRISKRGNSYLRMLFIQAARVILLRPANWPKHGFGAWLVRAIQRLHPNVLAAALANKLARIAWTVLAQERSYEARVTKAEA

SEQ ID NO: 364485 - protein, 387 aa, unidentified
MQKPHDDSKMCLAAFEQDRTLVVVVEMSLSSWLVAGLIPGVSREPLKKINPDPERLLQLLYRWRDEAVAAGSKINRIAVAYETGRDGFWLARWLRNRGIDAHVIHATSVAISREHRRAKTDRIDTAMLRRGFLGWLRGEPGHCSMAVVPSVAEEDAKRPHRERDTLIHERTSIVNRMKSILIQFGVRNFNPVLRKANEKLDAVRTPEGIPLPANAVAALRRLMDRLRVIKEQVKAIEQTRLQRMQRNPADRMNAMVFLLVRIIGMGVETAEQLVREMLFRNFHDRKAVARYAGLTGSPDESGSKRREKGLSRSGNGRVRNILIQLSWRMLQFQPDSGLVIWYKKRTESARGSRKPMIVALARKLIIALWRYVNTGVVPEGFELRSAA

SEQ ID NO: 364486 - protein, 413 aa, unidentified
MASMKECCCGVDVHKSFIIAVIATFRDREVKFTKYARFSTFTRGLRDFKEWLGDHNCFEVCMESTGKYYVPVYRVVSDDVFHVDVVHPKYVRAPRGKKNDKRDAKRIADMYMRDHIAEYSIIPPADILAIRDLTRYRRKTVNAMTAEKNRMSNCLTVSCIKLDEVLSDVYGKTGQALIGQIIERGTCDFDPRPYVDRRVKATPEDFDLALDGDVTPATLTKMEMIQGRLEYLGKQKADLESSMASLSKDFSRQLEILESAPGIDSISAISIISEIGVDMKNFGSIKRFLSWVGVVPQNNESAGKKKSTKIGKGNKWLKPVIVQCAKAAIRDKKHPEIREKYLALKKRRGYGKAIVAIAKRLMTAVFYMLMKDEMYNPNLSKDVAPKRGKIVLENLVAHYQSKGYTVVSKNEVA

SEQ ID NO: 364487 - protein, 433 aa, unidentified
MTTAPYDLIIGLDRSDQTADLCLLDTRTGERRRVSIATAPEALWEWLAELRQQYPTARVGLCLEQPAGHLIPFLEAYAWLTLHPINPLTLQKYREAFVTSRAKDDTKDAAYLADLLLNHHAQLPVWAPEDSATRAVQQLVFHRRAVVDERTALTNRLQALLKQYYPQALTLCGEDLWRPLATAFLLKWPSLGAVQKPKPATLTQFYYVHGSRSQKLLAQRLALIAKAVPVTDETAVIQSFELRVQLVCRQLQALQRTLGEFDQQLAAAYAAHPDRAIFASFPGAGPVLGPRLLASLGANRERFADAATQLQRYTGVAPVTKRSGGSCRIHRRYLCPKFHRQSFHEYAGESILWSRWAAAFYLQQRTKGCPHHTAVRALAFKWQRVIWRCWQNHQPYDERIYEASLRKHGSPVVALFERVELGKSPWKNPAPKN

SEQ ID NO: 364488 - protein, 401 aa, unidentified
MSKKNTRNALDTSLSYAVIGLDLAKADCAVAAVPCADDELGLIDRMDYESLFEQAEKLGPTLFAMEPCCGYSQISLRLQNMGHEVKVISGHAVKNWIATHKSNQKTDLNDATALAKLALYDHDLQPIRVKNVEECRIASVQAIRIQLRTQATKSLVCFKSLCQCWGIVIRRGSLNTKKMAEAVAAVEKLLGVEVASSLMILRDAYKFTMKQINALDKLLDALVEANEQARTMKTVLGIGTQTAARLAVTTGDIKRFPMPRSYAAYFGLAPRNIITGHSGTPSPSKRGALKPVSSRGQGKVSRRGDRVARSFIIQGAATIYMLYCKDMLPECQLRRWLHEQIKRGKPYGKIIVSLAAKLLRIVWALLTYGEKFDSHKAGVPRSVLAAMEKPLKHDAAAESAA

SEQ ID NO: 364489 - protein, 285 aa, unidentified
MTIQTQFVPRNYDLFAGLDVDKKSMAVSFTDHQQLKQVLRLPYSAELLVNYVRKHLPGQRVAFAYEAGPTGFGLYDELAAEGYPCLVVAPAMVPTAPGQQVKTNRLDARKLSENLRGGQLRSIHVPSCNYRELRHLVHLRDTHVRQLTATKCRIKALLTYEGMVFPGNGQWSARVLLELHALPCSPAVHFELDHLIGTLHFHFNAAATMQKEIRRYCQNDPELRHSINLLKSIPGLGWIVAAHLVARLGDWREIDNVRSIAGFLGLVSSEHSTGDKQIHELLCAT

SEQ ID NO: 364490 - protein, 342 aa, unidentified
MDVKTLGIDLGKNVFHVVGLNERGAIALKRRVTRTQLGVLVGNLPRCVVAMEACPGSHHMARRLAEHGHTVRLLPPQYVRPYVKTNKNDFRDAEAIAEAVGRGTMRFVPPKTVAQLDLQALHRVRDRLVGQRTALVNQIRAFLLEQGRPMRPGRLALRGELRRLLAAAAPGISPNLARLLTQLSQEWQQLEERIDCVTGELAAVATTDPACQRLMAIPGVGPISATALVAAVGNGRAFSKGRDFAAWLGLVPRQHSTGGKPRLLGASKRGNTYLRRLVVLGAQSVLRSKVRDRQRFGPWLRRLELRVHRNVAVVALANKLARIAWSVLANATPYRPLMDEAA

SEQ ID NO: 364491 - protein, 454 aa, unidentified
MSKVRKAATAKSNVQLPTLHPHAAGIDVGATQLQVAVPCDADPQPVRTFTTFTDDLLKLRDWLKACGVQTVVMESTGVYWIPLYQILEAAGIEVCLANARHCKNLPGRKTDVSDCQWLQYLHSVGLLRASFRPPEQICVVRSFLRQRANLVRYASQQVMQLHKALTQMNVQIHNVISDIVGVTGLAILDAVLAGDRDGNKLAQLKDHRIKASGDVIARSLVGDWRVEHLFALRQALATWRHYQILLTECDAATARALAGFESRVDVNANPPPPSTLRHKKPHANEPRFEARTELYRITGVELTQVPGLQVSTALVLFGELGPDFVQRFPTAKCFTSWLGLCPDNRITGGRVISVKTRDVKSRAAEALRLAAQALWQSKTYLGDCFRRWKARLGTPKAITAMAHKLARVLWHLLKYREAYDPKVWAVAEEKLRAKKLKRLHQNAIALGYKLVTAV

SEQ ID NO: 364492 - protein, 265 aa, unidentified
MCIVDAQGKIVKEAKVASEPEALVGFFETLGFAVKRIGLEAGPLSQWLHAGLKRAGFGAVLLETRHVKAALSAMTVKTDRKDARGIAQLIRMGWFRPVHAKSIGAQEIRALLVARKQLLGRLIDVELSIRGILRGFGLKVGPVTRKNFEVRIRELVTGQATLERIVAAMLSARAALKAEYGKLHKAVLTIVRDDTVCRRLMTVPSVGPLVAITYKSAIDDPHRIAKSKAEGALFGLTPKKYQSGEANVTGGITLAGDEMGAHGAV

SEQ ID NO: 364493 - protein, 441 aa, unidentified
MPDTAVTTPEPAWAAFVALDWGSQKHAWILQPASGGKQNEGFVDNTPEAIAVWAADLHRRFDGQPVAVALEQKRGSVVNLLLPYAHLVLFPVPASMSASYRKTFVPSGAKDDPGDAGWILDLLLRHRDRLRRLEPDDANTRLLLLLVEDRRQLVDDKTRLKLRLQDCLQQYFPQLVLWFDVDTPLVAGRLQRWPDLQHLQRCHDGTLRTFFRQHHCHAHLTEERIDAIRAAVPATNDPAVLEAGSTKARHLTESIATLREQITQLERRRDELVASHPDSPIFASFPGAGRATVPRLIAAFGTRRERYQSAFEVECDSGIAPVHIRSGKIDRVSVRHACQDFTRQTFHEFAGQTLPQCDWAKAYYQAHCHKPEQHHAVVRALAFKWIRILFRCWKDRKPYDEELYLKSLRRRSGLLGSGLASATCVGWVTVAGFSKLSEKSS

SEQ ID NO: 364494 - protein, 412 aa, unidentified
MENFKIWVGVDLGAAGHQVCVVDRERNILLERKSKHEGASTAQLIDELLGLVDGAAELIGVALETPQSAIAEAMLDRGLHVYSINPKQLDRLRDRYTVAGAKDDRRDAFVLAATLCTDGHHYREIRLGSAELVQLRELSRLHDELGTEENGLANRIDGELLRYFPEMRKVGSVHTDEWMLSLLKLAPTPAKARKLRASTIRSVLERVRRITADEIMTIFREPSLKVAPGVTEACAHHIALLSRRLRLVREQKAETHLQMRRLLEKLSEPVESQDPKIVEHRDAAIIQSLPGVGTIVSATMLAEAWQPLQDRDYTRLRALCGSAPVTRRSGKTSVTVMRRACSPRLRQALYHWARCGVQNDARTKAHYRRLRLAGHTHGRALRGVADRLLALLVKLLEGGQLFDPSRWTPISA

SEQ ID NO: 364495 - protein, 341 aa, unidentified
MLIIGCDYHPGMQQIAWWDNQNGECGEQRLEHTDEAERFYRELKRRGVRVRVGIEASGHTRWFERLLAELEMELWIGNPAKIAAQRVRKQKTDRGDAQQLLQLLREDRFPKLWIPSPENRDLRQLLWHRHRLVQMRTRVKNQLHAIALNQGVQRRSRLWSKAGRAQLDSLVLPPWTARRRHDLLQLLDQLTPQIAELSQAVEQEAERRPEVQRLMTHPGVGPITALAFVLVLGRPDRFRCGKQVGSYLGLIPCEDSSAGKQRLGHLSKQGNTLLRYLLVEAAQSAVRCDPQWRRRFVHLAMRRQRNIAIAAMARKLAVSLYWLWRKAEDPPAVPQSGSHAG

SEQ ID NO: 364496 - protein, 320 aa, unidentified
MSNIGSICFVGIDVSKESLEIAVRPSGEHWSIKHDPQQFPALVEKLSKLAPSRVVLEATGGLETLVATHLAAAGLSVCVINPRQARDFAKATGQLAKTDGVDAHLLAHFGEALHPPLRELPSTGAQLFEALLTRRRQLVQMRTAEKNRLAATNHPRKIIKDLEAHIAWLDKRIGQCDDELKTALQASPIWRTNDQLLRSVPGIGQVVSRTLLAELPELGRLSDKQITALVGLAPFPNDSGGRRGKRHIRGGRSSVRSALYMATLSAIRSNYRIRAFYERLLAAGKEKKVALTACMRKLLVILNAIVKQQQAWRTYTLLNA

SEQ ID NO: 364497 - protein, 480 aa, unidentified
MNESIFKRKNQDIVELFISAKHPKKVACVALDYAKGTHTALICNGEGKRLKAVFPVQNNTEGLEYVFDRVDKICRKHHISHNHVFFGGESCGTYALNFIPAIEQKGFLVISVDPKEAKDQRASFQASTDKIDLLGIAKVLLDQRGSSRAVSSEAERQLRNVTRHRSCLVVSKTAVRNRIHSIVDQLFPCFLDETKSGIPAFSEMSLWLMENRFSPRQIKLRKLSSTARQARKHGLKRPEDCIHKLQEYACSVLHPVPEWVGMLQTTLYHEVQLYRKLLLCIEQSDKEVALHLACTPAAMMTTMRGIGITLAAGVGAEIGAPKKQLSVRCLTSYCGIIPRVKQTGGPEGEPRYGRVSRRCNHILKNYVVQCGTHLGIHGPAELMEDHRRRGANGQHADFGMAKRFLRISMRLMLETQAYVPAVLREQGDKDKLRIYYLNSWELLRRKWKQTGALEVAFNSKNPLGKWRDCIQELYEINLPL

SEQ ID NO: 364498 - protein, 482 aa, unidentified
MAKRKMSTFERLRSGSMNRQERKEWQQRLYAEDAGLEAVHPDAAGIDVGNASHFVAVPADRDQQPVREFGSWTADLQRMAEWLKRCGIRTVAMQSTGVYWVALQEVLERDGFEVCLVNARGTKNLPGRKSDVQECQWLMKLHTYGLLRNSFHPPEQIRAVRTIWRQRDRLVKEAGREVQQMQKALTTMNVQLANAISDVSGLTGQAIIRAILRGERDPQQLAKLRDYRVAASEAEIAHSLEGNWREDVLFELQQVVDAYDFHQKQIAACDVQLQKYLSALPIRSRPGAGEQSTADAPSEKPNKQRRHKLQKNQPTFNLAAELQRTMGVDVTAIDGVDVMTTQVILSELGPDLSTSFPSEGHFASWLELAPRRDVSGGKVLRHKSRKSNNRVATALRMAAQSLWRSDSYLGARYRHLKARLGGQKAVKAMARYLACLIYRLLTKGKAYVDRGAAHFQSKRTERELLALRRKAAELGMEVVAVS

SEQ ID NO: 364499 - protein, 330 aa, unidentified
MQTLPQIYVGVDVSKDELVVAYPQAQGGWVKAKITNELADIFEWLNKLELKDKFFILEHTGPYSQRLIHALDKVGATFSVVNPIQSRSMAKLLMKTNKTDDQDAQTLSQLGQTLKTQVYRMPSSIEKNRKEAFSALVSLQKQEGQLKNQLHAFQYLVDPNPVAVRALEQVLHSVRLAIADLEAQIKPQIEEAQACDLVKRISSVKGIGQTTAEALVTLFGDFSSFECAKAFAKFLGLTPSEFSSGKSVRGRRFITKKGNSKIRGLLFNCARSAMNHNPTCKALYQRIIAKEKNGKIALTAVMHKLARIVFGVVKSGRLYDPNFSIQKKCV

SEQ ID NO: 364500 - protein, 384 aa, unidentified
MTQAPGTGTVIDYERTLILAIELSNTSWVLAAQIPGLPGVKAKRSIDPTPEALMAAIENYRGRAEKAGRNVDRVIAVYEAGWSGFWLVRWLAKHGVEAHVIQPSSVPVDRRARRAKSDGIDAELLLRTLLAWLRGEPRVCSMVPIPAEADEDARRRVRERAELISERVGLVNRIGAVLATLGAGEYNPLRRDRRQRLDELQTALGDSLPTNAHAKIARMLDRLELLLIQITELEQSRDAVLEDESPDRASSMIQQLAKLRGIGVQSATVLVREGFVREFANGKALGSYAGLTATPYSSGGIEREQGIGKAGNARLRTVMVELAWLWQRYQPGSAQVRWFRERGGTGRRVRKVMVVALARKLLIALWRFATQGVVPEGAVMKPAS

SEQ ID NO: 364501 - protein, 350 aa, unidentified
MEMVIGVDPHKATNVVAAIDEQGEVVGQETFAANRKGLRTLERWAKRFPERRWAVEGAGGIGRPLAQKLLSAGERVVDVPPKLSSRVRVLSSGNARKNDGLDATFTALAALRNERLSSVQPEDGPEGHVEILRLLTERREDLVSERTRVLNRLHVLLRDLLSDPVGKQLSANAAAKLLRRARPQHPAGRVRRRLASELVRDVRALDRRIAGLDERIGVEVEASGTTLTEIFGVGPILAAKIVAIVGNVSRFPSKAHFASYAGVAPIEASSGEVVRHRLSLAGNRTLNQVMHMIAVCQARSDHMRGGAYHRKKLAEGKSRREAMRCLKRRVSDAVFKALVADSRRASLAVA

SEQ ID NO: 364502 - protein, 389 aa, unidentified
MYFVGIDISKYKHDCCIISAADQQIISKFTITNDKDGFEQLLTALNSLSNPEDIKIGFESTAHYALNLELFLENANHSFMEVNPVLIKEYKKSTTLRRTKTDSVDCESIARWLMTVEYKPHSKGFYHAYSLKSLTRLRDRLIRQRSFYLVKITNVLDHTFPEFKPFFNERLSKTAIYLLENYGSAEKMAHMNSASYDKLRCISRGKFSIQQFLHLKELAANTVGVNNSIFDIELNSLLTLYNSLCKEIKNLEAEITRLIEEVHPHYMSIPGIGPISAAVIYAEYGDISNFSNPSQMLAFAGIEPGINDSGTESHGGRMVKHGSSQLRYVLLNACLPLIRFDLTFATYYAKKRAEGKKHRVAITHVAKKLIRVIYALERQDVDFNAQKIR

SEQ ID NO: 364503 - protein, 343 aa, unidentified
MHIATIGLDLAKNVFQVHGIDADGRVVVRRRLRRSEMLSFFDELSPCLIGMEACSTAHHWARELMAFGHDVRLMPASYVKPYVKRGKNDANDAEAICEAVTRPTMRFVLVKSIEQQSVIMLHRSRDLLVRQRTMLVNALRGHLAEVGIVAALGLPKVQELIAIVKDDTNERIEPLMRQCMEVIVDQLQDLQGRIGMLDQAIHAWHRQSEISRRLETIPGVGPITASVLAATVTNPSAFSSGRQFAAWLGLVPRQKSTGGKDRLGKISKMGDQYIRRLMIVGAHAVLRWGRTTKGSAWVLALLGRRPFRVVAVALANKMARIVWSVLAKGGSYRDERSSGALPA

SEQ ID NO: 364504 - protein, 328 aa, unidentified
MLAQRVDHVIGVDTHRDSHTAAVLDTTGGAVADVTVPADAFGYKRVLAFGRTHAPGRRAWAIEGTGSFGAGLTTFLLEQGEWVVEIDRPARPARRNGAKSDELDAARAAREALARDHLAQPRSRGEREAVRVLLVTRQGAVVSRTRAIAHLKALLVTAPEQLRNHFRNMSTDDQVVRCSRLRTSPTHALEAVANDLESEIERLVKGLAPRLLEERGVGALSAAQVLCSWSHPGRLRSEAAFAALGGSAPVPASSGQTVRHRLNRGGDRQLNRALHTIVLSRLAHDDETKAYAAKRRAQGKTPREIKRCLKRHLARRLFKLLETSARGA

SEQ ID NO: 364505 - protein, 345 aa, unidentified
MNYYAGLDVSLEETAICIVDETGAIVRELRAPSDPESLISAFNGVALPMVRIGLEACSQSAWLHQGMARSGLPVLCIETRQAKAAMGAMPNKTDRNDARGLAQIIRTGWYRQVHVKSAPSRMSRSLLVARRTVLCKVRDMENAVRAVLRESGLKVGAPGRKLFATRVRELAETDPSLADITEPLLAIVAAMHCQLERLTRRVLETVRVEPICRQLMSVPGVGPLTALAFRATVDRPERFRRSRDVGAHLGLTPRRYQSGETDVQGRVSRCGDELARTLLYEAAHTLLTRCKKWSALKAWGMGIAKRRGMAKARVAVARKLAVILHRMWSDQTEFRWGKVPAGQIA

SEQ ID NO: 364506 - protein, 474 aa, unidentified
MGNKSHFVCVPADSVPPGQSPVREFGVFNPDLDQMVDRLKQCRVETVAMESTGVMWIPVFQKLEAAGLEVLLVNTKGLKHVPGRKSDMLDCQWIQLTHSYGLLAGSFRPADIICRVRTLMRQRENLVHGASRETQHMQKAMQEMGVHLHVVVADVTGDTGLRIIDAIVQGERDPEELVKLRDPRIRKSTVAQMKAALQGDWRDELLFVLGQSRRVYAFFQEQLASLDVKIIALLAEVPEAPPPPTEGSQAPSPGSSGAPQQSAGGESPVSGSTEGAAVSAQGKSQSRGRKNPKFKPNGAGNPLPEDVSPQLAKIYGTDLTLIPGLGILGVLIILSEIGADLKGRWRSGDVFAAWMGLCPGSKISGGKVLSSRTPHVVNRAAALLRLAAVAIGGTETCLGLFYRRIKARHGAPKATTATARKLAVLIYHLVTTGQEYQARDLKQYDERLRKNRIIRLSRQAKELGFDLVPVEKAA

SEQ ID NO: 364507 - protein, 344 aa, unidentified
MDHFGGLDVSVKETSICIVDDTGKIVKEVKVASEPAALLKVLGNPSYRFKRIGLEAGPLSQWLFSALAEAELPVICVETRHMQAVLKAQINKTDRNDARGIAQMIRVGLYRPVHVKTLRSQKLRMLLTHRKLLQSKAIAIENDLRGTLRNFGLKVGMVGKVRFEARIQELVENFPDLSVLVEPLLIVRRALREQVVILHRRLLAIVRDDEVCRRLMTTPGVGPVVALTYRATVDVPARFRKSKSVGAVFGLTCSRYQSGEIDWSGKISRCGDEMMRTMLYEAAQSMMHSKKWSWLKAWAMQIARRRGMKKAIVALARRLAVIMHRIWVDGTEFRWTREQAAAAA

SEQ ID NO: 364508 - protein, 455 aa, unidentified
MSRRKTPVPDTPAATLQVVHPHAAAVDVHSDNHVACIGPERVRTFGAYSADLETLADWFAEAGVTTVVLESTGVYWIPLFELLEARGFEVFLIEPSQASHCGARPKTDRLDCQWLQRLHTYGLLRPSFRPPEAVLALRGYWRQRQMLVRYASHHVQHMQKALEQMNVKLTEVVSSITGVTGTAIIAAIVAGERDASRLAELRHEKCARSEAEIALALGGTWRPEHLFALKQAFELYRYLHRQIDECDAQVRAELERLPDRSGGVPTTPKPRRRGRKSNDARFDATGPLARALGVDLTAIEGIDVSTALVVLAEIGVDVSRFPSEKHFASWLGLCPRTARSNKTERRRTPRKGKNRVAQALRMAAQSVGRTLTPLGAFYRRIKSRIGGRGAITATAHKLARLVYRMLRYGGAYVAQSLVEYEAQMREKLERSLRKRASALGYDLVPQAASPGPAPS

SEQ ID NO: 364509 - protein, 366 aa, unidentified
MIVIGTDTHKQSHTAAALDGATGGVIAEQTARAKRRSFEDLLLWARQLGPERVWAIEDCRHVSGALERFLLAHGEQVVRVPPKLTAGARSSARERGKSDSIDAVSIARAAIREGLDTLPVAQLAGPELDVRLLVDHRERLIAQRTQLINDLRWSMHDMWPEFDVPARALTASGWQERVASRLARAEQSARVRIARDELRRIRELTRTINALEGELATLIATLAPRLLAEPGCGVLTAAKLIGEIAGISRFATEAQFARITGTAPIAASSGRTERHRLDRGGNRQLNCALHRLAVTRGRMDPDTSGYLARKQAEGKSRREALRSLKRHLARRIWLILQPPGRDTPPTRHRPAVTIHCNTPYGSFSLT

SEQ ID NO: 364510 - protein, 348 aa, unidentified
MLIIGCDYHPGFEQIAFVDTETGECGERRLTHREEAEQFYGMLKGRSVRVGMEASGHARWFERLLSDLQFELWIGDAAEIRTKRVRKQKTDRQDAQLLLRLMMEDRFPRIWVADAENRDLRQLLWHRHRLVQMRTRVMNQLHVVALNEGLRRKKALWRPAGRNQLESLILAPWASRRRRDLLDLLDQLSPKIQELTRALEDEVEKRPVTRRLMTHPGVGPLTALAFELVIGSPERFHCGKQIASYVGLVPSEESSGDRRRLGHISKQGNSLLRYLLVEAAQVTVRSHQHWRSKFFHLAMRRGRKIAKVAMARKLAVHLYWMWRQGWDYGQFEKLGSYAGEPGNRQGVQ

SEQ ID NO: 364511 - protein, 313 aa, unidentified
MKKTICGVDVSKAKLDVCIEPGHRFVSFDNDTAGIAKLAAFCREHAVELVVMEASGGYERRAFVELWEKGINCALTNPRNVRRYAEAMGILEKTDRIDSSVIARFADAKNLAPTPLPSKAQQRLKALVARLRQVTDDLTVQKQRRASLLDNPEVLASLDEVIALLKRQSRKLEGEIASMIDDDPLWAKLAETWREVKGVAGRTVARLHAEVPEIGTLSNKAIAKLVGLAPIADDSGKRKGKRPTRGGRAGVRSILFLVAATAARYDKSLKDFRDRMVAAGKEKMVIRIALARKLLVRLNAKARDARTAYANAT

SEQ ID NO: 364512 - protein, 410 aa, unidentified
MDVIIERGAGIDVHKNLLVVCLLIFTGNKRKKLKKRFGTFKADLIELRDWLVSEGCTHVVMESTSVYWMPVYEILEGHVQIVVGNAQHIKNVPGRKTDENDAEWLAKLLCYGLIRNSFVPPKPFRQLRQLSRFHNNVTKTATQQKNRIHGVLETGNIKLGSVATDIFGTSGTDMLHALVEGKLKPAAMAQFARNKMKAKIPQLALALDGTMTDHHRNLLRIELSMHDKIDATLAEVELAMFEAASPYSQLLERLDVIPGINQLAAIGVIAEIGVDMSVWRSDSHLTAWAGLCPGSHESAGKHRKVGVRKGNPHLKRRMIQIATSAVKTNGTYYQHKYQQLAKRRGHKRAIVAIARIILTTIFHMISRGTDYAEVGLPVPRPVNREKEANRIVMQLQHLGFNVSLSPATNV

SEQ ID NO: 364513 - protein, 314 aa, unidentified
MSLSPCFVGIDVAKDHLDICLRRAGRDRAWRAETSPAGLVSLVARLKRAKPVLIVLEATGGYERGAMQALQQAGLALARVNPRQVRDFARAEGTLAKTDRLDAALLARYAQAMQPRPSEPRASADDRLRALIIRRRQVIANRKAEACRLAQTPFDDLKAMIAQALERLDAELAQLNRMIKALIKQTPDMQRRCARLQSLPGLGAITAATLIAEMPELGSLGRKQTAALIGVAPLACESGKWRGRRRCQGGRKTLRDTLYMAALSAATRTNSPLAAFYRRLRQAGKPAKVALVAVIRKIVVIANALLRDDKPYLA

SEQ ID NO: 364514 - protein, 357 aa, unidentified
MATLSIAEVPANVTVGVDTHKHSHIARAKDGLGRHLGQLEIETDPRGYAGLLAWAQGFGPVVTFGIEGTSSYGAGLTRFLRSQGQAVIEVLRPVRRDRRFGGKSDPIDADAAAGAVLSGKATAVPKAGDAGVEMVRALKIAKQTAIKARTQAVNAVKGLVVMAPDPIREQLRNLKTPALVRTCSAYRVDRASDPTSVIKLSLRSMCRRYVALDQEVRSLEKELDALTIRLVPQLRQLFGVGQDVAATLVLAAGNSGDRLRSEASFSMLCGASPIPASSGMVQRHRLNRGGDRQANAALHHIIIVRLRHDEATKAYFAKRKAEGKSKKEIFRCLKRYVAREVYRTLVDPREEASRSAA

SEQ ID NO: 364515 - protein, 420 aa, unidentified
MKNGNTKKVRRLNEKTLLVTVDMGMIRHTGYCRCPNGMEVKPFDFANNRKGFEEFWFRVLQTQKSHNLQEIVVGFESTGAYAEPLLHFLRRKGIKLVQVNPLHTKRLKELQGNSPGKTDHKDPKVIADIIELGHALTVVIPEGTSAELRRLTSARERSMQRRTVLLNQLHVLIFILFPEFLQVLKNTGSKTSQYLLKHCPTPEGIIEKGVVALARILKTVSRGNMGNERAEALYKAAKETVGVKEGQKSIVFEITEIVFAIEATERFIATVEAEMKKYLKEIPYSLSILSIKGIGTITTAGLIGEIGDFGQFNTISEVMKQAGLDLYEISSGKHKGKKRISKRGRHLLRKILFFAAINTVRKGGMMHEHYQKYLQRGMLRMKALIAIARKLLRIIFAIVRDNSVFISDFSGTQYQLKEAA

SEQ ID NO: 364516 - protein, 346 aa, unidentified
MLYAGLDLSRKRLDFHLLDREGATVEVGACPPDADGLRGLTERVDRHGAPIRAAIESMNGARFVHDQLELAGWQVEIADAQKVKGLAPLACKTDRIDAWVLAQLARRDLVPAIWLPDPQVRAERERARWRLHLVRHRSSLKQRVHALLLTHGKPCPVSDLFGLRGRQLLATLGLPEPWQGTIEASLRLIDELEREIGECERELRRLGADHRYVPLLCTAPGISWVLAYTIAAEIGDIGRFPSPRKLAGYSGLCPRVYQSGQRDLRGPLSKQGPRYLRWALVEAATHACTHSAYRDRYQHTKTRIGKQRGAKVAQIDLARRLSEAIWHMLSRGESFAPKGATDPLAA

SEQ ID NO: 364517 - protein, 344 aa, unidentified
MKVSVLGIDLGKNVCSIVGFDETGAVVLRRRAKRETLIGLAAKLPPCIVAMEACCGAHHLARLFANQGHDVRLMSPEYVRPYIKAQKNDDRDAEGIAEAATRRTMRFVEVKAQEQLDIQTLHRSRDRLVAERTALINQLRAILLERGIIVPQGKRKLEQYLTALMDGQDPNGLSQRIRTLIADIRGQWLELDRRIAVFDKEFAAFAKENEDARRLTTIPGVGVTIASALIAAVGNAETFEHGRDLAAWLGLVPRQSTTGGKPRLLGISKRGNKYLRKLLIHGARAALPHIAERDTALGRWTKNLLARVHKNVAIVALANKLARIAWAVLRRCEKFTAKGLPLAV

SEQ ID NO: 364518 - protein, 309 aa, unidentified
MEIVVGIDVSKERLDVAILPQEEVFAVGNDHAGIDELAERLKGIGVDAIALEATGGFEMLAVAGLSAAGLTVLVVNPAQVRAYAHAIGRRAKTDPIDAAVIAAFVLATKPEIRPLRDAETQALSELVARRRQIVQMIVAEENRLRMALAKQAQKSIKRLLKALRRELESLDADLDSHIRKSPVWRVREALLTSVPGVGPTTARTLLAELPELGSLDRRQIASLAGLAPWTRQSGKWKGKSFIGGGRGKVRAVLFMAALVASRYNPDLKAFRDRLVAAGKPKIVATVATMRKLLTILNAIIRDGRPWQNA

SEQ ID NO: 364519 - protein, 395 aa, unidentified
MNKIVHYIGLDVHKETIAVSIAPQNSTEVRRYGIIGGTLDAVDKLVKKLAQNNVELHLVYEAGPCGFVLCRHLRNKGIHCEVIAPSLIPRKASDRVKTDRRDADQLARLYRAGELTAIHVPDQEDEAIRDLVRARTSGMTDQRQARNRLKGFLLRLGFRYTGKSSWNDAHKRYLSSLVMPQGPQQIAFQEYIHAINDATDRLERLAKAVEDALPGWKWEPVARALMSLRGVQVLTAMTLVAEVGDFSRFDDPRSLMHFFGLTPSEHSSSDKRVQGGITRCGNAHCRRVLTEAAWHYRLTPKVSETIQKRQQGQSKPVRLIAWKAQERLHKRFRQLSAKKKSVVAATAVARELVGFVWAIACKVKPTAQPAAPEIIRTCRGKVYRLDLEKKFQKNK

SEQ ID NO: 364520 - protein, 394 aa, unidentified
MFYAGIDIAKNKHEASVIGADGKALLDSISFANTKEGCEKLLALFERLGIVKDDVVLGMEATGHYWLSVHAFFLELGYEVKVINPIQSEAFRKMYIRQTKNDSKDSFIIAQIMRFGQFSATSLSEEGIVALRQLSRYRLALVDACGDCKRRVIALLDQVFPEYDDLFSNTFGVTSKEVLLKYPTPEDMLTVSTRKLTTLLNKSSRGRFGEEKAKQLKAVAAGSFGVSFAKDAFAFQIRQFMEQILFLEKQIAELEQEISVLLQQTGSFIMRIPGIGETLGAIILSEIGDIHRFDAPGKLVAFAGLDVKVNQSGEFIGTKNKISKRGSPYLRRAIWLAAGRAAFCDPILSEYYQSLRARGKHHLTAVGAVSRKLCNILFVILRENRPYEATPPKR

SEQ ID NO: 364521 - protein, 355 aa, unidentified
MNSEKYIGMDVHQATISVAVMDSSGKLIMECILETKAVTILEFIDGLRGTLSVTFEEGTSAAWLHDLLKPHVSHLVVCDPRRNALLKDGSKSDRIDARKLAELLHGNKLHAVYHGEHGVRTLKELGRSYLTITKDLTRVMGRIKALYRSWAIPCSGTTVYAVRHRAEWLAKILEPGVRLRAERLYQQLDLLQPVRQEARRDLLVESHKHHAVKLLRQIPSIGPIRAALLVALLQTPHRFRTNRQLWAYSGFAVETHDSGEYRFVRGKLIRNRERITVHGLNHNHNHDLKNLFKGAAISASTRPGPLCDFYVALVEKGMRPTMARLTLARKMATITLTIWKKGVEFDAKELNRQAV

SEQ ID NO: 364522 - protein, 433 aa, unidentified
MLKINYMSTLFVGIDVSSKTNAVYAMDFEENKYISSSFGNNQPGADKLVNMIAECMLKHKKLDTIFIVLESTSVYSVHISNFLSTSEVLMPYKPYVFCVNPKATSNYRKSYIGMEKSDPSDAYLIADFGRVGRTKKLEPWRGGQFIALKRLTRHRMHLSECITREKTYMVSNLYLKFSELQLLEGDDKPFGSLYGATSSAVLTEFLSPQEIIDMPEEDLLTFLAGKSRNRISDLSKTSELLRKAARDSYRLDKCMYEPLSISLASSFNCIHAYQKEIKLIEQAIEKCINGMNPNALLILQSIPGIGPIWASGILSEIGDITVFHSSDALAKYAGLYWPKGDSGDFTSEDNKMSKAGNPYLRCYLGEAANSVRKHIPEYADFYARKYAEVTKHQHKRALALTSRKFVRLVFGLLVKNQLYTGEKLDTEYNIESN

SEQ ID NO: 364523 - protein, 415 aa, unidentified
MEIVYQRCAGLDVHKRTVVACANILDAHGKLAKQRCTFGTMTRDLIALRDWLKAHGVTHVAMERTGVFWKPIYNLLEGHLEVMVVNAQHIKAVPGRKTDIKDAEWIADLLQIGLLRPSFIPPAWQRALGDLTRSRTSLIEERTRTIARLQKGLEDANIKLASVASDLMGKSAQQMLHALVQGSLTPEQMAQFARGRMRSKREQLTQALTGYLQPHHRFMIAEHLTHLKALEQAITRLSEEIAEQLRPYELILVRLETIPGIKRRLAEVILAEIGPDMSRFPTAEHLASWAGMCPGNHQSAGKRLSGKTRKGSQWLRTALVEAAHAASHCKDCYLSAHYHRIAARRGKKRAAVALGHSLLIIIYHVIAEEKEYQELGGNYFDKLDQQGTEQRLVHQLKKLGFEVTLTPSSSDLISA

SEQ ID NO: 364524 - protein, 444 aa, unidentified
MAMRKREDEVFPDAAGIDIGASSHWVAVPRHLAEAGGCESVREVGTVTEELRALAAWLLSLGVDTVAVESTGVYWIPVFEVLEQHGLKVWLVDARQLKYVPGRKSDVQDCQWLQKLMALGLLRAAWRPSAEVCVLRAVARQRETLLTEQASWVQRMQKALVQMNIQLTEVLSDVMGATGQAIVRDIVAGVRDPRQLARHRQRRVKASEAEIARALEGNWREEHLFVLEQALAMYDDIGRHLAHCDAKLETLLDARSQAKVDIGKLPRAGSKVRAEHDIRQRLADWAGVDLTRINGLGVTVVMKLLTEIGPDVSRFASVKHFCSWLGLCPGTRISGGKVLSSGTKRSANRARQALKLAAQSLCRSESALGAFYRRLCSRMDKPKANTATAHKLARMVYFMLTRGEAFVDQGQQRYEEQQRQRSIAALKRRAAALGFQLNPTEATA

SEQ ID NO: 364525 - protein, 422 aa, unidentified
MLGIGIDWAEDFHDIAFGTQDKGVIEQFRIDHGPAGVSALIERALRLEPDPAEVRVVLETRHGLLVEALVDAGFTMVPVNPDVVARRRGPARKKDDAEDARICCLLALDRHAALKTLIPHGQIGGELRAIGRDDERAARDQRRLLNRLRADLQTTYPAALALAGKDLGAPTVLRLLERWPSQPELAEAAHEELVEFARLGRHGWPDRFADRVVAALAAPSLPTRDYLVRAKAAGIRLAAVQLLALHEARRGWQARMAELLLGGPRTGRDHTVKDPDPGKAFPGGEIYLSMPGLGDLLAARVAGEIGEHINQFDCPSGLQCYAGSAPVTRRSGKSDFVVARRLAHNHYLGAAVHQWAFCSLTRSGWAREFYDSKIAAGKSHHAALRALSNRWLEILWHCLTKGVLYDEAIHVANRNRALGHAA

SEQ ID NO: 364526 - protein, 341 aa, unidentified
MEIAILGIDLGKNTCSVVGLDGTGHVIMRRRMQRDSVIKLAASMAPCVVAMEACCGAHHLGRIVRDHGHQVRLMSPEYVRPYVKAQKNDDRDAEAIAEAATRPTMRFVELKGAEQLDMQSLHRVRDRLVGERTALMNQLRAILMERGITVPQGRRKLEQHLAVILDGEDLRLSPRVRSLVEDMQAEWGALDHRIEAFDDEFAAQAKTDDSARRLASIPGIGVLNATALSAAVGNAASFARGRDLAAWLGLVPRQMTTGGKPRLMGISKRGNKYLRKLLVHGARAALPSLSASTTPLGKWLKNLLLRAHKNTVIVALANKLARIVWAVLRHGGTYDAALTAA

SEQ ID NO: 364527 - protein, 348 aa, unidentified
MTIIVEQHRTITGGVDTHLDMHVAAAIDQLGALLGTEAFEANRAGEADLVCWLGSFGTVTRVGVEGTGSYGAGLARLLAVDSDVEVVEVDRPNRQLRRREGKTDTLDAIEAARAAQSGRALGQAKSRDGNVEAIRALTVAKRSAQSTKVQALNQMRHLGFTAPDPLRERLAGLSAAKLVAEAASLRPRPGGDPVVFATKTSLRILGRRVLALDAEKTELDAHLTVLVTETAPELLAAYGVGVDTAAQLLVAAGDNPQRLRSEASWAHLCGVAPIQASSGKVTRYRLNRGGDRRANHALWRIAMTRMSSDPRTKAYVIRRTEEGKTKSEIIRILKRYIAREIYALLPRN

SEQ ID NO: 364528 - protein, 295 aa, unidentified
MAHSVIFAGLDVHAAQTHAAQLEAATGELSTTRLAGGTAPVIAWLRRLGPGVRAVYEAGPTGFGLARAAREVGIDLRVTTPALIPKRPTDKVKTDRRDAVRLARLLAAGELRFARVPTVAEEAFRDLIRAREDVRGDLMRARHRLSKLLLRREIVYPGPGGTWTQTHMAWLARLTFDDTASTVTLADYLAAVQALVQRRTTLDTAIAELVADSPCAATIPRLRCFRGIDTLSAAGLCAEIGDFARFSHPRLLAGFLGIVASEHTSDDKRRQGAITKAGPPHARRLLVEAAHHYRR

SEQ ID NO: 364529 - protein, 369 aa, unidentified
MKTKTTPSVVPTSPATVTPGGFTLGLDLGDRSHHVCVMDATGQIVREGSLLNTRPALAKLIAEFPRATIAIEAGTHSPWISRYLTELGATVLVANPRKLHAISRSERKCDRRDAQMLARLARVDPALLHPIQHGSAQAQHDLLGLKLRDALVRTRINLINAIRFTLKSLGHSVRNPSSESFHKTVLADVPADCVPVIQPLLTVLAQVTEQIKGMERDLVQRSRKDYPATQRLQQIAGVGPLTALCFVLKIGDPQRFSRGRDVGAYLGLCPRRDQSGGTDKQLRISKCGDGLLRRLLVSAAHYILGPFGPPCALREHGLRLAGTGSAREKKRAVVAVARKLAVLLLSLWKHGTDYEPRVTASPVLVMTPA

SEQ ID NO: 364530 - protein, 348 aa, unidentified
MSQRNQYVGLDVSLKETSICVIDEADKIVWRGRVDSTPKAIASAVKQHSPHAVRIGLESGQLSNWLFQELQAAGLPVICVDARHAKAALSLKVNKTDANDAVGLAQIMRVGWYREVTVKSLDCQAVRALLVARAQIVSQITTLKNSVRGILKTFGRVLPKGLRSQFPVRVRAAIDGHPVLEAIIEPTLRVLEAARAQLLVYDRAVIQRARSDSTARQLMSAPGVGSVVVLAYITAIEDPARFKRSSSVAAYFGMTPRRYQSGEVDYAGRISKCGDGMVRCLLFEAAKVLLSRSARPSALKTWGETLGKRVGAKKATMAVARKLAVVLHRMWTTDTTFQWSAEAGSSAA

SEQ ID NO: 364531 - protein, 477 aa, unidentified
MAENPKEQPSKGEGKSKRGRKKRGWCLADRPVLEANAAGIDLGARELYVAVPPDRDAEPVRRFGTFTEDLHRMAEWLRGCGITTVAMESTGVYWIPPFEILEQYQLRPCLVSARHMKNVPGKRTDWQECQWIQYLHSVGLLRSAFRPAAEICAVRALMRHRGDLVALSSQHVQHMHKALTQMNLQIQHVISDLSGLTGMAIVDAILGGERNPDELVKLRDPRIRAEVSVVRKSLVGHWRAEHLFTLQQSRDLYRTYQQRIVECDQELERYLKNLTPRVDPEQKPLPPDGKKHRRARRTKKMGDWQAARDLRTETYRVFGVDVMQIPGLEKGALLLFSEVGRDLSPWPSAHHFASWCGLCPDNDRSGGQVLWTGVRRIKSRVGQLFRLAAHSLHHSLTPRGHYLRRLRARLGPRAAITATAHKMAIIFYTLVRQQVEYDESIWARRDAERQRRHEANLRRQAKQLGYQLVPLPETPAA

SEQ ID NO: 364532 - protein, 399 aa, unidentified
MLAVGIDISKSKSVAAILNQDGSMHTSPFEFHHTQPELDAFIKYILNSKQSATILMENTGHYHYPVLKAFQEAGLPVCMVNAYQIKKFGDMDLRKAKTDKKDAVRIARYALEKSYSLVPYTSMEQKYEDLKFLARQYNQRMLTLKTNKVFLLNLLDETMPGITNILPLTTRTPETSLSVLFINRFKSYDRIKKMGKSRFLDAFEKIARKSRNRQTKTYGLAIYEAALRNITTRGENEYTLAAQDQCLELVCESQKAADSIILKMQTLAETLPEYAVLRSMAGVGDRLGPLILAEIGDIRRFHSGKALNAYAGNDAPPYQSGTFESHNRHISKRGNAALRKYCFEVMQALKLTRPQNDPVYLFLLKKEQEGKPYNVAKMAGVNKFLRIYYARAMETLKQQ

SEQ ID NO: 364533 - protein, 362 aa, unidentified
MTVTSMPQPILPTRQSSVVEEVVLGVDTHKDVHVAAVITSLGASLAHQEFPTTALGYRQLVIWARSFGTLRRAGVECTGSYGAALARVLRREGIDVVEVNQPDRATRRKRGKTDAIDADAAARAVLSGRATTTPKTADGPAADMRVLRLAKESAVKARTQAMNQLKAVLLAVDPDLRESLAGLTNRALIATCAELAGDLGEAVFTLRLLACRVQNLSEEVKELTRRTTKAVRACRPQLLELVGVGPDSAAVLLIAAGDNPERLTDEASFAALCGVSPVEQSSGKTQRRRLNRGGNRQANAALYRIVMTRIRWDERTQAYLHRRTAQGLSKREIIRCLKRYVARELYRHIQATSGIVTTSSAA

SEQ ID NO: 364534 - protein, 336 aa, unidentified
MKLMPVGVDIAKNVMQVHFVNTDTGEIFNKALKRDKFLEFFTNRSPCLIGMEACGGAHHWARELTRLGHMVKLMPGEFVKAFNIRNKNDIADAQAIWRAVQQPGKAVAIKTEQQQAMLALHRIRSQLMKFRLMQTNALHGLLAEYGEVMRKGRASLVRNVPEILARLSGRLPAVLIDSLREQLGEVERTDTRIMDIERRIRELSKNDPDVKAISEIPGVGLLTATAAVASMGDADAFRSGREFASWVGLVPRQTGTGGKIQLLGISKRGDKYLRKLLVNGAHSVIQNAREPGPWVTDLLKRRPINVASVALANKMARIIWAVLAHSRPYRKEAAHN

SEQ ID NO: 364535 - protein, 336 aa, unidentified
MKKYIGLDAHSSTCSFCVTDEAGKMVDTAKIVTNGRLLIDYVRNIPGKKELTFEECELSSWLYEILRNEVDKVLVCNPVENRQYKKAKTDKLDAINLSNLLRGNFLKEVYHDGSDKEKLRDLMSGYQDLVEDAIRIKNRYKSLFRKEGKRKQGKVLYSDESFLKELDRKDFKFIGKHWFDLLEVMEKSRISYVKEIKKYNKKHKEIGHLKTLTGIGDIHAAKIVAQVINPHRFSTKYKYYSYCGLVRHRQISGERTYGDKKIWGNRVLKCVYKMAAESALKGTSGLRKYYEHLREKGVSHKNAKNAVARKIAAISLAILKKGEKYREEMITNNLVK

SEQ ID NO: 364536 - protein, 371 aa, unidentified
MKRLPDPVQKINAWVLGLDLHKRRTAWVLLDRKGHHVDEGWIDSRPEALRELYRRVIGRKKAHVAFEAGGSSLWAFDTCLDLVKDEARIHAAHPKSVKAIANSTQKNDMNDAWWLAYLTYEQRLPEGWIPRERYRELRVATRERTACVQERTRVIKRIHAHMRQAGRALPLGALGNAQGRTVLRAGLCEFSTVLRLAIEHALERIESLTSRIQTWEATIQELVSDWDEVDVLAQEMPGIRTTLAAVIVAESGPITRFRHPKAYGRYTGLTPSERSSAGKTRFGKISKEGNPQLRWALTQAVAACLRTKHGSGVAVRNWIRARQRRLGSCKKALVAAARKLAEAIWRLFALGECFDLERMFGRVPPQVRLGT

SEQ ID NO: 364537 - protein, 307 aa, unidentified
MCCVLMVVIAPNKFANTTKGHDELVSWLKGHKIDHAHICIEATGTYMEPVAECLYDAGYIVSVINPALGKAFAQSEGLRNKTDTVDARMLAEFCRQKRPAAWEAPHPLERALRALVVRHQALTDMHTQELNRTETAREVQRPSIDAHLLWLEAELKRLEKQIKNLTDDDPDMKHRRKLLESIPGIGEKTSAVLLAYIGLKDRFAHARQFAAFAGLTPRRYESGSSVRGASRMSKAGHVSLRRALYMPAMVATSKTEWGRAFRDRLAANGKKGKVILGAMMRKLAQVAYGVLKSGVPFNASRHNPVAA

SEQ ID NO: 364538 - protein, 459 aa, unidentified
MNRKRSKSKAERTLPVMHPNAAAIDVGATMHMAAVRADRATEPVRSFGTFTADLHRLVDWFTECGVETVVMESTSVYWIPIFELLDARGFAVFLVNARDAKHVPGRKTDVSDAQWLQRLHSHGLLRASFRPKGQIAELRAYVRQRERLLEYAASHIQHMQKALTEMNLQLHHVVADITGTTGLRIIRAIIAGERDPEVLARLRHYSCHSSAETIAKALTGSYRTEHLFALEQALALYDVYHEKASACDGRIEAVLKGLSIDRARSGSKELPTPRRHRTDQPNALAFDVRAALFRLLGKDITMIDGLGPYLSLKLIAECGDDLSSWPSAKHFTSWLGLAPSNKISGGKILSSRTRRSGGRAAALLRLAAVTVGRTDTALGAFYRRLSARIGKAKAVTATARKVAVLFYNAVRHGMEYVDPGASAYETRYRARIVNNLHRRAKAFGFVLQPMEPTPNIVVS

SEQ ID NO: 364539 - protein, 342 aa, unidentified
MYYIGLDVHKKTISYCVKDASGQVHQEGKVGATRWELDDWMKTLPQPWTVAMEATIFTGWIYDHLLPHAQQVKVAHPLMLRAIAAAKKKNDRIDAGKIADCLRCDFLPECHMASTAIRDRRRTLRYRHLLVRQMVQMKNRISGLLMETGVSHNKQRLHKVGYFRELLASNEEVNESIRPLLRVSRDSIVRLQKTEYALVSSLQRDPLLAERIKRLRTIPGVGPITALTWALEMGEVSRFPSIRQAISYCGLCGDEKSSADKVTRTPLSKQRNKHIQRVLVEAAKLAPRQDHNLALVYEREKQKGNANRATLAVARKMVAYLLAVDRGQRDFVPFADSQSAAA

SEQ ID NO: 364540 - protein, 388 aa, unidentified
MFYVGLDIHLKRISLCVLNQTGQIVHRSQVRTIDQMMSILRCLPDRFEVCYEASCAYGHFHDLLRPVASRVLVAHPGRLHLIFRSSNKNDRKDAERLAKLLYLGETPTVHVPSIDVRTWRELINCRSQVVAKRTRAKNTIRALLRCAGETPSRHPSLWTKKGMAWLRQLNLPTVSQQLRRDLLLEEIDTLNRQLRRIEQELNRRAHQTPAVSQLRSIPGVGARTAEAMVAFVDDPHRFRQAKSVGRYFGLVPSQDQSGDRNRLGHITREGAPVVRRLVAEAAWQACRRSPTVRAFFDRVQRGDPLRKKIALVATTHYLVRVMWAMLKRGTFWWENPARARQTPARARQQQGRPHALVSCRVRRQGLAASRGERRTATAKPAAGGKGGL

SEQ ID NO: 364541 - protein, 332 aa, unidentified
MKSVHIGVDVSKEKLDVYVPAAKEGARPTTMEVDNNAKGFRKLRELARKAKATVCVEPTGGYELELIAFMHKFDVAVAYTDALRVRQFARAEGSLSKSDAIDAALISRFADKIGVRILDKQDVDAVELKRKTKFRQTLTDARTAMICRLETEIDADMKAMLREQVKHLDRLIARAEKSCLETVAGNEPMDTLRKRFVQVGGVGDVTAIAILAGLPEIGKLPDAKLNRLVGIAPEERQSGTREWQRKIWGGRKDVRNALYMATTASLLWNAKLGAYYRKKRAEGHPHKWAMVPTMRKLLSLLNRIARDPNFVPAPEPETTKRNATAWRKRKAA

SEQ ID NO: 364542 - protein, 330 aa, unidentified
MNYSHFVGLDVGKKSFDASLVSLDQELSHHTFPNTPEGIEELLHWIKQHGVEVETALFCAENMGSYVIDLCLSSYQYHFPLALECPLTIKKSIGLQRGKNDRIDARRIAQYASLHYRKLRLYELPDKDLVRLRNWLVIRDNLVKQKVSSLKLLELTRETSRLADLMVPMTFLENQICQIKEKISYVEEEMEKIITEHITLSTNYRLLTSIKGIGPVNAIVLLCVTDNFQRFSAPRKFACYSGVAPFEYSSGTSIRGKTKTSHLANREVKVYLTRAAITAIAWDPQIKAYYKRKIAEGKHKASVINAVRAKIIARCFAVIKRKTPFVTLSA

SEQ ID NO: 364543 - protein, 373 aa, unidentified
MKYTKFVGLDVHKDTIAVAVAREGREAAEPLGTIINSPEAIAKLVRKLGPAKNLYFCYEAGPCGYGIYRQLTAAGSTCIVAAPSLIPRKPGEKVKTDRRDAKKLAQLLRSGELTPVWVPDEKQEALRDLVLAREDAQEDIIRKRNQISKFLLRLEKRPPSGVKNWTMKYWQWLNSLAFSQAAQGIVLKEYIHALEEAEAREKRLEEEITELVRYSEQAPIIAAFQALRGVGLITAATVVAEAGDLSRFDSPKQLMSYVGLVPSESSSGSSRYQGRITKSGNAHIRRVIVESAWHYRRQPSIGAGLKKRQEGQSEEIKAISWQAQHRLNLKFRRLSGRGKPSQTAAVAVARELLGFMWAISQEIRQKNNLKKIS

SEQ ID NO: 364544 - protein, 375 aa, unidentified
MGDHSEAFVAFDTSKLRNAVAIADSGRAGEVRFLGEIENTGPATAKLVRKLAAKYERLTFCYEAGPTGYGLHRQIKSLGYECVVVAPSLIPQRPGDKVKTNRRDAISLAKLLRADELTAVWVPDQGHEAMRDLTRARETAVMDLRSKRQQVSAFLLRQGRHYPENKKTWTQAHMSWLASQKLEYPEQRLVFEEMMLAIRQAQERRERLEQAIRVAVPDWSLFEVVTALMAMRGIDLIAAATLLAEIGDLARFRTPRELMGYLGLVPSEDSTGDTIKRGPITKAGNRRARRMLVECAWSYQHPPRVGREKQPKVDAAPRAVREIAWKAQCRLHRRYRALIRRGKLKTVAITAVARELAGFIWAVGRAITPAPAAAK

SEQ ID NO: 364545 - protein, 374 aa, unidentified
MIYSLGCDIAKDEHTTCLLRYNLTQQQWQVIGRKTFKNTPSGSKALAGWVRRLTKAQPGPIRCTMEATGVYYEQLALYLFDNHPEFHLSVILASQGKTYISSRGLRNKTDKIDAFGLALMGAERKLDKWKGIDRFWRVLRQMTRAKADLQDQITMANNQLHALTHSGVQVKEVKASLNKVLQTLRTEKDKLTRQITKHLASRKDLAEQIACLKSIPGIGMQTIAVILAETLGFAYFTSYGQLMSYSGYDVVANESAKRIGKRKISKQGSPYMRRAMYMPASTILRIKPKPLYGIYENLLAKHGIKMKAHVAIQKKLLGYMYTLWNNKETFDPQNIIDRKKEFEAHKKRIEQSNIKKVALPIGKATVDTSQAKAS

SEQ ID NO: 364546 - protein, 344 aa, unidentified
MKKVLIGIDFSKEKFDVAIIVKSTSTQEHSLFDNKVSGYRKMIKWINSVVEDIPCSSWLFCGETTGGYSRMMSDWLYAQGYDVWIENALVIKRTFPLKRLKNDTVDAFMIAEYALRFEDRAQLYKPLSQALTELREIFLYRHHLVRHRCSFEVRRIEKRFTQQKSANKNVISQSARHIITEINKEIAKCDEKIKEYIESDDQLSSIFAIVTSMPGVGTINAVSLMVYTNNFTKFAYNPRKIACYYGIAPFGRDSGTSVHTDPRVGFIANKMLKSLLTQAALASVRTCPQIAKYYQRLIERGKKPMVALNNVKNKMIAIITAMVRTGCMYQPDNICLATKSVNVK

SEQ ID NO: 364547 - protein, 370 aa, unidentified
MLDTTTFVGLDVHARSIKAVSLDVMTGEVRCATFGYDAGAVAEWVRSVDPKARCVYESGVTGFDLQKRLSGLGVDCVVGAVSKMIKPSADRRRKNDRNDAEFLARMLSVGNVVEVWVPDDECEAARDLTRALEDARDDLSRSKQRLSKFLLRHGLVFDERTPTGRRKGNWTRAHWSWIESIRFAEGADNDVLAYYVDAVRRAAEEKARLEGLVEAEARKPRWRRRVDSLRCLKGVDTASAADLVFEAGEFSRFRNARSFAAWVGLTPSEHSSGESDRRGAITKAGNKHLRKALVEAAWHYLTCSGRPKDLARGQAPDRGARRHAAKGVRRLVERREALLARGVHGNKANVATARELACWVWAAGLMAEEA

SEQ ID NO: 364548 - protein, 353 aa, unidentified
MKRDKYMGMDVHQATTVVAVIDAEGKIVLETIVATAAAPIRRLIESISGAVHITLEETTQAEWLYELLQGFVAEVVVCDPRRNRLLSEGSKGDKADARKLAELLRTGMVRSVWHGRQTTRGLKEMVRSYETFVADTRRTMLRIKALYRSRGIATTGTGVYQVKQREHWLKQLTEVGMQQRAAWLYQQLDHVRELRKQAKAAVLAEGQRHRAVELLRTIPQVGPVRAAQIVATAGTPHRFRTKRQFWSYSGLAVVTHTSAEYELRAGRVVRRNKPVATRGLNPNCNRRLKSVFVSAATAGGVSHPWQPYLDNLKRKGMRADMARLTLARKIAALALAIWKKGEAFDPKKLNWTT

SEQ ID NO: 364549 - protein, 349 aa, unidentified
MQYYIGLDLHRKYTEACVIDQKGDILMRNRLYHEDEQEVADFFEQLPKDTSVAMEATIGWPWISDLLESFGFDVHLAHPLKLRLIAEARLKTDKVDAWVLAHLLRIGFLPESYLAPSHVRDQRNLLRHRESMKKIRGTIKNRVHGLLAYHNIHPKESDIFGKAAMEMLHNLELDPHSRHILDDMLDHIEYSNKEIKKLERYLRKTLARDPRVGWLRTLPGIDYLSAYYIIAEIGDISRFLTPEKLISYIALCPTTQSSGGKTWHGPPEGGRKLLKWVLVEAAHTAVKRDSYFATIFHQKKRKKGKHSAYFIVAHKMAKIIWHMLTEERPYKVRKKQTQVGSRLNMAVTQ

SEQ ID NO: 364550 - protein, 363 aa, unidentified
MNSVYHTELSSLEETRGQFNGGKADIKLGIDVHQDFYVVVMQEGGRNPKPPQRFQKQAFLLWAAKLKSRSAEVHAVYEACGFGFSLQRQLSQLSIHCYVSCPQKLDEHNKRVKTDSLDAKALCLRLDRFVRGNREALAMVRVPSEEEERSRAIHRQREQLIKVRKMLEAQGRSLMVNHGIEPVKNWWKRNNFAALPLPAWIKELLQNSQPILIALQQKISALTLQLQVAAAFNQPRGLGAMTSVMIDREIGDWHRFNNRRQIASYTGLCPGEYSSGHTRLQSCVTKHGNPRLRAALVELAWRLVRFQPNYPAVRKWKERLAKGTLTTGAARKKAIVALARQLAIDLWRIRTGRLSAEALGLEI

SEQ ID NO: 364551 - protein, 353 aa, unidentified
MKVTTFGLDLAKTVFQLHWVDAETGEVCRRRLRREQMLPFFANRIPAVVAMEACGSAHYWGRQLRGLGHEVKLIAAQFVRPFVQTNKTDAADAQAIWEAAQRPKMRGVALKDEEQQSVLALHRMREQLVKLRTMQSNQVRGLLYEFGVVLPVGRERALAELPKKLEQLETRLPAMLLTTLRRQQARLTELTADIVAIERQLKQWSKGEAAAQRASRRLQEIPGVGLLTATAAVATIGEARSFRSGREFAAWLGIVPRQSGTGGRVKLLGISKRGDVYLRTLLIHGARAVINCRREPKPWLQQLLARRPPNVAAVALANKMARTIWALLAHDRTYAEDHVSTRPVSGQPAPQGH

SEQ ID NO: 364552 - protein, 410 aa, unidentified
MKVLHPCCCGLDVHKETVVACVRLVIDGKPVKEVRTFSTTTADLIALSEWLAETKCTHVAMEATGVYWKPVWHILSDDGFELVLANAAHIKNVPGRKSDVKDADWISDLLAHGLIRASFVPDGPTQEMRTFLRTRKQFVREKGSHILRIQKTLEDANIKLDSVITDIIGVSGRKMIEALIAGESDPAKLARLADPRVKASQQTLRQALRGRVTGHHRFLLRLHLDQIDALDVAIAKIDQEVEAGIAPFRTAVEQVSSTPGVKTLAAMQILSEIGTDMSRFGSDANLVSWACICPRSDESAGKRRSTRIRKGSPWLKTTLVQCAWAAVRKKDTYLHAQFHRIKARRGPKKAIVAVAASILTAIYHMLKDGTMYQDLGPNHFDACNKERQKNRLVKRLADLGYAVELAPLPN

SEQ ID NO: 364553 - protein, 322 aa, unidentified
MKYIGIDVSKATFVVAYSSDKGGEIRIFNNTTTGIKQFIGALPKDGSIHCVMEATGNYSALLLYMLNVAGITVSMENPLKIKNFARAMLSTVKTDKIDARLIALYGEKMNPQPFKIQGEAILRLRQKRTVIRQLTKQITAMSNLRGSLACLPVPDKGATHTVDETIKFLEKRRDRLQVELTDLVEIEFSRQLALLTTIKGIGITLATALIITTGGFTYFQNAKQVSRYLGICPTYEQSGTSVNIRGHINRNGDAYTRGLLYVAAWTASRFNTKCGETYTRLRQNGKPGKLAMIAVANKLVRQAFAVVTHDKEYVDGFVSNRP

SEQ ID NO: 364554 - protein, 335 aa, unidentified
MNQARMHVGVDVGKECLDICYPDGSKEHIGNTKRSRAKLIRKARAMSAIVSFEATGPYEENLADECLAAGVPAVRLDAWKTRKYAESQGMLEKTDAIDCEMIRDFAASLKPEQLRFVRPMSDGYRRLKRATSVRRNLIKAKTLVVNQLENILDKDVRASVSRVIDALERQIEKMDALCTEAIRSDDKMNALAVRFEQVVGVGPVLISTMLSSCPDIGSFTSKGIAKMAGVAPIENKSCTIRKKSKPRRGRRELRSALYMAAVSACHSNHLLEPVYKRFVGRGMPRRVALIALARHIAILMNYIAKYPDFNPAVDPKKAALLALPKRKPGRPRKNP

SEQ ID NO: 364555 - protein, 409 aa, unidentified
MDIVIPRCCGIDVHQKSLVACVRLLGPQGTVTRHLRTFGTMTDDLRALAAWLQDAGVTHAAIESTGVLWKPVWNVLESTVTLVLVNPRDVKQVPGRKTDVSDAEWIAQLLQCGLLRRSFVPPLALRQLRDLTRNRTILEQQRAAVVNRLHKVLEDANLKLGTVVSDIVGVSGRAMLRAVIAGETDAVALANLARRSLRRKIPQLQRALAGHVTAHHRFVLGRLLTELDFIDQEADAYSRQILDATQPFADALARLDTIPGVDRRTAENVLAEIGPDMAVFPTAGHLASWAAICPGHHESAGRQTHGTTRKANPWLRRTLVQASWGAIRKKGAYPGSQYRRLVGTRGKKRAIVAVAHTLLRVAYYVLRDGVDYRDLGADHYDRLAPEKMTRYLVKRLERLGHKVTIEAAA

SEQ ID NO: 364556 - protein, 445 aa, unidentified
MSDASTAAPLEPEWAAFAAIDWADQKNFWRLLPAGSGRSEAGELENTPEAVEAWAAGLQQRFGGRPIAVILEQSRGALVYMLTKYPHLVLFPVHPTTAARYRETFAPSGAKSDPGDTDSLLDLLLRHRERLRPLQPDTVETRLLHFLVEERRQTVDDKTRQGHRLTDCLKLYFPQILRWFDDVTSPVVGALLERWPNLEQLQRAHPGTLRKFFQQHNCRSAEKTEERIAAIYQATPATQDPAVLEACALIASGLVAELATLRTSVAAFDKRIAELVAAHPDTAIFGSLPGAGAVLVPRLIVAFGTCRDRYQDAHEMQCYSGIAPVTQASGDSEWVHFRFACPKFLRQTFHEFAGCSIAQSEWAKAYYDHQRNDQNKEHHAAIRSLAFKWIRIIFRCWKDGKPYDEEIYMQSLRRRGSLLVDALGPATSAGWKSIAGFQKLSENKA

SEQ ID NO: 364557 - protein, 396 aa, unidentified
MNNTPQLCVSVDIGCRQHSVAIGLPNGDLLDEFDILHRPEGFKQFFERIDHHCRQHGKEVAVAMEGYNGYARPLDSLVKMRGYQLYNINNLKLARFKEIFPAAAKNDRIDACKGLELFQLRDHLPLAKDVLQEVMPTPQENDMLKRLSRRRRALVNEKSRLQGRLQTDLHAVCPGLLDITRNADNLWFLRFIASVDELTKLSRLRLSTLNNIPSVGHKYAAIIKAWQPNAVFSHEVEWVGEMIIADAQRILALKDDIKALELRCKTLMNDSRIAQLIDSVPGFSVICASELAGEIGTIDRFASERSLALYLGMANLDNSSGKFRGSKAPKHVNKRAKGAMMTAVDRHRKCVPESQRYYEKKRTEGKLHNQAIRALGRQLCRIIFRMLKQNRTYEVR

SEQ ID NO: 364558 - protein, 382 aa, unidentified
MTGTEPHAWGTGLMDDITFVGLDVHKATVCIAVAEGGRGGDVRQLGVFENRPEILSKVVSRLSKGGRRLSFCYEAGPCGYGLHRLLTGYGHECVVVAPSLIPMKAGDRVKTDRRDALMLAKLHRAGELTAIWIPDAGHEAMRDLVRARATAVRVLVKARQHLQGFLLRHERIYRGARAWTLAYRRWLSTVHFEHPAQQIVLQDYIHAVQEAETRRDRLTQQIEELLPNWSMAPVVAALQSMRGVALIVAVTVVAEVGDFRRFANPRQLMAYLGLVPSEHSSGPSVRRGGITKAGNALARRVLIEGAWTYRMSARVSRKLYDRLEPLPAAVRDIAWKAQLRLCARYRRLAAIGKPKVVVTTAIAREMVGFIWAIARLAQPALV

SEQ ID NO: 364559 - protein, 333 aa, unidentified
MNEIGSREYGCFPNNNTGYRKLCNWVKTNAWDTISGEWLFCGEDTGSCSIGLSKWLYGKGYDIWIENAYNIKHSSGIQRVKNDKADSAIIAEYAWRQQDKAVPFEPLNESLAQLREVFLYRHKLVGQRVAMELRKEDKSQSNKSKAISFINRKSKHLIDEINKAIAECDKMIDNIIEADEELKENYAIITSIKGVARQNATCMLVYTNNFKKFGYDPRKIACYYGVAPFGKQSGTSVNTPAHTSHFANKLIKSLLGQAAHIAKIYNPEIRDYYQRLINKGKKPQVALNNVKNKLIRIIVALVRKKVPYDQNTYKYYEEREVMKEKKNEKLIYC

SEQ ID NO: 364560 - protein, 341 aa, unidentified
MNEVITIGVDLAKNVFQVHGVDAEGTVIVCRQLRRAQVLPFFKKQPPCLVGMEACATSHHWARQLIELGHEVKLMPPHYVKAYVKRNKNDAADAAAICEAVTRPTMRFVSVKNMEQQSVLMLHRTRNLLVRQRAMLVNAIRAHMAEFGIVAPVGVPQVKKLLSVIADRDDARLPPVARTCLESLVKQFVSLHGEIYATEKHIHAWHKSNEASRRLETIPGIGPIIASALTASITDPEVFKNGRELAAWIGLVPRQNSTGGKQRLGKISKQGDQYLRWLLVAGAMSVILHAKRRGTTNLPWLADIIARKPTKVAAVALANKNARIVWALLSHGGTYQQPVVA

SEQ ID NO: 364561 - protein, 407 aa, unidentified
MPYTVGLDWAQDDHAVCVIDEQAQVHLRCTVVHSASGLADLIQQLRRVAGPAALPIAVERPSGLLIDTLVEAGFPVVPIHPNALKASRPRYSAAQGKSDPGDAFILADLLRTDGHRFRPLHPLSDDTRALRALARSRDDLVVQRVALANQLRALLESFWPGAAAIFAEVDSPIALAFLARYPTPTSAAHLGEKRLAAFLARQAYCGRRPAAELLDRLRAAPAGLAGPAECEAKGELVRTLAAVLEPLVTQLQLLTASLEHAVAQHPDGPIIMSFPRAGRVNAAQILAELGDDRARFTHPDQLAAEAGVAPVTYESGKHRGVGYRWACNKRLRRAVTCFADNSRHASPWSAQVYRRARDRGCDHPHAVRILGRAWLRVLWRCWQDRKPYDPAAHRRARPLLLAADPAA

SEQ ID NO: 364562 - protein, 369 aa, unidentified
MEKDTTYVALDDSKRKIVAGILRPGDGQPELREIANDPRQIRRLFERLKREGPVAACYEAGVSGYDLYRQIRALGVACDVIAPALTPRRPGQRIKTDRRDAAKLVRLFRADELTAIHVPDETEEAVRDLVRCRDDIRRDVLRWRHRVLKLLARHGRAYLAGKNWSHAHWRWIREQRFALLPLQRAFEATVFALEQALTRQAELDKELETLAVTAPYREPVGWLRCFRGIDTLSAIILLAEVVDFQRFRRPRELMAYLGLVPSEYSSGEIQHRGALTKAGNSHARRVLVEAAWHYRHRPTIGRALASRSQGQPDEIISQAWRAQQRLHRRYRHLVGHGKRTPVAVAAIARELVGFIWAAMTRHESRRQAA

SEQ ID NO: 364563 - protein, 445 aa, unidentified
MIQIINPNAAAGDVGSECIYVSIAGKPAEAFGTVTAELGRLRDYLLANQVDAFAMEFTGVYWMPLYELLEKTPIKVCLVNGGHVKSLPGRKTDVADCMWLATLHAHGLLRPGFVPGPQIRRLRDYVRLRDNHVRQAGSHLQQVQKAMELMNIKVHDVISDMAGVSGQRIIRAIVGGERNTEVLIGLCDEAIRNKKRQRLCDALQGTWAAQHLFALRQAWKAWEFCQAQMAECDGEIEIVLREMAQASQPGDPPEDTEDRKAKRPSKNAPKILDLHETLRKVLGGRNPTRIPGLGDGTVLSLISEVGTDLSLFPSEKHFTSWLGLAPGSRSSGQRKRSYSRKGGRAGQLFRMVAQTVGRTVNSGLGAAYRRIRSHRGGLVASKALGRKLAELYYRVMTRGMKYVEEGLEQAEKRYREQQSKRLNRLAQQMGFVLIPRDLNPQPTDS

SEQ ID NO: 364564 - protein, 443 aa, unidentified
MSRNRRTHLRGERGQAFADKIRGIPMEQILCVSLDIHKYFHVVIIHNALGEIVTPTFEIDIFQTGFEQLCQATDETIAQTDAKVVLIGMEPSSHYFENLARHLQEHGRPVTLINSFSVKENRNQQMMLYEKDDEIDTAAIGDLLRRGEGSPFNPPEGVYLQLQHLARVRTSKVKMRTMLQNQVIGHLDRIFPGLVIIGKEAKDRYRPLFATKFWHCKTLQHLIRVCPDPRQLAAMSTQDLIDAFHAHGYAIGPFRANKIIAYAQKMLLPDPDLGAIRCQLLPHDLALLEEVEGHITQLEDDLLALLAETPYHIWDKIKGLSPIQAVDLAAAIGDPANYRHAKQVFRRSGLVPGRNDSGTRQRKGKGNKVVKVGDVYLRRALMNALATLILHQPVLGAYCCKLKASKPAGVARVATARRALGILWAIQRDQRSDTLIFKKEIDM

SEQ ID NO: 364565 - protein, 367 aa, unidentified
MKKVSTVAAAQSRNISQQKLTIGLDLGDRNSWYCVLDETGQIQLEQRVRTTAKALQEVFSAMPRSRIALEIGTHSPWISRLLCELGHEVIVANARKVRLIGENRKKDDRLDAQTLARLARIDPELLYPVRHRSVQAQADLTVIRARAGLVRARTALVNTARGLAKSYGERLRSCNVRNLNPEKAESLSPELQAALEPLLNAIESLSERIVEYNEGIENLAQQSYPQVALLKQIKGVGTLIALTFLLTLEDPHRFRKSRDVGCYLGLQPGRRNSGQSEPQLHISKEGDPYLRTLLVQGAQHILGPFGVDCDLRRWGLKLAERGGRNGKKRAIVATARKLAVLLHHLWVSGEAYEPLHNSSPTTVATAA

SEQ ID NO: 364566 - protein, 318 aa, unidentified
MIHYIGIDISKRDFHVCFSEGGDILKWSNDIIGIEQFIKYLKANNYTVKKTLIGLESTGSYHLPVSYLCSQAGYRVNVINPLITKKQNQTSLRRVKTDKQDARLIRFCTMRGEGHPFMETADSLAFKALVRHRARYSMLRMRMRLRHEEMKWRESYLKVPMTNINHELFEFLDKKIKKLDAQLRKYDPQTQKLLQTIPGVGPQTAATLLAEVGGINRFPDAQKLTAWIGLDPRVHQSGTSINGKGYITKRGNKLLRTRLFNAASVAVIHPPNIFHEFFQKKRSEGKPYRVALCAVMRKMVHVIYAVWSHETPFMNKLK

SEQ ID NO: 364567 - protein, 332 aa, unidentified
MKKIIHFIGIDVSKETLDIALIRNNDKSNIYSSKVTNNKTGFKKMKQWLKLEKIPLHEAVFCIEHTGMYSKPVGKFILSLQGNLWMEMSLKIIRSMGVQRGKNDKIDAMRIALYAQRCQDEMKLYEPPRPVVEKLRTLLQLRKRLINSRNSLQVSCNELTTIDEQAGKEATRLIRSSVTALEKNIDVINEQIDELIASDEQLAHEFEIGTSVPGIARITLAYMICFTNEFKNYAGGKQLACYCGVVPFEYTSGKSVKGKPHVHNMANKFLKKLLHMGAIAAVTYYDEFKCYYKRKVEEGKPKMLVLNNVRNKMVLRLAAVIKNNKPYQKIAA

SEQ ID NO: 364568 - protein, 350 aa, unidentified
MAEGNRVVTVGVDTHKDAHVAAALDASGALLGTASFPADARGYASMVAWMRAFGRVEAAGVEGTGGYGAGPARALDAAGVRVLEVSAPDRSERRRRGKSDGIDAEQAARAALAGTRCAPAKSRCAEMGALGALEAAYAGAVKARTAALNALQAQVVALPEEARAPLRGKGSSELVRACASMRPGAGSSPETLAKVALRSLARRARMLDEEAKGLEAEIDALTKALAPSTRSLLGAGPHVAARLLLAAGANVSRLRSEASFSMLCGASPVPVSSGRADRHRLSRAGDRRANSALYTMAITRMAHDGRTRSYVARRMSEGKTKKDAIRCLKRYIAREAYRALAQDMEALGMS

SEQ ID NO: 364569 - protein, 434 aa, unidentified
MQDAEDEPLFAERVAGLDIAKAEVEVAIRVPSDTTAGRRQQETRTFATTRKELLALADWLRCWGVTKAGMEATGDYWKPVFFLLESQGFDCDLYNATQVKALPGRPKTDRADSIWLAKITERGMISSSFVPPEPIRRLRTHTRYRRHLTQARTAEKQRVEKLLEDGHLKLSSVISDIHGVSGRDMLNALAAGQRDPRALAQLARGTMRGKIRRLEEALECSFFTDQHAAVLAMMLTTIDHYTTQIGQLTIKIEALTEPYLHQVGQLDQIDGIGTICAQDIIAEIGTDMTVFPTASHLVSWARWSPQVKQSAGKRKGSNATGRGNPYLGAALGEGAASAGRTQSFLGARYRRLTRRMPKKKALVATGNSMLTIMHALLADPDACYQDLGADYYEQRMHARRQARNHIKSLERLGYKVTIQATANDPGNQTLTAAG

SEQ ID NO: 364570 - protein, 422 aa, unidentified
MSYCPVAGIDVSKRFSDMCILSPDNKIFAQEKIYHDETSINRANALLQKAERLFFSKPVIVMESTSHYHLILFQFFSEHGYDVIVVNPLQSNSMKDFSIRKRKTDRVDAFKLAMMYRTKTLRPSQIPQTATRALRQLCRHRAELLNDVSSYKNRLTALLDQTFPGYDKVFSDVGGVTSCAVLVRFPTPTILLMEEESELVEVIAAASKSSYSFAKKKAGLLISAAQKAQTLGIHSCADETLIVCTIQMLRTLSESVLQIETAIDNLLAQIKEMRNNVSLLQSIPGIGSHSAALLLGEIGDISLFKKPKQLAAYFGLDPTERQSGSFRGTKNKLSKRGSPYARAALHMGVVNSICKRGKDSAANPVLLSYYEKKCKNKPAKVAQAASMHKLVFIIFAVLRDQKPFELKTPEQHAVEQGFVKAA

SEQ ID NO: 364571 - protein, 334 aa, unidentified
MMNDVAVGIDVSKRKLDICIARDGKYKSKSLSNTKSGHKELTRWLETQGVTSETPVALEATGPYSEAIAIHLSENDWRVCVVNPARISGFAKSELARNKTDKADAKLIARFALRADLEIWQPPTPAVRELRALVDRLQALSDMRQQELNRIEGLSETAQLTVTEMIMDHVQWLEKQIDSIKSDIDDHIDGNTELKQDAELIESIPGMGRRSTAQFLAYIGDVRRFKSAKALAAFIGVTPRQKQSGTSIKGRSGLSRTGHNAARKSLFMPGMVAKRFNPVIIAASARLEARGLTPKAIVGASMRRLVHMIYGVVKSGTHFNAKIPLSRLDFQEGI

SEQ ID NO: 364572 - protein, 298 aa, unidentified
MPLYGGIDLHANNSVVVLLNDQDQVIYQKRLPNHLSVILEPWSLYHREIEGVVVESTSNWYWLVDGLMEAGSHVHLAHPAAMQQYNGLKYTDDHSDARWLAHLLRLGVLPEGYISPKAERAVREVLRKRAHLVRQHTANVLSVQNILARNTGGRFSLKRIHELTKQELEALLPEADQVLTVTSSLAVLDCLSHQIKALEQCVHQRLHHTPAYEQLLTVKGIGPILAQTIALETGDSRRFPTVGHYASYCRCLDSTKLSNGKRKGRSPYELLGLKLPTSDWWQLLQMDPQELEQKLLTQ

SEQ ID NO: 364573 - protein, 452 aa, unidentified
MPVHQFGLRVGVYTIGDVVIRSSGYDPVKEIAIFAPCACDLNHHRKSVREFGAFTTDLNALADWLTKCGITSVAMESTGVYWIPLFELLEQRGFEVKLVDARQVKNVSGRKSDVLDCQWLQQLHTYGLLAGAFRPPDQVCVLRGYMRQREMLVQASSMHIQHMQKALQQMNLLLHNVVSDITGVTGMKIIKAIITGERDPKVLARHRDQRCHSSAATIAKSLLGNYREEHLFALTQAVSLYETYQAKIVECETAIACYLKQQPNRTDEEPPPTDKSVRNRDRQRGGVDVRSQLYKMTGVDLFNLPGLAADTLLTLAGEVGFDMTPWPSEKHFTSWLALCPGTRKSNGKVLSRKTKRSANRAAAAFRIAAASLTRSKTALGAFYRRIRVRVGPAEAITATARKLAVLYYSLLKHGSAYVEIGQTVYEEKYQQRRLNSIQKQALAMGYQLIPTA

SEQ ID NO: 364574 - protein, 400 aa, unidentified
MNPELRVAVDVGCTRHRVAVGLSEGKLLEEFDINHDAAGLSEFFERVGRHERQWGRPVAVAMEGYNGYARPLDERVLLHGYRLFNVNNMKLARFKEIFPGPAKSDPVDARKMLEMFSLKDKLPLAREALQEVAPVAEVNLQLKALTRRRKQLVNERMRVSSRLQADLQAVCPGLLDITGEADNLWFLNFLTCRADLTKLKTVREASLLALQGIGKGYAGKIRHWQRQATFSGTVAWVGPMIIEDARRMLELRKVIGTLQTQIDALAEHSEIACRIDTIPGFGRVCAPELAGEIGSLQRFRGESSLALYLGMAPLDDKSGARSGSKPPRHVNVRAKAAMMIAAAQNAASVPESKAFYDKKRAQGKTHNQALRALGRNLVRVMWSMLKHGRDYQLESPSQNA

SEQ ID NO: 364575 - protein, 359 aa, unidentified
MQTQSNKIDFNGQNIYVGFDVHLKSWMVTILTEKLTHKTFSQPPRPEALHHYLVKTFPGGTYYSAYEAGFCGFWIHNRLVELGINSIVVNPADIPTTGKEKVMKTDPRDSIKIARSLRNGDLKPIYVPSSPILEDRGLVRIRATLVKDLTRYKNRIKSFLHFHGIEYPDVFNKSQGHWSNRFFKWMEDLELKDLTAKATLITLLEQVSSLRGAVLRITKQLRKLAKTDRYKEQEMLLRSIPGVGLITALTILTEIETINRFANIDQLCGFIGLIPSTNSSGEKMVDGDITPRGHSILRNVIIESAWTAARHDPALNKSYHAYCRRMESNKAIVRIARKVCSRISFVLKNNHPYVCSVVK

SEQ ID NO: 364576 - protein, 362 aa, unidentified
MTITNPAKRIVVIGGVDTHKDTHTAAALDDRGRLLGVSDFPASASGYRELCRWFEKLGDLDSIGVEGTGSYGAGLARHLRTSGVRVLEVSCPNRQLRRRRGKSDPVDAEAAARAVLSGQALGVPKSQDGAVEAMRLLRTERRSAIKARTQATNQIHATISTAPETVCARFTGRTVRAIVDVAGAFRVVDPTASLDAMTRYVLRGLAKRWQTLNGEVGRLDKVLAQMVDELAPALVSEPGVGPEVASALLVAVGDNPERLANEASFAALCGVSPVDASSGRQRRHRLNRGGNRDANRALWVIAFVRMRCDPRTKAYVAKRTEQGLSRPEILRCLKRYIARALFRKLHPLAAKAASGVHQPKAA

SEQ ID NO: 364577 - protein, 430 aa, unidentified
MKSNTQNAKIKAITETTLVLGIDVGSETHYARAFDYRGIEYSKKPFKFSNDEAGFVMFKAWILDIKEKHGKDKVVPGMEPTGHYWFNLGKFLQDNEMKPVLVNPHHVKKSKELDDNNPTKNDRKDPKVIAGLVREGRYMIPYLPEGVYADLRTASNMRFQLQAELTRIQNRISRWFNIYFPEYKTVYGQPDAKSGMLILKVAPLPEDIMTLGIDGVNQIWRDAKVRAVGKARAKTLIEAAEHSVGSKEGEISARMEIRMLLEDYESRNTRLQEVVALIEELVKKIPMAEKLLEIKGVGIKTVSGFLAEVGDISRFNNPKELQKLAGLALVENSSGKHKGETTISRRGRKRLRYLLFEVAMSLVSKNPEFRELHSYYTTRKLNPLKKMQSLMAVAAKLLRVFFAMLTKGVDYDPKKLVGDIKRPAVYLQVA

SEQ ID NO: 364578 - protein, 388 aa, unidentified
MIYVGIDIAKLNHFAAAVSLEGEILIEPFQFSNDYDGFYLLLSKLAPLDQHSIIIGLESTAYYGDNLVRFLICKDFKVCVLNPIMTSSMRKNNVRKMKTDKVDTLVIAKTLMMQDSLRFSTLEDLDYIELKELGRFRQKTMKQRTRLKIQLTSYMDQVFPELQYFFKSGLHQKAVYALLKEAPMPKDIASLHLTHLSNLLVKSSHGHFTKDMARELRVLAQRSVGLNDSSLSIQITQTIAQIELLDSQLFETELEMANLVTCLHSVLMTIPGIGTVNGGMILGEIGDIHRFSTLGKLLAFAGLDPTVYQSGNFQAKRTHMSKRGSRVLRYALMNAAHNVVKNNATFKAYYDTKRAEGRTHYNALGHCAGKLVRVIWKMLTDEVEFNLE

SEQ ID NO: 364579 - protein, 347 aa, unidentified
MLHAGLDLSRKKLDVCLLSEQGEHLDQLGVPPDVDSLRRLARRIDEVHAEPVSAVVESMTGARIVHDTLEQEGWEVEIADAQKVKGLAPLACKTDRIDSLVLATLSQRELVPAIWLPDPRIREERELARFRLHLVKHRSMLKHRIHSTLINFGRPCPVTDLFGVEGRRLLERLEVPEPWRGNVSASVVLIDDLERQINEINRRLRQGHTEHPYIPLLMSAPGIGWVLAFTIAAEIGDISRFSSPEKLAGYTGLCPRVNQSGDSDRRGPLSKHGPTYLRWALLEATMHALKHPAYSERYQRNKRRLGKQRGAKVAQIDIARRLAQAIWHMLTRNQGFAPRGAALRLAA

SEQ ID NO: 364580 - protein, 340 aa, unidentified
MSEISIIGLDIAKHVFQAHGADALGRAVLRKKIGRAKLLPFFASQPRCRVVLEACGGAHHWARELARLGHDVQLIAPAYVRPFVKRQKNDAADAEAICEAAQRPSMRFVPIKSETQQAAAMVFRGRDLLVRQRTQISNALRGHMAEYGWIAPKGLAHLDKLATLLADPAAVPEGVRSVCTVLLESLALLDRQIATLDKEIVRRSREDAVARRLMTIPGIGPITATAIAALAPPPGTFAKGRDFAAWVGLTPRQHSTGGKQKLGAISKMGERTLRRLLIIGSSAVVLQASKRGAPKGSWLEQMLARKPRMLVTVALANKTARIVWALLNSEEDYRAPVAAA

SEQ ID NO: 364581 - protein, 302 aa, unidentified
MNYIGMDCHITTLDFAVVNEAGRLVKANRVSTSVNGFIEFVKTVPPPRTIYMEEGTLAAWALETCVRFREKLVITDAKKNHWIGSSGQKGDSIDALKLAQLARGGYIKEIHHPVGQRRRFRELMIAYHDTVRSTTRIKNKIKARFRQNGIQCTGATVYSETHREEWKGKLPQEATLLLILGGLWRQLKQSEQTEEELLAAARAQAKQYPEIKLFKDIPGIGFIHAATISAILETPYRFADKRKVWMYAGLGIMTRSSGGKIYSEKLSTDYNRLLKYTLKQAAEAAIQSKDNPFRRKYLYVTT

SEQ ID NO: 364582 - protein, 328 aa, unidentified
MDASRASFKYSIARSQCSRALAQLGKNTLHISGLDSRGAIVLREKVSRGRISSRLANLAPCLIGIEAGMATHYVARELAALGHDVKQVPPTYAKPFRQGHKNDFRDAHAVAEAVQRPTTRFVPAKTDEQLDLQALHRVRSRLVSERTAVINQIRGFLLERSIIVRQGLRFLRQMLPDILAKRTDVLSPRMVRIVADLANDWRQLDERIEAVTDEIETLAKNDSSCRRVMTVPGIGPIISSAMVAAIGSGAAFERGRDFSAWIGLVPKQMSTGDRTILGRISKRGNGYLRMLFMQAAQVILLRPASWPKHGFGVWLARHRAGWQSVDNC

SEQ ID NO: 364583 - protein, 451 aa, unidentified
MSKGMTSGVTRGDRRRNARLAGLRAMVPAGNAVAGLDLGEKKQALAVTDHDGRVLARRSPRVTVHDLGGHLDWALAQARAAGFAGLSVACEPTGSRWMVVQDLCGARGLPLVCVQPLVSHVAREQMDLTGDKTDEGDCVLIARLARELHCYVPERVEGAWAELRAEGRHRAQVITRATAARQLIGDQLGLVAPALLEACAHPFKSLTWLASAEVVLERCGADPSVLAAMGYEAFAALVAARLGGWGGKRVGPACRAVFTALPDERGVTRMRRAALRRAGRALGDLKYARARRGQVEADMIALLGDLGIGTARICEIPGLTPAGLAAIMAETGDLRRYASSRSVVKHAGMSPARNESAAFHGLTRISRRGRPALRLAAWRAAWAVLRHCDVLAAKHAALTSRDGEGKLAAAQARVACAASLLRWIYALTVHRTRSDPRIAAGDLGHRHAMAA

SEQ ID NO: 364584 - protein, 341 aa, unidentified
MKNLFIGIDFSKEKVDVAIIFADGLTETAPRVFNEFKTTVSGYKQLVKWVEQNSYGIDPSLWLFCGENTGGYSNGLCKFLYGRGYDMWLENAKSIKDASGLRRLKSDRADASMIAEYAMRNHDKAVMYKPLNESLEQLRELFLFRQTLVRYRCSFQVRREEKRLTMDKSPIKTMISQIGRHMVTTLEKEVEKIDKRIADLIKSDEELTEVFTIVTSVPGIGTQNAVCLMVYTDNFRRFNYDSRKIACYYGIAPFGKDSGTSVHSDPHVHFMANRQIKAMLTQAALAAVRFNPVMARYYMRLVERGKKKQVALNNVKNKLVHLVTAMVRNRQTFTPEYKFSA

SEQ ID NO: 364585 - protein, 307 aa, unidentified
MFVGIDVAKDRLDVHVRPAGEAFTVGRDGEGIEDLVGRLSRMAPALVVLEATGGFETIVAAGLGAAGLPVAVVNPRQIRDFARATARLAKTDALDAAVIAHFAEAVNPPARPLADEQSRLLGELMARRRQLIEMIGAESNRRRMLTVRRTLKTVDRVLATLKTQLQQIDDDIDSAVRGTPAWREAEDLLVSVPGIGPRIARTLIAELPELGRLGRREIASLTGVAPFNRDSGTLRGRRTIAGGRPVVRAALYMSILVSIRRKLPLALTYHRLRAAGKPAKVAIVACMRKLVTILNAILRDKKPWASA

SEQ ID NO: 364586 - protein, 309 aa, unidentified
MEPKQWVGIDVSGKRLEVFVRPIQRILKVANSPAGLATLVSELLGIDPALIVIEATANWHLAAVAALSGAGLPVAVINPRQARNFARATGQLAKTDPIDARLLAHFAEAIHPPVRVLPDEQTQELAEWVQRRHQLVEMLTAERNRLRAMSGSARADIETHIDWLEKRLLRLDEELERLIADNPVWKDLSALLCSVPGVGSVVSATLIANLPELGSLSHKQIAALVGVAPLNRDSGQTRGHRTTWGGRAPVRTMLYLACVVGIRFNPIIRRFYQRLKQAGKPSKVALVACMRKLLVSLNAMVKTQTQWQS

SEQ ID NO: 364587 - protein, 344 aa, unidentified
MNKTIVGVDLAKKVIQVCIYRNKKVQSNTEMTPDEFLSWLVTSKPVLIVFEACGMSNYWKQRATEAGHDARLISAKLVSAVRQNQKTDKNDALAIVQASLLPEVRFISGKSVKQQQLQSIKRLRELAIKHRDALKKQIVALLLELNIRVPNGSARLIDKIDDILEDAENDLSAEFRQALQVAQQQLSAAIKSVLIYDDCSEKSIQTHPDCKKLLKLEGVGPINAINLYIALGCADLGAFNKGKDASACIGLTPAQHSSGGKVKIGTIGKLKNSTLRSQLISGAMSVIKQIVKREARTKKEVWLKSLIERRGNKCAAVALANKTVRTAFAMLTQGTEYKAELLAA

SEQ ID NO: 364588 - protein, 335 aa, unidentified
MLHIGLDVHWRLTMICILNACGRVVKRKTIRGPWHKTVAWLSRLDEPFEVVFEASCGYGPLYDALSKIARRVVMAHPGQLRLIFRAKRKNDRVDAEKLAKLLYLDEVPAAHVPSEDVRQWRELIEFRRRVVDKQTACKNQIRALLRGQGVQAPRGLWSRKGLAWLAAQEWPSLSGCVRRDLLLEELQANRRKLQTVTRVLDRIGRRNPAVTLLRTIPGVGPRTAETIAPYIDDPRRFARPSQAAAYFGLVPCQDASAGTNRLGHITKQGPPAARKYLVQAAWQTVRRSETARRRYERLTGGRRERRKIALVAMAHWLVRCMQAMLCSGEGWREAA

SEQ ID NO: 364589 - protein, 413 aa, unidentified
MKRRQRTIQEDTLLVGIDIGMERNTAYCTNMSGNGTKTIIFTHTREGYEKLMEYMLMMQRKLGCTGCLVGYEPTGPYGEPLIHYLIHKGVPLVQINPMHTKRLKELNDNSPLKTDKKDSRVITDIMRLGYTLNVVVPEGDAAELRRLMNLRDRHIDERVALMNYLRQLIFLIFPEFFQAIKSLRSTTAMMIVREYLATGSLWKTDHESLGRAIRTTSMGKLGHGEAMRLLHAAHTSIGITKGVSGIMMDMSHVALQIAMIHSLIQEAEHCIEKILKNIPSARYIRSIPGIGSITTAGIIGEIGDFNKFRTQGEVVKFSGLNIYEVSSGKHTGKRKISKRGRSRIRNLLYLAALGTVKKRGIMRAYYTRLLGNSLHKTSALVAVARKLLKIIHAVVRDECMYVREEKEVEQKAA

SEQ ID NO: 364590 - protein, 330 aa, unidentified
MEKFAFYIGVDVSRNTLDVHCAELNKHITIPNRTEGFRMFHCLCRENGIDLKNAFVALEYTGGYEYRFIQHLHDKQISFARIPGIAIKHSLGITRGKSDKIDAKRIATYAEEKRRQLSPEKPVDKTIIAIKELLGLRKRLVRESAGYKATIKERKHMYGVGNKDFIVAVLLKKEAGNKRLIEKTEQQITLLVKENPAIHHSFKLLTSIKGIGKVNAWMTITYTENFTSFPNARSYAVYVGVIPVDYSSGTSIKGRKRVSHLANKELKQELSQAARSAIQWDTEMRLYAEKKLENKHYGIVVNNIRFKLILRMFAVIKRGEKYVDKYANVA

SEQ ID NO: 364591 - protein, 291 aa, unidentified
MNIVFLGIDLAKNVFQICGLNQAGKPVYTKRTGRKELLQTLATIPACLIGIEASTGAFYWQREFEKLGHNVKVISPQYVKPFVRGQKNDGNDAQAIAVALMQPTMQFVPPKSPEQQDIQALHRARQRIVNHRTATVCQIRGLLLDRGITIGAAVSRVRRAVPLILEDAENGLSVRMRRTIAELYDLFNDLERRIHFFDKEIETVFRQSEACQRIAKVKGIGPKTATAVIAAIGKGTEFKNGRHFAAGLGLVPRQHSSGDRQVLMNMTKKGDKHLRTLLTIPFAKSDSTSLV

SEQ ID NO: 364592 - protein, 438 aa, unidentified
MISAAIERCAGIDVHKKFLAVCVMVGPLEGEPRIEKRRYGTTVSELNDLREWLQSQAVTHVVMESTGSYWKPVFNVLEEAVRVYLANPQEVKNRKGHKTDDKDGWWLAHLLRHAMIQPSFIPPRAIRELRDLTRRRKRLLGNSTSERNRVQKILEDANVKLGNVLSDVFGASGQLMLDALLEGQATPVQVAQLAQRKAKKKIPQIIAALEGHQMSAHHRQLIRYSLDHLQFLEEQILKLDNDIAAKIREAQLEPQWQLLQTVPAIRETSAAAILAETGGDMTTFPSVKHISSWAGLCPGNNRSADKNKSSHTTGGNPWLRSSLVECSWAATVKRNCFLREKFWRIVTKTRDHKKGPALIAVAHTLLQLIFQVLSTGKPYVERGVPPLDERQRNRIIRHHVRRLGKLGIAIHSMQPAATARLGRPLKAVLLEPRPPATS

SEQ ID NO: 364593 - protein, 463 aa, unidentified
MAARKPKRMGAQTVEDEDYQLRYERVAGIDVAKGSAMVCLRLPPGPGKVRRTSRTWEVMARVPDIEALAAELKASRVERVSMESTSDYWRIWVVVLEGAGLDVQLVNSSQARNLPGRPKTDKADAQWIARLTEMGLLRGSFVPPPEIRALRQYTRQLVHLSQDRTRYWQRLEKLLESALCKLTSVVSGLAGSASCLAMLEAMIAGERDPQVLAGYARGPMRSKHAALVKAFTGMQFGPEHVFSASSDLRMIKMLDAEITGLEQQVRDHLAAIPAAWGTDADGVTGPGAGTGPDAAVLPAVDRLTEIPGVGPAIAAGLIAEIGLDMSRFPTPHALVSWVGMAPVPNQSGPRTGRGRKGHGSSYARRLAGQAGNGAARTDTFLGQRHRRIRSRPAGGGWKKANVAVGRSIIIIVWHLLKDPAARFTDLGPDHYAKHTDTNRKARNHKRQLEALGYDVILTPRQAA

SEQ ID NO: 364594 - protein, 348 aa, unidentified
MKNKSFVGIDISKNVIDVSIFREDTNIKMFPHEVFNNTRKGFGDMCSWLKKSRVVLSQVLFGMEFTGCYSLDLEKFLTSKNYSFCMLSTRIVKHHPMGTIDKRDKNDSAKIADFLYRYDGTECAKPYKLPSKAMQQLKQLVNERKFLVEQRTNFMNRMQMFETKEDSAMYESYIKKLNHDIEKIDQEECELMSKEEDVFDTFQNLLTIPGIGLVNATNIIAITRNFTAFDTARQYARYVGVAPCSHTSGTSVKWRARPSAHCNGQVKADLSMAALRAVEYDVEMQMFYNRKLGGRKDSDTKRKALNAVKFKLIRRMFAIGKQKRKWEVLNTSDDRNNLHIEKSKASEL

SEQ ID NO: 364595 - protein, 352 aa, unidentified
MPNYTRVVIGGVDTHGRTHHAAVLDTQGRLLGDREFPAHRGGYRQLLGWLGRHGQVGVVGVEGTSSYGAGLTHYLLDQQVRVVEVDRPDRRTRRQRGRSDPIDAEAAARAVLAGTATAAPKRRDGIVESIRALRTARRGAVKARTAAINQLKALLVTAPASLREALDGRSTPALVAACARLRPDQTALADPAHATKAALVVVAQRIQLLEAEITLADQRLATLVGRAAPRLLQLLAIGTDHAGQLLVTAGQHPERLRGEAAFAHLCGVAPIPASSGKTRRHRLHRGGDRDANRALHLAVVVRMRFCPRTRAYVERRTKQGLSKPEIMRCVKRYLAREVYHALVADFEALHAT

SEQ ID NO: 364596 - protein, 318 aa, unidentified
MALLMRFVGIDVSKDWLDVWTDGWKATERFANDAAGWSALIARLEAFGPTCATAVAFEATGGYQNGLRRALGEADFIVHTANPARVRLYARSLGRNAKNDRLDARLIARYAQVAELRPEVFDPQRERLAELVMHRRRLVDERTAIRNQNHMTRDPKLRSQNTRRLTLIERQIAQSEAMIASVVGGDGAMQVKMARMKTLKGIKDVTATTLLALLPELGALNRREIACLVGLAPFDHDSGKLKGKRAIAGGRAPVRTALYMAARAAALSNSPLREYYQRLISAGKTPKVATVALMRKMLVTLNAMMRNQEPWKHAPAIT

SEQ ID NO: 364597 - protein, 338 aa, unidentified
MSNAQTDNSAFLHFAGVDLGRDSLTLTVIDRQGKECLKTKDFPTSKAGFRRLRKCLGAFPKLAVAFEPTGNPSLTFLKALDGFDAKLFQINGRVIRRRATSLTQTKTDAADAKAIAETVRDIAIAKPGELEHFRIVWNAEHANLALLATEYTERVEDVRRLKVRADHLEHQSAPMAVELRGRVAKDLKAAEKARDQAKQEMAAAAKACNGDMFALLLSIPGIGEVGAANLVREIGSISRFESADALKGFLGMYPARRQSGKTEYPAHLAKHGNSAVKSTLFMSGHVAARHNPTCKKLFDRLVGKGKKRIVAIGAVMRKLIQIVYGVLKNKTPFSPDFA

SEQ ID NO: 364598 - protein, 372 aa, unidentified
MSNLRFVGLDVHAQTIAVCVAEGSGEVRPLGTIPNRLESIRKLVGKLGPVKQLRTCYEAGPTGYVLYWQLAALGVACDVVAPTLVPVKAGDRVKTDRRDAEKLARCHRAGELTAVWVPDAEHEALRDLIRAREAGKKDQLRARHRLSKFLLRHGRRQPEGMKAWTKKYLEWVKSQVHFDQPALEFTLSDYFHEVEHAASRIERLENKIDEVVHKMPAQLRAVVEGLQALRGIAQLTAVTIVSEIGSFSRFEPRKLMGYSGLVSSEHSSGNRIQRGGITKTGNSHLRRVIVEAAWSYQHRPWLGGYLLKRQRDLKLSEETKEIAWKAQNRLHNRYKKLSAGGKNKNQVVTAVGRELLGFIWSIAVQIEAGYKA

SEQ ID NO: 364599 - protein, 346 aa, unidentified
MTIVGGFDVHREQITFDYVDGDGLVRWGRIRPATRRTLRRWLAEHCPDGDGEFALEGCTGWRYVCEELAAAGMGVHLGDPAEVAALRGPKKRAKTDRADAQLLRTLLLEGRFPESWIPPGHVVETRILGRLYCRLMDERRSWQQRIHAQLFQQGCPPITALLSEAGREALTRVELSTAGHHYVDAALRRIDELTRQIVPLRAQLVTFAHQQAGCRALQASQYGIGWLSAAIMWAEIGDARRFRNSDQLVRFAGLDITVYSSADHRAAGHLSRQGSPELRWAAFEAAKCAARSASPDHAYYQQVAARKDGKRPTLAVERKVLRRSYHTLRELGDAALAQPHPIDQAA

SEQ ID NO: 364600 - protein, 460 aa, unidentified
MNRKRSKSRVDRTMPMMHPNAAAIDVGATLHMAAVRADRATEPVRSFGTFTTDLHRLVDWFTECGVETVVMESTSVYWIPIFELLDARGFTVFLVNARDAKHVPGRKTDVSDAQWLQRLHSYGLLRASFRPKGQIAELRAYVRQRERLLEYAASHIQHMQKALTEMNLQLHHVVADITGSTGLRIIRAILAGERDPEVLACLRHYSCHSSAETIAKALTGSYRTEHLFALEQALALYDAYHEKASACDVRIEAVLKELCIHRGRGIGSVAPAPRRRHRTDQANALAFDVRAALFALLGKDITTIDGLGPYLSLKLVAECGDDLSSWPSAKHFTSWLGLAPSNKVSGGKMLSSRTRRSGGRAAALLRLAAVTVGRTDTALGAFYRRLSSRIGKAKAVTATARKVAVLFYNAVRHGMEYVDPGASSYETRYRTRVVNNLHRRAKAFGFVLQPLEPKPGAVVS

SEQ ID NO: 364601 - protein, 308 aa, unidentified
MEQFAGIDVAKDTLEVFIRPDTIRKTFPNDEEGRMDLARLLVAMKPALVVLEASGGYEIPVVEVLALRTLNVVVVNPRQIRDFAKATGKLAKTDAVDAEIIARFGEAIRPEIRPLKDAEAQRLQALIARRRQLVQMLAEEKNRLQIAPSWTKADIEAHIAWLTECIKKAGKNISSTIKKTPLWREKENLLRTFKGIGPVNACTLLARLPELGQLDRKKIAALAGLAPLNRDSGKYRGRRTIFGGRADVRAALYMATLSAVSHNPVIRAFYEHLIHAGKVPKVALTACMHKILTILNAMVRTNTPWCAR

SEQ ID NO: 364602 - protein, 342 aa, unidentified
MNYYAGIDVSLEYSSVCVVDSAGKIVRESKVASEPEALIGWFRKLGLSLTRIGLEAGPLSQWLYAALRQAGLAVELLETRHVRNALKTMPVKTDRNDARGIAQLMRLGWFRPVHCKSMEAQETRALLTARRLVKSKLHDVEMSLRGILRGFGLKVGRTGKTQFEARIRELVAGHPTLQAIAEPLLAVRGVLRRELAGFERRVRATARSDLRARLLMTTPGVGAVISLTYASAIDDPARFKSSKIVGAFFGMTPTRYQSGETDVSGRISRIGDAAVRAVLYEGAHVILTKPVKGCTALKSWAMRIAARAGMKKAKVALARKLAVIMHRMLVDGTPFIDAAKAA

SEQ ID NO: 364603 - protein, 351 aa, unidentified
MKILAIDLGKCKSVACKYTAATGEHTFETFQTRPQMLHDLLVAVRPERVVIESCSATGWVGDLVRALEIELQVANTNHDAWRWKNVKRKTDRDDALKLAQLSAMNQLPLVHLPEKDVRAWRSLIQFRGKLVGRRTRIKNHIRSILEREGLRMAPGKSGWTKRWLKQLGALAEATADGTRALWQFELSIELVQYEAAMDAIMNVEYELNQLAKGDERVKRLRTIPGVGPRLSETLVAVLDDPKRFKSGKQVGAYVGLTPRLYESGSMSRQGKISKQGHRYLRSLLVEVAWLGLRHNAWMREVYERVRRGSKTRKKIAIIAVARRLLIRCWAMLRDGTNWSPPASGESAVRAA

SEQ ID NO: 364604 - protein, 370 aa, unidentified
MSVRRILAKTIDTDLEYEAIGIDLAKNCVSAALLTTDGEVVCIDRLDYSELEKSAQALSPTTFAMEPCTEMNYLVQKLEAWGHRCLVIGGKNVQNYVENHYSGQKTDLNDAQALAFLAQDKQLRTIKAKDIEQQKYASLTTLREQYIKQYRQTIVSLKGICQAWGLNISKGISGKAQLKDLIENHAAFPEELRESLVDMVTHAQTTQKVLNKITKTLEVLAKNDKVCQLIQTIPGLGTICSCRLRVTIGDIKRFKNPKDFPAYYGLVPRSIATGHNEKKGKITHRGDRTMRSLMVQGAGCVIRLATCGKLKSKQLTKWILKKQKEKMPWGKLVCAVAAKLLRIVRAVLISSKPYNPKIAGVAKCSLPKGT

SEQ ID NO: 364605 - protein, 468 aa, unidentified
MQQPIEVQVDEHEPIVERVVGIDVAKASGMVCLRVPHETIPGRRVTKVWSVKATTRALVELGDHLRCQGVQRVVLESTSDYWRPFYYLLEAAGLTVWLVNAAQAKNVPGRPKTDKIDAVWLAKLAERSMVSPSLVPTEPMRQVRDLARARFDLVADRARVKQRIEKLLEDALIKISSVLTDIHGVSGRAMIEALIAGQRSPKALAELAKGRARARSAALQEALDGRFTDHHARLARLLLDQLDELTARIDQVTALLEAAITALTPPQADTDTPTGDSGGDSGGDSGDSGDSGDGAPAQPAPGRYARAVERLCAIPGGGPDSVRAVIGEIGLDMSVFGTHQRLCSWAKVAPRTVQSGRKTGRARTGRGNPYLKSALAQMAMGAAKTDTFLGERYRRLIKRMPKAKALVALQRSILVIIFHLLADPTAEFTDLGSDFYQRRIDRARRTTHLLRQLHALGYQVQLTETEAA

SEQ ID NO: 364606 - protein, 359 aa, unidentified
MKIVGCDFHPRWQQIAVFDGETGGVSEQKLLNGDGEAERFYRGLEAPALVGIEACGNSQWFIDLLERLGHQVWVGDAARIRASYVRRQKTDRRDAGHILKLLMEDRFPRLWMATAAQRDLRQLLVHRHKLVEIRTRVKNGLQHLALNRGMQKQRSLWTAGGMAGLKNLALEGWSLRRRADLLKLLGELDQQVSALDEAVGQAAAGHPEARLLMTQPGVGPVTALAFAVTIGDVRRFEHSGQVASYVGLIPREHSSGGKQRLGAISKQGNRFMRQLLVEAAQTACRLDEGFRKPYVARCHHKPKGVAKVAAARKLAVRLYWMMRQKVAYPEIAHIESSSRVPLTGTKEVVTLNERSRIRQ

SEQ ID NO: 364607 - protein, 401 aa, unidentified
MEGPIVSIDVSNGNSHYMCFIKNNKRFGKVKKIDHDIEGFKRLLEDIQKLEAETNEKVCAVFEATGVYTKPLERFLSKNSIKTYMINPLESARKRKEEIHNKKTDKLDPISISKVYYDKEKMMELKKKDETYNWLRKKNRLYEDQLNHLRKYKVTFQNQLSICFPGYLDLFKDGYSGIPMIILKKYPHPDLLKNKKAETVARYLEKNTCHNHKVSLEYALKIIEFAKKTYPGCEKDDVEVEIFKILLDKVIETQRECEKTLNEMITVASTLEEYRYISSIDGIGPNLAARIIAEIGDIEEFKSREALVAYAGLDPHIYQSGDQDGKHLKISKKGNKYLRCLLFLAVGCSIRGAKDNPVNRFYQKKKQQSNPLNSKAAKTACTAKLLKIIYGICKNKTRYER

SEQ ID NO: 364608 - protein, 349 aa, unidentified
MRFYTKQHQFYCGIDLHASAMYCCILDSTGEVVLHKNIPTKPKSFLRLIKPYRDDLIVGCECMFSWYWLADLCAEEGIDFVLGHALYMRAIHGGKAKNDRIDSHKIAVLLRGGSFPLAYTYPKQMRATRDLLRRRNHLARKRAELYAHIQNTATQYNLPHPLGRIAKPSERGDLPAKFPDPIVRAMVEVDLATIEHYEELLGTLERHLEKIAVGHDPINLALLKSIHGVGRILSLVMLYEIEDIGRFPRVQDFVSYCRLVKPAKESNGKSYGHSGKKIGNAHLRWAFGEAVVMMLKGNKPAQAVLQRLASKYGKGKALAILSHRLGRAVYFMLKNQVPFEQERFLRKST

SEQ ID NO: 364609 - protein, 382 aa, unidentified
MDTLSNTVAAIDSEQQKAKLFVALELGQATWVVALHSPIADKISIYRIEGGDTDQLMALIEKKRVQAARRLGRAAQVVSCYEAGRDGFWLHRFLIRRGIDNRVLDSASILVDRRARRAKTDRLDARALLRVLMALVRGEEQVCRVVRVPSIAQEDERRLSRERERLLHERNSHIARIKGLLILHGVRDYRLIERDWKERLDAVRTTEGQALPARAKTEIERECRRLWLAKQMLAEVEREIEQMIAHDGAVAGKLIQVRGIGQTFASVLTHEVYYRSFDNRRQVGSYLGLVSIPWQSGSVRRDQGITRSGNARARRCAIELAWLWLRHQPGSALSCWYRTRVGTMTGRMRRIALVALARKLIVALWRYLQNGIVPEGAVLKAA

SEQ ID NO: 364610 - protein, 343 aa, unidentified
MQVTTIGLDLAKHWFQIHGIDARGGVAVRRKLRRGELLTFFQSLQPCLIGMEACATAHHWARELSALGHEVKLMPPAYVKAYVKRNKNDAADAEAICEAVTRPSMRFVPVKDAEQQSVLMLHRARSLLVRQRTMLVNALRAHMAEFGIIAPAGLRNVELLTETVAREHERLPDLAREILQLIVEQMHDTMLRVREIEARLAKWHRQCQVSQLLATVPGIGIMGASAIAATVADPSLFRSGREFAAWLGMTPRQNSSGGKERLGRTSKRGDKYIRSLLIAGAVAVLRHARNRPTRDGEWVRAVLARKPTKVAAVALANKTARIAWAVMMRGSGYQAKEVLGQTA

SEQ ID NO: 364611 - protein, 317 aa, unidentified
MFDASLMSADEKELSHKSFDNTPTGIQSLLDWIAGYHLSLSKLLFCAENMGSYVTELSVSSVSMGFSLALVCPLTIKKSIGLQRGKNDRIDAKRIANYAVLHYRKLELYKLPDKDLVRLRGWIIIRDNLVKQKVSIIKLLETFSWMAKLADVTESISFLEEQLKSIKERILEVEEDMEQLIAASTSLYTNYLLLRSIKGIGIINAIVLLCVTDNFQRFDNPRKFACYCGVAPFEHTSGISIRGKTQTSSLANKEVKVYLTRAAITAISWDPQMKAYYKRKIAEGKHKASVINAVRAKIIARSFAVIRRQTPFVTLAV

SEQ ID NO: 364612 - protein, 357 aa, unidentified
MRFYTKQHPFYCGIDLHARTLYVCILDQAGETLLHRHRQATPEALLKAIAPYRDQIVMAAECMFTWSWLADLCAEHGLPFVLGHALYMKAIHGGKAKNDKSDAHKIAVLLRGGMLPQAYVYPAKMRATRDLLRRRMHLVRKRGELLAHVQNTNSQYNLPAIGKKIAYKANRDGVAERCADPAVQKSMAIDLALIGYYDALLCDLELAIVKAAKHHDANTWYLLRTVPGIGKILSLVLLYEIPDIERFPRVQDFASECRLVKCAKASAGKRSGTSGTKSGNAHLQWAFSEAAVLFLRDNPAAQKLLARLEKKHSKGKALTILAHKLARAVYYMLKRQTAFDMNTFLHGEGRGVGERGA

SEQ ID NO: 364613 - protein, 381 aa, unidentified
MTTAATHHANGNTTETTLFVAFELSEKTWKLGFTTGPGQKPRERSMPARDHERVLDEIAQAKRRLGLGETVPVVSCYEAGRDGFWLHRFLQGHGITNHVVDSSAIEVSRRQRRAKSDGLDVRKLLSMLMRYESGERYVWQVVKVPSVEAEDQRHLHRDLETLKQERASTTTRIKGLLSSQGIRLTSLNKLPEQLDALRLWDGSPRPPGLRQRVLRVYAHHQFLSEQIAEVEAERRAQLQTSSDASMEQVRQLMLLKGIGINGAWLLVMEFFAWRAFKNRREVGGLAGLTPTPYQSGESAREQGITKSGNRHVRWITTQLAWGWVRFQPDSALSVWFRERFGGGGKRLRRIGIVAVARKLLIALWRFLETGVLPEGAVLKAG

SEQ ID NO: 364614 - protein, 421 aa, unidentified
MKHPLEPKFVAFIGIDWADAKHDVCLQSVNASGREFSVIVHRPEAIEAWAQELKLRFHGGSIAVCLELTKGPLVSALLKYDFLALFPVNPSTLAKYRQAFTPSRAKDDPTDAELQLELLLHHPDKLKRLDPPSRAMRTLQHLVEQRRGLVDDRRRITNQITCALKQYFPQALDWFAERDTVLFCDFLERWPTLKQVKHARQATLEAFFREHNVRYPQVIEKRIRAIKTALALTEDLAVIRPHQLLVQALVDQLRVSLKAIARFDAEIETVTQRLPDYALFRALPGAGPAYAPRLLAAFGERRDRFPDAAALQKYSGIAPVTERSGKKHWVHWRLQCPKFLRQTFVEWAAETIPRSFWAGAYYQQQRAKGCSHQVALRALAFKWVRILYRCWQTRTPYDESTYLNALKRRGSPLLNSVAQGS

SEQ ID NO: 364615 - protein, 412 aa, unidentified
MEVMHEVVCGLDVHSRRVQAGVRKLVGKAAKEEVRTFYTMTKDILELSDWLASEGVTHVAMESTGVYWKPLYNILEGRFKVLLVNARHVKNVPGRKTDVRDCQWLAQLLQYGLVRGSFVPEREQRELRDLTRHRAQLVAQRAAVVNRIHKTLEDANIKLGVMATDILGVSGKEMLRALIEGAKTPEEMAQLARGRMKAKIAGLEAALRGHVTEHHRFVLEELMDQLEDLEGRVDRFTQRIEEVSSNPFGAAIEALMELPGFDRRTAENLLAETGDDMSRFPTDKHFCSWAGICPGSNESGGKRKSGKTNNGSRWLKATLVQAAWAASRTKNSYFRQQYRRLCARRGKKRALVAVAHSLLVVIYHVLATGMTYKDLGADYFDNLDSSRIVRSHVKRLERLGYTVTLVREGEAA

SEQ ID NO: 364616 - protein, 408 aa, unidentified
MSYVMAFDVSMGKSAVVIYDDNQQCHYEGEVEHTTVGFRSLKEQINLVRKLDGQLPEIVFEATGVYSQGLERFLQNEQYPYSRINPLQAKLQMATGSMRRHKTDISDAHELAKSHFKTERNKTYVHEEYFEQMRALGRYYDDLEHESRQYANRLHAFLQLSFPLLEDVFSRSSLHFLQIVQHYPHPDLIKGLSLEEIQSRVKETSLKNISLQQAEKKAALLLAAAENSYPAIQATDVRCQHLKECAQRVKELKRQKKEIIKQMVQLSKERSDFQVLISFPGIGEATAVRIIGELGDIRRFQNNKQVNAYAGIDIQRYQSGKLHYQDRINKRGNRRLRKILYFMVISMISLRKRTQNTIVDYYDQLKKQPQSKPHKVAVIACVNKFLKVAFHLIQHSIPYNYAFAMASA

SEQ ID NO: 364617 - protein, 352 aa, unidentified
MNGLKYIGMDVHKATTVIAVLNFAGKVVGEAIIETTASSILDFIKSQRGTLHVAFEEGTQAAWLYDLIRPHVAAVVVCDPRKIAKQGNKADKPDAKRLAELLRTNALTPVYHGEQSTKAVKELTQSYTSVVEDGTRIKNRLKALFRGRGIDCSGSAVYSPDERKQWLAKLDTAAVRARAARLWEELDCVERLCEEAQQELVAEARKHAAVKILRSIPGIGFVRAAVILGVAGTPHRFRTKRQFWTYCGLSIVTATSSEYEMVDGRVCRSKRRPLVRGLNHNYSRALKSAFKSAAKTAASGPWKSHFDAMVASGTQESLALLTLARKIASITLALWKRGERYDQKKLKMLHAA

SEQ ID NO: 364618 - protein, 457 aa, unidentified
MSDQLLMDVVNQNAAGIDIGSRSHWTAVGQSEKDIREFGVYNENLHELADWLEQHSVKTVAMESTGNYWQNLYAILIARGFEVTLCNGKFTKNIKGKKTDVKDCQWIQKLHSLGLLSSSFLPDEDTEVLRTFTRHRENLIKQAASATKKMQKYLRLMNIRLDVVVKDVVGLTGLKIIRAISFGESDPQKLASLRHYNCRKSEEEIAMALHSNGRKDYLYALKDELDTYEFVQKKIRECDDQIAAKLEEIIGKDPEKQELHIDKKPYKRVNKNAPKNIDLNLKSYQLSKGIDLLAIEGMSYSTVLSIMSEVGYENIKNFKTAKHFTSWLRLAPNNKISGGKVLSSRIGKGSSRLKIALRNAANAIGNLKDSTPLRDFFHRINFRKGRVAAITATARKLAIIIWNMIVKEQSYHNPEGYLYLDQKRKLGIVKRMQKQIDKFGLTTADLALTSISSKSVI

SEQ ID NO: 364619 - protein, 340 aa, unidentified
MGVFVGIDVSLENSAVCAVDEHGKLLRETKVASDPGALNACIRSMPGVVEAIGIEAGPLSQWLHKSLTDLGLPVVLMETRQVKAALKAAPVKTDRRDAAGLARLLQMGWFRPVHCKSLSAQELRVLLGARRSVQDAAINIEMSIRGMLRNFGLRLGRIGKVSFEDRVRELTDGNKLIQLSIEPMLRARAALRSELVRLERLTRDITREDPVCRLMMTMPGIGPVVALTVRSTIDDPGRFRRSKDVGPSIGLTPRRYQSGETDIIGGVTKAGDLDMRTALYQAATVVIHRSKKPTWLRAWAERVVRRRGAKRAAVALARRMGVILHRMWVDNTEFQAARQV

SEQ ID NO: 364620 - protein, 332 aa, unidentified
MSDTPALCTPPPAGAAEPLFLGIDIAKASFDAHLLPGGQQWHLPRTAAALAAWLRELQALGAPITLVVMEASGGYENLVAATLAEAGLPVAIINPGQARQFAGALGQRAKNDPLDAALLARFGRDLRPPVRPLPDAQQQALAELLTRYTQLVGMQTAESNRLQTAITQRVRKSIAAHLKWIAAQLKAIDTDLDDLIKGSPLWCDQEQLLTSVPGIGKTTARMLLGLVPELGLCPGRQISALTGVAPFDRQSGKWHGRRFIGGGRADVRSALYMPTLAAMRCNPPLRALHARLKAAHKPGKLIVIACMRRLLVMLNAMLRDHRPWSPQPITNP

SEQ ID NO: 364621 - protein, 419 aa, unidentified
MNTLNTTSFTAFIGIDWADAKHDICIKRAGDDEREFDVIPHQVERIDEWAHTMRRRFGYPIAVAVELSKGPIVYALQKHDCFVIFPVNPSTLAKYREAFQPSRAKDDPTDAELAVDLILRHHERFKPLQPQSVEIRMLASLVEQRRNLVADKIRITNRLRVALKQYYPQMLEWFDHIDTPLFCDFLTRWPTLLQVKRARKSTLRKFFHEHNMRFEHVLEKRLIAIKTATPLTLDEAVVVPHRLQALVYVEQLRVMLDAIKQFDIEIESVAKQHDDYALFTALPGAGPSLAPRLLVAFGEQRERYKSAADLQKYSGVAPVTERSGKKHWVHWRWQCPTFLRQTFVEWAAQTINKSYWAGEYYRQQRAKGCTYQAAVRALAFKWIRILYRCWQTRTPYDEVVYLKALERRGSTLLNVDKVA

SEQ ID NO: 364622 - protein, 317 aa, unidentified
MLEAILERCAGLDVHQETVVACVLTGQLDRAPKSEIRTFGTMTNELMELGEWLVEQGCTHVAMESTGVYWKSVWNVLEAFELDLLLANAHHVKNLPGRKTDMKDAEWIAKLLRCGLIEGSFVPSEDIRDLRDLTRYRKKLVYDATSEKNRIHKSLQDANIKLTTHMSDIFGTSGRLLLQKIVDGEVITMEFLETHMKGALKHKSPKLLQSLNGRLRKHHRDMIRFSWDHLVYIEKQIRLVEQDIRNRLASKQEAIDLLVTIPGINEQAASVIIAEIGTDMTVFKDDHHLAAWAGVTPGNHQSAGKKKEHERDPEMPI

SEQ ID NO: 364623 - protein, 347 aa, unidentified
MLADQLDYVVGVDPHRDSHALAVVGVASGAVLFEANVAANSDGYAHALKLVDEHAPGRRAFAVEGSGSFGAGLTRFLSAHGERVLEVGRLRRERRSGGKTDALDAIRAARSVLAQNRPATPRASGEREALRALMAAREGAVNAKRAGLCQLRDLLVTTPEPLRGELRPLTRARLLRRLAATRPERRHDPELRGALLALRSVARRVLQLTAEERELAREIETLTRKLAPQLLEQPGVGPLAAAQLVLSWSHPGRISSEAAFARLAGCAPIPASSGQTIRYRLDRSGDRQLNRALHMILVTRRRAHAPTIAYIERRIQEGKTRREAIRCLKRYLARNLYRLLENAPAPT

SEQ ID NO: 364624 - protein, 387 aa, unidentified
MEKFNYFIGIDVSKDNFVVSIKSSPFIHTNLTFSMDKSGFEKFLLFTSKFKDSSICALEPTGTYHTNLFNFLKTNGYNVSIVNPYKVKQFSKVIKNKPTKTDKIDSKILAKFVEFTQEIGPSIPEEKENFRHLIREKELISKQIAKIKAHIKALLYMLFPELARNENIFSRGIISILKIFPSASCIRNIPEEKFISCAKKYLPKIGKKQDLKTIYQLAKNSIAYSYPHHETLLKMKIEHFEFLEKQKQEITKIIEQLADKIYKREIEILTSIPGIAKSSAIYFIGEIMEIKRFKNAKKLIGYCGLDPVIKQSGTYKGKWKISKRGNSHVRRIAFIMASSVRKHSLYFKEYYEKKRNEGKSHIEAVIATSTKLLRVIYSLLFQDRIFN

SEQ ID NO: 364625 - protein, 360 aa, unidentified
MKAKETRYVGIDLGKRTYETAIVGKNGVQISNGKTCAAGRQALYKKLRPSDKVALEAGNLAFIIAKELEASVGCRVYVLNPSHLPLIYGSMKKTDKEDSLKLAHILEDFQEDRLPEVPVPSDKEMNRRKLLACYRRAQQSRNREINQLHGLFLAQGITTMVKEDLSTGDSRREAVRTLTGIEREEANYLVVSLELHEGQIEMLNREIKKESAGDEVIERLQSVPGVGPMVAFAFVSHVAAERFENASQVSNYLGLVPRVYMSGDTVRYGRITKRGNGYLRALLVQGAWALTRTRDGGKLKERFEYMTVEKSISKKKAIVAIARRMAELLYTLMRDGTKYEYRPFIREKKVEKLAQLAMSA

SEQ ID NO: 364626 - protein, 326 aa, unidentified
MYQYIGIDVSKQTLQVYDGEKDSSFPNEPNLKSFDRFIQDKKRNNAEELVVIFEPTGAYSSILRKYCIREDLKTKIVNPSQSAYFAKAIGNRSKTDKVDARMLYSFSVLLHDKDIRVPYDSEKANRLGAYINSYALLVANETGIKNHLHAAEHEGNMTPDLLALMQTYLEQLEVMKKEILQQAIDSIETEPTLQRAMENICSIPGVGKISAIHLLYLFLKYPEANRNQLTALAGLDPVVRESGTSLHQRKKISKRGSHLVRRVLYCAAMSSVQHNTEWKSMYDVFLARGKQRQVILVAVMRKILLVSHALYRENRPYEERGKYKKN

SEQ ID NO: 364627 - protein, 310 aa, unidentified
MTKPYVGIDVAKATLDVAIGSDGELVQVENNEAEIARLVERLDKVAPTLVVLEATGGYESVVAGAIAGRGIAVAVVNPRQVRDFAKATGVLAKTDRIDARVLARFAEAVRPEPRPLPTEEAKELEEYLSRRRQLVDMLTMEKNRLTIAATERLKARIRKHIDWLEEALRRANDDIDKAVRGSPAWREQEDLLRSVPGIGPVSARTMLAELPELGRLSRKKIAALVGVAPLNRDSGTLQGTRTCWGGRASVRQVLYMAAVSAVRCNPTIRRTYAALRNRGKKHKVAIVACMRKLLAILTAIVRDQRRWSPS

SEQ ID NO: 364628 - protein, 402 aa, unidentified
MTYDYVIGMDVGKYFHHACVLDIDGTQVLSKRINQNEQSLRALFSAFSAHDHKVLVVVDQPNNIGRLTVAVAQDIGIDVRYLPSLAMRQLSRIHAGNAKTDIRDAYIIAHAAKNLPESLRSVDRVEEAFLQLKVLNGIDEDLARSYTRLINQIRSALVGCYPQFEQALRGQIIHRKWVLHLLARYGGPTKIKRLGKAKAAAFARRYKARNPEPVLDAIFAAISEQTVTIAGAHYAEMGVAMSAKDALLKLEHRQQIEKEVIELINDIPHTQFLLSMPGIGPKTAAQILMTAGDMSDFPSAGHLASYAGLSPRTNQSGTSIMSNSLNRAGNKKLKNALWQSSFASIRFHERSRQFYERKRREGKRHNAAVVALARRRLNVLYAMMRNHEHYHDPAPSQEDLAA

SEQ ID NO: 364629 - protein, 388 aa, unidentified
MIYVGIDIAKLNHYAAVISSDGVVLTEPFQFTNDGDGFKRLSEELSDYAPEPAIIGLESTAHYGDNLVRYLVANDYKVCVLNPIQTSSRRKDRIRKTKTDKVDAIVIAETIMMQKSRRFVTFYDLDLMDLKTLGRFRQKSIKQRTRLKIQLTSYVDQVFPELQYFFKSGLHQKSVYALLKEAPTPKDIASVHMTHLSYLLKTSSHGRFDKETARQLRALAQKSVGNSDSTISIQITQTISQIELLDSQIDKVEAEMTEIMKFNDTVIMTIPGIGYINGGMILGEIGDIHRFSKPHQLLAYAGLDPSVRQSGSFNAKRTRMSKRGSKVLRYALVNAAHNVVKNNATFRAYYDEKMAEGRTHYNALGHCAGKLVRVIWKMMTDDVDFNLE

SEQ ID NO: 364630 - protein, 439 aa, unidentified
MTLKIEHTAETVNSASKTGSSQKLLCCFDVSKASLSLYAQYQPEKQPGGRPCQIEDQLPNQTGAIERILDRLEGLAEEAGLDGLLVLAEPTGGYERKLLQTARRLSHETGLISPEHVAKLKTVESNDTGKTDHKDPRVMHLVARLGKTQTDRHLPERYRRLRRLTRYYDEDEETLTAARQRIQAVISDLFPDYDKSATFTFDTTGQALMEAYAFNPYHIRRAGLGRFKSTIKRRVNARFSTLEHLFERAEESVRYHKTEAEAQLLTSRLKALWADYKRLRARRTALRAQIEQVGRELVTDRELPDLSHLKGITLFNLTRLASQTGPLTDFGSGRALLRYAGLNLRERQSGTYRGQTRLSKKGRPLLRKILGQTIFPVLRKAMLYGPYYHRKLQEGMIAAKAKVAVMRKFLRMLHSLARSEEAFDPERFRMCESQYTLAQ

SEQ ID NO: 364631 - protein, 404 aa, unidentified
MIFVGVDWAEDHHDICVMNQDGAVLGKRRVPDSVAGIGELHELVAEHAEDDEAVAVGIEIDRGLVVTSLVAAGYQVFAINPMASSRYRDRHGTSGAKSDPGDAKVLADLVRTDRHNHRPLAGDTELIEGVKLLARVHQSAIWGRQRQLNALRSALREYYPAALVAFGTDLSHGDATQVLALASTPELGRTLSRSKIASALRRGGRIRNLERRTDEIQGALRAEYLQAPPTIAGAYGTITRSALRLIETYTAEIASLETALSEHFEQHPNAKVVHSLPGMGTVLGARVLGEFGDDRTRFATAKCRKNYAGTSPITKASGHSRVVLARFARNRRLSDACDQWAFCSLTRSPGARRYYDELRARGKTHRQALRQLANRLVGILHACLEEGVLYDETIAWQAAEQSAA

SEQ ID NO: 364632 - protein, 495 aa, unidentified
MGVDSCLENVWAVAAMVSHLVNANQADRSRNMALTLGIDVAVRAAHQATLARDGATVWRGRKFWTRPADLERLWADLDLVDPGELTVVVEPTRNAWIVVAEWFRRRGAKVVMVPTTQSADLRKYYSKHTKNDRIDSELLARLPLLHPEGLREYSGQGPADPLRRLVKQRSTMVKRRVAVYARLDALVELLGPSWYAVLGSNYGIAALEFLARYADPNAVIRLGQARLSRFLIARSRGAWREDHAAGLVAAAKETLVLWGTDGMDFAELAEDIAHEAEQALFLTRQIKQIDERVANLYADADPEGIVASAPGVGPVISAVIAGRIGDPHRFTSLAAIRAYTGLVPKVSQSGVSKVESSITKAGDPLLREMLCTAADQARKVDPQIAAKYQRLMAGDRHHDSAICHLATLMVTRIATCVRNGQPYALRDVDGTPITEAEGRAIVKERYQLEPRRRDNVRHKRMHERRKQAADQESQESQSAPTSRPANNKPTSRQVA

SEQ ID NO: 364633 - protein, 344 aa, unidentified
MATYYIGADVHSNNTELAIEQRGQIVARYSVPTTIPAISTVLSSIQGKKILAMEEGPMAGWLFRNLSEKVDKFVVSEPRRNKLITCEGDKDDRIDSGKLAILLRGNFLKAVHHTSDSHRAHLKHWINLYHDRVRDAVRCINKIRACCRMHGVRIPRKVVRNNVHRHQWLSELDNSTLKAQLHMLWIGYDATKEQVELAKKQFSSYARKYPIIKSWCKLPGIGQIRATTIFAYLDTPWRFKNRAKLHRYCGVGLVRATSGKDKKGRPRPPRLKLPWAVNRRLKNAVMGAATTAIERGDNAFKDYYRRMVLNGITPANARHSVARKMVSTMSAMWKTGNEYDEKLL

SEQ ID NO: 364634 - protein, 340 aa, unidentified
MSVYVGIDVHRKRSQVAVVDQGGQVLANRNVPNGVQPILGVIGGLPPGTPAAFEAAFGWGWLVELLEDYGFDPHLVHPLQCKAIASARLKNDKVDAAILAQLLRADLLPEAWIAPPPVRQLRALLRHRAQLVRLRTLLRNRIHAVLADHGHDRPGGCWSGLGRAWLASLELPAVSREVIEDDLALIDALQQPIDRLDWEVHQRAKADPRVKVLTQLPGVGPFTALIILAETGDVSRFGSARKLAAWAGLTPTVRGSDRTVRHGHISKQGSAWLRWILCEAAQTAKRHPEFAASYQAIARRRGKKIATTAIARKLLTRAYHLLAAASGGTPTSPEGSPGPG

SEQ ID NO: 364635 - protein, 343 aa, unidentified
MDYFAGLDVSVKDTSVCIVDDTGRIVREVRVTSEPDALLTVLRNPTYRFKRIGLEAGPLSQWLFSALGEANLPVICVETRHMRAVLKAQINKTDRNDARGIAQMMRVGLYRPVHVKTLRSQKLRMLLTHRKLLQSKAIAIENDLRGTLRNFGLKVGIAGRTKFEARIEELVEDVPDLAVLVEPLLIVRRVLREQIAVLHRRLLTIVRDDEVCRRLMTIPGVGSVVALTYRATVDVPARFRKSKSVGAVFGLTCSKYQSGEIDRSGRISRCGDEMMRVMLYEAAHSMLRSKKWSWLKAWAMQVARRCGMKKAIVALARRLAVIMHRIWVDGTEFRWIREATVAA

SEQ ID NO: 364636 - protein, 310 aa, unidentified
MEPLFVGIDVAKERLDVHLQPGGETFTVARNDQGLADLVRRLQPRGVTLIALEATGGYEVLVAATLAAAALPVAVVNPRQIRDFARATGRLAKTDRLDAHTIAVFAATVRPAARPVADAHARLLGELVARRRQLVDMLVAEQNRRRLIEEPALRRRVDAHIQWLEYAVRELDSDIDTTVRSSPIWRATDDLLRSVPGIGPITAHTLIAELPELGRLDRRRIAALVGVAPINRDSGTLRGRRMIAGGRAVVRHALYMATLSAIRHNAVIAAFYLRLVNAGRPGKLALTAAMRKLLVILNAILRDQRPWQPA

SEQ ID NO: 364637 - protein, 441 aa, unidentified
MAMRKRDDEVVFPNAAGVDVGASSHWVAVPRHLAEEPVREFGAMTDDLRAMADWLIGCGVDTVALESTGVYWIPLYEVLERQGLTVWLVDARQMKYVPGRKSDVQDCQWLQKLMSLGLLRAAWRPGDEVCVIRAVVRQREVLLTEQATWVQRMQKALVQMNIQLTEVLTDVMGMTGQAIIRDIVAGQRDAAVLAKHRNARVKASVADIQRALSGNWRDEHVFVLAQALAMFDSLAQRLAECDTKLEALLAPLGRRDVKLTGRPKRGGKNTPAFDLRTALARWAGVDLTRINGLAVTSVLTVLSEIGPDLSRFANVKHFCSWLGLCPGTKISGGKVLAARTRRSTNRVRQALKLAAMSLSRNSSALGAFYRRMCARMDKPRANTAVAHKLARMVYFMLTRGEDYVDQGQQQYEEQQRQRSIAALRRRAAALGFAIAPTAEIA

SEQ ID NO: 364638 - protein, 468 aa, unidentified
MKKNQIALTVINPHAAGIDVGSRTHFVAIGQQQKDVKSYGVYAEDLTTLTDWLIKNNITTVAMESTGAYWQNLFVELINKGLDVVLTNGKFTKNMNRKKTDVLDCQWIQKMHSLGLLPSSFLPDYTTERLRTLCRHRTNMIRQRADSIHKMSKFLKYLNFRLDVVVRDITGLTGLKIIEDICNGNLDPKSLASHRHHNCRKSEKEIAKALVSNEREDYLFGLKQEFDRYQFYTIKISECDKEIGLFLDKTIRQKEDVVDDIPDNKYFKRQNKNAIKGIDLNIVSYQYFDGVDLLAIPGVSHSTVLTIMSEIGPEGLSKFPTAQHFSSWLKLAPNNKISGGRILSNRIPQGSNRLKIALRNAANAVGNLKESDLARFFRKIAFKKGRQTAINATARKIAVILWNMITKKQQYMPKNNYLFLDQKRRIVSRMRKQIADLGLIPDELGFSSANRDKISREILPDFQTLSLR

SEQ ID NO: 364639 - protein, 316 aa, unidentified
MAEIINQTNVGIDVSKDWLDIVVIPSGETWRTENKETALRELTKQLEQLKPERIVVEATGGYEQMLAVQLYLAGLPLCRVNPKRTRYFARSMGLLAKTDKLDGKVLALFGERVKPPLTRLPSEKEQVLSALITRREQISNFLVAERNRLHTAPKKLFASLNDHITWLKRELKQLERDIEAFVDNDPDFKEKSELLVEVQGVGKKTAAKLIADVPELGECDRKQIAALIGVAPFNRDSGSKSGQRYISGGRSDVRSILYMATLAATRHNPVIRVMYQRLLKAGKLKKVAIVACMRKLLTILNALIRDRSHWNVAFSA

SEQ ID NO: 364640 - protein, 315 aa, unidentified
MPDMIAQSVGVDIAKDTLDVHLHPAGASRRLANDARGWSALIAWLEGFVVTRVAFEPTGAYHRGFERRLAAAGLPLCKVNPRQARRFAEAIGRHAKTDAVDAAMLARFAALIEPPARPVVSAILDEMKELHVAGRALVKDRTAALNRGQLRRAALLRRQAAERLRQIERQIDAIDTALWAYLAADPVLKARFDILVSIPGVGEATAFTLLIEMPELGAIEPKGAASLAGLAPVARDSGRHRGKRSIRGGRASLRQALYMPALVAVRFNTTMKAKYDAFLAAGKPPKVALTAIMRKLVILANALIRDGRAWTPKRA

SEQ ID NO: 364641 - protein, 318 aa, unidentified
MSQEKYVGMDVHQATISVAVTDSRGKLIMESILETKAATILEFIQGLHGSLSVTFEEGTSAAWLHDLLKPHVTRLVVCDPRKNALLKDGSKSDRIDARKLAELLRGNQLTSVYHGEHGMRTIKELGRSYLTITKDLTRVMNRIKALYRSWAIPCSGTSVYAPRHRAEWLGKIPEPGVRLRAERFYQQLDLLQPVRQQARHDLLTESRKHHAVKLLHQIPSIGPIRAALLVAQLQTPHRFRTKRQLWAYSGFALETHDSGEYRYVRGKLQRNRERMTVRGLSNNHNPDVKNLFKGAAISASTHPGPLYDFYVALLEKGM

SEQ ID NO: 364642 - protein, 418 aa, unidentified
MDVIVERCAGLDVHRDNVVATVRVPGTGRRQWDKQTQTFKATLAGLAELALWLAEAGVTLVGMEATGVYWKTVFQALEDRFECWLLNAHHLRNVPGRKTDVKDSDWICQLVQHGLVRPSFVPPPEIRRLRDLTRLRRAQTNERARTIQRLEKVLQDAGIKLSSVASTTYSKSARAMLEALLSGVTDPEQLAELSKGKMRAKIPQLREALQSRFQIEHHGIMVAQLLAHIDTLDLALANLSERIEFVLTPHAHIIELLSTIPGVQAHAAQVLIAECGLDMSLFPTVGHFASWAGACPGHHQSARRRGSGRTRPGPRWLTDQLTECAKAAVRTKETYLAAHYAQLRGRRGEAKAIGAIRHDLLVAYFHIVRDQVPYRDLGPDWQPKRYSVEHRARRLQRQLEALGYAVTLDQIPQPEQAA

SEQ ID NO: 364643 - protein, 398 aa, unidentified
MSLEPHAEPAAIRTHFGAIFVSLELSRSNWLVTSLIPGGGGKMSKHGVRAGDVAGLLARFSELRRKALARTGENYPIVVIQEAGLDAFWIHRVLEQEGIESHVVDAASIAVSRRRRRAKTDKIDGEALLRALLAFKRGEPRVCSMVRAPTPEEEDRRRICRERKVLIAERVRHVNRIKGLLFSQGIGDYRPLGRDRRRALEMLRTGDGRDIEPHLKKQIGRELDRLELLMEQIVAVEGDRDAMLSAAIEAEVAATPQNAPAPVRMLANVKSIGPEFAAVLWTEGLCRSFANRRQIAAYAGLAPTPWQSGSIDREQGVSKAGNPRLRTTMIQLAWLWLRHQPDSALARWFHERVNRNGGRQRKSTIVALARKLLVALWKYVTAGVVIEGAVMKTAAPAL

SEQ ID NO: 364644 - protein, 398 aa, unidentified
MRSVALDLGVHEISFCEVAGGAVVLRRTVRSLDSLQDLLGPSSSPARVAIEACREAWAVHDKLRDWGHDVLVVDTTRARQLGIGQHGRKNDRLDAEALARAVERGGIPLAHVLSPHRRAIRHQLAVRRALVETRAQYVTTVRGILRACGHKLARCTTEGFLTVLSAAALPAETRQLVGPLVTALEMLTPQIALADAALEQLCTHEPVIVRLTTAPGVGLVVAAAFVSVVDEAKRFHHAHQLASYLGLVPLEDTSGGRGKQRLGSITKQGNGYLRALLTQAAHTILRHKSGDDPLRRWAKAIDERRGRHVAVVALARRLSGVLWAMWRDGMVYDAQSAAVASAKGLRLQAQSIEQQAQSMKEAAAKARRRQRSIDKGLGVARATARSRPVSTSRRASMH

SEQ ID NO: 364645 - protein, 413 aa, unidentified
MEGLSPLYRRVAGIDVHKMQHVVTAVIEHPDGTIEQQSREFGGFKRDCRALSAWLVELNIELVVLESTGIYWKSLYAHLERAGVQVWVVNAHFVKHVPGRKTDMNDSQWLAVLARFGLVRGSFIPPQDLRELRLVSRYRRKLTAMRASEINRLHKILDDGGIKLGSVVSDVNGLSAREMVNGLIEGKSISALLDMARGRLKLRREDLEAALDGDLTARHRFILTHIHVHIEMLEHNLIELDAYILAAMAPYQWAHRLLQTIPGIDQIASALILIEIGDDMTRFGAPDRLAAWAALCPGNNESAGKRKSGRIGKGGSVIRYIMCECANSAWKTKSSLAAKYKSLMVRKTHKKAIIAVAHKMIRLIYLLLTRKEPYRDPMVDYDSMSAKKNAPRWIRQLKLIGQWPDKTSAPANA

SEQ ID NO: 364646 - protein, 321 aa, unidentified
MNKCKEFVGIDISKDTFDVCYADGKHEQFSNNESGFKEFIKTISLESHCVMEQTGGYHKPLASYLQDQGFMVSVENPLVIKRFIQMNLRATKTDKADAKMIMEYGKQFDPKEWRRSKQYITECKQLRSLVVLYQKQSTALKSQRHSFMSSGDSTKGLIKLIDQELSHLKKKIKELEKQMEELVKANEQTMLTNLSSIKGIAKRTAILLIIHTNGFSDFQTYRQLSAYFGLCPQIRQSGTSIKGRGNISKSGNKDLRKMMFMCALSASVYNKGCKEQFQRLVAKGKCRKVALIAVSNKLLKQALAVAKSGIPYDPEFVSVKR

SEQ ID NO: 364647 - protein, 390 aa, unidentified
MDSPAYWKDYIQWQVAIIQTGGRMKSIVYVGMDVHSEDNCMAVYLDDRGEPEYESTIPNTEAKVQRFFQKLKEKYPDCTIQTIYEAGPTGFVLYRKLKEVGISCLIAAPSLLPHAPGDRLKTDRRDAKSLAKALRSGMATPCHVPSKEFEAVRDYQRMVADTKDAVGTAKKRLIMLLHRQDCPSYEGTYWTQRHLQWIKTVSLDPVDRETCDEYLMMVKELQDRLARQLVRLEEFAAMKEFSEEVAKLKCFKGISTQTALAFVTEVEDFQRSPTARSFMAYLGLVTSEHSSGGRRVQGGITKAGNRHVRSLLVESSWHFRYPFVQKSRALKERQQHQDIAIVSYANKANNRLTRKFSKMTYRNKSTKTTVVAVAREMSGFVWGMMTGNIV

SEQ ID NO: 364648 - protein, 404 aa, unidentified
MPLTMDRNRIVAGLDVHKDSVFLCIMRYDEAIIFEKTYGTLTTQLRQMRDDMLCHGVTECAMESTAVYWVPVWNELCDYMTLRLANPHFIKQLPGRKSDTRDAQWIAECQLKKLIKESFVPNPVVQDMRKLNRRIFNLNEDLTYNKNKLDAAMQRCGFRLSNYVSNTGGKSYQSVVRAISQGETNAEKLVLLVHGRTVNKHGRDTIAGSVTGNFSPTDIAVIRQYLAMIDLINNQIDECQKALAAMCEEHFPEQYRRLQTIPGVKERAATAIIAETGADMSMFAKATNLVGWCGLKPRNDESNRRIKSNRITHGNRYLRQILIEIAWVASRTRNCFFSNFSYVQVTVKKKRKMKIQVAIARKILVAVWHMLSNKEDFIDIYLKRLEEQRLIQLQIEQLESSMAL

SEQ ID NO: 364649 - protein, 332 aa, unidentified
MNMHQQGGVANGSVKLNAGIDVSKLHLDVCVGATRQRVPNDANGWNELTAMLQAAQMDLVVVEATGGYERGLVCALQSAGVCVARVNPRQARDFAKSMGVLAKTDQVDARVLRDFADVLARHADRRKFITPMIDRARELLAELMTRRRQLVDMRVAEHNRLEHAGQRAARSIASVLKLLDKQIEAIDAHIDDHMDQHFKAQRQLLDSVKGVGPVTILTLTAALPELGQLGRRQIAKLVGVAPLADDSGGRSGKRRTWGGRSEVRSVVYMAAIVAMRHNPVIREFYERLLKAGKPKKVAIVACMRKLLTILNAMLRDQALWNATRHLKPTESS

SEQ ID NO: 364650 - protein, 351 aa, unidentified
MEKYIGLDVHATSCTAAVVNGHGKRLGSHVIETNGAALIGFLRSQAGTIHVCMEEGTQSTWLVEILSPYVERVVVTHVSESHGQKSDEHDAFNLAERLRTGALETSVFKQVGRFGKLRHLVRAHAMIVQDAARAQQRLKALFRSRGVQVAGKSMYNATRRAEYLRALPESVRGAAELLFSQCDAIAPIRDRAHQELVAESHRHPETRWLESCPGVGEIRAAQIAAMVVTPDRFRTRQQFWSYCGLGIVMRSSSDWVQTAQGKWARAQVAQTRGLNHDYNHVLKCVFKGAATTVLQIQSNDEPLRAAYERMLAGGTKPNLAKVTLARKLAAITLALWKKKEVYDPAKWTKTS

SEQ ID NO: 364651 - protein, 335 aa, unidentified
MQIYGIDLAKEKFDVSFFDLTSKKVSNKPSHKVVKNNFKSIGRFLETLPSDAVLVAEHTGVYGDTLLKCCMDSNVKIAFVGGYVIHRYRATPDRAKTDVLDCALLREFGERYPDKLKYRKFPEEALYELRQLARHREMLVEQRKQLMTADKSEDCRPIRSLAVKRSMDRIKEMLDTEIAETEKEMLKVINGHDSIHHNYEIVKSVNGVGLVTAVELLVKTDNFTKITTARQYAAYAGTAPYEKSSGKMDKGAHISKIGNRRSKTLLYICAESARLHNKEIKLYYERRTLIDKKPRHYVLNAIANKLLRIIFTLVEKGEYYDANFIRQDPRLVKHN

SEQ ID NO: 364652 - protein, 355 aa, unidentified
MSQEKYIGMDVHAATISVAVKNAQGKLLMECVLETKAATILEFIQGLRGTLALTFEEGTLATWLHDLLKPHVNRLVVCDPRKNALMREGNQNDRVDARNLAELLRTNQVKAVYHGKHGTRALKELGRSYLTLTKDTTRVMNRIKSVYRSWAIACAGTSVYSRRHRAEWLAQLVEPGVRIRAEHLYQQLDSLEPVRQAARRELLREGRQHAAVKLLRQIPAIGPIRSALLVAILQTPHRFRTKRQLWAYSGFAVQTYDSGEFRFVRGKLHRNRERITVRGLNHNHNHDLKNLLKGAAISAIERPGPLQDFYAARVEKGMRPSLARLTLARKIAAITLIIWKKGASFDPKQLQRQAA

SEQ ID NO: 364653 - protein, 345 aa, unidentified
MSELYSGRQFVGIDLHRRRSVIVRMTADGDPLECIRISNDVEMLSTVMARAGESPEVVLEATYGWYWAVDALRDLGAQVHLAHPLGVKAFEYRRVKNDERDARDLADLLRMGRLPEAWIAPPATRELRELVRHRAKLVGIRSNCKAQIHAVLAKCGIQVSMTDLFGLAGTELLDRLELPRPYAARIASLRRIIGALDFEIDAFAGQVRGRLARDPGFLAVQAIPGVGPILGAVFVAEVGDVHRFARAEELTCWAGLTPKHHESDTHVHRGHITKQGSRLVRWAAIESVQILPKHTLVGRIRDRVGDRRGRNIGVVAAARRQLELVFYALRDHRVRALQGTRPVAA

SEQ ID NO: 364654 - protein, 348 aa, unidentified
MTLVGCDLHARDQQVAVLDTATGEIQERRLTHEGSSVEEFYTSLPGPVTVGIESTGYALWFHALLHRLGHEVIVGDAAKIRAMVVRKTKTDRRDAAHLLDLLRHDRFPTVWLPDPAVRDQRTLLAHRMRLVRMRTMVKNGVHAIALNYRLALGPSLFTRAGVAQLQALSLPPHTSCRRSESLELLSWLNTHIKGLDDQIEEAARAHPEAQRLMTHPGVGPLSALATVLVLGSVTRFPTSKHVVSYIGLAPAIESSAGKHRLGRITKQGNTLLRYVLGQAGQAAIKRDPDLKRLYYAVLHRRGRSRAKVAVARKLLVRLYVMLRDHIDYQTFLHRAPAAARRKEMTPTS

SEQ ID NO: 364655 - protein, 321 aa, unidentified
MSGYLGIDVSKDELVVVREAVAGSKIYRNDERGHADLLKELTKKDSTPPTLIVLEATGGYERGVVAALGAAGLPVVVVNPRHVRDFAKATGRLAKTDQIDARVLADFGAMVKPEPRALPSEAEEELRDLLARRQQLMQMLVAEKSRVLQAVGRKSQRLRRELKSHVADLERRLHMTDADMDDTIKKSPIWREDDDILQSFPGIGRQTSLMLLGELTEIGTVSGAAIASLVGVAPMNRDSGKQRGKRRTGGGRSHVRAALYMATLSAIRHNTVIKTYYQRLTKAGKPKMVAVVACMRKILVTLNAMIKTRTRWQAQLTPTTA

SEQ ID NO: 364656 - protein, 410 aa, unidentified
MKEQNGVDVNIVPQLDKACGLDMHKDKIVGFISCKDGSGQELKEFGTFTCELKQIKAWLQGHHVEHCLMESTGIYWMSLYAILTEAGIHVTVANPTHIKQVPKRKTDRKDAKWLCTLLLNGLVRPSFMPTAEQRILRDHCRSRLFYTRQQNKTQNRLLKILESNNIKLRSVISSIKTKSAMSMIRLLAAGVTDKEHLLACALGRVKLKKERLTKALDGTLAPHHLVQLQMLLQDLDHVAKQLETLETMIAEITQAHYSIAYECLDSITGIAGRTAQIILSEAGSDMSRFNTADHLTAWCGLAPGNHESAGKRRETSIRKGNSYLKTAIITAAWAAVRVKDSYWRALFERLRKRMRVPKAIVAIARRMLKVVYKTLNTLTHYQEKGIAYFMDLQAKAAMYYRMKHQWPSTE

SEQ ID NO: 364657 - protein, 344 aa, unidentified
MTRYIGVDLHTNSFTICILQAGREDCIQTLPVQGGGLERFASGLHAEDEVAVEATGNSAHFCKIVSPHVARVVVIAPWQFEVIRRSVKKTDQHDARAIAFFLSKDMLPEARQKNEEHTQLTSLITTRDQLVGLRVSLIGKVHGLFVRHGMKVKREALTSAKGFARHVASYSWSTLEKVELDVISAQLEAIGGNVKTLEKEIAAFAKTMPGYENLISIKGIGSLSAAVMLTHIGEIADFKDTGKLAAFFGIVPRVSQSNASCNIGRITKRGSKIARKSLVQCTLIAKRYSPYLHEFYERVKAKRGTGKAIIATARKLLNTIFYTLKNKWVFDDFSKFKLLPCNQS

SEQ ID NO: 364658 - protein, 437 aa, unidentified
MSEKKSVEIRVSVDVGYRRHSVAIGLPSGEVLEEFEIAHRPEGFAEFFSRIEKHQKVRDCEVAVAMEGFNGCARPLDAMVRRRGYRLYNINNLKLARFKEIFPGAAKSDRIDARKGLELFQLSDHLPLAKEVLQEVKGTPRENEVLKRLTRRRRRLVDERVRVISNLQTDMQAVCAGLLEITKNAGNQWFLNFLVSAPTLSQLARLRPATLRKIPAVGRKYAGLIEDWQKRAHFSEEVEWVGEMIQEDAKRCLELDEKIKALRAKIKEVAKDSKIAKTLLSIPGFGTICTAELAGEIGTIERFSKEGSLALYIGMSTLDNSSGKYQGSKQPKHVNTRAKAAMMVALDRHRKYVPESQRYYEKKRSEGKKHNQAIRALGRHLSRIIYKMLTEEREYEMRPERGNTKSKVSPRSLIKRQIRKPKISAKGENHKIYQQST

SEQ ID NO: 364659 - protein, 411 aa, unidentified
MIKENYIYVGIDLHKETHTAVMIDCYNQKLGEITFPNRPADFPKLVTKVKKCNTDGKEVVYGLENAYGYGRALAVWLIDKGYLVKDVNTAISHRQAKHRGAMYRKSDSDDAKAIALATLNMLDKLPDACPNDAYWSLGHLVHRRDNIMKQRTRLVNQLHEQLCIAYPSYKSFFNDISRPTALYFWEHYPFRKYLRGKSVEDLRKELVPVSHNKCSTKTCEKILDAVASDKVKNIDYQDARDMVTLSIVSDLQHYDSQLAEVDKMLEQMYKMLGCTLTTIPGVNVIIAVKILAEIGDIKRFSNANKLAQFAGIAPLHLSSSGKGKDVATKQGNRRLQAAIYFLAIQMVQVSSKGTPRNSVVRAYYEKRKAEGKSSQQALICISRRLISIIYGMLKNGTEYRMPVVENAGEKL

SEQ ID NO: 364660 - protein, 369 aa, unidentified
MQRKEISFKGQKVFIGIDVHKDSWRVAIAPEVGVVKGHSQKPSAQELLDFLKKYYPDGEYHAVYESGFSGFSTYYALQDVGIDCIIIHAADVPTTQYEETMKTDKVDAAKLVRSLKSGLLTGIYIHKRDNIDARSVVRLRKTVQKQLGSYKSRVKHLLHSNGVTFPERFSTPGSHWSKVFIRWLKEEVALLSATRISLDLLIAQVEAIRKTLLMATRNVRELSRSERYRHGCELLTSIPGVGVNVAMTLLTEIGDINRFNNEKEFASYLGLVPTSHSSGGKVAHGEKTFRGNKYLGPQIVEASWVSIYRDRGLGCAYLNYKKRMKPQEAIVRVARKLSNIIFSVLKTGQKYKPYEWDEQQKHTDLQATS

SEQ ID NO: 364661 - protein, 412 aa, unidentified
MLFVGDDWAEEHHDIEVQDETGKVLAKKRLPEGLAGMVALHELLGRHVPAGWADLDPAEAAGKVVVGIETDRGPWVAALVAAGYRVYAINPTSAARYRQRHSMSGAKADTTDAHLLAEIVRVDRAHHRPVAGDSPDAQAVKVVARMHQTLIWDRARHLLRLRSALREYFPAAIRAFDELAAPDSLELLAVAPDPDAAAKLTKTRIVAALKRAHRRNVDERATVMMEVLRAPELRLPPVVQQAYAAGIVSLVAVLGVLNQQIDQLSVVVGDHFGRHRDAEIYTSLPGLGVVLGARVLGEFGDDPTRYADAKARKAYGGTAPITRASGKKKVVLARYARNDRLADALQQWAFGSMRGSPGAKAYYKALKDRKIGHQAALRQLGNRWVGILHGCLKTGQLYDENKAWSHQSSAAA

SEQ ID NO: 364662 - protein, 441 aa, unidentified
MLKEINIHAGAVDVGSETFHAAVYDGPMKVFGTFTSDLQAVVKFFQENGVQTVAMEATGVYWMPLYEALVQAGLTVCMVNGAHVKNVPGRKTDVADCQWLAQLHAHGLLEPGFVPAAPILRLRDYQRLRQDHIEMGSQHILHMQKALERMNVKVHDVLSQLTGFSGLQIIQAILKGERDPAKLADLCDSQVLIKKRDRLIESLRGDWKEEHLFALRQGLEGWQFYQGQMAACDQQMGLLLEKMAAVLPEVPQDKLLPLRERKKVHHNPPQITRLYETLVRLCGGNDPTRLPTVTEYMVLQLVAETGLDMTRWPTCKHFTSWLGLAPGSRQSGKHRGSHKRFRGRAGRIFCVAARSLARSKHLALGGFYRRLRATCGGQVANIASARKIAQLYYNTLRHGSAYVEQGLKAYEEKYRRDSIRRLKAAARKFGLEITEPAPASA

SEQ ID NO: 364663 - protein, 452 aa, unidentified
MTKKTVFNVIHPDAAGIDVSSNDFYVAVPEDRDEEPVRSFGSFTQNLNELADWLLKCQITSVAMESTSVYWTQLFAVLQDRGFEVFLVNARQIKNVSGKKTDVADCQWIQQLHTYGLLTNSFQPDNITKELRIYVRQRKNLTDDASKEILRIQKSLTLMNIKLDQVISDIMGKSGKNIIEAILKGERDPKVLVTLTDHRLKATKEDLIKSLEADWRNEFLFTLQQSYDLYKFYQLKISECDKEIEKLLSVYPRSELICSAAQKDAFNPYKRKQKQKNDFKFDANISLKAIYGIDLTKIPGFSSLTAVTILSEIGPDIKNKFPTKKQFLSWLNLVPNNKITGGKIISSKMKKKKNKPGQSFRHAANALKSSKCPIGDYFRKVKSRDGHPRAIIATAGKLASIFYTLVTRKIEFNYEIYLSSYKSNLEKHMFRLNKKMKDLQKQLSYTADLQRG

SEQ ID NO: 364664 - protein, 344 aa, unidentified
MTYYAGFDVSLRTVNICVIDDQGEFVAETKLASDVQDIIAYLDDLKFELESVGLEAGTLTQYLTYGLQAAGFEVVCMEARQVKAALSAMRNKTDKHDARGIAQVLRSGWYSKVQVKSMASHHIRMLLSSRKAVLSKCVDLENEVRGLFKIFGIKLPPKLGHGAFDPMVRDIIEADEALSHALLPLLDARLVLYHTFRVLDNRTRKLAMNDPVCPRLMSVPGVGFITALTFKAGVDDPHRFKRSRTVGAHFGLTPRRFQSGEIDIEGHISKCGDADVRCALYTAANAMLTRSAKWSSLKAWGMKLAKTRGHRRAVIAVARKLAVVLHRVWIDDTQFRWGTEGARS

SEQ ID NO: 364665 - protein, 315 aa, unidentified
MSDAPYFVGIDVAQAQLDIAIRPSGERWAVPNDPSGVTALVDQLQALQPTLIVLEATGGLERLVTSALATSGLPVVVANPRQVRDFARATGQLAKTDALDARALAHFADVIRPTPRPLPDAQTQELRAFLGRRQQLIVMRTAEQNRLAGTSARLAKDITAHITWLNERIATLDDDLETVLRASPLWRENDDLLQSAPGIGPVCARTFLLELPELGTLTRQQIAALVGVAPLNCDSGTLRGRRTIWGGRAHVRTVLYMGTLVATRFNPRIKVLYERLLAAGKVKKVALTACMHKFLTILNAMLKHRTPWHAQEVQS

SEQ ID NO: 364666 - protein, 312 aa, unidentified
MAMLSFCGIDVSKDRLDVVVLPEGWFFSVSNGTAGWAELVVRLRPLTVSAIGLEPSGGYERGIIRALLAAGLSVRRINPNKLRQFARARGVLAKNDRLDARLIAEYVAIMPTRVVQRDAAVERLAEIVTMRRQLCDEHVAAENQAAHLEDAMLRRLSKRRQMRLEADIRLLDKRLAEMVAANVALAQRYELLTSMPGVGPVLAFTLIALLPELGKMSRKQIAALVGLAPYDFDSGKLKGHRSIYGGRMPVRNVLYMAALSASRYSPALKAFHNRLADADKKSKVIIVAVMRKMITTLNAMLRDNAVWQPRSA

SEQ ID NO: 364667 - protein, 335 aa, unidentified
MIGLDIAKNVFEVHGRNGAGEVVLRRTVKRSNMEKVFGQLPAAVIGMEACGSAHHWARVLGKLGHEVRLMPPAYVKPFVKRNKSDAIDAAACCKAVVDPDMRFVPAKTVDQQAALSLHRSRELLVRQRTQLGNALRALLAEFGIVAGQGKAGLAHLVEQLRAGTLALPEDALFSATMLADQHAAADATAAELERRIKAQAKADKMARMLQTAPTVGPITAHAVRATLPDPARFKCARDFAAFLGLAPSNSGTGGKMRTGHITKKGDPTVRRLLVLGATSWVRHVSRRLDKASPWLRGMLARRPKKVVAVALAARTARILWAMLTHNQPYRAPAIG

SEQ ID NO: 364668 - protein, 367 aa, unidentified
MSSVASQAGLIHLGMDTSKNTIVVATLLPGEDSPVTDRIANEEAAIRRLVGRFADRSVLRAWYEAGPGGYELWRLLASMGVACQVVAPSLIPKGGSDKVKTDKRDSRRLARLGRAGELTPVRVPSPAEEAVRDLARARDAMLADRKRAQQRLTAVLMRHGRIWRGATYWTAAHRAWIAAQRFGEPALAAAIGYYRATLAVREAELAALEAELMPWAAREPLAGPVARLGCYRGIAELGALTLAAEVAGWRRFPAARAFMSYTGLVPAGYSSGERTRRGHITKAGSEPVRTALTEAAWSCRHAPAIGAGLRRRQAGAAPDTLARSWTAQRRLHDRYVHLVHHGGKAAPEAAVAVARELAGFVWAEMTA

SEQ ID NO: 364669 - protein, 311 aa, unidentified
MGNIVEFEQVIERGFGIDVHKSLIVATIRGTGIKEETREYSAFTEDIQSLGHWLKENGVTHIAMESTGVYWKPVFNILEEDFEVILVNARHIKNVPGHKTDKKDSRWIAKLLLSGLLKGSFIPPKQIRELRDLTRYKRKLVEQISSEKNRIQKILEDGNIKLSSVVSNMSGAVATRIIDDLIAGEEDISKLVAYRHGKMQASESDLAKSLVGNLTAHHRQMLGFIKQSIKDKEMLVSNLDKIIEEHLKTAELELDRDLLSTIPGVGKEGAVYILAEIGSDMGVFADENHLASWAGMCPGNNESAGKKKARE

SEQ ID NO: 364670 - protein, 310 aa, unidentified
MEATVVGIDVSKNTLDVHVYPTGEAFAVARNADGIDALIAKIAPLGVHAVAVEATGGFETVVAASLGGAGLPVIVVNPAQVRAFAQALGKRAKTDPIDAAVIARFVEATKPQIRPLPDEATRLLADLVARRRQVIQMLVSERQHERQLPSRHLKKSAARVIKVLEKELSQLDTDIGDSVRGSAIWREKEELLRSVPGVGPVVARSLLAELPELGSLSRRQIAALAGLAPWTRQSGKWRGKSFTGGGRTGVRIALFMAAMVGARHNPTLKAFYQRLIAAGKPKLVALVAVARKLLTILNAIIREQKPWQPA

SEQ ID NO: 364671 - protein, 493 aa, unidentified
MDLTDLTSTDTKPASPAPPPGLVAGVDTHQDTHTLAVLTAQGAVIATSSFPADQQGYDDLTAHLDRLGPLMAVGVEGTSSYGAGLTRTLRQAGYDTVEVLRPSRRVRRHHGKSDPIDAIAAARTVLSGDGVSQAKDTTGPAEQLRLLLAARTRLISAATAITNSIHSLLTTAPEPLRERYRRLDTPALITRLARTRPTRTITTPQQAATSALHHMARTHQDLHHRAERLNQQMHHILTTHYPGLLAVYGAGTTVAAQLAVTAGGNPGRIHNEAAFAHLCATAPIPASSGKTTRHRLNPGGDRRANAALHRIALVRLRHDPTTKNYANRRTQEGKTTKEIIRCLKRAIAREVYRALTQPPPTDTTSTLAAHRKRHHLTQTDVAHALNTYPARISDIENHRRPLPQLTHRYHQYLTTLDTQQEHQVRRPAHRPAFFHHQMSKTTAPLRDQQCVSVGHEGLRQDASLSTRILPEAFTQPPKEVHLEAYSQHPSKVL

SEQ ID NO: 364672 - protein, 356 aa, unidentified
MKNSQLDFTGQTLYIGIDVHKKSWQVTILLNGMKVKVFSMNPNPKELNNYLTNHYPNANYHSVYEAGFSGFWANRQLQALGIKNIVVNPADVPTKSKERRKKTDKIDSSKLARELSVGNLDGVYIPSTKAEALRTLIRLRRQIVNDQTRQKNRIKSLLLFLGYSVPEDVETKHWSQRYIKALRNLDIEHEESKATLNELLNNLNFIRSQLVQILEQIKGFIAKDQQADKTVRLLKTIPGIGPILAVILYSEIIDIYRFKKLDELANYVGLSPAIYSSADKEINLGLTKKINKYIRNYLIESAWIAIRKDPALQMAYGLLCKKMSSNKAIIRISKNLLNRIRTVWINQQEYVIATVA

SEQ ID NO: 364673 - protein, 393 aa, unidentified
MSFFVGLDVSKEKFDVCCIGEEGERVFTLTCSMDRGGFEKLITQLPEDKTSFLLGMESTASYHIPLFTYLISHDYRVVVINPLLINGFSKRSLRKTKTDKKDALTIAQFLLREEEALPVKTPDYLVPELKELARRREKLADHMTSLKGNMKIILSVVFPELEYITGVFTKATLRLLMQYPSACAIRNADHLAIADVFNKGRGNRPRITVKALIDAATSSVGVASPAKELTLRQEASLLVHVEEQMKETTKVLMNTLNERMKQDTGILCSMKGIGENTAMNFLIEMGGSVEIYENDKKLIAASGLDPSTYESGKYAGKSRISKRGNRHLRRVIWLMATRVIINNNLFKAYFKKRKQDGLPYKKAVLATAHKLIRTIFVMLSRKTCFVEGGIKYS

SEQ ID NO: 364674 - protein, 312 aa, unidentified
MNNIICGVDVSKDWLDAHIRPGAAFARFANDAAGLGELLVFCRGHRVELAVMEATGGYERLAFLWLWENGLPCGIVNPRSVRRFAEAMGTFEKTDRIDAAVIAHYASVKQIVPAAPPSPAQQRLKVLVSRLSQVTGDITVNKQRKSATTDAETLASLSTVLTCLKREEKRLAGEVASLIDDDPLWARLDMTFRVFKGLADRTVARLLAEVPEIGIVSNKAIAKLVGLSPFANDSGKREGPRNIRGGRTGPRGILFIVARHVARYDPHLQAFAERLQKAGKTKMVIRMALARKLLVILNAKARDARMEFANAT

SEQ ID NO: 364675 - protein, 387 aa, unidentified
MVQQLDDLSRSLTPLELDSTIIAVIEMSQASWLAAGIVPGLERHPLKKLEPSEVELLRLLMRWRAEATQKGRPITRIVVAFEAGRDGFWLARWLRARGIEAYVIHPTSVAVSREHRRAKTDRLDTGLLKRVFLGWLRGEPDHCHMVAIPTLAEEDAKRPNREREGLVRERTRLVNRMKSCLVRFGVRSFKPTLRNAPDRLATLRTPEGVPLPPNTLLELRRDMARLRFVMDQIKDVEEARAQELERAPPDKTHVMVHFLARILGIGIETADMLVHEVLARTWRDRRAVARYAGLTGSPDESGSRRREKGLAKAGNARVRRGLIQLAWRFLLHQKESALSQWYRARTADARGSTRKTLIVALARKLLIALWRMVTTGEVPAGVVLRAA

SEQ ID NO: 364676 - protein, 408 aa, unidentified
MKTLHKRCAGLDVHKVEVVACLRLISKRKVEREVRRFPTTTQGLLALAEWLESAGCTHVAMEATGVYWKPVWHILEGRFALILANAAHVKNVPGRKSDVNDATWLADLLAHGLIRSSFVPPPAIQELRDLTRTRKQLTREIVQHVQRIQAVLEEANIKLCSVITDIMGASGRRMLKALIAGETDAEKLAALGHERLGCTRAELVEVLTGCVREHHRFLLGQHLRTIEQLKDSVAAFDARIEAALSPFHDIVERLEEVPGLAATATETVIAEIGTDMSLFPTAGHLLSWAGFAPRLDESAGKHRSTRIRKGAPWLKPVLVQAAWGAARKKNSYFQAQFLRLKARHGAKKAAIAVAASILTTVYHMLRDGTCYQDLGPEYFTRRNPAQAAARLANRIRNLGYHVEIRAAA

SEQ ID NO: 364677 - protein, 322 aa, unidentified
MRYIGIDVSKATFVVAYSSDKGGGIRTFNNTTAGIRQFIGTLPKDGSIHCVMEATGNYSALLLYMLNVAGITVSMENPLKVKNFAKALLSTVKTDKSDARLITLYGEKMNPRPFKVQGEAILRLRQKRTVIRQLTKQITAMSNLRGSLACLPVPDKGATHTVDETIKFLEKKRDRLQAELTDLVEVEFSRQLALLTTIKGIGITLATALIITTGGFTYFQNAKQVSRYLGICPTYEQSGTSVNIKGHINRNGDAYTRGLLYIAAWPASRFNAQCKETYTRLRQNGKSGKLAMIAVANKLIRQAFAVVAHDKEYIDGFVSNRP

SEQ ID NO: 364678 - protein, 341 aa, unidentified
MKKFIRIGVDLAKNYFQIHALVSEGGPAVTRKLRRSKMHEFFSQIEPCLIGMEACGSAHYWARELKARGHEVLLMPPAYTKPYVKRGKNDAVDADACCEAMSRPGMRFVPIKSAEQQATLMLHKMRELLVKQRTMSVNALRSHLSEFGIIAAKGIGRVDELLELAESDATLPNAARAGVKVLSQALEGLDKAIDDLEDEITSAHAQNEMTRLLYKVPGIGKIISSVIAASVPDPSVFKSGRDFAAWLGLTPRQNSSGGKQTLGAITKQGNRYIRKLLVLGATSLLNVMGKRKGALRDWIVGLLAKKPARLVTVALANKLARILWAMMKTGESFRTEMFAKA

SEQ ID NO: 364679 - protein, 341 aa, unidentified
MKQEMHVLGIDIAKRVFHAIGMDNTGKLVFRKRLSRHDLMPFMAKLPPVLIGMEACGGAHYWARRFREHGHEVKLMAPQFVKPYVKSNKNDSRDAEAIAEAVTRPTMRFVPTKDVAQQDIQALHRVRERLIGERTALVNEVHGLLHEYGIVMPKGVSKFRQAVVEKLESEKDKLTALSQEMFWKLVEEFAALEKQLAYYQEKLDTLATTHPECQRLMTIPGIGPLTATALVAAVSDASAFKNGRQFAAWLGLVPRQHSTGGKERLLGISKRGDTYLRKLLVHGARATIRWVGRKTDRRSQWMRQLLERRGHNRTAVAVANKNARIVWALLTHHQDYQPATS

SEQ ID NO: 364680 - protein, 335 aa, unidentified
MDRQYVGIDFHRRRSVIVRKDAAGEKLASVRVANDPLAIAAVIADAGPDPEVVIEATYGWYWVVDWLQAQGARVHLANPNALNWGTRRVKNDERDAVDLVDMLRLGRLPEAWIAPPATRELRELVRYRAKLVALRSGLKAQVHAVMAKEGVLPERNDMFGPGGQRLLDEMQLGDAYTVRVESLRDLIEVYDREVAMLEHKIRERLRGHVGYRAIQAINGIGPTMAAILVAEIGDVHRFRSAAALCSWAGLTPKHRESDTTVYRGQLTKQGSRLVRWAAIEGTVRYHGGSKLAADWRQIAERRGKNKATVAVARKVLTLVYYGLRDGKIRCLAKAS

SEQ ID NO: 364681 - protein, 434 aa, unidentified
MLYLGIDLHRKQLTVNLRNEKGDVVLKRQVSTSWEKVMQFFDHLAELAAVQDGFTAIMEICGFNDWLVEMLHEYGCRKIVLVQPENRDIHKTDRRDANQLSQLLWLNRQRLQEGKSIEGVRQVRPPSARDAENRQLTSMRKRLGDCRTRTLNQLHRLLLKHNLHQECPVKRIQTKAARMWLASLDFEKIDRLQLNLLTAQWELQDRQIAELQREIENRQRQDPVAAIIATVPGMQAYSSLTVASRIGVIENFPRPGSLANYWGLTPGCRNSGDVNQRLGSITKRGSVLVRFILGQVILHVLRKDPAMKAWFLRIKKRRGAKIARVAAIRRLATILWHMVKHQVPYRIGQMMDLGRTTTALETSPAGNASIPAPVFGGITEQKNVGKPRQQKRPRPSKRPRSGGTFFRPDPGIPCRVAPQQSPTPLPRTESNVIA

SEQ ID NO: 364682 - protein, 500 aa, unidentified
MEVMQRRCCGIDVHKKKLMVHVLPPQGQMETRPLEREFRTFTRDLRELRDWLKECGVSEVVMEATGQYWRPVWNVLEQHIPSVMLVNPQHVKALAGRKTDRIDSRRLARFLERGELVGSFIPPRPIRELRDLTRSRIHLVEEVNRVKNRISALCETGNIKVSSVATDLFGTSGRRMLHSVADGNQDAGWMADYAQGRLRQKRQELSLALDGDFSECQRWMLREALAHLKHIEKAITDLQAEIGKRMQAYEDQIQHLVTIPGVDRIVAWTIIAELGTDMSVFPDAKHVASWVGICPGNHESAGKQRSGRTRKGNPYLRRDLCQAAWAASHTKGTYLAALHRRFTVRHGHNKAIMAVAHRILIVAYQMLRKGEDYQEHGGNYFDRQDRSRVTTRLVGRLTSLGYHVSLQPASTVVAPVQTLATEGERATPTPGGTPPPKAARRPPGRPCKCAIRGITCTHKTRAERRRLQNHEHSFASTYRRPFFVGLTTSCLTGGSLRFCC

SEQ ID NO: 364683 - protein, 386 aa, unidentified
MPRLNDLSRSLVTLEQDATLIAVIEMSLTSWLVAGIVPGVERQPLKKLGVDERALLKLLHRWREEAEKAGHRIKRIAVAFEAGRDGFWLARWLRAYGIEARVIHASSVAVSREHRRAKTDRLDTELLKRAFLGWLRGERDHCRMVAIPTIEEEDAKRPNRERESLVGEQSRIVNRMKAALIRLGIRGFNPKLKKAAERLDGLRTPEGDPIPPNTLAELRRDMVRRRLVSDQIRQIENARLERLEHASGDGPHAMVRLLARVIGVGTETADMLVQEVLSRNMRDRRAVARYAGLTGSPDESGKKRHEKGLARSGNARVRRGMIQLAWRFLMFQKDSALAQWFRARTEKARGTRKTMIVALARKLLIALWWLVREGVVPDGVVLRPAQ

SEQ ID NO: 364684 - protein, 343 aa, unidentified
MQVVRIGLDLAKYVFEVHGVDNHGKVIVRKRLRRDAVARFFANLPACLVGMEASNGAHYWARVLTELGHQVRLISPQFVTPYVKSNKNDQNDAEAICEAVGRPSMRFVPPKSTDQLAVQAVHRIRRRLVADRVRLVNQIRGLLSEHGIVIARDIAQLRRGLAVIVGSINDGLGEMLRALMRELQEELSELDTRIAAHDRRIREIFRTSEQCQRLGKIEGVGPVTATALIAAVGDRSCFKNGRQFAAWLGLVPKQRSSGGRARLFGISKRGDRYLRTLMIHGARAALSRATGKQDPRSLWLGKMRQRRHPNVVAVALANKNARIVWAMLTGDAAYEPALSVKAA

SEQ ID NO: 364685 - protein, 368 aa, unidentified
MPVSVTRISDDRVVVGVDPHKASWTAVAVDGSLRPLASVRVPVSRDGYRALRRFAHRWPHARWAIEGAAGLGAPLTTLLGSDGIEVIDVPAKLAARVRVLSSGHGRKNDDADARSVGIAALTSPALGTAQIDAASTALRAVVEHRDDLVKTRTQTVNRLHVVLTRLVPAGARRHLSADHAAELLRGVRPRDAAAKTLRALAMDLVSEVRQLDRRIAKAANDIQMAVSTSGTTLTELQGLGALTAGKILGRVGDVSRFRSAAAFASYTGTAPIEVSSGEVVRHRLSRAGERQLNFCLHVMALAQVRHDTPGRAYYLRKRSEGKNHNEAMRCLKRRLSDIVYRQLIGDAVKQKAGPGGHSGAALSSRAAS

SEQ ID NO: 364686 - protein, 341 aa, unidentified
MKLIRVGVDLAKNVFQLHGVDRSEKTVWRRKLVRGDWIQALLDRIEPGCEIGMEACSGAHHWARLLQEKGFTVKLIAPQFVKPYVKSNKNDANDAEAICEAMSRPSMRFVAVKTVGQQDIQAVHRVRSGLMDQRKAKANQLRGLASEYGLVAPKELLHLRSAIPRWLEDRDNGLSERFRRLLHGLWRDLKALDERIEELDREIEQIARQDPAALRLQHVRGIGPVTATALLATVGDASQFASGREMAASFGLTPKQNSSGGKERLLGISKRGDAYLRSLLVHGARAVIRTAHAKTDRLSIWVIRIATTRHPNIAAVALANKTARIAWAMLTKGTDYQPQAA

SEQ ID NO: 364687 - protein, 324 aa, unidentified
MIDGILGIDVSKNTLDVSIAICTKVRSKSFANSSDGWRLLLDWLIAQNIQRVHACLESTGRYSLGIAYALYEAGHVVSITNPAQIRDFARTKLGRNKTDGVDASHIREYCELFKPSPWEPPTQAHRRLGELQTIRAGIIAGLTEWKNRKNSGIVDVEAQALADATISHFTSQLGAVDEAITRTIDNDCDLRSKRDLLLSISGVGETLAGVVLAELPGPDVLRSSAEVVAYAGLNPRQYQSGTSVVRATRISKIGNAVLRAALYMPALSAMRYNPAIVALVTRLKSQGRLKPKQIVVAAMRKLLVLCFGVLKTRRPFDAAIAMGC

SEQ ID NO: 364688 - protein, 344 aa, unidentified
MDHFAGLDVSVKETSVCVVDDTGRIVREVKVASEPEALLKVLGNPAYRFKRIGLEAGPLSQWLFSALAEAGLPVVCVETRHMRAVLKAQINKTDRNDARGIAKMMRVGLYRPVHVKTLRSQKLRMLLTHRKLLQSKAIAIDNDLRGTLRNFGLKVGMVGTVKFEARIRELVEDLPDLVVLIEPLLIVRRTLREQVVILHRRLLAIVRDDEVCRRLMTIPGVGPVVSLTYRATVDVPARFRKSKSVGAVFGLTCSRYQSGEVDWSGKISRCGDEMMRVMLYEAAQSMMHSKKWCWLKTWAMQIARRRGMKKAVVALARRLAVIMHRMWVDGTEFRWTREKAAAAA

SEQ ID NO: 364689 - protein, 376 aa, unidentified
MIATTRPEISVSEPTLYVAFELSAKQWKLAMTAGFGVEPWVTTVAARDLAGVTRAMARARGRFHVSAEAPVVSCYEAGRDGFWIHRALTQLGVVNRVVDSASIDVNRRARRAKTDRIDALKLVRMLVRVWGGERDVWREVHVPSVADEAARHVSRERTALIQDQTRVLNQIRGWLATWGCGVPRRRADGWWTTVRDWAGTVLPAAVQARIARAEARRAQLATQIAELDAQQQRAVNAAAPASALGRLVQLKGVATTGASVLLEEGLIWRAFRNRREIGGLLGFAPMPYQSGAVAHDQGISRAGNERLQAVSIQLAWNWIRWQPLSALTQWYQHRFAGGGKRMRRIGIVAVARKLVIALWRYATMGVVPAGARLKGA

SEQ ID NO: 364690 - protein, 310 aa, unidentified
MEKVYAGIDVSKDRLDVAVAPNGKTWHFSNDEAGISQLLTTLKQLAPELIVLEPTGGYEVPLVVALASESLNVAVVNARQIREFARVVGRLAKTDEIDAAIMASFAETIKPKARPLGDEESRRIKAKVSRRRQLVDMITAETSRLDKMHHEEVKLDILAHIQWLREQSNKIDDDLKKAIKNSPIWREKDELLQSVPGIGKVISATLLAELPELGTLNRKQIAALVGVAPFNCDSGAMRGKRMIWGGRAPVRSALYIAALVGTRYNPVIRTFYQRLLATGKAKKLALVACMRRLLTILNAILKNRQAWHYA

SEQ ID NO: 364691 - protein, 358 aa, unidentified
MRFYTQQHKYYCGIDLHARSMYLCILDQDGTVLLHRNLRANPDAFLKAVAPYREDLVVAVECIFTWYWLADLCRGEGIRFVLGHALYMKAIHGGKAKNDRIDAQKIAVLLRGGMIPQAYVYPPEMRATRDLLRRRLHFRRKRAELLAHIQNTNSQYNLPEFEKQLTYASNRTGVVNRFADPSVQKTIQVDLALLAYYDQMLRDLEYFILRTAKDHDHNTLYRLRTVPGIGKILSLVILYEIHDINRFQRPQELASYARLVKCARESAGKMYGTSGRKIGNVHLKWAFSEAAVGFLRKNPEGKRYYARLERKHGKGKALTVLAHKLARAVYYIWKKDQVFDQQKFLAAAQRREVGEPAA

SEQ ID NO: 364692 - protein, 326 aa, unidentified
MTASSSSDNLFIGVDIGRASFDVAWHRGAGARYANSSNAIAMFVGKLKAGPVPTRIVIEPTGGYEKPLVKALRGADLPVEIIHTSRFSAYRAMVGVKAKSDSSDARLLAAYAAASDEVRGRKPHHVVLPEDPIREELAELASRRDQLKHMIHAETCRLSTARNAALRQAIIAHLDMLKAEDQHTHKAMLTLVRTRVDLKRAQGLLKTISGIGDKSALACIALVPELGQIGNKAAAALVGVAPFTRTSGTLRAPARIHGGRAAVRSILYMAAVSASRHNAVLRPFYQRLLAQGKKAKVALIAVLRRLVVFANAVLRSQQPWKGATLA

SEQ ID NO: 364693 - protein, 368 aa, unidentified
MKKVSTRAAAQSRNISRQTLTVGLDLGDRNSWYCVLDEAGQIQLEQRVGTNAKALREVFGAMPRSRIALETGTHSPWISRLLSELGHEGIVANARKLRLIGESRKKDDRLDAQTLARLARIDPQLLYPVKHRSAQGQADLAVIRARAGRVRARTAMLNTARGLAKSYGERLRGCNLRNLNPEKAEALSPELQAALQPLLAALESVSQQIREYNQQIETLAQERYPQTALLKQVKGVGTLIALTFLLTLEDPQRFGKSRDVGCYLGLQPGRRNSGKSQPQMHISKEGDPYLRTLLVQGAQHILGPFGVDCDLRCWGLKLAERGGRSGKKRAIVATARKLAVLLHHLWVSGEVYEPLHNSRRRTTVAAAA

SEQ ID NO: 364694 - protein, 408 aa, unidentified
MESQIIFGIDVSSKSSTVCVVIDRIKQGNSFKITNDSFGYQKLYDRLNDYLITPLVVFEATGVYSLSLQAFLEDYHIKYLKLNPLKAKKLMDNNLRHNKTDKVDAYRLALIQFNAPQKLRDPQPREYHELQNASRYYEELTKSLIVAKNQLHRNLQSTFPQIEQILSNPSGRVYWAIVSLFPHAKYVLEKNETQVKQMLNSISGIGRQRAQYITARLYAFAREAYPYDFKDSIIVRAIQRNISTLFSLQQERDFTIDYMEKLAKLVNARSLSIYLSIPGIAKITAVRLVAELGDLRRFDTSAQIDAFVGIDPGRYQSGEKDSSLGITKHGNYIARKILYRTITQMETVRATQPCHITDYYDKKKRSSNSQGYKKIAIASAHKLIRTMFALIKHNQLYDYNVATENKRL

SEQ ID NO: 364695 - protein, 384 aa, unidentified
MNKHSILFIGLDTHKEFNEVAYIEEHRGAQPVHLGRFSSSKVAVQKLVRQFESKYSGATLHFVYEAGPCGYWIYRLITSLGHCCYVVAPSLIPKKPGEKIKTDKRDALKLAKLLKSEDLTPIYVPEPEDEAVRDLSRAREVAMKDLKDAKYQLKALLLRNNINYKGTANWSQKHLRWLTEIVLPHPAQHIVLQEFLHTITERISRLERLDNELTHHVHQWRYYPVVKAIQAMRGVRLLVATGVVAELGDLSRFDHPRKLMSYLGLVPSEHSSGGKRHIGAITKCGNGRARRLLVEGAHTYRYAANISTDMQKRQEGLPKDIIDIAWKAQIRLCKRYKKMIAKGKHYNLVVTAIAREMIAYIWAIAKEVVLTPVNTKLRLARVPA

SEQ ID NO: 364696 - protein, 457 aa, unidentified
MNRKRSKPKIDRTMPMVHPNAAAIDVGATMHMAAVRADRTPEPVRSFGTFTTDLHRLVNWFKECGVETVVMESTSVYWIPIFELLDARGFTVFLVNARDAKHVPGRKTDVSDAQWLQRLHSYGLLRASFRPKGQIAELRAYVRQRERLLEYAASHIQHMQKALTEMNLQLHHVIADITAATGMRIIRAILAGERDPKVLARLRDYRCHASAETIEKALTGSYRAEHLFALEQALALYEAYHEKVSACDVQIEAVLKELSIDRGRRSGSLPSSRRRTDQANGLAFDVRAALFALLGKDITQIDGLGPYLSLKLIAECGDDLSAWPSAKHFTSWLCLAPSNKISGGKVLSSRTRRGGSRAAALLRLAAVTVGRTDTALGAFYRRLSARIGKAKAVTATARKIAVLFYNAVRHGMEYVDPGASFYETRYRTRVVNNLHRRAKAFGFVLQPMEVTSGGAVS

SEQ ID NO: 364697 - protein, 327 aa, unidentified
MKKNPAPVYVGMDVAKATLHVNLNGHQFEFKNDSKGHAQLSEKLAKLTLPHVICEATGGYERPVVEVCHKAKILVSVLNPAHTLAASQAQGKRAKTDPCDAAALTDYGQRFEPEPTAALPPAVRAITELTLWLKQLIDNRAVVKTQAEHLANSFVSQRHQELLAHYQSQIETVEKEIKKMVQAQALFQQRVDCLTQIEGVGFRTALLTLVFLPELGSINRGATAALAGLAPWTRDSGTMKGKRCIGGGRAQVRPVLYMAALSASRCNPVLAPHYQGLKKRGKPSKVALTAVMRKLLIHMNSKLKKLAAKPVNEKPGKSNKTKKSLAK

SEQ ID NO: 364698 - protein, 343 aa, unidentified
MKDSIYDHYIAIDWSIKNMAIARMTKKSNKITVIDVPSDIIEFQIYLKNLRGTKILAIEETTTSQWLYTELGDYVDRIIICDPYRNKLLGEGPKTDKIDAAKLVHLLKAGLMKEVYHSAEKFIYIRRVVSGYEDMVKAGVRLKNQRYALLRACGKSGKEKKDIKLGTQGDQFVLECLDRQIKAYEEEKSGYEKEFARLGRKYSEIRHQKNLPGIGSINAVKIVSRVVSPYRFAGKGHYLSYAGLIKLDRISGGRSYGKKNSRYSRQLKSVYKSGVLAAIGGNNPINDYYEHLIGEKNYPEHNARNKACRRLAILSLGVFRSGKRYQPYRRDRVKGNKAIPSDL

SEQ ID NO: 364699 - protein, 303 aa, unidentified
MIIGCDYHPRYQQIAMMDTETGELVERRLEHENGEARAFYAGLPKPARVGMEATGYGQWFERMLGEQGHELWIGHASEIRAGVVRKQKTDARDAAHLLRLLLEKRFPRIWIPSPAERDTRQLLRHRYKLVCFRVSVKNQLHGLAMSQGVCRKKKLFTAKGREELEKLSLGPWASRRRQELLAMLDQLNPVIEELDRAVQREAENHADAVRLMTHPGVGPVTALAFVLTLGPMTRFQRSKQVVSYLGLNPKERSSGDKQHTYSISKQGNTMMRWLLVEAAQTAVRFDPELQRVYRRLKFRNLRR

SEQ ID NO: 364700 - protein, 351 aa, unidentified
MRTSQKITGIVTTIGIDIGKNTFHLVGFDQRGAIILRQKVSRSQLERRVANIPRCLIGMEACSGSHHIGRQLAEIGHDVRLIPAQYVKPFLKGHKNDYRDAEAIAEAVQRPTMHFVTIKTPEQMDLLALHRVRSRLVGRRTGVINQIRGFLIERGITVRQGPMPLRKALSEILSSDTGALSPRMVGLIADLAQDWRRLDERIAAVSAEIEALAEQDDSCQRLMTVPGVGPIISSAVVAAIGNGTGFKQGRDFGAWLGLVPKQESTGDRTILGKISKRGNKYLRTLFVQAAHVVLERRPSAAMRGLWPWVEQASKRLHRNMLAIALANKLARIAWAVLARGGTYQPRITHAA

SEQ ID NO: 364701 - protein, 430 aa, unidentified
MTKRSSTPADAVLVAIDMSKHRQEVLIERPEGGRRRRMTVMATKADYDRLAADLADIGRPVIVGFEATGNYHRTLAHRLLSAGFELRLISSVALARTREALHNGWDKNDCKDAQVILHMLQIGATQRYVDPLAAGINDLQEMSKTHEAISKAKTQTWHRILTHYLPLYFPEIERFAGNSRSDWFLALLERFPTPGSMTRLGQEDFTREAWSLVGRKVSKARLINDIYETACASVALPVDEDSVAIAMFRMVIAQARSLIRQRDEIERTAHAMLSDNRDYQLLRMIPGIGPINALTILAEAGDLRRFAHHRQFLKFCGLDLATCQSGTFRGRTKLSKYGNARLRRTFWMATQVAIRQRDNSFRDKLGRYVAGHANDPDRRRKAMTALTAKMARVAHAVIKTGTEYRPFLERADTRWKDPSLWSREGAAATL

SEQ ID NO: 364702 - protein, 387 aa, unidentified
MPQPNDLSRSLVALDQDSTLVAVIEMGQASWLVAAIVPGINRHPLKKIATDQEQLLQVLRRWAKEAETAGRMIKRIAVAYEAGRDGFWLARWLRAGGVEAYVIHPSSVPVPREHRRAKTDRLDTELLKRAFLGWLRGEPDHCSMAAIPTLAAEDAKRPGRERENLVGERTRIVNRIKGALARLGLRNFKPMLRNAPQRLETLRTPEDAALPPNTLAELRRDMARLSFVKQQIKEVESARLERLQRAPGERGNAMVHLLTRVVGVGVETADMLVQEVFCRNLRDRKAVARYAGLTGAPDESGKKRRERGLAKSGNARVRRGMLQIAWGFLVHQKDSALAEWYRARTADARGATRKTMIVALARKLLIALWRLATTGEVPEGLVLRAAP

SEQ ID NO: 364703 - protein, 338 aa, unidentified
MLYSGIDLHKRTAVISTVDETGKVVAEASVPTSRAAVARYFQWLPGPTVATVEATSSWYWLRDLLDSENVPLTLAHAKFVKAIAYAKVKTDTVDALTLAQLLRADLIPVAHMVSPELRPLRDLLRTRLHLVEKRTSAKNSVERLLEKYNAARAEALPDEATMQAELYAEQIELLTDQIRRIEKQLNPQLIPNPDIQRLLWIPGIGKLVAFTLYLEIDGIERFPTVKQFFSYARVVPGADNSAAKRRHRHRKDGNRYIKLVLSHAAVRACQYYPLIKRFYQKKARQKNPAIARTLVQKEIARAVYVVLSEQVDFNHKFKGQPLSKQKAAQWPRRASPDV

SEQ ID NO: 364704 - protein, 317 aa, unidentified
MSKHSMICAGIDTGKRKLDVALTPGSQHLQVENGSEGHCALSKWLRKHRVKRVGIEASGGYEQAIVSKLRCDGFVVIVFQPAQVRAYAKFHLQRAKNDKIDAALIADCTAATKTIHAPPDPRLMPLAGHLTLIEQLTEDIACLKNRRESCRDQRIRRHWTAEIARLKTLVRGELRQLVAVVRQHRDLAERLDLIASIDGIGVPTAVAILVRMPEIGRVSREQAAALAGLAPYDDDSADHVGVRHIDGGRERLRKSLYNAALAAAFHWNDQLIAIYKRLTAAGKPHKVALIACARKLIIYANVVVQRGEPWVAKPPAA

SEQ ID NO: 364705 - protein, 314 aa, unidentified
MEREVIGLDVSKAWLDGYLPEAGRRLRVSNDAAGIDQLLQSLADPGGCLVVMEASGGYERTAHQALVAQGVLAAIVNPKRVRDFARGMGLEAKTDRVDARLIARYGEVMRPTATPLPDPARQELREILACRRQLIDEIAVRRQQLEHLQSPAVRARVERALLLLRQEAKALLALLRERIAADRTLAADFALLTSMPGCGPILAATLLAEMPELGTLDRRKVAALAGLAPVARDSGLREHRRVIKGGRGQVRNALYMAAVASLKTDKSPLKARYARLRARGKPPKLALAALMRIMLVTLNAMLRSKALWTDPRQK

SEQ ID NO: 364706 - protein, 327 aa, unidentified
MRYIGIDVSKATFMVAYPSNEKEYKTREFGNNAKGIHQFIHTLKEDDHCVMEATGNYSYLLLYLLNHANITTSMENALKVKNFARTMLSVTKTDKADAQLLSLYGERMRPIPFKMPSDSILLLKQKRAAMRQFQKQLHATNNLRKSLEVLPQRDAATFKSIDKIIETLEKQIRKIEEDLVALTQKEFERQMQKLTSIKGIGASLAAALIIATGGFTYFDNAKQVSRYLGICPTYQQSGTSVNVKGHINRNGDSHLRSQLYVASWSMSLYNKECRNLYLRMKEKGKPGKLIMIAVANKVLRQCFAVVKHDTDYIDGFVSRKPNSSIEG

SEQ ID NO: 364707 - protein, 389 aa, unidentified
MDDRKTTAPTVTLDVATLYVALELSLKSWVVALRSSASDKVSLKQQPARDQAALLALIDEKQAELYAEGYREVRVVSCYEAGRDGFWLHRRLLEHGVESHVVDAASVSVPQHARRRKTDRLDVQVLLRELMALLRRESDCRVLRVPTPADEDERQLGRERQQLVSERVAHVNRIKGLLATQGIVDYQPLRSDRHERLAEVRTALNTPLERRLAARVERELKRLEGVMAQLKQVEAERDAIAANPPPDDANAMKIVQLARLKSIANETATTMTREVYYRHFDNRCQVGAFVGFDGSPWRSGQMNREQGISKRGNRRVRALLVEAAQRWVRQQPDSALSQWFIRRVGATKGAYKRKMIVALARKLAIALWRYLETGLVPTGAVLKPEAARA

SEQ ID NO: 364708 - protein, 390 aa, unidentified
MTYYVGIDIAKYKHDCFIADDSGCVIRDSFTLTNDKDGFNVLLSILKELKPKGQIKIGFESTGHYHFNLKLCLEANGFDYVEFNPLLVHKFISTQTLRRTKTDKKDASMLAKYLMTIDYKPYVNSFYHINNLKSLTRLRETLITDRTRFLNQITSYLDQIFPEFKPLFENGLNMSAFYLLTHYMTPAKMSKLDSNKYSKMKSELGHTISYQKICQIKDAAINSIGHTSKALEYALEASLTLYLTLDKQIDELESKIIEIYDSLNCHIHTIRGISKLTSAGILSEIGNFNKFLTPAQFQAYAGLEPSKNDSGTHDGIGVMVKHGSSYLRKYLMNSAETFYVYNPTISDFYWKKRNEGKHHRVALSHVARKLINTIFYLEKHNQDFDSTLVK

SEQ ID NO: 364709 - protein, 334 aa, unidentified
MQNITLIGIDLGKHSFHIHCQDKSGKALLRKKFTRTKLMQFLATCPPSVVVMEACAGAHFMARRISDFGHETKLISPQFVRPFVKSNKNDFVDAEAICEAASRPSMRFVQPRTEPLQAMRALHRVRESLIRDKVKTTNQIHGFLLEFGISLPTGDAVIKRLSLVLAEHEIPEYLSRLLVRLHTHYLYLVEQIAELESELSQSINADDTAQRIMTIPGVGPITASLLSLQPGDGKQFSCSRDFAASTGLVPRQYSTGGKLTLLGISKRGDKNLRRLLVQCARSFMMRLERQHGKLAEWVREQLNKKHSNVVACALANKLARIAWVITTQQKEYQA

SEQ ID NO: 364710 - protein, 375 aa, unidentified
MEEGMTKEQLTIHVGIDVSKDKLAVAIAGSGVRDEVLSLGTFENTPASVDRLLKKLSGRGLPVSVCYEAGPTGYGLYRQVRAFGFECCVVAPSLIPVRAGDRVKTDRLDAIRLARLFRAGELTPIWVPDETHEAMRDLVRARESAAEDQRHKRQLVSAFMLRHGRIYHRTKPWTMRYRRWLQSQSFDHPAHQIALQEMLQAERNATERHDRLTGHIEALVPEWDLAPAVNALQALRGVALISAVTFMAEIGDVRRFETPVKLMAYLGLVPSEYSTGKTTKRGGITRAGNSRVRHKLIEGAWTYRLPARPGARKLYILQEQPAEVQDIAWKAQSRLTARYRKLSQRGKKSTVVTTAIAREMAAFMWDIARRTMPAC

SEQ ID NO: 364711 - protein, 344 aa, unidentified
MKHCKRLSIDLAKGVFQICGLNSNNKTLFNRQTSRPKLLIDVLNAKPEMIFMESCYSANYWGRLFQSHGFTVKLIPAQHVKPFVKGNKNDKHDALAIAEASMRPNIHFVPIKTIEQQDIQCMHRVRERLVSSRTGLTNQIRGLLSDYGIIFSKGHHTILKALPLLIEDISNKLSFEIRDLLNDLLEELKNKNISIKKIEMNIKTLSEKMTGFENLMNMPGIGLINASALVSAIGDAKQFTSARGFAAFLGLVPKHEQSGTRLKSKGISKNGNRYLRTLLIHGARTIVSRYQNMDDPLKKFAMKIKEKRGNHKAYVAVAHKMSRIIWVILSKNQAYNPNHILSVK

SEQ ID NO: 364712 - protein, 412 aa, unidentified
METIVERPAALDVHKAQVMACVRVPDERGRREQYVQEFPTTVRGLLALRDWLAGHGVQQVVMEATGVYWKAPWAIVEDEFDCMLVNARHVKQVPGRKTDVSDAAWLCQLAEAGLLKANFVPPKPVRQLRNLTRYRKTQIQERSREVNRLHKALEDAGIKLDCVASDVLGKSGRDMLDALVAGETNPDVLAELARKQMRKKIPALREALEGHFDSHHRLWIGAILRHIDFLDEQIEQLTVMIEEQIRPFSPAVELLCTIPGIQRRGAECVIGEIGTDMTRFASSRHLASWAGQCPGNDQSAGKRRSGKTRDGSKWLDFALEEAAIAAIRVKGHYLEAQYRRLKPRRGHKRALGAIKHTILSAIWHMLATGETYRDLGGDFFANRDPERQTRRLVAQLERLGHHVTLAEGAAAA

SEQ ID NO: 364713 - protein, 333 aa, unidentified
MNYSGIDLHSNNSVVTVTDDNDRVVAEKRLPNDLAKIIGFLLPWREELAGVVVESTYNWYWLVDGLQAAGFLVHLANTGAIKKYDGLKHSGDETDARQLAHLLRLGILPTGTILPPEHRAIRDLARKRMQLVRSRTSHILAIENIMARQQAVKISSNAIKRLTADDVEQMGLPADVQSNLAVITTLGAQIDLLEKRLQERVGERPDYALLTSVPGIGRILATIILLETGPIDRFAAVGNFASYARCVDSRHTSNGKKKGEGNTKNGNKYLAWAFVEAANFALRFCPEAKRFYERKKAKTNTVVAIKALAHKLARACFHILKEKKPFDVTRCFA

SEQ ID NO: 364714 - protein, 359 aa, unidentified
MYPFYLGVDLHLKRSYVVLIRADGQVVDQRGLPNDAMAGYLARKVPRETYAVLEATRNWPFMYDLLCQHVERVELAHPKDLKAIATAAVKTDQIDARVLAHLARLDYLPTAYAAPLAVRDLRQHTRHREWMIRQRTQAKNRIHAVLASYNLVSPVSDLFGAQGRAFLRQAIAQQLRPAAVRAIEDNLLLIDLIEARLEALQQGLQVTPEQEQAIRLLESMPGIGRITAATIVAEIGDIMRFSSPKALCNWAGLTPRVRKSDKIVRHGKISKQGSPYLRAAMVRAATTAVRRSRRWGKVYRNLCARCGKRAAKVAVARRLLTVAYYMLKRQQPYREEEPKQGGIQTGEPDEIHGSQKPKG

SEQ ID NO: 364715 - protein, 351 aa, unidentified
MLIIGCDFHPSFQQIAYLDSESGEYGERRLTHPAEAKVFYGSLAGRQVRLGLEATGNFRWFRRFLGERGHEMLLGNPSAIHASNPRRQKTDKRDARHLLTLLVEDRFPAVWQPPVENEELRQLLLHRCRMVRLRTKVKNQLDAVAKNEGLLSARGWQEKRCQIEALPLPGWYAERRKDMFALLDELDRRIQPLDEAVKKAAGENAGARLLMTHPGVGPVVSLAYVLTIGDWQRFPRGKHVASYLGLIPAEESSSDKRRLGHISKQGNELLRWLLVEAATTAQRHDLSWHREYLRLSMNKHHGVAKVAIAHKLAIRLYWMLRSGQDYQQVVERGSHAGQSVCPSGCGLTPRT

SEQ ID NO: 364716 - protein, 339 aa, unidentified
MKKVSIIGLDLAKQVFQVHGVDEAGEVTVRRTLRRAQVVGYFSKLAPCLVGMEACATAHHWARELSKLGHTVRLIAPAYAKAYVRRNKNDAADAAAICEAVSRPSMRFVAMKTAEQQAAAGIHKVREMLMKQRTMLMNGLRGLMAEFGIVAARGPHHVEELVAILADAHDRRIPQPLRGGLVRMAQALASLERQIAAVEKQIVGWGGANRTCRHLISAPGFGPILSSALAAMVVNPADFRSGRDFSASLGLVPRQEGSGGKVRLGPISKRGNGYLRRLLVNGAMSVLCSKRAKHDPWLVKLLATKERKLVAVALANKMARIAWALMTRQEDFRTMPAAV

SEQ ID NO: 364717 - protein, 344 aa, unidentified
MDHFAGLDVSVKETSLCVVDGTGRIVREVKVASEPEALLAVLKGPAYRFKRIGLEAGPLSQWLYSVLAEAELPVVCVETRHMQAVLKAQINKTDRNDARGIAQMMRAGLYRPVHVKTIRSQKLRMLLTHRKLLQSKAIAIENDLRGTLRNFGLKVGMVGKVKFEARIRELVENLPDLTVLVEPLLLVRRVLREQIVILHRRLLAIVRDDEVCRRLMTTPGVGPVVALTYRATVDVPARFRKSKAVGAVFGLTCSKYQSGEIDRSGRISRCGDEMMRVMLYEAAQSMLRSKKWSWLKAWAMQIARRRGMKKAIVALARRLAVVMHRIWVDGTEFRWTRKQAAAAA

SEQ ID NO: 364718 - protein, 455 aa, unidentified
MPRRRPSTRPVTMPVLLPHAGGIDVGATDLYVCVPLDRDPQPIRRFGTFTEDLHTLADWLTQCGVTSVAMESTGVYWIPLYQILETRGFAVCLVNARHVKNVPGRKTDVQDCQWLQYLHSVGLLRASFRPPETVCAVRSLLRHRESLVQLAATHTQHMQKALNQMNLQLHHVLSDVTGVTGLAILDAILAGERDPQVLARHRDGRIKASRETLAKALVGDYRPEHLFTLRQALASYRHYQRLIAECDGEVQRLLGAVASQVDLARQPLPPPPAGRRQPHRKLPSFDLRAELYRVLGTDLTQVPGLQTPTVHTLFAELGADLSAFPSGAHFASWLGLCPDNRISGGKVLSVTTRPVKHRVAQALRLAAQSLSRSQSVLGGFFRRMRAKFGAPKAITATAHKLARIVYHLLTTRQPYDESRLAAADAAHRRHSESRLRAQARALGFQLVPAPEQAVS

SEQ ID NO: 364719 - protein, 394 aa, unidentified
MRVIGVDIGAETHVVAVVDEDGRTVLKPTPVTEDAQGYARLLELIGEAADTLVVMEATGHYWQNLFATLAAHGFAIALVNPLRTQRFAEGELRRTKTDALDALGLAHFGRQKRPQPTRLPDRATEELRELVHLRDRLVQDIGDRVRQLHRLVDLGFPEFTRHVPDLESMLATAILRAYPTATAFRGLSVRVLAALRYDGRHRVGEALAAALMAAAAASVGRHHGEPYRLQVRYACEDLDLWRGRLRSVERDIERLLRAHDVGKLLTTIPGIGPQTAARLVARVGDPAEFRSAGALAAFVGAVPGLRQSGQRQSQRAGLHPFGHRRLRAQLWMPTLSAIRFNPWLRAYYERLIARGKVRKVAVVAAMRKLLLAIYSVAKNRRAFVPHLSPQETPA

SEQ ID NO: 364720 - protein, 350 aa, unidentified
MRIIGCDYHPGFQQIAFADTETGELQERRLQHPEEAEKFYRALAGQGMKVRVGMEASGHARWFERLLSELQFELWIGDAAVIRTKRVRKQKTDRQDAQLILGLLLENRFPQIWVPSWENRDVRQLLWHRHRMVQARTRIMNQLQAVALNEGLRCKKKLWREAGREQLEAFPLAPWGSRRRHDLLELLDRLTPTITELTQTIEQEAGKCPEARRLRTHPGVGSLTALAFVLIIGRAERFQGGKQIASYLGLVPSEESSGDRRRLGHISKQGNTLLRFLLVEAAQVTVRSLPEWRSKYFHLAMRRGRKIAKVAMARKLAIELYWMMRKGWDYEQVKNFGPHAGQPEHRRGVQ

SEQ ID NO: 364721 - protein, 451 aa, unidentified
MEDEVIKMEVVNPQAAGIDVGSRSHWVAIGQREEDVREYGVFNDDLFSLCDWLKECKVRTIAMESTGTYWQNLYAVLISRGFHVILCNGKFTKNIKGKKTDIKDCQWIQRLHSLGLLSSSFLPDGKTEELRTYCRHRQNLLHESASTSKKMQKYLRLLNLRLDVVVKDTCGLTGLRIIRAICNGEKNPEKLADLRHHNCHTSKADIARALQSNGREDYLFALQQELDMYEYLHKKIEECDLKIEEKLNSIINDDENKKQHHIEPKPHKKVNKNTPKNIDLNLKSYQMFEGTDLLAIEGMSYSTVLALMSEIGVEGIRKFPTAKHFASWLRLAPNNKVSGGKVLSSKVPKGSNNLKISLRNAANAIGNLKDSTPLRDFFMRISFRKGRVSAISATARKLAVIIWNMVVKGVPYNNPEEYLFRDQKKKLGLLKRIQKQITKFELESTDFQFSN

SEQ ID NO: 364722 - protein, 387 aa, unidentified
MTTDHPATEVQTTARANNSKFFVSLELSRSTWLVTASAPGSEKFSKYAVAGGDGRALLDLLDRLRRTAERRVEVSVEVVAIQEAGLDGFWVHRLLENNGIESHVVDAASIAVDRRRRRVKTDAIDGETLLRTLMAWARGERRVCSMVRPPSPAEEDRRRLTRERGTLLKERIQHTNRIKGLLSGQGITDYDPLGKNRHTRLDALKTGDGRALPERLKLEIQREIQRLDLVNAQIATVERERDALVKTTVEADAQNAAAVLSRLKGIGAEFSSLIWLEALFRSFANRRQIAAYAGLAPSPWQSGSTDRDQGISKAGNRRLRHTMIELAWFWLRHQPDSALSVWFRAHVGRARGRVRRIAIVALARKLLVALWRYATQGVVPEGAVFKA

SEQ ID NO: 364723 - protein, 476 aa, unidentified
MNSKTKRANNQVNSVMNVQEQREMVEKANRILNEMKSFTWRDLETHGKFSKNDKLSFISDDMLIIGCDIGSETHYARAIDTRGRELSKKALAFGNDAEGFQKARDWAVQLAAANDKKQIVLGLEPTGHYWFCLAAWMVSNGISVVQVNPYAVKQTKELEDNSQQKDDRKDPKLIANLVKDGNYGMPYLPEKVYAELRRLSMFREQLMEDRNRHMNRLHREMKIYFPEYKDAFGKIDGAFCITVLKEAPFPEDILRLGAEGLRDIWHQAKLRGRGYSRAVEIIKYAETSIGLKDGTAAGKEAVRWFAEQIMELDEELEEIENKLEGKCGEISHAENVLEISGIGGKILSGILAEMGDITRFDDVKEIQKLSGLGLVSCSSGKHKGETRISHRGRKRLRYWLFQGARSAVAHGEEYKWIHAHYTTRAENPLQKKQSLIVIACKLLRVIYTILKTGKKYDPEKLLKDIRYAESVQSAAA

SEQ ID NO: 364724 - protein, 338 aa, unidentified
MQEQQYVGIDLHRRRSVIVRMNDAGEVLGTVRINNDPLKLAMAIAEAGPDPEVALEACYGWYWAADLLVAEGARVHLVHPLGLHWDSRRVKNDVKDATELANRLRRSDLPEAWISPPEVRELRELVRYRARLVALRTSAKAQVHAVMAKLGILPTQVDMFSSTGQVVLDEMPFEGVYGLRVESLRDLLEIFDREVSMVEREIHRLLKDDRGYQAIQVLNGVGPITAAIFVAEIGDVTRFPSARHLCSWAGMTPKLHESDTKSYKGRITKQGSTIVRWAAVEAVVRYHGGDVIAPAYRRIAERRGNKIARVAAARRLLTLVFYGLRDGEIRCVARKEAA

SEQ ID NO: 364725 - protein, 412 aa, unidentified
MEVLYACCCGIDVHAKMLVACLLLENSEKEIRSFSTMTDDLLRLRDWLLAANCTHVAIESTGVYWKPVFNILEDRLELILINPEHARALRGRKTDVKDAEWLADLLRHGLLRPSFIPPLEIRELRELTRYRESLVREQSSVANRIQKVIESGNIKLGQVASDALGASGRVMLWALARGETDPVKLAALAKRQLKEKIPQLRRALQGRLTVNQRFVLGELLQRWEELEAADRRVTQEIDRYLQERPKLARARVILDSIVGVGPRAAEVITAEIGIQMKPVFANDAHLASWAGICPGNKASGGKRLSGRTRKGNTYLRAVLVQAAWGATLKKNCYLSSQYRRLVKRLGAKKALVAVAHSLLVIIYHVLDRDQTYTELGGDYFDRQHVEQQREYFIRRLQMLGLTVNVEDLREVA

SEQ ID NO: 364726 - protein, 347 aa, unidentified
MNFYNNTHPYYCGIDLHARSLYVCIIDQDGNTCVHKEISADPTKLHHLLEPYIGNIVVGVECMHCWYWVADFCDDIGIDFILGHALYMKAIHGGKAKNDRIDSYKIANLIRGGNFPVAYVYPKDMRATRDLLRRRMKIVQHGADLKAHVVNTTSQYNLPPNKVNLKNVSAREHIRSAFPDPVVQRNMDLNMSILECYAKELSKLEWFIEQQAKQHNPVHFHILKSIHGIGRILALTIIYEIGDINRFKSVQDFASYSRLVKCKAESAGKSYGAQGNKIGNAHLKWAFGEAAVIYLRGNDKAKAYLLKLQKRMSKAKALSALAHKLGRCVYFMLKNETVFDERKFLNG

SEQ ID NO: 364727 - protein, 328 aa, unidentified
MCVVDATGRIVREAKVASEPEALIAWLRGLGLELARVGLEAGPLSQWLYAAMRDAGLPVELLETRHVREAFKAMPVKTDRKDARGIAQLMRLGWFRPVHCKSASAQETRALLTARKLLQTKHHDVEMSLRGLLRGFGLKVGPTTSRSFAARIRELVEGHAILTAVADALLAARETLGAQLRGLEKRLRDQARHEKRARLLMSVPGVGVIVALTFAAAVDDPSRFRSSKTVGAHFGLTPKRYQSGETDMTGRISKIGDAGVRTALYEAAHVILTRPVKGSTLKSWAARLAQRTGLRKAKVALARKLAVVMHRMLVDGTPFAAERAAVAA

SEQ ID NO: 364728 - protein, 389 aa, unidentified
MLLDHPSDGPTAIRTHIGAIFVSLELSRSTWLVTSLSPGKGEKMSRHSVTAGDIAGLLKLFAELKGKAQARTGESYPVITIQEAGLDGFWLHRVLQQNGIESHVVDPASIATPRRRRRAKTDKLDGETLLRALLAYKRGEPRVCAMVVAPSPEEEDRRRLCRERQSLIAERITHVNRIKGLLFAQGICDYAPLRRDRRARLEALRTGDGRELPAHLKAQIGRELDRIELLLEQIRVVETARDGLLAAARKPASGKAAPDPVTMLLALKGMGANFAAVLWSEAFYRSFSNRRQVAAYAGLAATPWQSGGIRHEQGVSKAGNPRLRTTMIQLAWLWTRHQPQSALTRWFKERSQQGRKRAIVALARKLLVALWKYVTQGVVIEGAVMKPAA

SEQ ID NO: 364729 - protein, 429 aa, unidentified
MSKIHSQSAQPIVAFVGIDWAEQKHDIVWCSAASVNQTQYQVVAHRPEALSEWVFQMRQRFGSEGRIAIFLEQSRGALIHHLMNYEALALYPINPLQLASYRKAIKVSGDKHDQLDAGLLLQFGRLHFDSLKAWQPDDALTRKLALLNEDRRQAVQKRTQLANELKSALKLYYPLALEILDQDTSTLLAADLLLSWPALELLQNQSPSKLRRFFYAHNCRTESKMLERLERIKAAQALVRDSAIIEATALRVKMLAQQLKSLLPYIAIYEKQIAQLFGSHPDHFLFSDLPGAGPALGPRLLSAFGTDRDRFSSAAEASTTFGIAPIRDLSGKRTAQKPGTVFYRHACPKFLRQSFHEFAACSIRGCSWANAYYEAQRAKGKSHHTAVRALAFKWIRILYACWKNRTPYDPSRYQLALSQRRSPFAPAAS

SEQ ID NO: 364730 - protein, 376 aa, unidentified
MSKLLFVGLDVHADTIAVAVAERDGEVRSQGVIPNRLESIRKLIGKLGPVKQIKVCYEAGPTGYVLYWQLTQLGVACEVIAPTLVPTKAGDRVKTDRRDAEKLARCYRAGELTAVWVPDAAHEALRDLVRAREAAKKDQLKARHRLGKFLLRHGRRPEGMKAWTKKHLEWIKTNVHFDQPALEATLEHYLHEVEHIAERILKLEKAIDDAIQQASPEIRAVIEALQALRGVAQTTAATIVSELGSLSRFESPRQLMGYSGLVAREHSSGNRVQRGSITKTGNAHLRRVLVEAAWAYQHRPNVTGFLLRRQKSLALSDEVKQIAWKAQYRLHKRYRKFAERGKNKNQIVTAVGRELLGFIWAIALNTEEKQKLATAA

SEQ ID NO: 364731 - protein, 440 aa, unidentified
MRLGTRMGNCRVQESAAHRISMSTEKRKVCGIDVHKAFLVATVVDREGKSETRRIQQNSESLLELRDWIQSENCDSVAFESTADYWRSLYLVLESRVPVTVANANHIKHVPGRKTDVTDSRWIAQLELNGLITPSRIFAGEMYDLRSLTRSRELLVQNRTELKNKIHHILDSASIRLSSVLSDLFGKSGTIILQGLVQNKPLEEIIKSLPKKMRGSADAISAALPASIPPVTLVLLQSYLKLVDDLDNEIKLIEGRIRESLTGKSREIQILTSIPGIGFIGASTLIAEIGNVHDFEDADKLTKWAGLTPSVYQSANVTRTGSITKQGSRHIRWILVELAHMAIRSPGRIRTFFERLMPKKGYKKAIVAVSRKMLRIVWHLQVHDEVFVDDFPRCKQVKFPKMPKKIQEIGINRIIELLSKASEVIIKDRNQEIFRLGLSD

SEQ ID NO: 364732 - protein, 431 aa, unidentified
MTNRLQVGIDFSQKRADVCLMFPNGQPLERHQAFGNSCSGYSLAKQLLLDALDSYQFDGVDVSGEATGYYWLPFFLQLAADPELEPHDLNLFLLNPRWVHWYKKCFAQDDKSDQKDSYYIADRTRTHRPDVVWSPQMDTLPLRFYTRFRFHLVQTLACEKCYFSAFLFLKASAYRRLEPFSDVFGATSRLVLTQLPSLDELAELPVEALTDYLHELSGHHLRDPADNARKLQRVACESFPLHPALTLPVQRILELTPDHIRFLEGQIQQVEAWIAAELVPHTAIRQLATIPGVGPVFSSGIGAEIGDVRRFLQGTKWDKRRRRYRSRNLRDAEDAVAKLAGLWWPRSDSGGFEAEDRRMARSGNRYLRYYFIQASNQMRLNISDYADFYARKYREASKHHHKRALVLTARKSVGLVVGLLHRDEPYRSKEG

SEQ ID NO: 364733 - protein, 355 aa, unidentified
MIVIGIDPHKQMHSAAAVAEQTGELVGERTVRARRAGHEQLLVWGRGFAGERCWALEDCRHVSIALERFLLASGERVVRVPPKLMAAARRCGRQRGKSDRIDAVAVARACLREPALPSASLAGGEREIRLLCDHREDLVGERTRIQQRLRWHLHELEPELQLPAGCLDRRCWLERISRRLARREQSLQVRICLELVARCGELSRRADELERELARILQRQAAPLLALPGCGVLTAAKLIGETAGASRFQDEARLAMHAGAAPLPASSGNKQRHRLNRSGNRQLNCALHRIAVSQGRHHPPAQAYLARKQAEGKSRKEALRCLKRHLVRTVYHRLRSLEDEQTRSTSRLTPAPALT

SEQ ID NO: 364734 - protein, 400 aa, unidentified
MGPPIRVAVDVGRNSHHVGIADPQGRILEEFSIPHSQEGFAEFFTRVERHRKELELPVAVAMEGYNGHGRPLDRMIQKKGYRLYNVNNLKLARFREIFPGPAKTDSLDVHKILELFHLKDHLPMAKDVLQEVPRIPAVNQKLKRLTRRRRQLVNEKVRVLSRLQTDLQAICPELLGLPGSVDNLWFLRFLASCDDLVELAQLTPEEIRGIPGVGKKYAEVIRGWQRRAEFSPEVDYVGPMIVADARRILELLQEIAALEGVIGELCRESELARRLRSIPGFGAISAAELAGEIGTWERFSSEASLALYLGMCPLDKQSGQVHGTRPPRQVNRRAKAAMMVAVAHHIWEVPESRAYYEKKRAEGKRHNQAVRSMARHLVRVMWSMFKQGRDYEVREVSCPS

SEQ ID NO: 364735 - protein, 354 aa, unidentified
MPSKVTKPNTSAYPKLMSIGLDIGKDVFHIVGFDHNGKVVLRRKFRRLELDAVFEKLPRCVVGMEACLSAHFVSRRLRALGFEPRIIPAIYVKPFLKGQKNDYNDAEAIAEAALRPNLKLVKEKTQEQLDLQACHRVRSRLVSRRTATINQIRAFLIEHGIAIRTGANSLRRSLPEILLQRADELSPRMRVLIEELHGDWLRLDARIEALNEEIEEISRQEKSCQNLMTIPGVGPLISTATVAAIGNGEAFERGRDFGAWLGLVPRQYSTGGRPILGRISKRGSKYLRTLFIQAANVILMRPQNWPRYSFGAWLVTAATRLHRNKLATALANKLARIAWSVLRYNERFDDAQTV

SEQ ID NO: 364736 - protein, 353 aa, unidentified
MRFYNRQHQFYGGIDLHVKTMYVCILDTAGQVLVHRNVPSTPAAFLEVVAPYRADVVVAVECMFTWYWLADLCAAEGIAFVLGHALAMKAIHGGKAQNDKIDSHKIAVLLRGGMLPQAYVYPAAMRSTRDLLRRRLHLVRKRGQLLAHIQHTNAQYNLPAFEKRLAYPGNRDGVVEHFPDPSVRKSIEVDVALIDQYDALILDLELTIVREAKRHDADAFHRLRSVPGIGKILALTILYEMHDVTRFDRVQEFASYARLVKCRKESGGKLLGTGGAKMGNGHLQWAFSEAAVTFLRHNREGQQLRARLEKKHGKGKARSIMAHKIGRAVYYMLSRETVFSMEKFLAASPGARG

SEQ ID NO: 364737 - protein, 394 aa, unidentified
MTYFVGLDWAAREHAVCVIDGRGAVIAQFTVAHTAAGMADLAARLVKVAPAAELRIAIERPTGLVVDTLVDGKFAVVPIHPNVVKAARPRYSAAQGKTDLGDAYLLADLLRTDGHRFRTLVPLSDETKALRGVVRVRDDLVGQRVATANQLRCLLEQFWPGAAEIFADVDSPIALEFLDRYPTPQSASSLGEKRMAAFLARHSYSGRRTAAELVERLRSAPASVAGELEADAKGECVRALVAVLRPLVAQIATLTATIEHAVDAHPDGKIVTPLFRSGRVCAAQILAELGDDRARFVSADHLAAEAGAAPVTRESGKHRAVTFRWACNMHLRKAFTTLADTTRHTNPWARAIYQRARDRGCEHGHAIRILARAWCRVIWTCWQQRVPRHSRLSA

SEQ ID NO: 364738 - protein, 340 aa, unidentified
MQAIRFGIDLAKNVFQVHGVDAAGRVVVQRQLRRAQVEKFFAAQPPALIGMEACGSAHHWARTLSALGHEVKLMPPAYVKPYVPRNKNDVRDAHGCCEAVSRPDMRFVPIKTVEQQWARALHRTRDLLVRQRTQLANAMRGLLYEMGQTSAQGAAGLEALLQRIETSDEAIPAALLICLAPLAGQWRALDGEIGKLDKQILAQVRQQQAALRLTTIPSVGPIIAHATIAAIGDGRQFASGRDFAAWLGLTRKSHDTGGKHKLTGHISRAGDRDLRRLLILGASSWLRQVRAKPDRGSPWIRGLLARRPVKVAVVAQAAKTARIIWAMLSSGQQYRAPAAA

SEQ ID NO: 364739 - protein, 396 aa, unidentified
MIRVQRKEIAMKNINLNVACAGMDVHYKFSNVTFRDSGGKVVSRQRLDHPDRNQLTMRMNHWPKGIPVVLEASFGWGWLSDLLIEAGLEPKLSNCYKLEQMRKARGWVKTNKKDADMLSLLPFEATDWWQVWRAPVEVRNRREQMRFRGDLVGLQTVVKNRIHAIFHRQGIFHEFSDLFGGKGRKFLAELCLENPAKLSSEALMALRGQVMLLDHLRRQLADVARILRKQLIKSPLIKRLKTIDGVGLILAHVLTAEIGRIERFRTHKALASYSLLAPRSDDTGQDDPARSPLGRHLGTHGNRTLKWAFIEAAHGAVRSGGRWRAMFDRVTDGGKKNRNRGYIKVARELVKVVYVVWKKGVDYQPVAPARPGCRRKKKSRSGTGQLLHPMVHALTA

SEQ ID NO: 364740 - protein, 466 aa, unidentified
MKPFYLGIDVSKGYADFIIINSKKQSVVQGFQLDDTFDGHRSLYNTLGRFLAEHSGSTLFAGMESTGGYENNWYNSLIEFQGSLKIQTARLNPFGVSHNSKADLKKNTTDKISAQNIAEYLVAHSEKVVYQNKDRLAGLRKQWGFIRMLTKQSTQFLNQLNGLIYSANPELLSYCQNGMPGWVLKLLIKYPSAANLKNAHAETVAKIPYVSHQKAQQLIANAKRSVASTKDITTEQLIVATVQQILHLKKIIADQTNRMLCECSIPEIELLKTFTGISDLSAVGLIIEIQTIKRFTGVKKLASFFGVHPVYKISGDGVGGIKMSKQGRKAPRQILYMIALSAIQHNPLIREIYEKHRKEGKHNMAVIGICMHKILRILYGMLKNNKPFNPTIDIANRLRSVRLKKDTPADNKNRRFQKYDQKAPVSRRQRKKRLEREMSQSVCDTHSGITAPVPLANIITNILPQL

SEQ ID NO: 364741 - protein, 365 aa, unidentified
MKKSSTAAATSKKNLDQKLTIGLDLGDRSSWYCVLNEAGEIVGEQALGTTPKAMKEVFTAMPRSRIALETGMHSPWVSRLLSELGHEVIVAHARNVRLIGESRRKDDRLDARTLARLARIDPQLLSPVKHRSAQAQAHLTVIRARASLVRARTALVNTARGLTKSYGERLRGCNPRNLDLEKAQSLSPELQAALGPLLQALESLSERIAEYNRQIEAIAQRSYPQTALLKQIKGVGTLIALTYMLTLEDPHRFRKSRDAGCYAGLQPGRRNSGQSEPQMHISKEGDPYLRTLLVQGAHHILGPFGADSDLRRWGLKLAERGGKNGKKRAVIATARKLAVLLHRLWVSGEVYEPLHNTNRTIVVAA

SEQ ID NO: 364742 - protein, 451 aa, unidentified
MNKTKIAAAFDKPASDPKNNFASASEEPEFGPKKEPEVKPLVRLPVGVDLAKKYIQVCFKDPVTGKIINKQLTRAQFAKFLAGSKYGPMMVGMEACGTCTYWGHFCLDHGHIPVILPAQLVHANNTGNKDDANDARCIWRLLFLPDIETKKIRLRSTDNQDLMSMMKLQESLAKIETQIENIVRHYLLERGVTSNKGAESVMNSLKKYCEDTIEVLGLENERSAMLSVVSSSFCGLMKANISSEQAITDYIISWAASNEKCKLLMTIPYVGPIAAAAIAIYMEDPSYFKNGRQFTALCRMVPYHTGTGGKVEILGIHRNGCSWIKRILFEVSMGMYMRVMKALKEGQNAADGKVPEPLSEWIVNMAKRKPIKKVVCAIAGKLCRISWAVLSSGTPYEQSKSSLIQPSVASPEGKVKSCRTVRKSNFNGVMSSIEAVESFWAAINDEAQQAA

SEQ ID NO: 364743 - protein, 338 aa, unidentified
MNIVFLGIDLAKNVFQLCGLNQAGKPVYTKRTGRKELLQTLANIPACLIGIEASTGAFYWQREFEKLGHKVKVISPQYVKPFVRGQKNDGNDAQAIAVALMQPTMQFVPPKSPEQQDIQALHRARQRIVNHRTATVCQIRGLLLDRGSPLAVLVSRARRAIPLILEDAENGLSSRMRRTIAELYDLFNDPERRIHFFDKEIETVFRQSEACQRIAKVKGIGPETATAVVAAIGKGTEFKNGRHFAAWLGLVPRQHSSGDRQVLMNMTKKGDKHLRTLFIHGARAVVRVATNNNDGHMNQWVNQLKERRGFNKTTVAVANKNARIIWSMLRNDTGYQVV

SEQ ID NO: 364744 - protein, 342 aa, unidentified
MKYFAGLDVSLEETAICVVDESSQIVKQTRAASEPQALSDALRKLDLPLERIGLEACSLTAWLHDGLCAEGLPAICIETRQANAAMKTMPNKTDRNDARALAQIMRTGWYRQVHVKSRQCRLWRALLVARRTVLNEMRSIENVVRAMLREAGVQLGTPSRTAFADRVRELASAEVMAMVEPLLTILGTMLKEFARLTKKVLDIVRREEVCRRRMSAPGVGPITALAFRATIDRPERFGSSRAVGAHLGLTPARYQSGETDIQGKVSRCGDELARTALYEAAHSLLVRSKKWSSLRAWGMNIARRRGMARARVAVARKLAVILHRMWADATEFRFGKEAAGSA

SEQ ID NO: 364745 - protein, 344 aa, unidentified
MKHYVGLDVSVKQTAICIVDETGKIVREAKVTTEPEAVVALLNDAGLGYARVGLEAGPMSQWMVTGLLAAGLPVVCVETRHMRVMLKAQQVNKSDRNDARGIAQMMRVGLYKPVHVKTLASQQERMLLTSRKLLRDKLQDTENELRGTLRNFGLRVGVVSSGRFEARIRELLKGHPPLGAIVAPLLAVRRVFREQFAVLHKMVLDRVRSDRQCRRLITVPGVGPVVALTFRATVDQPQRFAHSKMVGAHFGLVPRRFQSGETDYDGRISKCGDAMMRTALYEAAQVLLTRTQKWSWLKAWGMQLARRRGDKKAIVALARRLAVILHRMWTDGTQFRWKEVNVAA

SEQ ID NO: 364746 - protein, 391 aa, unidentified
MVFDVHKDSVFVCILNEKGEKFEAKYGVLTPELEELHQLLLTHEVKEVTMESTSIYWYPIWRILSDIECLKLVNPYFIKQLPGRKSDVRDAAWIAECTMKDLIRGSFVPDEIVQRMRQYNRRIFDLNKEKVYKLTKLDALLQRCNIRISNYVSSTDSKSYKDVVKLLSEGIVNAEKLTEAIHGRTVNRVGKEVITAALTGVVNEVDIDLIRQYREEILMDDKHLKECQEKLTEICRKEFPREFDNLQTIPGVKERSATSILSELGADMKMFITAAALVSWCGLKPRNEESAGKIKSRRITHGNKYIRKTMIECAWGASRTQNCFYSNFSYTQTVVRRKNAMKVKVAIARKMLVVIWHVLSDGVPYNDYKKPEAIAEATHNIPLIVRPVSLW

SEQ ID NO: 364747 - protein, 365 aa, unidentified
MHKLNSAATLIQRTTTEAPRDHMYYIGLDVHKRTISYCVKDAAGQVHQEGKIGSTRCELDAWIKTVPQPRMIAMEATIFTGWIYDHLLRHAEKIKVAHPLMLRAIAAAKKKNDKIDAAKIADCLRCDFLPECHMASTAIRDRRRTLRYRSLLVRQMVQMKNRVSGLLLETGVSYNKSRLHKVGYFADLMSTNEEVNESIRPLLKISREHIVRAQRLDYALVSSLERDPLLAERLARLRTVPGVGPITALTWALEIGDFMRFRSIKKAISYCGLCGDERSSADKVMRMPLSKQRNKHIQHVLIEAAKLAPRECHELALVRERELEKGNPNRATLAVARKMVSYMLAVERRKQDFVPAENFTCTTAA

SEQ ID NO: 364748 - protein, 335 aa, unidentified
MFYSGIDLHRDNCYITTVDDSGVIVKQQRVPNTPPLVLDYFTTLGNEHRTVVESTTGWYWLNDLLESAHIPLVLAHAKYLKAISYAKVKTDKVDSHTLAILLRMGLIPTAHKISPELRGLRDTMRMRLRLVQQRSACYRRDDSILAKFNAPENVPEPYRIQSAAIDQIVQSLTSQILVLERSLHPLLIPNTDIQHLLNVPGIGKLSAFTIYLEIDGIERFESEKHFFSYCRLVPAADNSNRRMHHHSSKDGNKYLKIAFSDAAVHAIQYYPEYKAFYKKIARRGNTAIARTIVAKELAKIVYHILKNNEPYRGFKGLPISRQKSLQWPRLPSPDA

SEQ ID NO: 364749 - protein, 328 aa, unidentified
MIMLGIDVSKTKIDCCIFPQGLTGKRKNKIFTNTESGFGSLLKWLITLKIEPDQVTAIMEATSVYHENLGYYLYDAGVKVCVANPSRVRAFAKGMSMLNKTDKADSEALSRYGYTAKLIIWQPEPENVRLLKALLGRRDVYLGSLLQEKNRLEKAQSTHTSVVVIKLLEENIEYLNQQLENIDKLINNHIDQDPTLKQDLKLLQTIPSIGERSGLLLLGLFHSHKFEKASQAAAYVGLVPVHQLSGSSVNKQSHLSKAGDSKIRSVLYMSALTAIKYNPHIEALYQRLLSQGKNKMCALGAAMRKLIHLCYGVLKHQTAYQRDYLVVE

SEQ ID NO: 364750 - protein, 343 aa, unidentified
MSEISTIGLDLAKNVFQVHGVDRSGAVVLRRQLRRGAVKKFFAQLSPCTVGVEACGTAHHWARVIGRYGHHVRLMPPAYVKPYLKRNKNDGRDAEAICEAVSRPTMRFVVVKSIEQQATLAVHTTRALLVRQRTMIANSLRAALGELGIVAAPGFEGLRQLMTGLEAPNEEVPEIMRGALLLLAKHWQALDADERVIERQITKAARADGEARRLMQVPCVGPIIASTVLAKVPDARVFRSGRNFAAWIGLTGRDHGTGGKHRPGRISKQGDRMLRALLITGASAYLRQQRMRGVSDPWLRDLLARRPYKVVMVALAAKTARIIWAMLAKGEPYRGRASALAAA

SEQ ID NO: 364751 - protein, 328 aa, unidentified
MFFIGIDVSKAKLDCSLLLDVASNKRRAKVVANSKTGIVDLLAWCTKQQVTVHELHAIMEGIGVYHEQAALALSDAGATVSIVNPAQVKDFGRSLGVRTKTDGVDSFVLARYGALLKPKSWTPPAQEARTLQALLSRREAIAQDLQRERNRLEKADAIDTPPPIRQSINDSIDFLEKQLAKLQQDIDNHINNHPNLKDDRDLLISIPAVGPQVSNHLLSVMHNHDFQSAEQLAAYLGLVPVERQSGTSVLGRPRLSKAGPARIRAVLYMAAIVATQHNPHLKALYRRLQDRGKSKMSALGAVMRKLAHLCFGVLKTRQPYQADYGIST

SEQ ID NO: 364752 - protein, 411 aa, unidentified
MLYVGIDWADDHHDVCCTDDTATTLAQFQIAHSTEGFAALHAQIAQHQADPAAVLVALETTRGLLVYDLLCQGYQVYAINPKAVNRYKDRHVLSAAKDDRLDALAMAHLLRTDRHRFKPLAPAPEHYRLLERLCLDLRKLIDDKTRLSNQITSCLKEYYPQAVGLFRDVASPITLAFLQAFPDPETVQQTDRNAFVAFFRAQHYTHPQRVDALYERTHAPAPVADPVVVRAAKIRLAALIDQLAIVRTHQGTYEHTIQTILEEVPEAQPLATLPGIDTRLIPELVAALGPHRPEAPTRFAAASDLAKLSGCAPITRASGKRRTVLRRRACDKRLRRTFYDWAMASLSWSRWARAYYDHHKAQHQAHATILRGLGQKWAKIVYAVWSSGDPYDEARHIEQLKRHKVVWALSL

SEQ ID NO: 364753 - protein, 393 aa, unidentified
MRFAGIDIASETHVLAVVAADGGVALKATPFTEDDLGYQKVLTLLGTPGEVLIAMEATGHYWKNLFAVLAAAGHRVALLNPLRTHRFAGVDLERTKTDAIDALGIARFAAQKHPAATPLPDALTEELRELVHLRARLLQDFGDRVRQLHRLVDLGFPEFTHYVRTLDSELASAILRDYPTAAAFRGVSVRRLAALRYDGRHHVGLDLARLLIDAARRSVGQHHSATYRLQIRYACDDLDTLRHRLRDLDRDLDGKLREHEVGRLLTTIDGIGTHTAARVIAALGDPAHFRSGSALAAYVGTIPALKQSGKRQSVRSAVTPIGNAQLRAALWMPTLCAVRNNPWLRAYYQRLRARGKLPKVALVACMHKLLLAIYSVAKHRRPFVPHIAIESAP

SEQ ID NO: 364754 - protein, 370 aa, unidentified
MGKSTPLFVGLDVHKDSIAVAHALGQSADPPVFVGTIGTRQADLDKLLRRLRAKTPALVFAYEAGPTGYGVHRYLTGQGVECQVIAPSLIPRKPGDQVKTDRRNAVDLARLLRSGDLTRVYVPTVEDEAIRDLCRARDAARLTQKNAKLRLKAFLLRLGLHYVGRADWNAAHLRWLAKVVCPTAAQQIVFQESVRAVDEQVDRLGRLEAELRERAPAWRLHPVVQALQALRGVQWLVAITVVAELGDLTRFDSPRQLAAFVGLIPSEYSSGPTRRQGGITKAGNGRARRALIEAAWAYRHPAKVSQHIQTRIDVLPKPIQAIGWKAQVRLCKRFRRLTARGKHPNVAVTAIARELIAFMWAIAKEVTVVG

SEQ ID NO: 364755 - protein, 337 aa, unidentified
MEYFAGLDVSMAETHLCVMDRDGAVMQEAKVPSTPADIAAALAQAPACERIVFETGRMAPMLYHGLSRLGLPIVCIESRQAYQALKSLATHKTDRNDARGLAHLARTGFFKPVHVKSLSAHAVRSLIIARKKLVGQRVTLENQIRGLAVVFGVRLPRALTAAFVRQALRASEGIPGLSAAMRGLVAARAAVLAAVVAIDADIRRMVKASDACRRLMGIPGVGQLTALAFTAAIDDPARFRRSRDIGAYLGLVPRRYQSGEVDYTGSISKCGDRRVRTLLYEAANVMLTRYKGSLKLKDWAFAIAKRSTMRKARIALARRLAIIMHAMLRHGTEFKPA

SEQ ID NO: 364756 - protein, 351 aa, unidentified
MSHKLNSTITVIGIDIGKNSFHVVGLDVRGGIVLRQKWSRSQVEVRLANMPACLIGMEACVGAHHLSRKLKALGHDARLMPARYVRPYSKGQKNDFRDAEAIAEAVQRPTMKFVATKTVDQLDLQALHRVRERLVSQRTGIMNQIRAFLLERGIAVRQGRWFLRAELPRILAMPPDVLSPRMVRIISGLAADWRLLDERIEQLSGEITELAKQDSGCERLMSVPGIGPLISSAMVAAIGTGDVFSKGRDFAAWLGLVPKQISTGNRTILGKISKRGNRYLRTLFVQAAWVVLVKVKPSRWEGHGLKHWIEAANKRLHRNVLAIALANKLARIAWSVLARGRAFEANRLQVA

SEQ ID NO: 364757 - protein, 482 aa, unidentified
MKKRTIYANQSQELLSLFEEAGNSAKVLCVPIDYAKKDHVVMFCNGHGDILRKPFSVKNTPEGIKYLTEQVSRSCRHHRINPQHVFFGGEDVGSYAENFANTLRSGGWLVAGINAHDAKKQRANIQASTDRVDLMGIATMMLNRRGNCSPAQSGIYLNLRTLARHRRKLVVMTTEVRNRIHAIVDRLFPGFLDERNSGITPFSKSSLYLMENRFSAMQIRRRRRKPLIESLRGLGTPNPDCAAAKLQEYAHQVLHSPDEYIGTLQISLAQHVKHYRCLQENIEQLEKEIAIWLSQTQGAFMTSVRGIGIVLAAGVSAEIGDPFQQKPMNNLVSYSGIIPRIIQTGGPEGEIYTTKVAKRSNRILKDYVVQSASHLGLHGPEDLMIDHKRRSAAGQHADFGIARRYLRMVMCLMRTSQVYIPPKLRKPGIKPNERATYYLMSWPYLRDKWQKLGALKAAFSEDRPLGRWRNMVQDLYEIKLTL

SEQ ID NO: 364758 - protein, 365 aa, unidentified
MNATAALPVVAVDVANIVFQLAVADGAWRVIEQHRLTRTQFERWFQNRAVGLVVMEACGSAHHWGRWLNALGIEVRLLPALYVRAYVKRNKTDAADACALLEAARCADIVPVKVKSIEQQALQGLHRTRSLWMGTRTSRINALRGFCREFGIVIAQGARLGVERIARVLADPHSGVPELIRGTMKLLIEEIRLLEARVSQLERELTVVARASGACTRLLTIPGVGLLTATAMVAATSGGVQHFRDARHFASWFGLTPKERSSGNTRLLGRISKRGDRYLRMLLTHGARSVLHASSRAVQAGKSVDSLRQWALAVQQRSNHNKAACALANKLARICYATLRDAQPYGEPLRRPEKKIARTSFELAP

SEQ ID NO: 364759 - protein, 455 aa, unidentified
MYLPDWKWIPIRKGLLLMSNKVIFNLDELFISVGIDVGADFSWMSIALPNQQFVGKPYKILHNSIDSLTTAVSKIKEAEELYSLESRIFLESTGIYHYPLFCYLRDKGFNCSVINPIITKNSTNINIRKVHNDRFDSKKAALVGLKSDLKVSLMPSDLALNCRNLCREYYDLMDNRSAYVNKLQGELRMAFPQYLGIFSKVTINTSLTLLETYTSPSAFLEADKQEIIDIIKSTARFGLTYAQNKYNAIIQAATDANQFGYIIDSNIKRIRLYISFIRKYDEEINSILESLHELVDANEDADFVKQIHLIETFKGAGFLSAVSIMGEIGDFSAFSKPKQLFAYFGLDPAVKQSGKFEGTKVQMSKRGSAIARRVIHMLTLQSISISRNGEAKNPVLREYYLKKCDSKPKLVAMGAVSHKVCNMIFAILRDNKPFKIIAPQEHIKQYNAAKCDIAA

SEQ ID NO: 364760 - protein, 393 aa, unidentified
MHLNVGIDVAKSVHEACILDDEGKQVGKHFRIKNSKSSIEKFIERVELVSNRLNSIPRIGMEATGIYWCAIYSELSKHYEIHAYNPSQVRGFAAVNVRGSKTDKIDAKTIAAILRFGEAPKTCYGDKTRMELKEYCRFYFKLKSNVVNLKKRLIRNIHLIFPGYDQVFSSIFTKTSIAILNEAPRPSDMLEMGEEKLYELMKKTSRNHYSPEKTRELLEMAKDSISLDFIEEALLFEVESLLNLIEYMEGQVKEVETKILAAWETVKDKHYLQTIPGISDLMAAIIWAELGDVENFQHPDQIVAFAGYDPKVKKSGNKEVISGPNKRGSRLLRWVLGRAVVQARLHNPVIKPYFMKKISEGKHYNTALCAAAKKMIRIIWSVEKNKKPFKIPR

SEQ ID NO: 364761 - protein, 401 aa, unidentified
MVSDFKKGRYNLMKIFVGIDIAKLNHFAAAISSDGEILLEPFKFTNDADGFQLLVSKLESFDKNSIIIGLESTAHYGDNLVRYLVAEFYQVCVLNPIKTCQMRKNNVRKTKTDKVDTFVIAKTLMMQDDLRFITFFDLDMMDLKALGRFRQKTIKQRTRLKIQLTTYVDQVFPEIQYFFKSGLHQHAVYALLKEAPSPKEIASMHMTHLANLLKVNSHGHFTKELAKELRVLAQKSVGANDSAISIQITQTIQQIELLDSQLEKIEAEMTDIMKFNDSVIMTIPGIGYINGGMILGEIGDIHRFSNPNKLLAFAGLDPSVYQSGNFQAKTTRMSKRGSRVLRYALVNAAWNVVRNNATFKAYYDAKRAEGRSHYNALGHCAGKLVRVIWKLLTDEVEFNLE

SEQ ID NO: 364762 - protein, 338 aa, unidentified
MKIMNVGIDLAKNVFAVHGVDENGKAVLVRPSVRREQLLELVAKLPPCVIGMEACSGGHHWARAFTALGHTAKLMAPKFVAPYRMAGRRGKNDAADAAAICEAVQRPNMRFVPIKDIDQQGVLCIHRARQGFVEERTATINRIRGLMSEFGMVLPKKADTVRKQAAQALENLPGWAKRAIDDLLTHLQTLDERVTEYDGHIKELAKADARSVRLMKMPGIGAITASALTASIGNGHDFKCGRQLSAWLGLVPGQYGSGGVVRLGYITKAGDPYLRTLLILGARSVLAAAGTKTDRMSRWATSVYERRGYGKALVAIAAKNARIAWAILAKGEDFTKPA

SEQ ID NO: 364763 - protein, 390 aa, unidentified
MIYVGVDIAKLNHFASAISSDGEVLIEPFKFTNDADGFQMLVSKLISLNAEPDSIIIGLESTAHYGDNLVRYLVAENFQVCVLNPIKTSTMRKNNIRKTKTDKVDTYIIAKTLMMQGSYRFYTFYDLDLMDLKAMGRFYQKTIKQRTRLKIQLTAYVDEVFPELQYFFKSGLHQKSVYALLKEAPTPETIASMHMTHLASLLMKNSHGHFTRDQAKELRVLARKSVGTSDSALSIQITHSIAQIELLDSQLNRIEEEMTDIMKFNDSVIMTIPGIGYINGGMILGEIGNIHRFSSPCKLLAFAGLDPSVYQSGNFQARRTKMSKRGSKVLRYALINAAHNVVKNNATFKAYYDVKMAEGRTHYNALGHCAGKLVRVIWKMMTNDLEFNLH

SEQ ID NO: 364764 - protein, 411 aa, unidentified
MRRIHDRVAGLDVHRDSVTACVQVYAGRRDPEIDKFRFSTTAAGVRELADWLAEREVTLVVMEATGVYWKPVFYVLEDLFDQVWLVNAGHVKNVPGRKTDLSDAEWLADVAAHGMVRPSLVPPPPIRALRELTRYRKTQITARGVEIQRLEKLLQDAGIKLSSVASKVWSRSARAMVEALIAGERSPATLADLAKGKMRDKIPALVEALDGRWQPHHSAVARHILAHIDFLDAAIASLGEEITERLRPYEAAVTVWCTIPGVSQTTAEVIVAETGADMSRFPTAGHLASWAGVAPANHESAGKRRPAGTRQGARWLRATLIEAAKAAARTKDTYLAARYRHITRRRGPNKATVAVAHSIIVAVWHMLNTGQTYQDLGPGFIERRNDPEREAQRHARRLAELGYRVNLQPVA

SEQ ID NO: 364765 - protein, 369 aa, unidentified
MGHPTEVFIGIDVAKARNAIAIADGERDGEVRFIGEVDASPDSMKRILQRIAAKYDVVHCCYEAGPTGYGRYRMIVELGHSCTVVAPSLIPKRAGDRVKTDRRDSIMLARLLRAGELTAVWVPDAGHEAMRNLVRARAAAVETQRIHRQQVSAFMLKHGRIFPRKTTWGARHFRWLQEQRFDHPAHQIALQELVDAVRVAKERIVRIEAAIEEFLPGWSLAPVVFALRALRGVELIVAVTFVTEIGDMRRFDNPRQLMGYLGLVPGERSSGDTVRRGGITKAGNGRVRHMLVESAWTYRHPPRVGKAKLYRLEQTTPKVREIAWKAQSRLTARYRSLIAKGKKTPVVCTAIARELAGFMWAVSREVQPA

SEQ ID NO: 364766 - protein, 385 aa, unidentified
MTIQIQVPRFIPRDYDVFAGLDVDKKSMAVIFTNHDGPMRALRMAHSAKPLLNYVRKHFPGQRVAFAYEAGPTGFGLHDELVTEDYTCLVVAPSKVPRASDERVKTNRLDGRKLSESLRGGQLHSIHVPTRAYRDLRHLVQLRDAHVRQLSASKLRIKSLLLYEAIPFPDPQEKWTARAMRELQTLPCSETVRFKLDDLLNTLHFHFQAAAAATKQIRQHCLGDPELQQSISLLLSLPGIGWIVASHLVARLGDPQQITNGKQIAGFLGIVSSEHSTGEKQNRGEITRTGDSRLRNKLIQSAWTAIKKDPELRAFYRRIYQRHPKKVAARKAIVAVARKLTNRIYVVLKEQRPYVVRPDSSIAPLTAEETVGPRDRLDGAQNDQS

SEQ ID NO: 364767 - protein, 351 aa, unidentified
MEKIVKQVAAIDVDQKLLVTTLGRMYDDWSPELYTQKTFTNTQKGFEALLAWVKKNTVNEVCVRFVMEATGVYHERLAYFLDDQGEEVTIVLPNKISNYMRTLETKTITDKTASEAIGRFGLERKLELWKRPKDIFKKLRQLSRERDQLVTERTMVKNQLHAEEAEAEPNRSSITRIKARIKMLNKQEQEIKAELSSLVCSNDEIKKVVVLLCSLTGVGILTATAVLGETNGFELIRNRRQLASYAGFDVKEKQSGSSVKGKPKISKKGNKYLRKAMHLPVLAAIRHDERFKAVFARIVSRHGIKMKAAVAVQRKLLEMMFTLYKTNTKYDPQYLINKNTPTEATFSSYNK

SEQ ID NO: 364768 - protein, 347 aa, unidentified
MKHYAGIDVSLNSSNVCVVDESGKVVREVKVPSEPVALIRCIKSLGVRVERIGLEAGPLSQWLYGALRECELPVELLETRHVKAALSAMPVKTDRNDARGLAQLMRLGWFRPVHCKSMAAQEVRALLTARKLVQSKLYDIEMSLRGILRGFGLKVGPTTSRSFAARINHLASGHPSLKMVAEALLSTHAAALCAFKNLEKNVRQISRADARVRLLMSAPGVGPLVALTYVSAIDDPKRFTSSKRVGAHFGLTPKKYQSGETDISGRISKIGDSSVRAVLYEAAHIILTRPIHGGALKSWAMRLAKRAGMKKAKVALARKLAVVLHRMWVSTSIFDFEKANGCMHAVA

SEQ ID NO: 364769 - protein, 328 aa, unidentified
MNSSSSDWPAAPLVLGLDVAKASVQGELRLADGRKVGCSFPNNAAGFAQLARLLQRHQVTTLCAGLEATGPYSQPLAAWLHAQGHRVSLLNPRRVKDYARSAGARNKTDRIDAALIADFLLAHQPHAWTPPTPAVAQLQALVRRREQLSLLLQGEKNRLEGVEASVRASIQRLVAALGSEKARLEKSITQQIRAHHELAHKHELLTTIKGIGSLTAAILLAEMAGPDQVARARQAAAHAGLAPRREESGTSVRRRKGLGKEGNPYLRKALYMPALVALKYNPPLRAFAQRLTAKGKPKMAVVCAVMRKLLHIAFGVLKHQQPFNPSLA

SEQ ID NO: 364770 - protein, 403 aa, unidentified
MLYLGIDLHLKQMTVSLRNEDGDVVLRRQVSTRWPKLEEFREQLRQVAAADEKYVAIVEVCGFHDWLVKWLQQDERCHLVLVVQALGRLATKTDRRDANALSELLWINRERLLRGDRVHGVRTVHQPGEEQLADRRLTAMRERLVRRRTQTLNQIHKILRRHNLEWERPTKTFQTGKVAQWLKTLPLEPMDRLVLNQLLVQWKLWEEQIAKVDTRIGERFLADPDAQLLAMIPGVNAFIAVAIACRIAPIARFPHGRSLANFLGLTPGCRSSGETERMGSITKMGSRIVRFLLGQVIVHLQRRDGTVRAWYQRIKRRRGANIARVALMRRTATIMWRMLTTREAWRPGSAAADSAAEEPRQVRPRRARRTVLSALSVSEAASGAASTGSSSLLTGEEVPPCQA

SEQ ID NO: 364771 - protein, 417 aa, unidentified
MNSPPETIPIQRYIGIDIHKDYLMTGGQNRHQEWTLRPRKVQVSRFRDWAEKNFQPGDAVVIETTGSVWDIYEIVAPLVSKTLVAHARKVRQIAEARVKTDKEDIKRLITLLIADIVPEVWVPPMHVRELRSLISFRWRLTKQITMSKNRLHSVVQRFNLNAPEGGLLTDTNKSWWEEQEFSDLTGFEVKQDLEIVKTLEGQKEAIDQKLAELSNTEPWASDMVYLMQIPGFGLIFSMVVLSAIGDISRFSNPKKLVGYAGLGAGVHDSGKKHQGKSITKEGRKELRWALVEAAWRAVGSDPYWKAQHKRLEKRMPRNKAIVAIARRMLVSIWHILTKRETYHHFDEETIAYKMLIWAQAIGEEGRQGLTRQQFAKYGLLRLGIGKDLERIVKGGGPRRIASTEEVLALKPELAPPR

SEQ ID NO: 364772 - protein, 343 aa, unidentified
MEYYAGIDVSLKESSVCVVDATGKLVREAKVGSEPECLVGYFDQLDFPVERIGLEAGPLSQWLYAALVAAGHEVVLLETRHVKAALSAMTVKTDRKDARGIAQLLRMGWYRPVHAKSSPAQDTRALLVGRKLLQSKLLDVELSIRGILRGYGLKVGEVSRGRFEARIRELIAGHATLSMVIDAMLTARAALWSEFTKLHREMLRIARADKVCQRLMSAPGVGALVALTYRSAVDDPARFEKSSTVGAYFGLTPKKYQSGETDRDGGVSKVGDAMVRTALFESAHIMLTRASRFSSLKRWALDVARRRGMKRAKVALARKLGVVLHRMWVDATEFRWSASPMAA

SEQ ID NO: 364773 - protein, 318 aa, unidentified
MAHLKSVVGIDVSKLRLDCHGLPGEQARQVANDAAGHRVLIEWLRPLSVELAVLEASGGYEQAVVKALRRSGLAVRVVDPKRVRHYAKAVGGLAKNDRIDARMIAQFATVAGAAMRRCEVVADPTRARLGMVLGARQDLIAHQTALLQQAAAAGPARRALAAAAGTMARQIARLDRLIADDIHRHPAMAALARRLASVPGLGPVATAAIIAWLPELGRLSRGEIAALVGVAPFDDDSGKRRGQRYIQGGRAKLRNVLYMATLGAATQHNPVLKPFYLRLLANGKEPKVALIACLRKLLVMLNAMLAREQDWQPRITAA

SEQ ID NO: 364774 - protein, 329 aa, unidentified
MFVGLDLHKNYLQAAVMDEQGRILSQERIPNKDESIEEFTEKRLKDSHAEIVIESSSTWYHVYELLSKNENCHVVLSNPVKTKAIASAKVKTDKVDALTLANLLRTGYIPESYIPPRHIMDLREMVRYRTSLARMRVEAKNKIHAILLQNGTRIKEKPFTIGFVEQLRRLEDYRIDGYLNVISSLSQQIHTVSNTIKREAVEDESTRLLMTIPGVGYFSALLILSEIGDVNRFPDSHHLCSYAGLTPSTHSSGGVTYHGSITRTGSRYLRWILTECAKAHIRSRKDSQLTRFYTRLAKRRGGSKATVAAASKLLRIVYWVLKEKRPYHG

SEQ ID NO: 364775 - protein, 341 aa, unidentified
MKNLFIGVDFSKEKVDVAILFADGLVETAARVFNEFKTTVSGYRQLVKWVEQNSCGIDSSLWLFCGENTGDYSKGLCNFLYGKGYDMWLENAKNIKDASGLRRLKSDRADASMIAEYAMRNYDKAVMYEPLSESLTQLRELFLYRQMIVRHRCSFQVRRGEKRLTMEKSPVKTMISQSGRHIVSELNKEIEKIDKRIADLIKSDEELTEVFTIVTSVPGIGTQNAVCLMVYTDNFRRFNYDSRKIACYYGLAPFGKDSGTSVHSDPHVHYMANRQIKAMLTQAALAAVNFNPIMARYYMRLVKRGKKKQVALNNVKNKLVHLVTAMVRNRQTFTPEYKISA

SEQ ID NO: 364776 - protein, 418 aa, unidentified
MINSKLIVGIDIGKRIHVATIIDGTGQAIGHPISFPNTTSGAELLLSKISSVNAGILPVVFGLEATGHYWLALYSFLTKLGYPVSVINPYQSDAWRKVYLSSVKTDKEDSFLIADILRFGNSPETKQASETVISLRNLSRFRVALTQQITDTKRRIITILDQIFPEFETLFSDLFGKTAKVLLEEYPTPESIEQISLRKLTNLVKKLSKGHFKQTKAEEIKQKAQTSFGINFAMDSFRLELQLLLQQLTFLEKQITVVEKEIRQTMTGVETTLTSLPGISTILAAAIIAEIGDIKRFKTSSQLVSFAGINPTVRQSGQFTGTRNRMSKKGSPYLRLALWQAAITSVRFNPVLKEYYQQKVKEGKSHMTVIGAVSRKLTGIVFALMRDNQLLLALANVAGNVVTGVVAVTAGWFLAKLV

SEQ ID NO: 364777 - protein, 338 aa, unidentified
MRDFFVGVDVSKAELVCRVLDEKGQEQGTGSFANGAAGFRKLKKFLLGLDVDGRFHVGMEATGVYHRNLALFLCNSGERLVPGVFNPASVKAFGQSRMSRTKTDGQDALILARYTLELFRDGTFRPWEPERPEVAQLQQLVSRREQLVSMKVSEQNRLHALEEDGGSLPFLVESVRDEILHLEDRIREVEKMIGRHMEGHPKLKADKDLLISIPGIGQITAATWMGHLGDLSRFGNPSQIVAHIGIAPRERQSGSSVRGKPQICRTGLKELRCALYLPVMAAATRLNPVLKSFYERLVTSGKRKKAALIACMNKLVHIIWAIMKSRQPFDPNYALARN

SEQ ID NO: 364778 - protein, 392 aa, unidentified
MIFVGIDVAKNKHDCFITNSDGEVLFHSFSITNNLSGFTELYQNILSVMDGVNKVKVGLEATGHYSYNLLGYLLDKGFPTYIINPLHTNLYRKSLSLRQTKTDKVDARTIASMLMSDVNLKSYSDTSYHNEELKSLTRYRFDKVKERSALKVSISRLVCILFPELENLVPTLHMTSVYTLLFEFPGASYVASAHLTKLTNLLSKASKGHYDKDTAVLFRETARNSIGSVMPAKSLELKHTIKLIQELTSEIDEIEAAIKQIMDEEIKSPILTIPGISYRMGAMIIAEIGDFSRFDSADKILAYAGMSPSTYQSGQLDNCHSHMEKRGSRYLRYALYNATKYVCHWDKSFGAYLEKKRSAGKHYNVALSHAAKKLVRTIFAMEKSGQPYIAAI

SEQ ID NO: 364779 - protein, 346 aa, unidentified
MTRYIGLDAHSESCTIAVLGGSGKRLRHERLQTSAELLKSFIKEVPRPRHLCMEEGTLSEWLCEELTPLVDKLVVVMPDRNPGNKSDLIDACKLADDLRRDAIRRPVYKAPGCFRALREAARTHYVLQRDKVRTKSRLSALCRGCGRPELAKALYGLNTRPDALQELPEHLRPRAALFGQELDALVECAVQAERSLQEESGRVPIVRRLATAPGIGVVRAAYIVAVVMTPHRFRTARQFWSYSGLAVVTRSSSDWVSEGSGQWRRSKTQQTRGLNHNRHPLLKNVFKGAALQITLMPEHPLGQAYQRLLTTTKPNLARLTIARRLAAAVLAMWKNEKDYEPAKHLM

SEQ ID NO: 364780 - protein, 366 aa, unidentified
MRKPSTKAVRGKGKLQDQQLTIGLDLGDRSSFYCVLNGAGEVILEERVATNPEAMKKTFEKMPRSRIALETGTHSPWVSRVLSELGHEAIVAHARNVRLIGESRRKDDGLDAQALARLARIDPQLLSPIQHRSAQAQADLSVIRARYALVRTRTALICAARGLTKSFGERIRSRYIRGFKPAMGDTLSPQLRFALGPLLSALETITARIREYDAQIEKLAEESYPDVALLKQVKGVGTLIALTYILTLEDPRRFRKSRDAGCYVGLQPGRRNSGQSEPQLHITREGDSYLRMVLVQGAQHILGPFGEDSDLRRWGLKPAERGGKSGKKRAIIALARKLAVLLHHLWISCEEYEPLHNARKRRLAAA

SEQ ID NO: 364781 - protein, 427 aa, unidentified
MNQLNNDETQNNYAAFIAIDWADRQHVFSLQVAGQTTKENGTLEQKPEVIGPWVAKLRERFGGRPVAIAVEQSRGALIHALMTYDFIVIYPLHPTTVAKFREAFKSSGAKSDPLDTDQILQILTKHRELLKALNPDTEQTRLLARLVEDRRKAVDLRTSHVQALTAALKEYFPQALELVNENLTSRLACDFLIKWPSFEAFQQAKPSTIKRFYYGHNIRSPEVMEKVLGLVKTAQPLTTDSAIVQSGSRLSQMYAQLIRTLNSVIVDYEERIEKVFHDHPEANLFNKLPGAGPALAPRLLSFFGTDRSRYEAAGNVQSFSGIAPVTKSSGKTRVVYFRHACPKFDRQTFHEFARLSVSKCQWARNYVDYYTAKGKKFHTIIRALAFKWIRILFRCWKNRAPYDETKYMDNLKKRGSIFATLHLEQKS

SEQ ID NO: 364782 - protein, 343 aa, unidentified
MERVYYIGLDIHKKTISYCMKLHDGTVVGRGVIATERRALWQWLNKIPGPWKGAMEATMFTGWIYDFLKPHALELKVAHPEMLKAITAAKKKNDRDDAEKIADLLRVNLLPECHMASEEIRQLRRVLRYRNMIVRTSVKMKNKISGLLMEVGASYNKKRLHGKKYFNTLLERVEDVPPSVNELLKLSRSGLEMFQGVQRKLLDTLHDNALIRERVRRLMSIDGIGEVTALTWVLEIGDFGRFSSVRQVISYCGLCSAQNESAGKEQRGPISKKRNKHLQTVLIEAAKLAPRWNQHLAEIHARELKRGNHNRATLAVARKLVTYMFAVERRQREFRKEPVLEAA

SEQ ID NO: 364783 - protein, 441 aa, unidentified
MSREPEQVHDSDQEVRLERVAAIDVAKASGKVCTRLPHPSQPHRRVTLVWDVAATTNAICMLAQQLVTDGIERIVLESTSDYWRPFYYVLEAHGLTVWLVNANDVKQVPGRPKTDKLDAVWLAKLNERGMLRASFVPPKAIRDIRDYTRLRHDLVADRTRYKLRLEKLLEDALIKLSTVATNFLGLSGRAMIDALIAGQRDPQKLADLARVKLRVKHAALVEALTGRFDDHHATIAATLLRQIDTLDTEIDATTNIIDQLITQIPTGHTGDGQATPDADAPSTLQRLDEIPGIGPRIAQIIIAETGADMTQFPTAGHLVSWAKLSPRTIQSGPKNRRGPTGKGNPYLKSALGEAAAAASRTDTFLGERYRRLVKHRGKGKALVAVARSILVIVWHILAHPTTKFVDLGAEHYTTRINTDRKIRNLVRQLEALGHTVNLTTT

SEQ ID NO: 364784 - protein, 438 aa, unidentified
MSNNVIFNFDDLFISVGIDVGADFSWMSIALPNQQFVGKPYKILHSDMNSLTTTVSKIKEAEELYSLESRIFLESTGIYHYPPFCYLRDKGFNCSVINPIITKNSTNINIRKVHNDRFDSKKAALVGLKPDLKVSLMPSDLALNCRNLCREYYDLMDNRSAYVNKLQGELRMAFPQYLGIFSKVTINTSLALLETYTSPSAFINADKQEILDTIRSTARFGLTYAQNKYNAIIQAANEASEFGYIIDSNIKRIRLYISFIRKYDEEINNILDAMHELVDANEDTDFVKQIHLIETFKGAGFLSAVSLMGEIGDFSAFGKPKQLFAYFGLDPAVKQSGKFEGTKVQLSKRGSAIARRVIHTLTLQSISTSRTGEAKNPVLREYYLKKCESKPKLVAMGAVSHKVCNMIFAILRDNKPFEILTPQEHNKQYNAAKCDLVA

SEQ ID NO: 364785 - protein, 406 aa, unidentified
MRLFAGDDWAEDHHDVELMDATGQVLARRRLPEGVAGMARLHELTGQQLGEAGEDAEVVIGIETDRGPWVAALVAAGYTVYAVNPLQASRFRERLGVSGAKSDPGDPHMLADMVRTDSHQLRAVAADSAEAGGIKVVARTHKTLIWERTRQVQRLRHQLREYLPAALEAFEDLAAPDALELPGKAPDPARAARLTRAQVSAALKRARRRAIADQTTQIIAALRSQQLARPAALTAAYAVTVRALAAVITTLNEQVKALESQVEAHFGQHPDAEIYLSQPGLGRILGARVPGEPGDDPHRYPGGRARKNYAATSPLTRASGKKKTVTARFIHNDRLIDALMAQAFSALNVSPGARALYDDLRARGIEHNDALRRVANRLAGILHGCLKTRTLYDEATAWSHRQNLAA

SEQ ID NO: 364786 - protein, 332 aa, unidentified
MYYVGIDISKRFIDVCLLVDGIKGKRKTKVLPNGPNSAQALAQWLTLQKCEPSQAHIIMEATGIYHEHLAYGLHLANILVSVANPHRVREFAKGMGILTKTDKVDAYVLACYGYLKQPENWVPPSQEIRKLRALLQHRDSVLDDKQRVENRLSTLKSTVAPEEVLTSLESIERNLKDELARIERLIAEHIDKHPRLKNDLKLLQSIDGVGEQIGWNMLAIIRGNHFRSAEQVAAYLGVIPVERRSGTSVCGRARLSKIGPPGIRAKLYMGAIAAISWNSHVRALYERLRLKGKAKMVAIGAAMRKLVHLCYGVLHTQQPYDKNYGMTTHKNA

SEQ ID NO: 364787 - protein, 344 aa, unidentified
MLIVSLDLGQSKTAVCMFDTRTSEVVHRSVRSTPEALHELMVELEPDRVVLEIGPTAGWVHDLARSLEIEVQVANPNHEGWRWRRTKHKSDRKDALKLASLSAMDQLPTVHMPSPARRAYRQLIRYRQTLVGRQTAVKNSIRAILTREGLSLPPGKRGWTKQQRAGLERMTWADDACWRSMLAVELEQLAGAEAALARVEQRLEEIGRRETGVALLQTIPGVGPRLAEAVVAVLDDPHRFRRGRHVASYVGLAPRRYQSGSMDRQGRTSGQGDRMLRSLLVEVSWLGLRHNPWMRQVYERALRGSDSRKKIAIVAVARRLLIRCWAMLRDGQPWRPAAELRLTA

SEQ ID NO: 364788 - protein, 344 aa, unidentified
MVTIGIDAHKRTHTVVAVDEQGRQLAQRTTGTTSADHLALVAWAAKLGGERLWAVEDCRHLSRRLERDLLTAGERIVRVPPKLMANARDAARSFGKSDPIDALAVARAALREPGLPTARLDGRERDVRLLVDHREDLVQERTRMISRLRWHLHELDPSAEPVPRSLNHLRNLELLASRLDGVAGTVARIARELTDRCRQLTVEIKELEKEITVLVVTLAPSLVAICGCGPLTAAKILGETAGIERFKSNDAYARHNGTAPLPVWSSNKQRHRLSRSGNRQLNAAIHRIALTQAHWHPDAKAMIARRRSNGDGGLEALRVLKRRLSDVVYRALKADAAIELLLAP

SEQ ID NO: 364789 - protein, 356 aa, unidentified
MSNYITIGMDLGNRKHTVCALDQTGNVLWRKDVANTPEALKPFFEENAGATVAMETGLCCRWISALAKSCGCDVLVGNARKLAAIWQSKQKNDENDALLIAELARASRRLFHPVELRDDERHEMVQLIELREVAVSQRTQAVNSVRGLCKAHGVFIPKCDASCFHKVAADAIPDGMAWKFKPMLRHLKEVAATIKRYDAMLEEYAQKHFKEEVELLRTVPGVGPITSCAFVALIADPGRFGSARDAGAYFGLTPGQDKSGDKDAPKHITKTGSALMRHLLVTAANHILRASSPDTALKRHGERICARGGKVARRKAKTAVARKLAVVMLAMLKSGKAYDDGIAAVKAGAGESTVAA

SEQ ID NO: 364790 - protein, 311 aa, unidentified
MSTATVWVGLDIAKAHIDVHVRPTGAAWRVANDDAGHATLVSSLAACQPTLIVLEATGGYETGIATAVALAGLPIAVVNPRQVRDFARATGRLAKTDTLDAAVLAGFAEAVQPTPRPLDDAATADLTALVQRRRQLVEMLVAEKNRMETARPAVRRNLQQHIRWLERRITDQETDIAARIRTSPVWRERDDLVRSVPGIGPTTASLLITGLPELGQLRRRQLAALVGVAPLNRDSGQWRGVRTIWGGRADVRAGLYMATLSAIRVNPAIRTFYRRLRAAGKPSKVAIVAAMHKLLTILNAMVRNNELWRKA

SEQ ID NO: 364791 - protein, 406 aa, unidentified
MHFEKKQLYIGIDIHVREHKVAIVPAFLFEQRGALWKRIKTINIKNQRDDFDHLDNIIKEQVSNKEDAVIAVDHTGGHYSEPIAYFLLKRGYQVYYLESKGIKAARERLLDQESKSDEIDSISAAYMLYLRDTQGLSFRISLMNYELGTQAAVINSLILHRWHFSKLITHVTNKLHQLLIATFPEGESRYFKKLMEIIPFYPTPGNICNGNNLNGVERIKEKDRESIIQLATNSIGVPDSTYEWLIKELGSLRLDLIQKRETITSMLRAQLNVHDYSEILYSFPHMGEITTGTIIGIIKNIDNWPDKKKFKKALGIYSTLKQSGSKHRGGKGKEGSRHGRRVLFQTCLGCIRKNAVENDFKDYYMRQVAHGKIKMKALVSTMGKLAEIIYHCLKNRELYKYQGIYR

SEQ ID NO: 364792 - protein, 339 aa, unidentified
MKITRMGIDLGKSAFHVHAVDRSGGVVVEKRLTRRGLARFIEELEPCLIGLEACGGAHHWARRLRGMGHDARLMSPQFVKAYVKSNKNDFRDAEAICEAVSRPSMRFVPVKSVEQQDVQHLHRIRSQAVAHRTALVNQVRGILLEYGITIGKGIGQVRRRLPEVLEDADNGLSGSMRALLAELGEEIRHLDERVGRFDARIVEISRATPACRRLERIPGVGPVTSTALTAAVGDGSEFGNGRELAAWVGVVPRQRSTGGRAVLLGISKRGDQYLRSLFIHGARAALRTAARREDRRSRWALEVQHRRGTNVASVALANKNLRTAWALLTQEVEYDATAA

SEQ ID NO: 364793 - protein, 344 aa, unidentified
MNKLSRVGIDLAKNVFQLHGVDRHGKSAWRRRLTRDNWLKVLLDKVEPGCVIGMEACTGAHHWARQLQAKGFTVKLIAPQFVKPYVKSNKNDAKDAEAVCEAMSRPSMRFVAVKTVEQQDIQATHRIRSELLGQRTSKANQIRGLVAEYGLVAPQHLARLRAAVPDWLEDAENGLTSRFRGLLNGLWDDLKRLDYRIAELDREITSMAQNDPVAKRLQQLRGVGPLIATALVAAVGNAEQFANGRQMAASLGLTPKQHSSGGKDRLLGISKRGDAYLRSILIHGARSVIRTAKHKDDRLSQWVTSLAARRHANVAAAALANKTVRIAWAMLRHGTDYQPDRIAA

SEQ ID NO: 364794 - protein, 413 aa, unidentified
MDVVYRCCAGIDVHKERVLVNLRRKGVEGKANLEEVRTYATMTRDLLDLCEWLQSEGCTHIAMESTGVYWKPIYNILGDSFQVILVNARHMKALPGRKSDVMDCQWIAQLLQHGLLKGSFIPSEPIRQLRDLTRQRRKLVDQRAAAINRIQKVLEDANIQLASVASDVTGKSGWAMLTRIVEGETDPTALADLALRRLKSKKPALQRALDGRITDHHRFLLRQHMRQIRFLEQMIGEYEKRIEEIVRPFEGAIPLLDTIPGINQTAAVAILAEIGPDMRQFPDHRHLCSWAGICPGNNESAGKHKSGVTRKGSKYLRAVLVECAWAASRTKDTYFRAQFRRIASRRGTKRALVALAHTMLTVVYHVLRDGMIYQELGVDFFDRLNHGRLRSYYVKRLKSLGYTVEIKEPPTAA

SEQ ID NO: 364795 - protein, 334 aa, unidentified
MQTVTLIGIDLGKHSFHVHCQDRQGNALLRKKFSRSQLATFLATCPACTVVMESCAGAHYMARTVSQLGHRVKLIAPQFVRPFVKSNKNDFVDAEAICEAASRPSMRFVTPRTEDQQAMSALHRVRSSLIRERVKTTNQMHAFLLEFGISLPRGSVVIKRLPSVLEENDIPPYLERLLTRLHTHYGYLSEQIKEIDNELKTHLDEDETAQRLLTIPGVGPVTASLLATRLGDGKNYASSRDFAASTGLVPRQYSTGGKPTLMGISKRGNKMLRSLLVQCARAFMRRLEHNPGRLAEWVKKQLASHHSNVVACALANKLARIAWAVTAHQTEFSK

SEQ ID NO: 364796 - protein, 360 aa, unidentified
MNAVGIDVSKGKSTVAVLRPFGEIVVSPFDVSHSPKELSKLVTLLKTLNGDTKVVMEYTGNYYLPIALFLRNNGFFVSVVNPILVKDYSTKSLTVRKVKTDKKDALKIASFALDRWNELSPFSAQSEARLLLKSYNRQYNQYNKLKIILKNNLIALLDQTFPGANTLFSTPTRKSDGHEKWVDFVLKFSHSECISKKSFSFFLKSYLSWCKKFGYKFSKSKAQAVYDFACNCSPSLSFSDSSALLVSNAIIQLNSINETLASLASEMNKIAATLPEYDSVMSMFGVGSVLGSQLIAEIGDVSRFPNKKALVGFAGLDASPFQSGNFNPQSRSISKRCSAALRKTLFQVCPSFCNEHRRIT

SEQ ID NO: 364797 - protein, 346 aa, unidentified
MLADELDYVIGVDTHRDEHVLAVVTAPAGAVVARKVIGADGRGYREALRVAEQLAVGKRAWAIEGSGSYGAGLARFLSEHGEAVLEVSRTLRAERRLAGKDDALDAVRTARAALASDKLALPRMGERREALRLLLIARRSAVDVRREALVQLRSVIVTAPESLRHELRTLPLGRLLDRCSRLRRTGAVDELATRLVLRSLARRVRAATVEAAELEREIHAHVRALAPTLLDEPGVGPIVAAQLIIAWSHPGRLRSEACFARLAGVAPIPASSGHTQRHRLSRGGDRQLNRALHTIVLHRRQHDPATRDYIARRVSQGKSTRDATRLLKRYLARHLYRLLEQQPAMT

SEQ ID NO: 364798 - protein, 320 aa, unidentified
MAKQLDQRIIGVDVAKSWLDICDAEQGEAKRIDNTAKGIDAWLRGLSGPAQIAVEATNRYHERFIEQADAQGHRNYVIDAFRLSRYRDAVGHRAKTDRCDAELLARYLRQEHEHLQRWKPRDPRQARLWRLLKRRATLVQTKTRLRQSLADIGALDDAAQDLISHCQRLIGKVDRELQVQARQLGWQADLQRGRDVPGLGPTTSVALVAAFYRHNFRSADAFVAFLGLDVRVRDSGRFRGRRKLTKKGDPEIRRLLYNAAMAGCRDPHWNPYYQSLRDRGISGTAALMILARKMVRVCYALLKQQVLFDPGIRNTPCQAT

SEQ ID NO: 364799 - protein, 387 aa, unidentified
MQKPHDNSKASPAAFMQDNTLIAVIELGLSNWLVAGLLPGVSREPLKKLEPNPEDLLKLLHGWRDEAIKAGRPITRIAVAYETGRDSFWLARWLRERGIDAHVIHATSVAVSREHRRAKTDRLDTAMLKRGFLGWLRGERGHCTVAIVPTMEEEDAKRPHREREGLVHEQTRAVNRMKSALIQFGVRNFNPKLRKASVKLETVRTPEGKSLPPNTIAALRRDMERLKIIKEQIKAIEQARLQQFEQKPEALASRMVYLLVRIYGLGLETADLLAHELLSRTLRDRKAVARYAGLTGSPDESGSKRREKGLSRSGNARVRKIMIQLAWRMVKFQPDSALVQWFKQRTENAKRSRKPMIVALARKLIIALWRYANDGVIPAGFRLHSAA

SEQ ID NO: 364800 - protein, 328 aa, unidentified
MFFVGIDVSKATLDVFIYQSNYSFIVENNPQGFSELLDIICNVAKCTVNEIFICFENTGKYSRMLSVFLHSNSITFVMEQALKIKKSQGVTRGKNDKIDAKRISLYAYEKRDNLTPTVLSGLKIDQIKSLLSLREKLIKHRTAYKNGLSDLHDCYIEGENDVIIETQKRLIQSLNKEIDEIEKHIHNIIKSDERMLNNFKLLLTIKGVGQILAFYLIAFTANFTLFGNARSFAGFAGIAPFEYSSGTIIGKPRVHPFANKQLKSLLNLAAQSVIQIPGEYSQYYNRRVEIDGKSKMSTLNIIRNKIVFRVFSVIQRQTPYVDLYKFAA

SEQ ID NO: 364801 - protein, 454 aa, unidentified
MSKVSKLPREFEQININAAGIDIGAQSHFVAVPQGRDPQGRDVRRFGTFTTDLYALADWLKQCGIDTVAMESTGIYWIALFEILEQRGFEVRLVNPRSIKHAPGRKSDVLDCQWIQQLHAYGLLTSAFRPKQDIRVLRAYHRQRTMLVNHAASHIQHMQKALEQMNLKLTNVISDITGVTGMKIIRSILAGERDPQKLAGHRHARCKKSAQEIQKSLHGNWRDEHLFALQQAVELYDFYQSQIESCDQKIQAQLCRFEDRSGTHELPPPPSGKRHRGTKKLSFEAREHLYRMAGVDLTQVVGLDTPTVLTLLSEVGLDMSRWPTAKHFASWLGLCPGSKISGGKSYSSKSKPSANRAAHAFRMAAYSLHRSPSAIGAFLRRKKAQLGAPKAITATAHKIARIFYTMMKTRTEYKDLGVDYYQIRYKERMLRNLKRKAKAFGLTIIDQNQMVMEN

SEQ ID NO: 364802 - protein, 356 aa, unidentified
MARISELEPTRVTVGVDTHRDVHVAVALDQLGRRLDQIELATTRAGYERMLAWAESLGVVEAFGVEGTGCYGAALARHLRARDMLVIEVMRPNRQTRRRKGKSDPTDAEAAARAVLSAEAAGSPKAGDDLVEMIRVLRVARGTAIKARTQAINALRSLLVTAPPELRDQLRALSTTRLVRKAAQLRPGTLASPLAVSKLALRHLARRCQTLEAEIGSLDGQLARLTATASPQLIGAFGVGADTAGALLVAAGDNPDRLRSEAAFSMLCGSSPIKASSGKTNRHRLNRGGNRQANAALHRIVLVRLRYHQATKDYVERRTSEGKSKREIIRCLKRYVAREIYAALTQTGHQKLAQAA

SEQ ID NO: 364803 - protein, 377 aa, unidentified
MSKVKFVGLDVHAETIAVAVAEPGGEVRSLGVVPNRQESVRKLVRKLGSAEHLRVCYEAGPTGYVLYWQLTALGVKCDVVAPSLVPVKPGDRVKTDRRDAQKLARSHRAGDLTPVWVPDAAHEALRDLVRAREVAKRDQLRARHRVSTFLLRHGWQRPPHLKTAWSKPHLEWVKMKIHFDQPALEVVISDYVHEVEHVAARLERLEAAIHEAARSAPPRMRAVIEALQALRGVAEVAAVTIVAELGEISRFSKATQLMGYSGLVPSEYSSGQGSYRGRITKSGNAHLRRVIVEAAWAYQFRPWCGGYLLKRQVGLSAEVKEIGWKAQNRLHLRYRKLLARGKNKPQIVTAVGRELLGFIWAIGVKVERQFQENRAAA

SEQ ID NO: 364804 - protein, 343 aa, unidentified
MDHFAGLDVSVKETSICIVDDTGRIVREVKVASEPEALLQVLGNPAYRFKRIGLEAGPLSQWLFSALAEAGLPVICVETRHMRAVLKAQINKTDRNDARGMAQMMRAGLYRPVHVKTLRSQKLRMLLTHRKLLQSKAIAIDNDLRGTLRNFGLKVGVVGAVKFEARIRELVENLPDLAVLVEPMLIVRRVLREQIVILHRRLLAIVRDDDVCRRLMTIPGVGPVVALTYCATVDVPARFRKSKAVGAVFGLTCSKYQSGESDWSGRISRCGDAMMRVMLYEAAQVMLTRTNKWSWLKAWAMQIARRRGMKKAIVALARRLAVIMHRIWVDGTEFRWTRDVATA

SEQ ID NO: 364805 - protein, 343 aa, unidentified
MNTGHERLWVGIDVGKGHHWAVAVDDMGEAVFSRKIPNDETEILQLIATACDAAEHVQWAVDLRGKTATLLLVLLTAHGQQVTYVPGRSVNRAAEGYRGEGKTDAKDALVIADMARIRRDFTTITIPPEQVCTLRLLTANRRDLIAERVRLINRMRDLLCGISPALEGAFDYARSKGAVTMLTRYQTPAALRRTGVKRLATWLQRRKVRNPQNIAEKAVAAADRQHTALPGETRAAALLGGLAHQLLALDERIASNDREIRETFRSDDRAEIIESLPGMGPILGAEFVAIAGDLSTYRDAGRLAAHAGLAPVPRDSGRRTGNLHLPDTYRAIAGLVSDRTATV

SEQ ID NO: 364806 - protein, 331 aa, unidentified
MFPVGIDVSKNTLDLCILYDGIKGRIKTRNIQNNRHSVENILRWLRLQHCGPEDVHVVMEATGVYHERLATELHDAGFRVSLANPHRSREFARGMGIMTKTDKVDAYMLACYAFLKKPHRWEPPAPEIRYLGALLRRRDVLLGDALREEKRLEKYLSTDTPADIISSCRRMAQLLREEVSNIERQIKAHIKASPALRRDYTLLTSIKSVGPQLGMHMLVVLRSHNFVSAEQAAAFLGVVPIEKRSGTSVRRRPRMSKIGPPQLRAKLYMSALCGKIYNKRMRNIYDEMCLRGKPKMVAIGALMRKLVHWCYGVLKTGTVFNDEGLKQVLST

SEQ ID NO: 364807 - protein, 431 aa, unidentified
MSKFFYRPVVGIDVSADFSVVAILAPDGEIHRKPFKIMHNRNGFDYLVDQIKKAEEEFNMKTAIFMESTGVYHLTLFHFLKDTFETCILNPLITNCNKNVDIRKVKNDKKDALTIATIGKFQDVKYSSDFDIEIYTLKSLCRDYYKFTDSKSTFKKKLSTDLRVIFPSYSSVFSDITGKTSIAILKKYSSPEAVLDADKDELINLISSNSKKGLVHSEKTYKKLTDAAEEAVYIGLKSPSLFVKIINTIAIIESLEIQIGNLLTEIHLLMRSNRISDEFKKNVQLLYSIPGVGELTSISIMSEIGNIKGFAKAKHLVAYFGLDPSVSQSGKFNSDKNVMSKRGTRIGWRALYAVALASIRKSRNGEPINKVLLNFYTENMKGKSKKVGLVAIMHKLINYIFSVLKNQKEYELRDPKIHSKMYFNKQSNPAA

SEQ ID NO: 364808 - protein, 343 aa, unidentified
MSNDTRIAVDVAKAVFEIGISDRPGHVSRRERLPRAGFLAFMAQQPAATVIMEACGSAHHWGRKIQSLGHRVVLLPPHHVRPYVSRNKTDRTDTKGILEASRNQDIRPVPVKTVEQQVLTSLHRLRSGWMTERTARLNALRGLLRELGVFIPLGAREVVPAVWLLIEDADSDLPEALRPIFAEACREIREIEARIKQVERQLEATAEQLPAVEYLQTIPGIGLLIATALVAFIGDIRRFPSGRHLASYLGLTPREFSSGLKRHLGRISKRGDGYLRTLLIHGARSVLIHARKQQPDHLREWANKLAKTHVHNKAAVAVANKLARIVWAVWTHARPFGLMATPV

SEQ ID NO: 364809 - protein, 392 aa, unidentified
MRKPKEQKPLDDLSHSLTPFEANQTLIVVIEMSKESWLVGGIIPGVKRQPLKKLSTDENELLKLLERWRTDARKAGYKINRITVAFETGRDGFWLARWLRAHGIEAHVIHAASVAVSREHRRPKTDRLDIRGLKRAFLGWLRGERDHCKMAAIPTFAEEDAKRPNREHETLVGERTSIVNRMKATLTRLGIRNFNPKLKKAAERLVRVRTPEGEPIPPNTLAELQRDMERRRLVMDQIRQIEAARLERLKQAPKHRSNAMVLLLARVIGIGIETADMLVQEVLSRNLRDRRAVARYSGLTGSPDESGKKRRERGLARSGNARVRRGMVQLAWRFLQFQKESTLAKWFNARTENARGSRKKMVVALARKLLIALWNFVRNGVVPEGVALRPAH

SEQ ID NO: 364810 - protein, 406 aa, unidentified
MNAVGIDISKGKSMVAVMCPGGEVLDKPFEVLHREDALEELSTKILSYGENTRVIMEATGRYHEPVAKILHEAGIFVCVLNPVVIKQSGAGSVRKVKNDKKDALKIAKYGIDNWRDLRQHNLMDITRQQLKLFSRQYSLHMKTVTALQNNLISLLDATYPDVNRLFSSPARDDGSQKWVDFAMHFWHVDLVAKAKFETFADRYLKWCKRNCYKFSMTKAQYIHSASQGLFATLPKSDETKLLITSAISALNQTMKVRATVKLEVIRIAKLLPEYEAVSALYGVGEITAAQLMAELGDVRQFANRSAIVAFAGVDPEVNQSGTQTRISNKSSKRGSPHLRKTLFQVVSTYLKRSPENEPVYQFLDKKRREGKPYYVYMTAGANKFLRIYHARIKEHLNSLYENHLVQ

SEQ ID NO: 364811 - protein, 340 aa, unidentified
MDITTLGIDIAKSVFQLHGIDADGVVVVQKKLRRGAVLNFLGNVGPCLIGMEACATSHYWAREIAALGHEVRLIPPAYVKPYVKRQKNDAADAEAICEAVTRPNMRFVPIKTEEQQSVLVLHRARDLLMRQRTMILNAIRGHLAEFGIIAAQGPRQVMGMIARLRDDGDASLPEIARSALLALGAHLEALAGEIRTLERQLMVWHRADPTSQRLETIPGVGLITATALAASVSDPSVFKSSREFAAFLGLVPRQNSSGGKDRLGRISKMGDRYLRKLLVVGATSVIRRAGSNPTKTGAWVRSLMERKPARVVTVAMANKTARISWAVMTRGEAYRASPIA

SEQ ID NO: 364812 - protein, 380 aa, unidentified
MRRVSGLDVHKDSVFLCIVDEDGVVFQSKYGVLTPELEQMAGVMVEYGVEEAAMESTSIYWMPVWRVLEPYVALRLVNPFFIKQLPGKKSDVKDAEWIATCLQKELIKGSYVPDELIQQLRQYDRRIFDLSKDIVYKLTKLDAALQRCNIRISNYVSTTKGKAYQEIVRLISEGKTDSEELVKHIHGRTVNRIGKDVLVSALSSVISAADIDTIRQLREEVELAQRHKDECQAKMDAICEQCFPKQYANLQTIPGVQARSATAIIAEVGANMDAFQTAAHLVSWAGLKPRNEESAGKIKSRRVTHGNKYLRKTLIECSWSASKTQGCYFNRFSYIQCNVRHKNKMKVQVAIARKMLTAVWYILHDNVPYRDCMPDIVPAE

SEQ ID NO: 364813 - protein, 323 aa, unidentified
MDNNLYFIGIDVSKVKLDVAVMATDSQKTVLELQAENSPAACRDLAVRLKPYAGSIVIIEATAGFHYAPAFALRDAGFQVKVINPIITGKYASSGIRKTKTDKVDALLLAKIGIMEQGLADYKENEKQIQMKQLSKAIAGLKEQRRSLMQKVKHMKHLGDMGSAEVIRALESVLKTIERETAKLTRSLAILAAPEVKIISSVQGVSEETAAVIAAELGDVTRFAGKRQAVAFSGLDPSVKESGSSLRGKSRISKRGSNVLRRVLFQGAWGLMMHNPNYKAFYNKKMAEGKHYYAVLCAMARKLLILIYTMLKNNTLYDPIKFT

SEQ ID NO: 364814 - protein, 433 aa, unidentified
MLKLNYMSTLFVGIDVSSKTNAVYAMDFEENKYISSSFGNNQPGADQLVNMIAECMQKHKNLDTILIVLESTSVYSVHISNFLSTSEVLMPYKPYVFCVNPKATSNYRKSYIGMEKTDPTDAYLIADFGRVGRTKKLEPWRGGQFIALKRLTRHRMHLSECITREKTYMVSNLYLKFSELQLLEGDDKPFGSLYGATSSAVLTEFLSPQEIIDMPEEELLTFLAGKSRNRISDLSKTSELLRKAARDSYRLDKCMYEPLSISLASSFNCIHAYQKEIKLIEQAIEKCINGMNPNALLILQSIPGIGPIWASGILSEIGDITVFHSSDALAKYAGLYWPKGDSGDFTSEDNKMSKAGNPYLRCYLGEAANSVRKHIPEYADFYARKYAEVTKHQHKRALALTSRKLVRLVFGLLVKNQLYTGEKLDTEYNIESN

SEQ ID NO: 364815 - protein, 310 aa, unidentified
MTIQPGFVGCDISKDHLDIFDDAIGKPERIANDAAALVPLIDRWKNKDILVLFEATGSYDACLRRALTAAHIPFARVNPARARDFARATGRLAKTDSIDAAMLADMARALRPACEPAPAPEREALARLHKRRDQLVAMRKQERTRLAAIDDPVMVEDVEAHIAWLSTRIVEIERQTRDLIASAVLLTEEQNLLRSVPGIGPVAAATLMALMPELGTRSPKTIAALAGLAPFNVDSGQFRGKRVIKGGRRRIREALYMAAITAVRSKHRFARIYKDMINAGKPPKLALIAIARRILVTANAILRDRTAFQP

SEQ ID NO: 364816 - protein, 339 aa, unidentified
MKYTPVGVDIAKHLIQVHFINEHTGEVVDKQLRSKDFLTFFSNREPCLIGMEACGGSQHWARELAKLGHRVRLLQARFVKAFVMGNKNDVMDARAIWTAVQQPGKEIAVKTEEQQSVLVLHRSRRQLVKFRTAQINALHGTLLEFGETIHKGRAAMDREFPAVLERMKARLPPYLITVLEDQYNRLSELDTLIDGIEKQLHSVARQNEGCKRLMEIPGVGPLIATAAVATIGEISAFKSGREFAAYVGLVPKQTGSGGKVRLLGISQRGDTCLRTLFVHGARAAALVAKEPGPWITELKKRRPTSVAIVAMANKLARTVWAIAAHDRKYDKNHVSIRPY

SEQ ID NO: 364817 - protein, 310 aa, unidentified
MDIIAVGIDVSKDRLDVAVRPGGEAFVVERNAAGLDRLIERLQKLPPTIVAVEATGGFETVVAAALGAAALPVVVVNPAQVRHFAQAVGKRAKTDPIDAAVIARFAEATGLQPRPLPDEATRLLADLVARRRQIVEMMAAEGQRDRRFDDKRLKKSIARLRKALEKELAELDDELDDQIRGSPAWREKEDLLASVPGIGPTIARTLIAELPELGALDRKEIAALAGLAPYTRQSGQWRGKSFIGGGRTVVRTAMFMGALVAKRHNPILRAFFERLVAAGKPKMVALIAVARKLLTILNAILRDKRPWQIA

SEQ ID NO: 364818 - protein, 326 aa, unidentified
MVHERTEPYAGVDVSKDRLELCVRRGREAGEGEHTFGVSNDPAGTQTLLACLLEERPALVIVEATGGFERPVAAALAAAGLPIAVVNPRQAREFARATGRLAKTDRIDAHLLARFAQAVRPAPRPVPEEEAQALAEITARPRQVVGMLTAEKNRLGAAATTKPVRGRLQAHVRWLEKELSRTDGDLEEAIAKSPSWRENEELLRGVAGVGPVVARTLLAELPELGSLPPKQLAALVGVAPLNRDSGAFRGRRAVWGGRATVRAALYMGALVATRHNPQIKEFYERLLGAGKPRKVALVACMRKLLIILNAMLKNRTPWRSPQTLAP

SEQ ID NO: 364819 - protein, 350 aa, unidentified
MRIESKQLLPTWNGLDVAKETFDSALYMPVEPGQSPRDIMSLPKKTFARTLEGVKEFHDWSFQVRDKAGLEGGNMRIVMEATGRYSKELAGWLNAEMPFTRPVIEDPRAVKDFVKSLKLRNKTDRIDAGALARYGAERMPEPSEDMPEEYQYLRELTRQREALKDQLTAARARLAEMGEFKKMIKIQQAVIKSMEQAVAKMELEIKRCINDSEELRKSLKYAVTVPGVALIVSATVLGECGPLYRHTSRQLGSYSGIAPQIRQSGTSVCGSKISKRGSGNLRRVLYMASIAAIDHNPEMKMFYNRLIAKGKKPLQARCAVMRKLLILIRAVVVNETEYDKNFAKKSILKT

SEQ ID NO: 364820 - protein, 331 aa, unidentified
MNQIGVDVSNAVFDATRLSDERLTRRQFANTPCGYRQFSRWALHGTEAARVCLEATGIYHLQLALALHDHPAIELMVVNPCAARRFAQAHMVRAKTDTIDADGLLQYLQRMPFQAWCAPRDEVLQLQSLAHRIAQLNQEIIREASRLHAARRAGGHTRWVQQDIQAHVKQLRRRLEHIQARALEVLKADEQLAQDAAIVTSAPGFAQRSTTRLLAELAHLPADMAPTQWVAQAGLDPRPCESGTSLRGPRRISKQGNARLREILFMPALVAIQRDANVAAYYNQLLAKGKAKMQAIIAVMRKLLHALWGMLHHRSTWDGEKFFKLNPCHNA

SEQ ID NO: 364821 - protein, 350 aa, unidentified
MSIIGCDLHSRYQVIAMLDTETGEIVRRRLEHEKGEARAFYAALPKPSLIGIEATSYTQWFERMAGEQGHQLWVGDAAKIRASETRKQKYDGRDAEHLLDLLLTKKFPRLWVPTRQERDLRQLLKHRDKLVHMQTAVKLQLHFLAMSQGICRKRKLWTEQGRALLERLSLDPWASRRRQELLELLDSLAPRIEPLDQAVEREAQQRPDAVELMKQKGVGPVTALAFVLIVGPVERFPNSRKLVSYLGLNPAEHSSGGRQRLGHISKQGNAMLRWLLVEAGQSASRFDPQLRRKYQRLKSRRGANVAKVAIARHLAVHLYWALRQMKDASPPVRMPGSPVSSVVEATPSIL

SEQ ID NO: 364822 - protein, 339 aa, unidentified
MNNNVVGLDIAKNVFHLYSIGAGDKVLKKKLKRQELLMFFANYPKSLIGIEACGSAHHWARELTKLGHQIVLLNAKYVKGFVVGNKNDFNDAAAIFDAVTRPNKRVVEVKTIEQQDIQLVHGIRQGLVEKRTALVNQMRGFLSERGIIIRQGINQVRKELPIILEDAENNLTTLSRELFAEQYEKLAQFDEEIKKQDQRITCLCASNELSKRYLKVPGIGPIAATIAASDIGVGKGYRNSRDYATSLGVVPKQHSSGDKAIYLGISKRGNRYIRTILIHGARAVVKNCTKKSDPLSQWLQSLVERRGFNKAAVALANKNARILWTMATTGKAYEAMEKH

SEQ ID NO: 364823 - protein, 342 aa, unidentified
MQNMMIGVDLAKNVFQVHGASQTGEVLYRKKLSRKQFSAFMALQEPSLVIFEACGSAHYWAREMEALDHEVRLIAPQYVRPFVKRQKNDAADAEAIVIAARQPEMRFVAPKTIEQQSRAAVFRGRERLVHQRTADMNALRALLYEHGHVFPAGIRHLNRMTALIEDETSGLPMLIREECKDLLAQIAEKTARIIERTAKLKTLAAQSDKARRLQTMPGVGPLTAVAVEAFGPDMAQFKTGRDFAAWLGLVPKQHSSGGKERLGRMTKAGQADIRRLLIIGAMSRLTWLGRRTIPAGSWLSRMLARKPKMLVAIALANKMARQIWAMLTKNENYRDPALAVVA

SEQ ID NO: 364824 - protein, 396 aa, unidentified
MYYAGIDVSKHHHDATVIDATGRVVIAPLRFLNTRQGLTIFLTRLQTLDGSVDIAMEATGHYWLPLYEALVAEGYTVSVFNPFQIKAYRQIGLRKTKTDAVDSLWIADFLRIGRARPTVVPSPAVRQMRELARFRFSLLQRQADIRRRALTILDRVFPEYRTLFPRPFSPSSRALLRRAVAAETFAAWPLEDLAQTLRQASRGHFGLEQARQLLHLAQDSLGIRSLGPVANQEMQLLLDQLALLDDQIATLDEELDRLLRQTGTYLTTIPGLSSTLAATILGEIGDIRRFATLKQLVAYAGLDPTVHQSGQFQATHSRLSKRGYVYLRRALWMAASVARQYDPDLKAFYQRKRLQRKHHSVVIGAVCHRLLARIYVVLKEQRPYEIRTPDTNHSTT

SEQ ID NO: 364825 - protein, 407 aa, unidentified
MPRYYVGVDWADIEHAVWVGNEAGEEVMARSVTHTPAGLGEFGRWLYERQAEGIELWAAIEKPEGRVVDFLLDHGVVVYPVNPKALDRARDRFRMSGAKSDPFDARVLAEFLRTDHPHLTPLVPSSAPAQELKLLTRDYQRLVRQQTRLVNQLTATLKEYSPRPLECFEELTSAVAREFLRTYPTPEALAALPPKGWQRWARAQHVSQARTVDLWEALRAPQLPVPAHVVRAKARLVGVLVDELDTVVRAVNEYRTAIDDFFAAMPEAEWARSLPAGQSGTTVPTLWAELGDAPGRWQDFRHLQAQAGAVPVTERSGKHQFVRFRFACNTHLRYAVHLLAFLSLRQSDWARAYYTQQRARGHSHHQAVRALGAKWLKIIFVMWSRQVPYDETHHLAMMARQRLHQAA

SEQ ID NO: 364826 - protein, 502 aa, unidentified
MNPRVTIGLDLARKTSHQAAILDTGSPGGPVLRKVNSSAASLDAALQAAGGPDGCVAVLEPTGMAWLAVAAWLVFRGCTVVRTDTRRAHDFRKVMRRDVKSDAVDAVALARLPLLGGEAARGLVMPERLRFALDQLLRLRAQLVKEATRQFQFLLSVLEAYVPELPGVLGEGEKLSSAKVLLLRRFLHPGRVVEAGVDGLTLALEQAGVRLDDASVVTRWHTVAERAWSIWGPLEGAGCCPVDFDVAQIQVDTWLGRIEESENHIRKVEDKVRAIYKEVDPDGILETVPGLGPVIAPFVLAVVGDIRRFPSAKTFVSWCGLAPRKNQTGGTDRGGQRISKAGNRLLRKYLYLAAESARRSDLDLASFYARKEAQGTHHTAIVTALAAKLARRIYAVLKRAAAGDTTGYRFTDQIGAIVDRRESRRLTGAAYPSKAARRRAEQERRRDRGATPPSTGQSSDSPRGLSNAPVPPPRNPPHPGGARPAQVTASGHSSQADSPRAG

SEQ ID NO: 364827 - protein, 399 aa, unidentified
MDRNRTVAGLDVHKDSIYLCIMGHDGVIIFEKTYGVLTPDLRQMCQDMVERGVTEAAMESTAVYWVPVWNELCESMELKLVNPYFIKQLPGRKSDVKDAQWIAECLLKNLIRGSFVPEPIVQDMRKLNRRIFDLQEDITYYSNKLDAALHRCGFRLSNYVCKITGKSYRKAVASIAEGKTDPGTILKCIHGRVINKHGRETLLAAVTASFSQTDITVIRQYWELIAVYLRQSEECQSQLTALCESNFPTEYKRLQTIPGVKERAATAIIAETGVDMKMFATAAALVGWCGLKPRNDVSNGRYKSRKITHGNKYLRHILIEISWTASRTRNSFFSNFSYIQVTQKHKSKMKIQVAIARKILVAVWHMLSKGEDFIDIYLKRLEEQRLMEEKLKSLELRMA

SEQ ID NO: 364828 - protein, 356 aa, unidentified
MESQDIKYVGIDCGKKSLEVVRIHSENSLKERRQFSTTETGINNLLKWLTQNDIVGLEAGTQSFRIAKSILNKGIQVIVLNPGDLATIYQSLKKTDKEDSLKIARLIQRYPMEELPVVPVPTDEEEDNRRLCTEQENWTRQLTQGKNRLHSLFTQAGLTEITKKHLRTKSSRETSVTLLPSRYQKEAERILQVLDLVEQNLKLIEEEIKEALRKNQTYTQTIMSMPGIGMITSLAIMSYMGDCKRFSSGKQAAYYAGLVPRVDISGDTVRYGKIVSRGCHSIRRVIVQAAWSLVRCQHGGKLKEFYERLYSKKGAKKSIIAVSRKMIEVLYSMIRTGALFDSMPEEVLHRKLLTIA

SEQ ID NO: 364829 - protein, 407 aa, unidentified
MCEGGLQMRNNAFVPSDYDVFSGLDVDKRSISATFNNQQGHIRSLRMPNSVEHLVNHVRKHFPDQKVAFAYEAGPTGYGLYDGLVAQDYPCLIASPSMIPKAPGQRVKTNRLDSVGLAENLRGGQLKSIHIPSPVYRDLRNLTQLRDTFVSAMVGMKQRIKSLLLLEGIEFPPAPAGSQWSIVVKHKLRKLPCSSTVRFKLDQLLDSLEFNEKQVVKTTQQMRRFCQNDPELSRCMGYVMSVSGIGRIVASQLLARIGDWRELKNIRQLGGFLGLVPTEHSTGDRTDRGSITQTGDGRLRSKLIQASWSAIRQDSELREFFASVCKTHARHIAPRVAIVAVARKLSVRISVVLMKQRPYVVREKVHSAPLTQEETSPQGTTRRKPEPGEPKLLTVRPLRQRSRGLVP

SEQ ID NO: 364830 - protein, 458 aa, unidentified
MEGDAVKKAKKIAKLPIINPNAAGIDIGATQIFVAVPPDRDAESVRCFATFTADLEKLADWLAACKIQTAAMESTGVYWIPLFQILEKRKIEPVLVNAQHLKNVPGRKKTDVEDCQWIQHLHAVGLLRGSFRPADEICTIRSLWRHRENLIQLASIHVQHMQKALDQMNIQLHHVISDLTGTTGLAIVDAILSGERDPAKLAQLRNPHIRASQQTVRESLVGDYREEHLFVLRQSLESYRHFQRLIHEVDLEVKQMVKELPSKVGVQDPPLPKAKNPRKTPWRNEPPELREDLYQAFGVDLTQVPGLNTLTTQILLTEIGPDFSRFPTSGDFCSWLRICPDPKITGGKVISSKTRPSKNRAALALRMAAQGLHRSQSFLGNYFRRMKARLGTPKAITAAAHKLAARIVYHMVTSRQEFDATIFEALERRSRDHKHLRLCAQARELGFDLVKINPEAAN

SEQ ID NO: 364831 - protein, 351 aa, unidentified
MKKVLKQVLGIDVAQKELVVTLGRTLEDFTIELYAHKVFKNSDSGIRSLLEWVKKHTDNTINIRYVMEATGVYHQKIAYHLAENDYEVSIILPNKISNYMRTLENKTITDKTCSEAIAQFGLERKLDNWQRPKAVYRNLQQLSRERDQIVSERSMVKNQLHAESSEAYPYQKSIERLQDRIFFLNKQEKEIKQDIKEIVSENKDLEQEVRIMSSIPGVGELTAIIVLAETNGFELIRSKKQLTSYAGLDVKEKQSGTSVKGKPKISKKGNRSLRKAMYLPALSAVKWDERFKAIYARIVGRNGIKMKGLVAVQRKLLEMMYILFKNKNTYDTHYLEKENSVQIQDQYAITG

SEQ ID NO: 364832 - protein, 350 aa, unidentified
MEYLGIDWSYRRAAWCSLSDAGVIVGEGAVPADADGLARLVIERGTDVRAVVEMMSGAIWARDQLAAAGWRVQIAHARKVRDVAPLACKTDKVDARVLAELARRDLVPELWVAPLQDRELRERLRRRMHLVRMRASAMNRIFGLQTQWGLRISLRRLRSPDAMTLLERQGMPAVWRRSIAEALDVIDVLDARITPIDHELRPLARADARVILLDTIPGIGDLLGLTLASEIGDVARFGSPGKLIGYAGLAPKIHQSGDRSRTGALSKAGSRTLRWAAVEAAQHAWRATNPWHQLYSDLAERAGKNPAKAAVARKILIAAWHVLSRQQPFKPAAPRRPDPASASSRCFLAA

SEQ ID NO: 364833 - protein, 333 aa, unidentified
MFNNEVYVGLDYHQKFVQVCVLDPEGNILGSRRCDNHWCRIADYANGFGRVRRAAIEACCGSADLAEELVAEAGWSIDLAHPGYMSRMKRGPDKSDFTDSRLAADLTRVGYLPKVWLAPHAVRELRRLIRFRQEQANQRRNTKLRIRALLREQRLTAPVRAWTRPWFTWLENEAALSEQGRWVIDRHLSQLVWIEQELTMVERRLEEATKDDPVVARLLAQSGIGPVTAWTIRAEVGRFDRFATGKQLSRFCALTPQNASTGGNGADAGVIKAGSRTLRAVLIEAAHRLSIHDADWRAFRQRMRAAGKPGSVIAVAIANRWMRRLFHEMNEAA

SEQ ID NO: 364834 - protein, 352 aa, unidentified
MQCIAFDSHKKYTWASVEDETGKVLREQRIQHTRGALRSFLEEFECGSPVAVETIGNWYWITDEIEQAGMVPQLVNARRAKLMNGSVNKTDKLDARALNRLQRSGTLPTVWIPPRQLRDVRELPRTRMALVQHRTKLKNRIHANLAKYGLKTDGATDLFGKRGRQILGCCLDELRSETRYGTQCLLDQLDHLKLRIDELEERMAALFGDIAALKNIQTLPGVGFILGVVILTEIGDVARFPSANHLASYSGMTPRVHASGGHVRYGRTRVDTNHYLKWSYAEAANVVMMLRRRYPKRHVSRLYERIKKRRGHQKAIGAVGRHLAEATYWMLTKHESYRDPAVEQTEESKREA

SEQ ID NO: 364835 - protein, 345 aa, unidentified
MHITSIGIDLGKTTFHLVALGERNKILLRKKFSRTQLLAYTANLPASLVGLEACAGAHFMGAALRAQGHQVRLIPAQFVKPYRKSNKNDFIDAEAIAEAVTKQNMRFAQLKTQEQLDWQAMHRVRDRLVQRRTALINEIRGFLLERGITFAAQPIHLRKNLLTVIEDAEQNLSPRLRGLLDRLWQEWKQIEIDVEAITDEIERISNEDARCRQLRQIPGFGPLVSTATVAAIGNGAAFRRGRDFAAWVGVVPRQYSTGGKQKLYGISKRGNVYLRRMLIHGARAVLFRVKYDTAGFGQWVQRLAQRAPRNKVVVAIANKLARIAWAVLSSGRDYRHQPLLQPAAA

SEQ ID NO: 364836 - protein, 422 aa, unidentified
MKKVTEFTKKVKGQIKNAALNKASWIVGIDIGKTKLSCVLMKKDQTVLCRFNAKSSMSGYKKILDQVKEKTKARGKVVYAMEPTGHYWMVLGQFLEDHNKEYVLIHPLALARSREVVRLNRGKTDPMDARLIGELACRGIATRTQIPEDYWATLRFLAREYMDREKDIVREKLRINSYVETTLPYFLDVFPNPLCLAGRACLRTFANFKGAIKGDFPSFEKQVRKHYTGKRLLISRVRQIYDTLRQSHSMGLRAGRHAMFWRIINSLERLEVAERQQETTEQSLLSQYNQSKYKKYLNSVQGTTSTTNALILGFMGNPTIYDNPKTLIKLAGCDPVLNESGKYRGKTSISHRGRSLLRKAADRTAFSIEKRNVVFRNFFHRLVTRQKNKLTKRQARIACINKYFRIIWVLCNHRVTFNPSLA

SEQ ID NO: 364837 - protein, 447 aa, unidentified
MDTESATQYAAYIGIDWADKDHAYALRATEDKKVEQGKVEAKPEAIEEFVARLRQRFGGKAIAVALEQSRGSLLFTLSKYDHLVLYPVHSSTLDSYRKACHPSGAKSDPDDAALILDLLQKHPEWLQPFAPDTVPTRTLQFLTEERRDAVNDKTRYLNQLTAALKTYFPQMLEWLDVDSKVMCEMLQSWPTLEQLQQQKPSVVEEFLREHRYPVVRVKPLQEAMEKAIPATTDQAVIEAKKFTVQRTIAQLEALRENIAELDRRIEQITRLHEDYRVFASLPCAGKVMVPRLIAAMGTQRDRFQTASELQCQTGIAPVKEASGQREWIHWRWACPKFLRQTFVEWAWLSTRKSQWAREFYDRQRAKDKSHHAAVRALAFKWQRIIFRCWKDRCPYDEARYLATREQRARTAKASTDGSPQLKSSQAGGVEITWKNVSGFSRPDSISC

SEQ ID NO: 364838 - protein, 501 aa, unidentified
MLANQKKPSISVCHPTRLRKKRQSSQDENDFTAFGIGMDVHKDSIVICVSGRLPKGEIVVYREHSFRNNFQGVDELCRFLRTYITRATILMECTGVYHVSLYQTLQDRFRGRRDHLIAMNPLLVHNRIADLGTKTDRADARTLSNLAFYERILRPSYVGSPDFFTARDFMRSYHRTMSHCTMFKNRIHRHLHLANQKFPFDLGSEWGIQLLDRYINSSQPLGDIYTEYLADLKDQGKGKVLEKRAEDIVPNADVCLTESQQFLLQVDLIRLLQSQQAAALLLGKAERYVLAHPTLRVYYEQMCIIPGFNAVTILTVLTEIGDYSRFRTADAFSKFCGVVPTVEQSGNYRAKGHVNRFTNKHLRGALTQAAASIIGRPDRTTDIGAYAYKQFHLRKLPFKKCMLKVAYKFSRILYGMLTEIRQYDPHHESMRKKRARLQNRLKNQDTLIESNRTRALRRDISSLLVSHSELLNSTSKYHLVNGFNRLIRKARYYDQQDPSGK

SEQ ID NO: 364839 - protein, 345 aa, unidentified
MTTMNYIGLDVHKKTISYCVKDVSGRIQQEGKIGSTRRELDCWMKTLPQPWTVAMEATIFSGWIYDHLLPHAAQIKVAHPLMLRAIAAAKKKNDQIDASKLADCLRCDFLPECHMMPRAIRDRRRTLRYRHLLVRQMVQMKNRVSGLLMETGVEYNKQRLHKVSYFRELLSANGEVPPSIRPLLKLSRETIERCQKTEYALVSSLQRDPVLADRIKRLRTVPGVGPITALTWALEIGDVSRFGSIKKAISYCGLCGDERSSADKAMRMPLSKQRNKHIQRALVEAAKLAPRQNHEMAVIYDQERQKGNSNRATLAVARKMVAYLLAVDRQQRDFVPAEERRTTAA

SEQ ID NO: 364840 - protein, 353 aa, unidentified
MSQVTTIGLDIAKSIFQVHGVDAAGQSVLRQRLSRSRVLEFFGKLPRCLVGLEACASSHYWARELIRLGHEVKLMPAQYVKPYVKRGKNDAADAEAICEAVVRPTMRFVGVKTTEQQSIMMLHRVRRILMRQRTQLSNALRSHLAEFGIVSPIGREGLDRLLKIVADTDDRRVPAEARAPLEMLAAQLEGVKAKILENDRRIIASARATEVGRRLLEVPGIGPVLASAFVASVADPAIFKSGRDLAAWIGLVPRQNSSGGKERLGGITKAGNGYLRQMLMVGAMAVIRYAQRNSTRRPWLVQLMGRRPAKVAAIALANKTARTVWALMTSGERYRDPQAIQAAVSANGMETPD

SEQ ID NO: 364841 - protein, 349 aa, unidentified
MKNISMIGVDLAKNVFQVHGVDAAGKVLVQRQLRRRQMEKFLEALPVGVVVGMEACGGAHHWGRLVQKLGHQARLMPAGYVKPYVKRNKNDGRDAEGVCEAMGRPTMRFVPVKSVESQAMQVLHRTRRLLVRQRTMAANALRSALSEFGIVAAQGLKGLRSLMEELEGEASGIPDMARMALLVLARQWEALNAEIDKLETQIVGAAKTDVVARRLMTIPGLGPLGATAILAAVSDARVFKSGRDFAAWLGLTPRQFGSGGKQRSGGISKQGDRTLRTLLTLGATAHLKCERGRGPRDPWLRALLARRPFKVAAVAYAAKMARIIWAMLVSGEPYRAFGQRRKAVVQAAA

SEQ ID NO: 364842 - protein, 350 aa, unidentified
MSGFIKQSIGIDCSKDSFHATICSLTISQEVSFTSVHRYANNQTGFNQLLKWMKNNHQKGVPICFHMEATGVYYEHLANYLHKNKQPVVVILPNKVKHYIKSLNVKTKNDFVDARAIAQIGAERRFELWEPASPIFHELRQLTRLHEQLQCQKVSLKNMLHSKEFSHGASHFVLKTNKQVITSIEKQIGKVEKEIQNLISKHEWLEKKMGKIQTIKGIGAMSAAVIVAETRGFTQIKNRKQLVSYVGYDVVERQSGTSVSGKTRISKKGNRHIRRALHFPALAASRYDEHHKQVYTRINQRNNHQTKMVGAVALQRRLLLLVYAIWKSEEVYDPNYQKKVAPEQIEDYTR

SEQ ID NO: 364843 - protein, 471 aa, unidentified
MIKSVGIDLGGIGEHKVRCLDERAQMCDGFSFDTTRAGLAKLEERVFSNGSNPVIIFEPTGLAWLLVAVYLKSRHPDSRLVRVQAQKVVALRKYLNRSSKSDKIDSLTLAKMPFIDPEKLEEIYFPPGKIYAIQRLARQRRRLENDIAGRKKRIGSIVDGHFPGIRSTFSDSWSAHARAFLRSRLNPLAVVRSGEKALCAFLTKARRHCKIEASVESHGVYLACREVATLYKASSSVGTIDDDFFSALQDEISRELRLMEIEETESAAIAKRLEKLYMELHPSDNLRTIPGVGDHTAPIFLATVGDPARFHSQSSFANYCGIVPGANQSSGSEAKGLRMTKAGPAIMRWALFQAGYIGRSHDPQLACVYYREMVHNGKNHMQAMGAVMSHMSARVLAVLREDKPYELRDKDGRLVSREEARKIILTRYQVPEEIRRERRRRKTPGSPRLQKKLREMLVPSEYEAAVAPQSG

SEQ ID NO: 364844 - protein, 487 aa, unidentified
MATTRKQPHRKNGSDARCSALKRKASSHCHPGKGNRQRSKLTISNPDAAGIDVGAEVHYVAVPEDRAEAPVRSFGAYSAQLDELVQWLKECGIKTVAMESTGVYWIPLFQKLEEAGLEVLLVDARQAKHVPGRKSDVQDCQWLQQLHSYGLLRAAFRPEDSICRLRTLQRHRKDLVECAAMWIQHMQKALNEMNLHLHHVLSDISGQSGLAILDAIVAGERDPSKLASLAHYRVQKSQAEIEAALRGDYRPELLFVLSQSLENYRQLQQQLLKCDLSIEKKMATLAGRATISQGAEPTHQSQDSDGKPPKRKPKDALELSLASHLKRILGVDLTTIPGLNVLAVLTLLSEIGTNMTKWRNEKAFASWLGLNPNNKISGQRVLSSRTRKVANRAATTLRLAAMLSGKTNTPLGSFYRRKRAQLGAPKAITATARKLACLVYRLIKNGQAYKPTDLRTYELKYKQQTLDSLRKRAKNLGFDLVQLPKAA

SEQ ID NO: 364845 - protein, 352 aa, unidentified
MDDAVVIGVDAHKRSHTLVVADALGRKLGEKTVAATSDGHIVAIAWAARWPVRRWAVEDCRHLTRTLEGDLLRAGEELVRVPTKLMADSRRGDRQPGKSDPIDALAVARAAWREPDLPTARLDGPQRELRLLVDHRDDLVAERTRLQTRLRWHLHELDPAFHVRPRGLRSRKGVDLVSAFLAGRDGLVARIARELLERVAELNDRARELEREITRIVSVLAPSLLAIVGCGALTAAKIVGETAGAERFRSKAAYARWNGSAPQPVWSGNRTRFRLSRTGNRQVNAALHRIAVTQARTATLGRAYLQRRQQAGATKTEALRLLRRRLSDVVFRALLADERRPLAAIDTTMALT

SEQ ID NO: 364846 - protein, 408 aa, unidentified
MNAVGIDVSKGKSMVAALRPMGEVAFLPREFLHTEIGLEQMAYAIIALGKDTRVVMEATGRYHEPVAEALHEYGIYVCVLNPLLIKQSGGGSIRKVKTDRADAMKIAKYGLDNWVDLREYTPMDTVRQQLKLCSRQHNLYMKTVVSLQNNLISLTDKTFPGVNELFSSPERADGHQKWVDFVMAFWHCDCICCVSETAFTERYQKWCKRKGYHFSAEKALDIYDKSCGHFTTLPKNNNTKLLISTAAQQLLAGKMTLAALRAEMTRLAKQLPEYDTVHAMYGVGETTAAQLMAEIGDVRRFPRRSSIVGFAGVDPGVDESGKYSAKSVPTTKRGSSHLRKTLYQIVCTYLKKSPANEPVYQFLDKKRSEGKPYFVYMTAAQNKFLRIYYARVKECLEAFDAQQGSAQS

SEQ ID NO: 364847 - protein, 354 aa, unidentified
MGSIGPDKQEREEVPVAIVGGLDVHRRQITFDYLDSETGEIRRGQIPATRASFRDWLARMKGRPGAFAVEGCTGWRFVVEELRRAGITAHLAEPADTAALRGPKRRAKTDGLDARHLRELLATGVLPESWIPPTHVQEVRAQVRLYKALLDERTAWQQRLHALYFHHGVPGRTNLLSAAHRSQLADGDGLTSEAQAIVGVMLRQIDRLGDDLDMLRTDFAHFARRQPGCRALTAEYGIGAVPSVAIWAELGDCRRFSSPRDAVRHTGLDITVHSSDGKRTRGHLSRQGPPVLRWALFEAAQSGSRQNSPDHTYYAAVKARLGGNRAALSVARKLVRRAHPHLRALGDDALIAVS

SEQ ID NO: 364848 - protein, 371 aa, unidentified
MFEDIRYYVGLDVHKESIAIAVAESHSREEPRFIGTTGYSVHQIHKALSSLKCTPKQLSIAYEAGLCGYGLQRELTSKGYECIVVAPSRVPRRAADRIKTDRRDALLLARMHRSAELVKVCVPDPADEAIRDLIRAREDALRAQKAARQQLQALLLRLGNPYRGGKAWTLKHLKFLADIKFEIPAHRIAFTEYRLAVQAAGDRLERLNTAIRQESESWRWLPVVKPLMSLRGVDFLTAMTIVAEIGDLKRFDHPRKLMSFLGLVPCEFSSGTSKQRGSITRTGNSRVRKLLIESAWNYRHPAKISREIEQRLDGLPQAVTEIAWKAQVRLCHRYRKLRYRGLHQNKTCTAIARELAGFVWSIGQITQPQHA

SEQ ID NO: 364849 - protein, 317 aa, unidentified
MQTPIVYGVDVAKVELVIAGPGANCVKLANRASEISQWLDEIPAGSFVAMESTGSMHRLLAQLAHRHGMTVFVLNPRDIHHYARALGSRGKTDRNDAAVIARYVAAEHSNLRPYAPASELQERIDILLRKRASVVRHRDALRKALRELPGLNDVAMRTMRSLAELLTCIDDQIDELVRSEQALVQRSALLRTMPGVGPLTSVSLANLLERVKLANADALVAFVGLDPKPNDSGQHRGRRRLSKRGPSEIRRLLYCAALTAARGAWKPLYQTLRTRGLASTQAVCIIARKLLRVAWAVCRDNRPFDPSLAAKPLDATT

SEQ ID NO: 364850 - protein, 408 aa, unidentified
MVLFVGDDWARDHHDVEIQDQSGRRLGRARLPEGVQGVARLHELLARWLPADAEPDQVLIGIETDRGPWVAALVAAGYRVFAVNPRQAARSRERLGVSGAKSDAGDAHVLADLVRTDAHQLREVAGDSDLAEGVQQLARAHQSLIWDRTRHLLRLQAVLREYFPAALGAFPDLGAPEALALLAKAPDPARAARLSRAQITSALTKARRRDATGKAETIQTALRAQHLARGPVLTAASAAVTRSLISVITTLTSEISELEGEVKTHFGRHPDAGIYLSQPGLGQILGARVLSEFGDDPDRYRHTKARKNYAGTSPLTIASGRKTTVRARYVRNHRLIDALMRQAQSALKASPGARTYYDQLRTRGLTHYAALRQLANRLVGILHGCLKTHTPYNETTAWTHHQHQQTAA

SEQ ID NO: 364851 - protein, 316 aa, unidentified
MEAAACIGIDVSKASLEVAFGSGGVVRSVANASVALESLTAELLELKPELVVMEASGGYERLAAALMWEAGLKVVIANPRQVRQFCEGMGQHAKNDRLDAKMIALWAEHKRPEVRPLPDAQARELSELLARRRQLLEMLVAERQRLARVLSRPLRKELGVSIRSLERRLQKLEHEIAQRIGKSDLWQQTRQLLESVPGVSKVTSFMLIAELPELGTVDHRRLASLTGLAPFVRQSGKWRGQSIISGGRAAVRSALYMAAVSASRWNPALQPFYQRLLKRGAPRKKALIAVARKLLVILNAIVRDRTPWRSPCPAPL

SEQ ID NO: 364852 - protein, 351 aa, unidentified
MTVTIVERPAHPRVITGGVDTHAEVHVAAALDPVGGLLGVQEFPATPAGYAQLLGWLGGFGAVCLVGVEGTGSYGAGLARHITAAGVRVVEVDRADRQDRRRQGKSDPLDAVSAARAAQSGRAAGAPKGRDGAVEAIRALMVAKRSARAGRTQTINQARALVLTGPDDLRIRFCAHTPAGLVAELAALRPRPGAPVGYPTRMALRELGRRAVFLDAQLQRLDELIVPLVTARAPGLLALYGVGADTAAMLLIAAGDHPERLRSEAAWAHLCATAPIPASSGKVTRHRLNPGGDRQANHALWRIVFTRMGSHPATRAYVARRSKEGLSKKEIIRCLKRYVAREVYPHLRTPG

SEQ ID NO: 364853 - protein, 370 aa, unidentified
MKNGSTLRVGLDVHKESIAVAYAGKEGTEPVYVGEIGTRQGDIDAMIRKLQSKGAELVFVYEAGPCGYWLYRYLTRKGLTCFVVAPSLIPRKAGDRVKTDRRDAVMLARLARSGDLTPVYVPAVGDEAIRDLSRAREDALHDVNAARFRLKAFLLRNDLRYSGRANWSAEHVRWLARLVLPTPAQQIVFQEYVRTVSERTELLRRLEAELLEQAKTWRLYPVIEALQSLRGVQFTVAVTTVAELGDLTRFDSPRQLMNYLGLTPSEYSSGERRRQGGITKMGNGHARRVLVEAAKAYRHRAKVSEQIQARQQQLPKEICDIAWRAQVRLCGRYKKLALRGKHANTIAAAIARELAGFMWAIAKAQATAAA

SEQ ID NO: 364854 - protein, 407 aa, unidentified
MEVVYRCCCGIDVHKKVIVACLVNGGEQELREFGTTTSEIKTLANWLTESGCEMIAMESTGVFWKPLYNLFELMDLDAMIVNAAHMKALPGRKTDVKDAEWIADLLRHGLLKASYIPNREQRELREITRYRKSLTEERCREVNRLQKILESANIKLDSVVKDITGKSARKLLQRIIDDDIPDSDEVSKLVHGRMRPKLDQIVASIEGITTPLQRKLLAQIIDHIDDLNRRIGELDKLVQEYMAEYEAAIEAIDEIPGIARRSAEVILAEIGLDMGRFPSAAHLCSWAGVCPGNYQSAGRRKHGKTTKGNKALKTILTQCAKSAKTVKSSYFFAQYQRISARRGKNRATLAVAHSMLIAIYHILKNKTAFHDLGSDYYDSFNRDRKINSYLKRLKALGWEPDAIPSSA

SEQ ID NO: 364855 - protein, 394 aa, unidentified
MKLVGIDVGKNSHHFCIMDKETGEFNFAPSSFSNNKEGFDFLINSLKPYSKKSILLGMEDTGHYHVALLKFLLSNGYTVALINPKTTDLTRKMEGAITKNDKLDTITICDVLDTPERKKQYRITKVDRFDLYEQRQLTRHHHNLKEELNIYCNRLQKSIDLVFPEFNTLFGSKYGVVYMNLLKTFGSAEAIASTDIRTIRKCFEIKGRGGRISLTAEKLKECAKNSIGISSEVETIQIKHLVSQIMLIKEQIAEIDKKIEEFSIKNNSPILSIPGISHFSGTSILAELGDIGNYSKPSRIIKFAGVAPYHYESSQYNAQHTAITKKGSKYLRKTLYQVILPVINNNPVFKKYYRLKISQGKGHRCAQGHCIRKLLRVIYHLLETGQSFDPALLR

SEQ ID NO: 364856 - protein, 399 aa, unidentified
MRYIGIDIAKKMHAVAILDERGEVKAGPFTINNTASGFRKLLERFEKTGASSDECLIGMEATGHYWIALFDFLARHGFDVAVINPIQTDAFRKVDTIRKTKTDDIDAVLIANLLRFKAFEPSRLAQESTEALKQLTRFRMCLIKESTQLKNQATAILDRVFPEYHTLFHDTFGEASKELLKRCATPEEILSTDIRTLTRILSESSRGKLGRAKADAVKETAKESIGVSFASNALSFELKQIVGRLSFTRNQIDELDKEIGRILEDTSGKWLTTIPGIGANLAAQIAGEIGDPNRFEDAKKLIAYAGIDASRKESGTSIDSPGHMSKRGSSQLRYALILSADKARLFDPYFGEYYDGLRARGKHHYVASSGVARKLAGCILALMKEERAYQPQPPRMQQA

SEQ ID NO: 364857 - protein, 343 aa, unidentified
MAQRGRLAQNIRARTVARVNQARILQGRAGKEIEMGETYIGIDISCNTLDIAIYEEEKTHQFTNDQGGIRKLCDFLSGIKPTLIVFEATGGYEMPLYIALSEAKLPAALVNPRQVRDFARATGKLAKTDVLDARVIAHFAAALHPQPRPLPESQEIKDIVARRNQLVQMIIAEKNRLHNARKNIKLRIQAHIQWLEEELDSTNKELEQSISNNPEWKEKNDLLQSVPGVGPVLSTTLMADLPELGKLNRRQIAALAGIAPFNRDSGNLRGKRTIWGGRATVRGALYMATLVAIRFNPVIRQLYQRLVDAGKLKKVAITACMRKLLIILNSMVKHNTKWSYTPV

SEQ ID NO: 364858 - protein, 486 aa, unidentified
MGGEQTLDSDNFKFSEDWTEAQFTCGIDVHKYQLAVAIYARDDAGQEFAKHDVFHNDQAGLESLWRFAAKYRPTKFAMEATGVYHHALAAFLASQQADCGWSFEVVIANPADARGVIGRQKYDRVDALTIAQLCAAGILKSGTLVIPALEDLKAVFRAAARLERDRTALKNRIKKTLDRAGVRPTGLNLNAEWARAFLYFLTEFPGTLGDAVSRCSGDDSPVPECSVKLAKNSAMFAAYADVAISPTQQALVRQDLVELEFKTSRKALLALQVDLVLMTRPGLRQVAECLASVPGISPFSAAWLLAEIGPVARYPSMRGFLAYCGCCPRVIESGGHTYSAHITRRSNKHVRTIFYMAATVLCNFTRKESALKAYAQRVVRAKGPKRRKLALMIVATKIARIVFGIIQNPAPFSPDLARPTQVREQGDGRSFCVADRKMLRKAKKCLEHAGEILNDHVLGADLQRLSAALDAALHGKNLAVRGEPAI

SEQ ID NO: 364859 - protein, 454 aa, unidentified
MNEKRSKRRKKAKDLDALEQINLNAAGIDIGAEEVYVAVPQGQDEESVRSFPTFTADLYRLADWLEACDIETVAMESTGVYWIPLYEILESRGFEVYLVNARHIKNVSGRKSDVLDCQWIQQLHTYGLLQPSFRPPEQICAIRSLVRHRDMLIKYRSAHIQHMQKALTVMNVRLTNVLSDITGVTGMKIIRSIVAGERNPEVLASYRDGRCAKSETEIAKSLEGHYKREHLFALKQALELYDFYDHQLRDCDAELEKLYQEFDLPDEPGTPPPDPRKTKRRKNQPHFDLAQSLYRMTGVDLTQVDGLDAMTVQDILSEVGTDMTPWPTVKHFASWLRLSPNNKVTGGKIKQRGTLPSQNRANTALRMAAQSLARSDCALGAFYRRIRARHGGPKAVTATAHKLARIIYFMLKNRQPYHDPGADYYEEQYRIRAIRNLKRKAAKLGMRIEPVGVT

SEQ ID NO: 364860 - protein, 328 aa, unidentified
MQVITVGLDIAKNVFQVHGIDSEGRAVLRRKVRRDQLLKLFGSLAPCLVGMEACATAHHWAGELGAFGHEVRLMPPAYVKAYVKRNKNDAADAEAICEAVTRPTMRFVLHRARHLLVRQRTEQVSAMRAHLAEYGVVAAKGISRLRDLLPVLDPGTGILTELARQTLLLIAQLIEALTIQIRKIETELLAWHRSNPASQRLETIPGVGVTTATALAATVLDARAFRSGRQFAAWLGWCRGRTPAAASSAWAASPRWAAAICATCSSSAPPLSSATRGASQPRSASGPTGCSTASLPDWSPSRSPTRWPGAAWAVMAREENYRATATAA

SEQ ID NO: 364861 - protein, 411 aa, unidentified
METLFERVAGLDVHKDTVVACVRVVVGRGVSEELVEWGTTTKELLGLRDWLEARRVELIGMESTGVYWKPVFYVLEGLCDCWLLNARHLRNVPGRKTDMADAAWIAKLVQHGLVRPSFVPPKPIRELRNLTRYRKAQIQERTREGQRLDKILQDAGIKLSSVASDTRGASGRAMLAALIEGSARPEALAELAKGTLRKKIPALREALNGRFNANHALIVGEILAKLDYLDEAVARLSDAIEEQCRPFEAEIDLLDTIPGVDRRCAEAMIAEFGVDMSRFGDAHRLASWAGVCPGSHESAGRNKTGKTRKGSKWLQTHLNEAAKSIVRSKGTYLAAQYARLKPRRGHAKATVAVEHSIVVAAFHILDRHEPYHELGADYFVRRHDPERHARRLARQIQALGFDVTIRPADAA

SEQ ID NO: 364862 - protein, 348 aa, unidentified
MAMTIVEVVRLITGGVDTHLDVHVAAALDATGGVLGVRSFPTTPAGLVELHGWLGEFGTIGRVGVEGTGAYGAGLSRHLRAQGLEVIEVDRPNRQARRVRGKSDSLDAVEAARAVLSGRACGIAKSADGNVEAIRTLLIAKRSGRETRIACLNQIRHLGFCAPDDLRERLRDLPRSHLAAVAASLRPQAGTEPVAYATKVALRTLGRRDQAINNDADLLDAHLGELVEATAPGLLALHGVGVDTAAILLVAAGDNPERLRTEGAWASLCGVAPLPASSGKITRHRLNRGGNRQANHALWRVTLTRMGSDARTRAYVARRLDEGLSKPEIMRALKRYIARETYQHLPRS

SEQ ID NO: 364863 - protein, 342 aa, unidentified
MNHYAGIDVSLECSSVCVVDANGKILREAKVASEPAALIAWFHLLGFGLERIGLEAGPLSQWLFAAMREAGLAVELLETRHVRKAFEAMPVKSDRNDARGIAQLMRLGWFRPVHCKSMSAQETRTLLTARKLVQSKLRDVENSLRGILRGFGLKVGKTTELKFAGRIEELVAGHPHLQVVAKALLAVRAVLRSEFAAFQKQTRKMAQSDARTRLLMSTPAVGPIVSLTYASAIDDPARFRSSKQAGAHFGLTPKKYQSGETDYTGRISKIGDSSVRTALYEAAHIMLTKPLKGCTQLKSWAMRIARRAGMSKAKVALARRLAVIMHRMLADGKPFNAAAAAA

SEQ ID NO: 364864 - protein, 341 aa, unidentified
MYYAGLDVASKGSFAYVRDRRGNKVESGEILTNRKSIKSFFEKYTDKKAIVAVEASGSTRWIYDLLTRMGIDVYVVNPNKVKAIADSKRKTDKIDAKILSELLRINALPERVHMAQGQARQLRDLIQARHQVIKGYTNLMNYLRGQLRQEGIRIKAREFKTVDYFVRLDSLKLPDHVRQIMTTYHDTIEAMLAEKGKLEAKIKDYSSKDIDLIKTIPGMGEISSRTIQSAIGEIKRFKKAKQLASYCGLVPSVYASGKRIEYGHITREGRSEVRRVGIQSAHAVLRSKSLESEPLRRWWRSVARRRGVKTALVALARKLITIVFYVLRDQKVYDYTLLRAA

SEQ ID NO: 364865 - protein, 415 aa, unidentified
MGPWPMGCCLLCRELMSPTMHGEVLMEQQDRQPGSRRLVGIDLGIASRHSVRVLESDGRVVCRSSCVPTTESLSLMERAALAGAPEGTRLAVVFEPTGPAWLPIAVFFARRGHDVYRVSSAKAADLRRFLRRHAKSNGIDAETLARIPLADPGGLQRLELPGADAAALDRRVRACDRLTSAASEHKVRIKDLVRQLMPMTPLTGDLGKADLAVLERYADPRELLAAGPVELTRLVTSASSHQQGSERAGQWQAAAMAAIDLYGDHPAVPFEELAAEVATEVRLLRAIQAELATHAAARERHYRQVDPGQLARSLPGFAEISGPVLVAIMGRPGRFRHGTKFKSYAGLAPKGSETGETGRKGQSMSKAGPSLLRATLFRAADTARRQDPPLARIYYQQMTEGAPPTSRPVASSPVT

SEQ ID NO: 364866 - protein, 419 aa, unidentified
MSFKIIKKNCCGLDVHKTWIYACIGIADANDRVEYKQARFSSFTKGLQELCDWLAKYHCSDICMESTGKYWIPVFNILEKNNLWVTLSHPKYTKPMKGNKTDRKDAKWICDLYMCGMVKPSFIPPADIRHLRDLVRYRFKLSCMITGEKNRAQNCLTVSNLKLDDVFSDVFGKSSRSITEHILQHPGETFDVTPFVDKRCKTPIEEIQAAVDGAVSPEQAVKLRQCLDHIDELEKHISEVAQEIYRLSEKYEAALELIRTVPGFDKNNLTAIQILSEIGGDMSVFPTAKNLVSWAGCCPRNDQSDRKIKSTRISRAGSYIKPVLVQIANALIKSKKHPEFTDRYRRIKARRGHKKAIIAICRMLLTAIWHILSDLKPYTADGFLEPRPVNESRVLTTSQALNLLKQRGYTIKDDPATAS

SEQ ID NO: 364867 - protein, 356 aa, unidentified
MGKRNRNQGKGKLAVQEGDVVFVGVDCHKKDLHVAVRINGELRTCWVTPRRAGALVKQLHPLRVARTEIVYEAGPTGYGLARRLERAGFGVRVTPPGKTPREPNRGNKSDRLDAKKLAELAEGGRLPAVGIPTEQEDADRQIVRLRAQLLKKVRRTKQQIKGMLLYNELPSPSGWGPEQIARLRDLPMRKELRLVLDVRLDELAYQTAQLQRATKLIADLAKTARHAAHERRVRTHPGVGALTAMDFLAEVYQPERFRRTEEVVCYVGLAPSVRESGERRQEGGCVKGGRPELRRLLVQAAWRWIRLDPGAAEVYRRLVQNTGDRRIAIVAMARRMLVNLWCMRTRGEPYRSRAAA

SEQ ID NO: 364868 - protein, 345 aa, unidentified
MNQISRIGMDTSKHVFQLHGVNAAEVPVLRKKLRRKEMVAFFEKLAPTVIAIEACGASHHWARLLQSFGHTVKLIPPQLVKPYVKRGKNDAADAEALCEAMSRPTMRFVPVKTAEQQAALMLVGVRDRLIRNRTQLANAIRGYAAEFGLTAAKGKAHLVPLLERIEADESLPALARELFAIQAKEYAQLQARIDEVDAKLTAWHRADECSRRLAKIPGVGPIGAVLLRMKTPDPAQFRSGRQFAAWIGLTPKDHSTAGKVRLGVITRAGDEGLRSVLVVGATSVILQVRRGGRASPWLAELLKRKSPKLAAVALANKMARIAWKLMLTGETYTANSAPAALAVAV

SEQ ID NO: 364869 - protein, 342 aa, unidentified
MDHFAGLDVSVKETSICIVDETGKIVREVKVASEPEALLAVLSNAAYHFKRIGLEAGPLSQWLFSALAEAELPVVCVETRHMQAVLKAQINKTDRNDARGIAQMMRVGLYRPVHVKTLRSQKLRMLLTHRKLLQSKAIAIENDLRGTLRNFGLKVGIVGTVKFEARIKELVENLPDLAALVEPLLIVRRVLREQIIILHRRLLAIVRDDEVCRRLMTTPGVGPVVALTYRATVDVPARFRKSKAVGAVFGLTCSKYQSGEIDRNGRISRCGDEMMRVMLYEAAQSMLRSKKWSWLKAWAMQIARRRGMKKAIVALARRLAVIMHRMWVDGTEFRWTREAATA

SEQ ID NO: 364870 - protein, 355 aa, unidentified
MAVTIVEEARPVTGRAAITGGVDTHADTHVAAALDPVGGLLGVREFPATRAGYAGLLGWLGGFGTVALVGIEGTGSYGAGLARHVAAAGIRVVEVDRSDRQDRRRQGKSDPLDAVSAARAAQSGRARGAPKGRDGAVEAIRALMVARRSAAGERTRTNGQARALLLTGPDDLRARFTRHTPAALVTGLASLRPRPGDVAGYATRIALRELGRRAQFLDGQLGRLDELIIPLVTARAPGLLTVFGLGPRTAALLLITAGDHPGRLRSEAAWAHLCGVAPIPASSGKVTRHRHGPGGDRQAGHALWRIVFTRLGSDPATRAYAERRTAEGKSKAEIIRCLKRYVAREVYRHLRPAAG

SEQ ID NO: 364871 - protein, 350 aa, unidentified
MDKELYIGVDVSKQTLDLAYYDGESIDWKKAHIKVSNNNAGFKKIGSWVAKVSKGVDIVLFCMEYTGLYTQNFRLWLEEKHYIYRMVEPRKMHRFEPDLDDGLRSLDRIKTDELDSFRIAIYCEQNHRKILRIPSKLPPPVYFKLKRLLAERKQTVKQSVLYKQQLHDICAYDTDLSVERKNGQLKTLNDALKGIDNEIDMYIKEDADISKNFSLLTSIPGIGRVVALETIVLTENFMAIDNPRKYACYIGVAPFKKESGTSVRKGSSVSKKGFKQAKADLSIACLVCMQHIPNIRDYWERKRKEKCSGIVFNAIKFKMILRMFAVIKRGTPYVETDNYRNGKNKQPGVN

SEQ ID NO: 364872 - protein, 343 aa, unidentified
MAYYVGLDVSLKTTAICVVDHDQNVVWQGSAETHPEMILNALDRWIGSVMRIGLETGSSSPWLARALKARNLPVIVMDARRAASALKARPVKTDRADARALAEMLQSGWYTEVFVKSEESHRIKALLSARDQLVRNKRTFFGQIRGMLRPFGIRLPARQGTRRFDEAARAACRHDDLLYACVNALLEALGAIEVQIAALDKRVRAMVQTSKACWYLTSVPCVGPITALAFAAAIEDPGRLRRSRDVGAYLGLTPRRWQSGEKDIVGAISKQGDAMARHCLYEAANCLLTTWGGRSALKSWGLRLVKRVGAKKARVAVARKLACLLLRLWKAESHYDEDQVRTA

SEQ ID NO: 364873 - protein, 347 aa, unidentified
MKIATVGLDLAKTLFQIHGVDSQGHVVVRKQVRRADVLAIFAKLEPCVVGMEACGSSHYWGRELTKLGHTVRLIAPQFVRPYVKSNKTDAADAEAICEAVNRPHMRFVPIKTQEQQTMLSLHRARAGLVKSCTALANQIRGLLGEFGIVLPQGIRMLGQRVIEALSNHEHELCAEFRTLIQLLVEHLRELGNKAAELEGRIRAMHRTDEAGQLLETIPGVGPLAASALAASIGNPRAFRDGRELAAWLGLVPGQHSSGGKPRLLGISKRGDTALRTLLIHGARAVIRMAANKPEMTDSWVMKLCRRRHKNIAAVALAAKNARTAWALLIRKQVYQVGHVPVRADVTV

SEQ ID NO: 364874 - protein, 403 aa, unidentified
MVIDTSGVGVFLGLDVGKSTHHGHGLTPAGKKVFDKPLPNSEPKLRAVFEKLAEKFGTVLVIVDQPASIGALPLTVARDAGCLVAYLPGLAMRRIADLYPGEAKTDARDAAVIADAARAMPHTLRSLELTDEITAELTVLVGFDQDLAAEATRTSNRIRGLLTQFHPSLERVLGPRLDHQAVTWLLERYGSPAALRKAGRRRLVELIRPKAPRMATRLIDDIFDALDEQTVVVPGTGTLDIVIPSLARSLAAVHDQRRALEAQINELLGAHPLSQVLTSLPGVGVRTAAVLLVTVGDGTGFPTAAHLASYAGLAPTTKQSGTSIHGEHAPRGGNRQLKRAMFLSAFAALHDPASRTYYDRCRARGKTHTQALLRLARQRISVLFAMLRDGTFYEPRLPETVAA

SEQ ID NO: 364875 - protein, 427 aa, unidentified
MSEERSVELRVSVDVGYRRHSVAMGLSSGEVLEEFEIDHRPEGFEEFFSRIEKQRKKKHCAVAVAMEGYNGHARPLDSLVRERGYRLYNLNNLKFARFKEIFPGAAKSDRIDARKGLELFQLSDHLPLAKEVLQEVRGTPTENEILKRLTRRRRRLVNERVRVVNNLQADLQAVCPGLLEITGEASNQWFLNFLLSADTLPKLARLKRSTLLKIPSVGVKSAALIEGWQKRFHFSQEVDWVGEMIQEDAKRCLELDEKIKRLEAQIAEVAKDSKIAKTLRSIPGFGAVCTSELAGEIGTIERFASEGSLSLYLGMSMLDNSSGKYQGTKAPKQVNTRAKAAMMIALDRHRKYVPESQRYYEKKRSEGKKHNQAIRALGRHLSRIIYKMLTEQREYQIRPEKGNTKSKVSPRSFVKTQIRRPKISAKS

SEQ ID NO: 364876 - protein, 331 aa, unidentified
MTGIICGVDVSSSLLAARIGRAGAQASFPNTVEGIAALAAFCRTHQVELVAMEATGGYEQQPFALLAEEHLPVAILNPRAVRRFAEGMSLTEKTDAIDAGLIEWFAEVKHPPPQALAAAGQQQLRALVTRLRQLTDLRTAQINQSRLVTDPGVQATFTELLAMLKRQTRELEQNIAQLIAADPLWHQLDQAFRSIKGVAGRTVARLMAEMPEIGTLSNKSISKLAGLAPMAADSGKHQGKRRIRAGRSAVRQILFVVASVAGRYEPDFILFQQRLKAAGKPPKVIRIALAHKLLVRLNAKARDVRNRFHEPRSINTGSPGSDFIAPDLAVA

SEQ ID NO: 364877 - protein, 402 aa, unidentified
MQVDDIDVFIGIDVGKSEHWATALTTAGECLHDRPLPNDEARLREVYEHLGEHGRLLVVVDQPATIGALAVAVAQDMGITVGYLPGLSMRRIADLSPGSAKTDQRDAAVIASAARTMPHTLRSITSSDEDAAALSMLTGFDLDLARQVNQVSNRIRGLYTQIHPALEGVLGPWLEHDSVLEVIATWPTPAALRKAGRARINAKLKANGCRRHAAWAQAIVEALSKQTVTVAGTDAAGVVLPHLARQLIALHTQRADIAAQVEALVEAHPLYPVLTSIPGIGVRTAAVFLAGTLGKTFTTGAHLASYAGLAPVTRRSGSSIRGEHVSHGGNKRLKQAMFLSAFASLRTDPVSRTYYERKRAQGKRHNQAILALAHRRILTLHAMIRNGTLYNPQPAQPLTTTA

SEQ ID NO: 364878 - protein, 353 aa, unidentified
MPRPRLSRQPLKKLGADAQALLTLLRRWQAEATKAGGTINRIAVAFEAGRDGFWLARWLRAHGIEAHVIHPTSIPVSREHRRAKTDRLDTGLLLRAVLGWLRGEPKHCSMAAIPTIAEEDARRPNREHQTLVQERTRVVNRMKATLIRFGIRNFKFKLRKASDRLEALRGPEDEPLPPNTVAELRRDMARLQLIGEQINAIEKARLEQLKQAPCKGTHPMLLMLAQIMGIGVETADMLVHEVLSRELRDQRAVARYGGLTGAPDESGAKRREKGLARAGNVRVRRGMIQLAWRWLMHQKNSKLAQWYQARTTGAKPGVRKTMIVALARKLLIALWRYVRTGELPAGVALHPAT

SEQ ID NO: 364879 - protein, 383 aa, unidentified
MKAVCGLDVHKDSVYLCILSEFGELIEKVFGVLTYQLEEMRDLMLHHHVVEVSMESTSVYWIPIWRVLSPHFKLNLANPYFIKQLPGRKSDVKDAQWIAECTMKELIRGSFVPPETIQQLRQYDRRIFDLNEEIVRKLSKLDAVLQRCNIRLSNYVSNVGSKSYKAVVRAISQGITAPEELVKLIHGRIINHHGIDVITASLKGVVSLAEIDMISQLRDELDMAEAHKEKCQAKMLEICEREFPEELKRLQTIPGIKERAATSLIAEIGTDMNKFETANHLASWSGLKPRNDESNKKIKSRSITHGNVYLRKTIIECAWAASRTKGCFFSRFSYHQTQVRKKNKMKVLVAVARKMLIAVWHVLHDNTIYIDFTTDRKTSRTKG

SEQ ID NO: 364880 - protein, 365 aa, unidentified
MRTIGLDLAVQTAHKAVVLDEGGHFCTPILTVHTRPSELSQLLAQARDGASSAEVQIVMEPTGMAWFPVAVYHARQAVPVYLVNSQEVADLRRYYKRHAKSDRIDARVLARLPRVNPDKLHRLTLPSATALACQRGCKQLDHLATQITAIKNRLQAIDRFAWTGLEEQVFADPFSPAARFFREHWYDPRQVVQVGANAIRQQWEARAVDADDGGAWVEPLLTLAQQVLTLYGTDGQFLDFGQLQAEVQRDQAWLTWLEQQHHTLRLRTVRPLYRAVHPSRNLETLKGVGQDSAAVYASFIGDPRRFSSTRLFRGWSGMVPSSAQSAENEAKGLHVTQAGPDLIKKYAYLDAEIARRYDPQIAAAC

SEQ ID NO: 364881 - protein, 313 aa, unidentified
MAEVNAAIEVGKRELQVVLGSGGALFTEPNHPRGVKRVVQRLSEAGCVRVLVEGGSYQSVLVAGLRAAELPVVIVNPRRVREFARSTGQLAKTDQIDARVLAKYGETIAPPVKELPAELNQDLRALWVRREQLIEMLVMEENRLEHVPPKAKAVAHNLRSHIDYLRKQIKQADDDMDRMVRNSPLWDQYELLTSVPGVGPVLSVALLSDLPELGRLNRGEVAALAGVAPFNYDSGTLRGQRRIEGGRARLRRVLYVATVAAVRWNPVLKAYYQRLRAAGKPAKVALVAAMRKLLTILNSMLATKTPWRPPCPA

SEQ ID NO: 364882 - protein, 338 aa, unidentified
MKLYGAIDLHSNNSVTVVSDEQDHVVYEKRLPNDLALITQQLASYRDSLEGIVIESTYNWYWLVDGLMDQGHKIHLANTAAIQQYEGLKYTDDPSDARWLAHLLRLGILPQGYIYPKEHRPVRDLLRKRGQMVRQRTMNLLSIKNLFSRNTGGSMSANRVKRLDSKEIEELVPNADLALAIKANLAMLQCADGQIDLLEKTIVGRVKLKPEFELLKTTPGIGHTLSLTIMLETGDISRFPTVGDYASYCRCVGSQKISNSKKKGKGNTKNGNKYLAWAYVEAANFAVRYNAKIKSFYQRKKAKTNAISTIKAVAHKLCRACYYIMKDQVAFDVTKAFA

SEQ ID NO: 364883 - protein, 393 aa, unidentified
MSLDHHFEEPTAIRTNLGAIFVSLELSRSTWLITSLSPGAGEKMSKHGVSAGNVAALLTRLSELKQKAFARTGKSFRLVVIQEAGLDGFWIHRVLQSEGVESHVVDAASIATSRRRRRAKTDKIDGEALVRALLAHKRGEPRVCAMVRAPTPEDEDRRRLCRERKTLTNERVQHVNRIKGLLFSQGISDYEPLRQNRRQRLDELKTGDARPLPPHLKAQIGRELDRLELLLEQIKAVEIERDALISAMKPGGMNADAVRSPPAMLISLNGIGPEFAAVLWSEGLYRTFVNRRQVDAYAGLAPTPWQSGSVAREQGVSKAGNPRLRTTMLQLAWLWLRHQPQSALTLWFHERVKRNGGRLRKTTIVAMARKLLVALWKYVTAGVVIDGAVKRAV

SEQ ID NO: 364884 - protein, 341 aa, unidentified
MEEYIGLDVSMKETSVSIRRAGERIWRGKCASDPKIIAELIRKRAPAVKRVVFETGPLSIWFYHSLRAEGLPAICIDARHAKAALDMAANKTDANDADGLAQLAEVGFFREVRVKGFDSMLTRTLVAARMRLVRITTELSNQIRGVMKTFGLLVPAGKGSTFEKNVRSLLANQDGLASIVLPMLEAWRGLRIRAAELGRQLVRDARQNQACRILMSIPGIGAITATAFTTAIERPDNFKKSRSVGAWIGLTTRRYQSGEVDYDGHISRRGDGSLRGLLYEAAAVILTRSSTPSTLRTWGLRLRERIGFKRAAVAVARKLAVVMHTMLKTGELFNPNAGAAA

SEQ ID NO: 364885 - protein, 378 aa, unidentified
MKAARFTADEIERVAYLTSKGYLPVAVDVASRVFQVCYYDLGAKHIRNYQLSRVKFFEFIDDTQTPRKLIGIEACGSCNYLCRYIEEHNHKCHILPAQKVKAFLHLDKTDRIDALGILKALITPSMQHIPARTQENQYLLNLITVRDQLNKQFVQTVNAAHAFLYESGVVAGTASVASATKVTEALKALGNTETEKEHSEDDCSYSHLNCISESLLSNIESLQTKIKEINTHLLSYASNNEICSNLQTVPGIGKLSAVALYAAMGDPERFSSSRAFAAFIGVAPVTTGTGGKTTVLGIRKSGIQSIKKMLYMCAMVYLSQAMKNGTESSWLKLRLNQNRSKKIIICAIMNRLARIAYAIAKSGQPFDETKCNMIKKLR

SEQ ID NO: 364886 - protein, 317 aa, unidentified
MTTKIQNYYIGVDISKDTFDVYRLPGDKHYTYQNDSKGFQAFIQVLKRLKGQVLIVCEATGGYEIPLAQKLHDKEFKMVIMNPRKIRDFGRAVGFLAKTDKLDAKLIALFAERVQPAYRKKDFSKLELVALHQRQEQLKTLIQAEKNRLAHTSKDIAGSISKLIDFLNNQLDDISKKLEQTINADCDLRNKVEIVQTCKGIGRLTAQNMLICVPELGTISKKPLTALVGVAPFNRDSGKMRGKRMISGGRYQARRSLYMSTLVAIKHNPPIRDFYNKLLEKGKPKKVAIIACLHKLLIIINAMVRDMLPWQKMNMGT

SEQ ID NO: 364887 - protein, 376 aa, unidentified
MKKKRDREGMVTAALDLGDSESLATILSPDGDVVDSFSMSMSDDGYSSFASKVPKDARIAFEATSMAYPVSRRLTALGYSDITVAHSKELAWIVKSKKKNDRIDSLKIARLHMAHMLPESHLLSREEQVKRDLLIQRVTLGKEIGKMKLKLIAYLKREDVYLSLPESSDSFSRERRQAIRSMRFGGDGDDDDGRDLVVGTMMDRLEFLERQCAPLEEKVRTIVRDSEDIRRLMSIKGVDFYLASLASSYVGDVNRFPDDDHLASFLGIIPESWDSANVKRRGHMSKEGPSTARWAFSVMTDTVMRYNPRLKTYYLSVKKRKNSGSLAHVATMRKLVRMIDHMLRYKENWRWEDEASTAKKLANLDREAEAKTTGGD

SEQ ID NO: 364888 - protein, 347 aa, unidentified
MEQYAGIDVSLEASHVCVVDAQGKILKEAKVASEPEALIAWFAAHGTPMARIGLEAGPLSQWLFAGMKAAGLAVELLETRHVRAAFKTMPVKTDRKDARGIAQLMRLGWFRPVHCNSLPAQEVRALLTTRKLLQAKRHDVEMSLRGVLRGFGLKVGPTTPKTFAGRVRDLVAHHDTLQTIADALLSARTVLEQEFKAIEKRLSGLARANGPTRRLMTTPGVGAIVALTFVSAIDDPARFRSSRMVGAHFGLTPRKHQSGETDVTGRISRIGDHGVRVALYEAANVILTRAVKGSDLKSWALGVAKRAGMKKAKVALARKLAVVLHRMLADGTTFMASKVAPSAAVAA

SEQ ID NO: 364889 - protein, 335 aa, unidentified
MQVYGIDLSMEKFDVNFIDAKGNEKNREVKNKVISISKFLSSVAEDGILCAEHTGIYGELLIYLCNQAEVPIALVPGYTIKHSLGLLKGKSDPIDSRRIREYGERFADKLVFSEYDQESIVELKQLYTLRSQLVKARKSLLTSDKGRGHLPLQSVSVHNHLQPVLFGLDTEIIAVEEEIEALIKADEDLNENYELVKSIKGIGPVIATDLLIKTGNFENINTARKAASYAGVCPFPNTSGKMKGKSKTSPFADKKLKSLLHMGAKSAVKHNKEYRLYYQKKELEGKPHYLIMNNISNKMLRTVYSVVKNKIPYNQDHVCLDPRERNINSSTKKVA

SEQ ID NO: 364890 - protein, 350 aa, unidentified
MTTIARTITGGVDTHLDVHVAAALDERGALLGTESFATTPKGYQALLDWLESFGTVELVGVEGTGSYGAGLTRHLHRQRIAVVEVDRPNRQKRRRQGKSDALDAVSAARAAQGGGANGSAKTRTGNVEAMRVLRVARSSARRSRTQAINQMRSLISTAPDELRAELRDLSIYKVLELAGAYRHTGRTDVTSVTKLTLRMLARRALSLEAEVKEIDRLLKSLVAETAPELSTIDGVGTDVASALLVTAGDNPERLKNESTFAKLCGVAPLDASSGKNERHRLNHGGDRQANSALWHIVFTRMVNDPRTKHYIERRIKDGRTKKEAIRCLKRYVAREVFAQLPRPTLALDNP

SEQ ID NO: 364891 - protein, 353 aa, unidentified
MITLGIDAHKRTHTVVAVDELGRQLGTKTTRATTSKDHLGLLRWADQFGPDRTWAVEDCRHLSRRLERDMLGAGETIVRVPPKLMAHARDGARTYGKSDPIDALAVARAALRERDLPTAHLDDEAREIRLLVDHREDLVAERTRHINRVRWHFHEIDPGWEPKERGLTAFKNLDIADERLALIDSVLGRIARDLIRRIRELTVEINELSKELDGRTVERAPNLRAIPGVAALSAAKFIAEVAGIDRFKSQHAFARHNGTAPLPVWSGNRERHRLSRTGNRQLNAALHRIALTQARYHPDAVSFIERRVSGGDSGKDAIRALKRRLSDVVYRAMNADLEAIASTPTREHSLAAA

SEQ ID NO: 364892 - protein, 371 aa, unidentified
MGSNHRTKFVGMDVHQKSISIAIADDGPDREVRLYGTIKNTVEAIDKVIRKLVSTGAELHFVYEAGPCGFGLYRHLTGNGFCCIVAAPSMIPKKRGVRIKNDNRDAISLARLLRAGEITPIYVPDREDEAMRDLTRARNDARIAARKAKQRLHSFLLRNECIYHGKKKWTKSHFNWLAQLIMKHPAQQVAFQEYIEAVNECSERITRLDEQIVKAADEWRWAPTVKALQALRGVSLLTAVNMVAEIGDFNRFQNPKELMAYLGLVPSEHSSGDRIRRGGITKTGNSHARRLCVESAWSYRYQARVTKLLLKRHEGLPKDVLQIAWKAQLRLCTRYRRLRARGKVSQVVVVAIARELVAFMWDIARRIPAVA

SEQ ID NO: 364893 - protein, 408 aa, unidentified
MNPLFVGIDVSSKSNVAYLMKPDGSKHSSFSVQNNLGGAKLLSERIVSALGSMQLSDVVIGLEATSIYGDSLVYALREDGSLGRFQRKIHVLNPKQVRKFKEAYPDLPKNDWVDAFVIADHLRFGRIAKEVYMDDYRYQALRTLTRARFDVIQSLTREKQRFANYLFLKCSGIAQNKDIQNTSATTIALMERFETVDELANADLNELTAFISEAGRGRFADPDATAKTVQAAAKGSYRLPRTVNDTVNQAMAVSIASMRAMKEQVKVLDKAIEQQFEIIPNTLTSIPGIGKVYSAGIIAEIGDVHRFESQASVAKFAGLVWHKHQSGDFEAEHSQMIKSGNRYLRYYLLEAANSVRRCDSEFRRYYDLKFKEVNKYQHKRALALTARKLVRLVFRLLKDNRLYIPPEG

SEQ ID NO: 364894 - protein, 403 aa, unidentified
MNAVGIDVSKGKSMVAIMRPFGEIVSTPFEIKHTTSDINSLVEIISSIEGESRIVMEHTGRYYEVLAHQLSEANLFVSAINPKLIKDFDNDSLRKVKSDKADAVKIARYALDKWQNLKQYSLMDELRNQLKTMNRQFGFYMKHKTAMKNNLIGILDQTYPGVNTYFDSPARSDGSQKWVDFVSTYWHVDCVRKMSLNTFIIHYQKWCKRKKYNFSQSKAEEIYGKAKELVPVLPKDELTKLIIRQAVDQLNSASVTVEELRSLMNETASKLPEYPIVMQMKGVGPSLGPQLMAEIGDVTRFTHKGAITAFAGVDPGVNESGSYEQKSVPTSKRGSAELRKTLFQVMDVLIKTMPQDDPVYKFLDKKRAQGKPYYVYMTAGANKFLRIYYGRVKEYLSSLPESE

SEQ ID NO: 364895 - protein, 408 aa, unidentified
MTASKSSFNIIPLEYDIFVGMDVDKRSIAVTVYDHNGKVDSFKTSNSAVKIINYARKHFAEKRVAFAYEVGPTGYGLYDQLTEAGYKCLVVSSSSVPTPSRSRVKTNRLDSQRIAETLRGGELKSVRVPSKKYRHLRHLIHLYNTVSKHSRNCKCRIKALFLLEEIPYPNMSKTDHWSNNTIRRLETMELEAPLRFKLDVLLEDLRHFRQQILRVKKEIRRFCRSDQDLADSICYLMSIPGIGWTIASHLLARIGDWRNLNNVRELGDFIGLTPWENSTGDDVKKGNITRAGDSRLRNMLIEGAWTASARDPEMKEFYHRIFSRHPQDRAARKAVVAVARKMTMRIFRVLKDRRLYIPAEKYKINHRPSDKKRRPTAPKDASTLCRTRKYVLKRDKKYSPVFAGSLAR

SEQ ID NO: 364896 - protein, 323 aa, unidentified
MAKRITVCAGIDTGKKKLDVALDGSPERLQVENTLEGYEVLLDWLRRHRVKRLGIEASGGYEQAVVAELRRKRFVVVVFQPAQVRAYAKFHLQRAKNDKIDAALIAACTAAVKKIHAAPDPRLSPFAEQLTMIDQIGEDIARIKNRLETCRDLHIKELWKQDIARLAKRERAELKALVAAIRKHPDLAERLDLINSIDGIGLPTAVAVLVRMPEIGRVAREQAAALAGLAPYDDDSGEQVGVRHIEGGRERLRRALYNAALAASFRWNQQLICLYQRLIAKGKKHKRALIACARKLLIFANTIVARGTPWQDHRPAAAALTIG

SEQ ID NO: 364897 - protein, 425 aa, unidentified
MRESEPTGPPLMKSPQKGKAMQILHECCCGLDVHKKSITACVLRLGQEKQIRRFGTTTWEIQSLSEWLQEAGCTHVAMESTGVYWKPVYNILEGQFQLLVVNAQHLKAVPGRKTDVRDAEWIAELLQHGLLKGSFVPPEFERQMRELTRYRTSLAKERARTSQRLQKLLESANIKLASVASDIQGVSAYAILRELAKGETDPAILASLAKGRLRHKRAELEQALEGRVRAHHRFLIAELLGHLDYLEDSIERLDQEIGDRFRPFEQDLQLADTIPGINTRTAEVVLSEMGTDLSRFPSDAHLASWSGLCPGNNESAGKRRSGKTRKGNRWLRQALIEAAHGAAHTKETYLAARYRRIAARRGHQKAAVALAHTILIIVYHVLKRRRPYQDLGSNYFDERDKTAVQRRLVKRLEKLGFSVQLEPAA

SEQ ID NO: 364898 - protein, 306 aa, unidentified
MVFSHQKKTKTETNNAKGIQHTLDYLSQFNVALITLEATGGLEIPVAKALARAGYRVFIANPLKASEFAKSQTRAKTDAKDAVNLAFYGLTCELKGEVEHQLYVPLSEQEEQLEALVVRRRQLVDMRVAELNRLQQSHETQLDNIQQHIEMLDKLIAELDKDIDDQSKHFSDKADLISDIKGVGKNCVAVMMSSLPELGKLSSKRIASLVGVIPHSQESGQWKGKSFCYGGRAIVRNALYMAALSAIRFEPVFKAFYTRLVAKGKAKKVAIMACMRKLLTIMNALVRRNEKWDATRYLSTESVGQN

SEQ ID NO: 364899 - protein, 355 aa, unidentified
MDSLKYVGLDVHQATISAAVLDAEGKLVMQCVLATRAGAILDFLQGLRGTVHLTFEEGTHSAWLYDLLVRRVTRVVVCDPRKNALLKSGNKSDTVDARKLAELLRAGLVSPVYHGENSMMGIQQLGRSYTALTEDTTRVMARLKAVYRGRAIACAGKKLYGQQHRGEWLAQLGEPGLHRRAELLYQQLDVLQSLRREARQELILESRKHEAVKRLRTVPFLGPIRAALLIGKVQTPHRFRTKRQFWAYCGLALETRTSADYGFQDGQLVRTRKPVFIRGLNFNHSHELKNLFKGAATTASAREGPFRIFYQGLLDKGVLPAMARLTLARKIAAITLTIWKKGEAFDAEHLKTQAA

SEQ ID NO: 364900 - protein, 349 aa, unidentified
MKIIGCDFHPGYQQIAMLDLVTGEIVEKALSHERKEEVRAFYAGLEGSIRVGIEASGQSQWFERMLAELGHEVWIGDAAKIRASCERKQKTDRRDAELLMKLLAEDRFPRIWVPTAVERDGRQLLLHRHKLVRMRTQVKNQLQALALNQGVQRKRKLWSETGRKQLESLPLLPWASRRRAELLQLLDQLGASITELDRAVVEQANARPAAQRLMTHPGVGPITALAFTLTMGPAERFQRGKQIASYLGLIPSEYSSGGRKQRLGHISKQGNPFLRGLLVEAAQSAVRLEPEMRRAYQRLAQRKCRGLAKVAMARKLAVRLYWMLRLQVNYAQLIQGSHAGQPGTFRGRG

SEQ ID NO: 364901 - protein, 323 aa, unidentified
MTSTVLGIDISKKDFSVSLLTESRATKPKKFTNNTQGFESLHNWLKQQSVVELHACMEATSIYGEALAEFLYGAGFQVSIVNPARIKGFAKSELLRTKTDSVDAALIARFCAAMKPSLWTPTAPEVKELQALLRRLESVAEMMTSEQNRLETATPTVAALTQEHLDYLQQQQQLIKKLISDHFDQHPHLKQQRELLTSIPGIGDLTASILLAEIGEVSDYDNARQLAAYAGLTPSERTSGTSVKGKTRLSCTGNVRLRKALYMPAVVAMRYNPLLKAMSERLLGRGKVKMQVIGALMRKLVHLAFGILKSQKPFDPNYAIATP

SEQ ID NO: 364902 - protein, 386 aa, unidentified
MQKLNDLNRSLAALEPDGTLIAVIEMSLSSWLVAGIVPGVERQPLKKLVVDESALLKLLHRWREEAEKAGRRIERIAVAFEAGRDGFWLARWLKARGIEAYVIHASSVAVSREHRRAKTDRLDTELLKRSFLGWLRGERDHCKMVEIPTMQDEDAKRPNREHDSLIGERSRIVNRMKAALVRLGIRGFNPKLKRATTRLDNLRTPEGEPIPPNALAELRRDMERRRLVNNQIRQIEEERLERIEKTPCDGPHVMVRLLARVMGVGIETADMLVHEVLSRNLRDRRAIARYAGLTGSPDESGRKRREKGLARSGNVRVRRGMIQLAWRFLLHQKNSALTKWFRSRTENARRTRKPMIVALARKLLIALWRLVREGIVPDGVVLRAVQ

SEQ ID NO: 364903 - protein, 412 aa, unidentified
MNPVVGLDVSKGESQVQAFLDKGKPYRKSFSIKHTLDGLDRLLEFLREIEKLADGKQPSVILESTGQYHMPVIQFLEEQQYVYIIVNPLISHRARSTNLRKVKTDAIDAYQLCELYYKEELEPYKKRGIHLLNLRNLTRQQETVSSTAVQTKLQLQSILDQIFPEYRGVFGDLYSKISLQILSIFPTSKEVLSVSESDLTNKIAELCTTRSEKWAKEKAIKLREAALRNPFQNNLYQSHIFNLRMFINIVLQYQEHLSKLAAEIDALAKEIEEYEIIQSISGVGEKIAATIISEIGEIERFNHPKKLVAFAGIDPSVYSSGRFTASINRITKRGSSRLRQALFMAVQCGIRDARKQKTSEEIIPRNKKLRKFYDKKREEGKPFRVAIIACANKLLHWIYALLKRKEAFQNAV

SEQ ID NO: 364904 - protein, 412 aa, unidentified
MRVVYKRCCGLDVHKKVIVACLLLLESNGELRKEIRKFGTMTKDLLALLDWLREAGCTHVAMESTGVDWKPIYNILEGQLEVAVVNAQHLKGVPGRKTDVLDAEWLAECYQLGLLKASFIPPAPVREVRDLTRYRTTLIKERGRTANRLQKVLEDANIKLASVVTDIQGLSAKAMLAAIVAGTTDPEVLAQLAKGLLRKKRPQLLEALAGQAKPHHRFLIAEHLSQIEYLEEAIQRLSKEVEERLRPFEEDIKLLDSIPGIGRQTAEVLLAEIGWDMSRFPSGKNLASWAGMCPGNNESAGKRRNGKTRKGSRWLRHALIEAAHGASRTRNKYLRAQYHRVAAHRGKKKALVAVGHSVLVIGYHLLTRRQNYSDLGANYFDERDRTAVQKRCVKRLEKLGYKVDLQPVTRAA

SEQ ID NO: 364905 - protein, 345 aa, unidentified
MSVLKQVVGIDVAQKELVVTLGRTLGDFSIELYAHKVFVNSDGGIKALMRWVDKLTDGSVCVSFVMEATGVYHQKFAYYLDENGHDVSLILPNKISNYMRTLDHKTITDRSCSRAIAQFGLERKLDCWHKPKEVYRRLQQLTRERDQIVHERSMVKNQLHAEQSEAYPYQKSIDRLKSRIALLTEQETEVKKDIEELINGDASLEAEINLITSIPGVGRLTATIVLAETNGFELIRSKKQLSSYAGLDVREKQSGTSVNGKSRISKKGNRSLRKAMYLPSLSAVKWDDRFKSVYARIVSRSGIKMKGLVAVQRKMLEMIYTLYKSRNKYDKLFLIKEDSAPIQNV

SEQ ID NO: 364906 - protein, 343 aa, unidentified
MGEGSWVGVDLHARSAVVSVLDGRSGELRVQRRVPAASGTLVAWLCGLPQPVRVAYEAGPTGFELARACLGAGIDCLVAAPGKIPRAAAERVKTDRRDAERLARLLRLGELTPVRVPDELEEATRDLVRAREDARADLMRARHRLSKLLLRHGLLWQASAWTREHERWLRGLSFGGPLAVCFDEGYGAVLQAKARRDALDRAISEAAMRPPFAEAVARLCCLRGDWQRFDPARLGAFLGLVPSESSSGDKRRQGGITKTGNSHARRLLVEAAWHQRRPLRPSLALTGRRAGQPAAVRAQAEQAARRLHQRWWDLERRGKRRTIVAVAVARELAAHCWRLATME

SEQ ID NO: 364907 - protein, 408 aa, unidentified
MRLFVGDDWAEDHHDVEVMNEAGKVLAKKRLPEGAAGMTQLHGLIGRHVPEDADDAEVVIGIETDRGPWVAALIAAGYTVYPVNPLLASRYRERHAVSGAKSDGGDAHVLADMVRTDSHQLRPAAGDSPEVEGVKVVARMHKTMIWDRTRTVQRLRHQLREYFPAALEAFDDLDAPDVLELLAKAPDPARAAKLTRAQVAAALKRARRHHVPDKADAILAALRTGHLGQPAALTTAYAATARSLVAVLVTLNEQVRFLEAQVKEHFGRHPDAEIYQSQPGMAAVLGARVLAEFGDDPYRYESAKARKNYAGTSPITRASGKKKVVAARFVRNNRLIDALMAWAFTSMLASPGARAFYDEQRAKGFEHNDALRRLANRLVGILHGCLKSRTLYDEDAAWGHREELKHAA

SEQ ID NO: 364908 - protein, 460 aa, unidentified
MNRNRSKSRVDRTMPMVHPNAAAIDIGATMHMAAVRADRAPEPVRSFGTFTADLHRLVDWFTECGVETVVMESTSVYWIPIFELLDARGFAVFLVNARDAKHVPGRKTDVSDAQWLQRLHSFGLLRASFRPKGQIAELRAYVRQRERLLEYAASHIQHMQKALTEMNLQLHHVVADITGATGLRIIRAILAGERDPEALAGLRHYSCHSSAETIAKALTGSYRTEHLFALEQALSLYDAYHEKASTCDVRIESVLKELIIHRGHDHGSAPPVSRRRNRTDQANALAFDVRAALFGLLGKDVTTIDGLGPYLSLKLIAECGDDLTSWPSAKHFTSWLGLAPSNKVSGGKMLSSRTRRSGGRAAGLLRLAAVTVGRTDTALGAFYRRLSSRIGKAKAVTATARKIAVLFYNAVRHGMDYVDPGASSYETRYRTRVINNLHRRAKTFGFVLQPLEPKAGAAVS

SEQ ID NO: 364909 - protein, 328 aa, unidentified
MGDIITIGLDLAKNVFQVHGVDEAGSVVVRKRLRRGQVLAFFAGIPPCLIGLEACATAHHWARELIALGHEARLMPPNYVKAYVKRNKHDVADAEAICEAVKRPSMRFVPLKTAEQQSVLMMHRARDLLIRQRTMLVNALRGHLAEFGLIEAQGLHKVARLITIVMDEMDGRVPDIARQVLKVIVSQIEDIRRGIAELETQVLAWHKNNPVSQRLATIPTVADPNTFRSGREFAAWLGLVPRQNSTGGKARLGGISKRGDSYLRRLLVNSAHTVLLCSKAAKTDPWLISLPRRKPRLVASVALANKTARVAWAIMSRRETYRHVAAAA

SEQ ID NO: 364910 - protein, 339 aa, unidentified
MLYVGIDVAKNKHDVTALNVPGKTVLKPLTFSNNKAGFELLDLSLRQLNQDCLIALENTGHYAFNLLNFLHEQGYKVYTYTPLLIKEFAKSLSLRKTKTDKKDAHGIALKLLSDPNREQFQHDNRQVELKILARHIHRLKRKQSDWKVQYTRCLDIIFPELDKIVGKHAECTYQLLTRYPNPQKRLEAGFDKLIEIKRLTASKIQDILSVAPRSIGTTSPAREFEIIKHYKRLIDKAETCVNDLMAEFNSVITTVTGIENRLGAVILAEIRNIHAFDNPAQLQAFAGLDSSIYQSGQIDLAGRMIKRGSPHLRWALIQAAKACPRFSPAFKAYLKTKLE

SEQ ID NO: 364911 - protein, 429 aa, unidentified
MNFRPIAGIDVGKFFSEMAILSPSNELVARMKIKHDSYSDIERAFELLKKVEKDFDSRPFIVMESTGHYHKILFHSFYRFGYEVSIINPIQSDCIKNIGIRKVKNDKVDAKKIALLYRFQELKATNIPNEDIECLRSLCRQYYKLNDELTAYKNRLIGVVDQLMLNFKEVFSDICSKTAITVLEECPTPSLMIKADRDKLISVIKKNSRKSHEWATKKYDLLILKAKEFEPLSIDNPANIAMLEKYISMIKTLQENLKKVLKTIEQLIANDLSKDMPVMWLTLELLQSIPGVGLITAATILAEIGDFSAFSKPKKLVAYFGIDPSVVQSGEFTGTRNKMSKRGSKYLRRVLFTIAIANVRTKRNGQPTNPVLLEFYNKKLQSKPKKVALGAVMHKLIFIIFAVLRDKKPFELRTPEEHAKRLKTKHIAA

SEQ ID NO: 364912 - protein, 425 aa, unidentified
MRFIGLDVHRDFCEVAICEDGTVRSGPRVPTSPETLARFAENLGPGDEVALECTGNALAIARIIEPHVARVVIAHAKSVRAISWAKVKNDRIDARTLATLLASGFLPGVWTPDERTRLLRRLVGRRAQLLKHRTSAKNAIHATLQRNLVGRAPATDVFGRRGRTWLSSVELPRDEQDTVEACLRQIDFLDAEISHLDQVLAREVVDSRDVRRLMTIPGVNVTTAATFLSAIGDIDRFPTPRHLASYLGLTPRVRQSGIAEPRLGRISKEGSARARHVLVEAAWAVLKTPGPMRAFGERVAARRGRNVAAVAVARKLAVLCWHLLSTDTDYAFARPSLTAEKLRRMELVAGAESRRGWRGPGATFASKDQHARERAIVIQAETAYRRLVADRTGRRRGAGAITGARISSPLEGQAARQDQAPGPAL

SEQ ID NO: 364913 - protein, 412 aa, unidentified
METVVERPAALDVHKEQVTGCVRVAAEGGGREQHVAEFPTTVRGLLALHDWLAAHRVQQVTMEATGVFWKPVWAILEDDFECVLVNARHVKNVPGRKTDVSDAAWLCQLAEAGLLRASFVPPKPIRRLRNLTRYRKTQIQERQREANRLHKALEDTGIKLDCVASDILGVSGRAMLAALCEGTTDPEALAELAKGKLRQKIPALKEALEGRFDRHHALWIGAILNHIDFLDEQINALSELIEEEIAPFAPVVELVCSHVGIQRRGAECILAEIGVDMSVFATEKHISSWAGQCPGNDQSAGKRRSGKTRKGSKWLDYALEEAAIAAIRVKDSYLAAQYQRLKPRRGHKKALGAVKHTILCNLWHMLSTGELYNDLGGDYYRQRDPERITKRLVAQLERLGHKVILEELPQAA

SEQ ID NO: 364914 - protein, 343 aa, unidentified
MEIRTIGIDLGKTVFHLVGVNARGEVVIRKKCSRLQLLRFTSNLRECLIGMEACGGSHFLGRALREQGHDVRLMPAQYVKPYVKTNKNDYIDAEAIAEAVTRPSMRFVPIKTDDQLDLQSLHRVRERWVVRRTAVINQIRGMLLERGITVAKGRRRIEAALPGILEDPDNKLSGALRVLLTQLRLEMQYLHGQIEESDKLILRIAVELEPCRRLVAIPGIGPVIATATIAAIGNGAAFKKGRGFAAWLGVVPGEHSTGGKQKLTDTSRRGNKYLRKLFVQGAHTVLQRRTKQVTALNAWLAQLTTRKRIQVAAVAMANKMARMVWAVLSKGEAYRPPLLPQTA

SEQ ID NO: 364915 - protein, 340 aa, unidentified
MKTQFKIIAGVDISKHTLDIALISESSEILSFKIANNHSEILDFVKEVKTKFKLRYSDLAFCAENMGLYGKFLTDVLLKLRVTLFLESALQIKRSLGLQRGKTDKADAVRIAQYARKNLPTLKAWEPPRQCIIELKDLHAIRKRLLKIKVILKGNSKNEKFYLDSTAASTLAEYSSRSLEAVTRDIMDVEHKMVSIIHSDERLKHLFDLVTSVPGIGTIIGNQLIIHTNEFKDFTDARKFASFCGVAPFPWSSGISVAGKNKISFYANREIKALLHIAAMRNVKYGGYSLAGYYQRKVKEGKNKMSVLNAIRNKLIHRVFSCVNNNIAFKEPMTGLSGLV

SEQ ID NO: 364916 - protein, 351 aa, unidentified
MSQKTNAVAVRTIGIDTGKNTFHLIGLDQQGTIVLREKLTRGRIGRRLANASPCLIGIEAGMATHYVARELLALGHDVRQIPPAYAKPFRQGHKNDFRDACAVAEAVLRPSTRCVPVKTDDQLDLQALHRVRSRLVGQRTAVINQIRSFLLERGIAVRQGPRFLRQQLPEILAKRIDVLSPRMIGMIEDLAGDWRRLDERVERVTEEIEQLAHGSESCRQLMTVPGIGPLIASAMVAAIANGAAFAKGRDFAAWLGIVPKQRSTGDRTILGHISKRGNRYLRTLFMQGARVILLRPANWARHSFGAWLTAAAKRLHHNVLATALANKLARIAWTVLAQRRNYETRVVTVAA

SEQ ID NO: 364917 - protein, 400 aa, unidentified
MSERQARVWAGVDAGKGHHWAAVVDETGATLWSKKIENDETAILTAMGEILDLADEVSWAVDISGTASALLLALLAAHGQRAVYVPGRTVNRMSGAYRGEAKTDARDAYVIAETARHRRDFAAIDVPAQLAADLALLTAHRSDLVADRVRMINRLRDVLTGVFPALERAFDYSAHKGALVLLTGYQTPAAIRRRGRARLTAWLANRSVRGADSVAVTALEAAQAQQTALPGEDVAAQIVADLATQILALDDRLKRIDQQIRDTFRAHPQAEIIESLPGMGPILGAEFVVAAGDLSAYADAGRLASAAGLVPVPRDSGRRTGNLHRPKRYSRRLRRVFYMSAQTSMMREGPNRDFYLKKRGEGCKHVQAVIALARRRASVLWALLRDGRVFTSAPPITQAA

SEQ ID NO: 364918 - protein, 372 aa, unidentified
MKEKVRFLGLDVHAETIAVAIAEPDGEVRSLGIIPNREESIRKLVKKLGPAEQLQACYEAGPTGYVLYWQLTALGVKCEVVAPTLVPVKAGDRVKTDRRDATLARSYRAGDLTAVWVPNEEHEALRDLVRAREAAKQDQLRARHRLSKFLLRQGRRAPAGKVWTQKYQEWIKKQVHFEQPAQEYTLLDYLHEVEHMADRIRRLEQATEEAVKLAPQRMQEVIQALQALRGIAQISAVTVVAELGEISRFEGARQLMGSSGAVSSEHSSGKRTQRGPITKTGNAHLRRIAIEAAWAYRHRPTIGPALRKRQEGLSEEVKEIAWKAQHRLHKRYRTLTAAGKEKQKVVTAVGRELLGFIWAIGVQVERNGQRVA

SEQ ID NO: 364919 - protein, 312 aa, unidentified
METRFVGIDVSKLTLDFDCRPVSAPQQFANDTDGVAALVALLQGSAVERIVVEATGGYETAAVSALAVAGLPVVVVNPKQVRDFAKAMGHFAKTDKLDAKVLALFGERIQPPLRAFADEAQRALADVLNRRLQLVTMRAQEKTRLATVPAVARKDIEQHITWLDKRIARLETDLGDRLKKSPVWCHKATLLDSVPGVGDVTTFSLLADLPELGTLNRQKISALVGLAPFPDDSGTRQGQRYIRGGRAEVRCVLYMATLSARTHNPTIKAMFDRLTKAGKPFKLAMTACMRKLLTILNAILKKDQPWKIQPSA

SEQ ID NO: 364920 - protein, 326 aa, unidentified
MQNILGIDVSKDTLDLVLINEEGKFHKVISNDPAGLKAMDKWLVSRHVDRVHACLEATGQYGDEVSEYLYGQGHDVSVVNPTRIKRYGESKLHRNKTDKADADLIAEFCLKEKPALWEPLSPDLKHLRALVRRLNDLQTNYRQESNRLLSGEKDAWVINDLSVHVEYLKARIVATEEEIQNFINQTPDLKVKQDLLVSIPGIGKKSSAMLLAELGEISGFENAPQLAAYAGLNPKGFSSGSSVHKKTRISKQGRSELRSCLYMPAVVAMTHNSVVRALKDRLRERRLPTMAIVAASMRKLLHIAYGVLKNQKPFDPEYDRQFNFSA

SEQ ID NO: 364921 - protein, 409 aa, unidentified
MERIIERGCGLDVHKKSIAACVRIPGANGQRTQEVRTFGTTATELLALRDWLQGHGVTHVAMESTGVYWKPVFYVLEEVLTCVLVNPVHMRQVPGRKTDVQDCAWIAQLLEHGLLRGSFVPPVPMRELRDLTRYRKTIVQERSRAINRLHKVLEDADIKLASVATDVLGVSGRAMLDALVGGTTDPDTLADLARGALRKKLPALRQALSGRFRAHHTFLLSQILAHIDYVEEAIEAISRQVGLLLAPFVEELERVTTIPGVKQRTAEVVIAEIGVDMSVFPSAGHLASWAALCPGNNESAGKHRSGKTRRGNPWLRTALTEAALGAIRHGRGALAARYRRIMRHRGHKKAVIAVAHAMLVAIYHMLTRRTTYQDLGDDYYDRRHAERAKHRALQTLERQGYRVSLEPVA

SEQ ID NO: 364922 - protein, 331 aa, unidentified
MNYSHFVGLDVGKKTFDASLMSADEKELSHKSFDNTPTGIQSLLDWIAGYHLSLSKLLFCAENMGSYVTELSVSSVSMGFSLALVCPLTIKKSIGLQRGKNDRIDAKRIVNYAVLHYRKLELYKLPDKDLVRLRGWIIIRDNLVKQKVSSIKLLETFSRMAKLADVTESISFLEEQLKSIKERILEVEEDMEQLIAASTSLYTNYLLLRSIKGIGIINAIVLLCVTDNFQRFDNPRKFACYCGVAPFEHTSGISIRGKTQTSSLANKEVKVYLTRAAITAISWDPQMKAYYKRKIAEGKHKAAVINAVRAKIIARSFAVIRRQTPFVTLAV

SEQ ID NO: 364923 - protein, 321 aa, unidentified
MANVSKIIGIDISKEKFDACFSIQPCGYSSRTYTYDAEGVKSFLQEVPTDCICVMEATGVYHLRLAYALNKQGIAVSVVNPLSVKNFSRAVMCRTKTDKADARQLVDYARRMELTEWKPTSDNYIRIQQIYRSIELFLTNITQFENQLEAINNSPVCDPRLCRMLHSHIKRLNKQIALLEKRIEELIAQEDATVVEHISSVPGVGKKTAIALLTATKGMHGFENYRQLSSYFGLCPRIYDSGKSVHGKAHICKMGMGWIRKLLYMCSISAIRYNKACAALYVRLKEKSKPIKVILIAVANKLLKQIFAIVKSNSVYSEILT

SEQ ID NO: 364924 - protein, 352 aa, unidentified
MERYLGVDTHALSCTLGLLSSSGQRLKSWVVETNGSALVEAVRNIPGRVHVCLEEGTQSAWLFELLKPHVAEVVVAVAPERKGAKDDQRDAWARAEELRTGAIATKVYKAPEHLASLRNAVRAYGFVVTDLVRAKNRLKAVFLSRGISTDAGVYDAKKRPQWLKQLSSPHRELAEWLGRQLDQVEPLRDEAEEWLLKESKSHPIIRKLATAPGLGPIRTAQVVAIVATPDRFRTRRQFWSYCGLGIVTRSSADWVQDKSRKWVRSQVAQTRGLSRKRQPRLKAVFKGAATTVIAQLPNDPLHADYERMLQSGIKPTLAKLTLARKIAATVLSMWKHQEVYDPKRHRPSSDKS

SEQ ID NO: 364925 - protein, 421 aa, unidentified
MQVLYERCAAVDVGKDVIAVAVRLPGDGPDRRATHKRTFKTFYGVLREAARWFCSLGVTHVAMEATGIYSMPVYHALIEHGEFTQVLVCNAGHVKNVPGRKTDLADAEWLVRLLECGLLRGSFIPAADIKAARDVIRYRAKIVQSRTSELQRLGGVLQDAGIKIDSVASSIATKSGRAMIEALIDGERRPAVLADLARGKMRSKIPDLAMALEGRFGDHHALMCRLHLDHISHLDAMIAKLDAQIEAMMQPFRAQRDLLTTIPGIGPLAAAAVLSEIGADVSEYFPDAAHLASWAGLCPGNHESAGKRRSGKPRHGNQHLQPVLVECAWAAVRRDGYLKALYHRHVMKWGGYRSQTAKKKAIIVVAHAILGVIWHVLAGGTPYDELGADFFTRRLDPERETRRLIAKLEALGHQVSLQPAA

SEQ ID NO: 364926 - protein, 395 aa, unidentified
MFIVGIDVAKRSHEVCMITSDGQTVQRPFSIRNNCTGYNLMLEKIRKHTNIKSQIVFAMESTAHYWLALFTRLRKDGYHVILLNPIQTSAMRDMFIRKIKTDAKDSFIIAELIRFGRYAESNVAQDRLLALKELCRNRFYLVDMAGDLKRKLIALIDRVFPEYEAQFDTIFCKSSVALLKKYPTPQKLSNAHLDKLTELLWNSSNGHFGEWKARELRELARNSFGVEDCDGAYSTLILLMLDQIQSLSGKADALEKEISRLFQSFDTTVTTIPGVGPIIGAVILSEVGDISRFSSADKLAAYIGVDPSVNQSGEFQAVHAHMSKRGSPYLRRCIWMASQVAVQRDPMFRAYYEKKAAEGLKYMTIIGHVTRKMTAVIFAILRDHKVYEPVLPTAA

SEQ ID NO: 364927 - protein, 359 aa, unidentified
MSRPQVIDDQEHERIHERAAAIDVAKDTGMVCTRTPHPARPGARRATVWTVKARMNAVRALGRQLKQDGIEIVTLESTSDYWRIWFFVLEACGLAVQLVSATQAKNLPGRPKTDKLDAMWLARLTEMGLLRASFVPPKAIRDLRDYTRARTRLVQERTRCWQRLEKLLEAALVKVSSVASKLTTISAQDMIKAMIAGQRDPEALAALARTRMKAKHDDLVQALDGMFDDHHGELAGLLLDQIAFLDSRIAVLGARAAELTAAMPAAWGVDPDGTTGPHAGATAGAPVLNAVARLAEIPGVSENLARSIIAEVGLDMTRFPTAAQLVSWAGLCPSARQSGPRSRPGKKGQGDTWLRGSLG

SEQ ID NO: 364928 - protein, 391 aa, unidentified
MIYVGIDVAKDKHDCFITNSDGEVLFQVFTIQNNRDGFDNLFAKIHSISTDVSNIKVGLEATGHYSYNLLGYLIDKGLPTFVINPLHTNLYRKSLSLRKTKTDKVDARTIAMMLMSDVNLKSYSDTSYHNEELKSLTRYRFDKVQERAQLKQSVSRLVTILFPELEKLVPTIHIASVYALLSELPSAGKIASCHLTHLTKLLENASRDRYSREKAIQIREAARVSIGSNMPAKSLELKHTLKLIGELDSEISEIESEIKRIMDQIDSPILTIPGIGYRMGAMILAEIGDFSRFDSPDKILAYAGASPSTYQSGQLESSYSHMEKRGSRYLRFALINAAKYVCHWDKTFGAYLQKKISEGKHYNVAITHATKKLVRLIYAMEKSGKPYIKAE

SEQ ID NO: 364929 - protein, 320 aa, unidentified
MMAQNDLNVVGIDVAKDKVDACVRSSAQRQTFPSGAEGRRKLIAWLRRHKVGKAVMEASGGYERDWAKALRTTGIEVRIVDPKRVRNFARSAGRLAKNDAIDAEMIAWFAETFGDAPTQAYDAERERLAQIVNARQGLLDVQTELQNRNEHSVPEVVQKMHARLLKKIAIEVANLEAAIAAMIKAARHFAELAEIIESVPGLGGGTSAGLIATMPELGHVSNKVAAALLGVAPYDDDSGKRRGERQIKGGRRKVRNLFYMACLGAATRHNPALKAFYRRLIANGKEKKVALLACMRKLIVILNTMIARRQKWDASLHLAS

SEQ ID NO: 364930 - protein, 418 aa, unidentified
MTCPCTVQVAPIRPALGGLIRRLSALYLAWLVTELPHEHVFPGSGQQGQLSIREVTAMTIVAHAYDFVVGVDTHASKHAFSIVESRTQTEVDCGEFPVTPAGFARSISWLRRRTNHSCRVLVSMEGVSSFGRSLRLDLQREGILVTEAPKPPHRAGRIAKNDFIDARRAATSVMGWDVTSLQIPRSGGVREALRILVQARHGLTVENTAQINRLTALVRTNALGIDARRALGRIQIKAIAKWRVRAETIDLQVARSEAVRLAKLIIANREALTDNKNAIETLVQQVAPALLTMRGIGPVTAAQFYLAWSHHDRIRSAAAFVALAGANPIPASSGNNQRYRLNRGGDRSLNNALHTVVLVRMRYDQETQEYVQKRTAEGKSKQEIMRCLKRYVARQVYRTLQAATIPVTAESETHKIPA

SEQ ID NO: 364931 - protein, 334 aa, unidentified
MVYAAIDIHKRVFQAVVVDVDSGELAQERFPATREALGDWAMRWQGRTAAVAIEATNGWRWVWRQLTEAGFDVRLAEAGQARALRGRTRSPKTDRLDARWLCFLLAKQMLPEAWVPPAEIQELRDRTRLRKALAEDRTRWAQRLHALLTHEGWSCERGRLLSKEGKRWVAALQLQPAVRSQVDALLRLIAALEDELEQTETELRRFAKSDQRCQVLMTIYGVGPILACHILAELGQASRFQRARQVVRAAGLDPVVSESGESKRRGRLAKHGSPQLRWALVEAAHHARHQRAPDGQLYSGVKGRAGSQAAVLTVARKIGRRAYHQLAQLERKAA

SEQ ID NO: 364932 - protein, 399 aa, unidentified
MFVGWDWASTAHDVTVIDSAGELVHRMAIPHTEDGIARAVAKLADYGDPGELPVAIEATRGLVVDRLLGVGHPVIAVHPNAFHAVRPRWGAARAKNDPGDSFKLADYARTDIHRLPMLVPTLPETLELQALTRQRDCQLALRIAAVSQLAALLDQYWPGGKTIFAQLHSPIALDFLDRYPTPRAAASLTPARIEAFCHRRGYSGRRSGAELLDRLRSAPISASRLGEPVVAQMIRGQVAVVRALQAGIDALDIVIAEKVTAHPYAGLLAVLPRIGTLNLAQIIGEVGPILERATSFDQLAAETGLAPVTRSSGKTHTVAFRYATNRRARQALHTWLDNSRRSSDWAQQRYAAARARGQRHPHALRTIGRAWLRIIWACWRTKTPYDPARDERAKQPTAA

SEQ ID NO: 364933 - protein, 362 aa, unidentified
MKSTTVAVDLAKSVFQLAVADASWKVVETHRLTRSQFERWFHNRDVSLVVMESCGSAHHWARHLSGLGIEVKLLPAKYVRAYVKRNKTDAADAAALLEALRASDIAPVRIKSVEQQALQGLHRTRSLWMATRTSRINALRGFCREFGLVIPQGSRTGVEAMARALADPRSAIPELIRGSMKLLIEEIRLLEQRIAQLEQELSAQVKHSPACQELLSVPGIGLLTATAMVAATSGEVGHYRDARHFASWFGLTPKEYSSGSTRRLGRISKRGDRYLRMLLTHGARAVLRSALMARQAGHQVDGLKEWALRVQGRTNHNKAACALANKIARICYAVLKHHEPYGSQTRREENKKTNRTAYAVAG

SEQ ID NO: 364934 - protein, 354 aa, unidentified
MSRKLNSEIAVIGIDIGKNSFHLVGQDRRGSIVLRQKWSRGQVEARLANLQPCLIGMEACVGAHHLSRKLQALGHDARLMPAKYVRPYSKGEKNDYRDAEAIAEAVQRPTMKFVATKTADQLDLQALHRVRQRLVSQRTGIINQIRAFLLERGIAVRQGLHFLRAELPGILAKRTDVLSPRMLRIIEDLAGDWRRLDERIESLSAEITRVVEQDPACQRLMTVPGIGPIISSAMVAAIGTGDVFAKGRDFGAWLGLVPKQMSTGDRTILGSISRRGNRYLRKLFVQAAWVVLVKVGPEQWERYGLKSWIEAAKKRLHHNVLAIALANKLARIAWAVLHKGRAFECVKTNAPRPA

SEQ ID NO: 364935 - protein, 446 aa, unidentified
MIVEDAMTVRKREDEVFPNAAGIDVGGSSHWVAVPTRSSDDPVREFGAMTEDLNAMASWLIACGVDTVALESTGVYWIPVFEVLEQRGLKVWLVDARQMKYVPGRKSDVQDCQWLQKLMSLGFLRAAFRPDVEVCELRAVSRQRDILLTEQASWVQRMQKSLVQMNIQLTEVLSDVMGLTGELIIRDIVAGERDPKALARHRHSRVKASTEDIIKALTGNWREEHLFVLGLSLGMYDDIARHLTECDARLNAGLKDLGQKNVELGKPPRSGSKQRKEYDTRQILANWAGVDLTRINGLGLAAVTKILTEIGPDLSCFPTVKHFCSWLGLCPGTKISGGKVLSAKTKRSVNRVRQVLKMAAMSLAHCDSALGAFYRRLCARMDKPSANTAVAHKLARMVYFMLTRGEEFVDQGQQRYEQQQLERSVAALKRRATALGFTITPVASGA

SEQ ID NO: 364936 - protein, 411 aa, unidentified
MKSLCSQRSCMLTSAMVDNSLIGKSAVRLADKTGAGEASVASRASTSRRREFGRVRAIKAVAEREPRRRYGTSPNSRLSRRKTASSHLQVREKTMSEKVYVGIDVAKDTFNVAASPSVLKTCLPNTSDGHCQLCQSLKNHNIALIVLEATGGYERPIVAELLDANLPVVVVNPRQVRDFANGMGQWAKTDPIDAQVLAKFAQIVQPAPKTHSTPQTTELAELVRRRRQLNDLRTQESNRLLMIHHPKVKKSIQKMIKTLNFQIDEIDHLIREHIDADDNFKNKDRILQSAPGVGPQTSAMLIANLPELGSLNRQEIAALAGLAPWDRSSGKYDGKAHIWGGRKDVRSVLYMAAFTACRFNPVIRTLAIRLKQKGKAYKVVITACMRKLLIILNTMVRNQTLWTPKIALKNT

SEQ ID NO: 364937 - protein, 356 aa, unidentified
MSYDVKYIGMDVHKEAIVIAVQNESGKLVMESVIETKASSILQFLHGLRGELHVTWEEGTWAAWLYDLLQPHVQHIVVCNPRRNALLKEGNKSDKVDAGKLADLLRTGMLRPVYHGENGLRTLRELGRSYQTISKDLTRVMNRLKALYRGWGIPCAGTQVYAARAREQWLSKIPHTGVRRRAELLYQQLDGLQALRRNVRPELLAESRKHKAAKLLRQIPCIGPIRAARLIGLMQTPHRFRSKRQLWTYSGLGIETHDSAQYCFVRGQVQRSKKPQQVRGLNRNHNHEMKEIFKSAATRASCGRGPFHDFYTGLLAKGMKPEMARLTLARKIAAITLTLWKKEERFDVEQLKTQAA

SEQ ID NO: 364938 - protein, 410 aa, unidentified
MEVLYPHCAGLDVHKDTVVACVRHIVNGSVRRAVRSFKTTTKELLALSDWLAGEGCSHVAMEATGVYWKPVWHVLSDGDFTLVLANAAHVKNVPGRKTDVNDATWLADLLAHGLIRSSFVPDEQTQEMRTLLRTRKQLVRECSRHVQRLQKTLEDANIKLDSVISDIVGLSGRRMIEALIAGETEPGVLAAMAHRRIKATPDELEAALRGRVTRHHRFLLQLHLQQIDAVNAAIDQIDQEVDAYVEPFRATVRLLTTIPGIDELSACVILAEIGRDMSRFPTAGHLISWAGLCPKNDESAGKRRSTRMRKGAPWLKTTLLQCAAAAARKKASYLQAQFHRLRARRGAKKALGALAASILTSVYHMLISGELYRDLGPHHFDQRAKAVNTRRLVTRLQNLGYAVQITPLAA

SEQ ID NO: 364939 - protein, 365 aa, unidentified
MPTRKLQNPDDFRGQKFYVGIDVHKKSWAVTVRSLNFVVAHFTQPPSPGALLSHLQRKFPGGEYFSVYEAGFSGTGAHEEFCKLGIKNIVVHPGDIPRTDKEKKNKTDVHDSRSLAFNLEKGNLHSIFVMSRQQQEFRALFRLRESKAKDVARAINRLKGCLLFFGIDYSSIFEGYISARVITWLRKLHMTNEAGAFTLKKYIDDLVHQRNELGKITKALRSQAKKDYSLPYKCLLSVPGIGFTTAIGLLAEIGDFNRFKDPAEYCSFLGLIPWQHSSGESVQVKGIQPRCNKHLRPLLVEASWFAIRNEPSLLKYYRKHAVKNSRHAIIKVARKLALIAKGVVQKLRMYDAAYSSFPNQGLVVQ

SEQ ID NO: 364940 - protein, 365 aa, unidentified
MQFVGVDLHTNRFTCCYRSEEKEGKETATFELTDYGMAQFYQTLTPETYVLVEATNPTFTFVRLIQPMVKEAIVANTYELKQISLARKNTDKIDADILCRILKMQVLSGEQAVSPVTVPPAGIQELRGFFTTYRLYRKQTTQIKNRIHSLLKEKLYGFTQEEIFGKKDREKIRKIENGTAMAFQINQLLDHLEYMEIQIDELEDKVKEHAEPYMREIEILTSMKGIGVFTAIAVIADIIEVNRFKNSKAFTSYLRSAPKVSNSNTSKPTLGTNKKGRKLAATLITQSLNHVLSASPKLNRWYLHLTQHKKKGLVRTGLRRRIFAEMFQMLKKGEYHYGRDSRIHEAKMLQYKRFLQKRKNLLKSA

SEQ ID NO: 364941 - protein, 411 aa, unidentified
MELICERVAGLDVHRDEVAACLRAPGPRGGVRTEKARFNTTTGGLAVLAGWLAERQVALVAMEATGVYWKPVYYALEDRFELWLCNAHHVKNVPGRKTDMSDAEWLADVAAHGMIRPSFVPPPAVRELRVLTRYRKRQADVRASEIARLEKVLQDAGIKLTSVASKVLTQSGRAMIEALIAGERDPRALAGLAKGKLRPKIPQLAAALDGHFGAHHALVAARILAHLDFLDAAIEQLDAQIAGRIATDFQPAARLLREVPGIDRAAAEVIIAETGADMSRFPSPAHLASWAGLCPGNHESAGKRRKVATRPGNPWLRRTLIESARAAARTKGSYFGAQYRQIARRRGPNKAAIAIAHSLLDVTWHLLTTGEVFTDLGEDYFLSRYGKQHQTRRLVSQLERLGYTVDLTPAA

SEQ ID NO: 364942 - protein, 370 aa, unidentified
MQQSSTLSVGLDVHKDSIAVASVGIEHHAEVVSLGNIGTRQCDIDKLVRQLQSQSKPLVFVYEAGPCGYWLSRSLTQKGQVCWGIAPALIPTKPGERVKTNRRDAIKLARLRRSGALTPVSVPQVEDEAMRDLCRAREDAIRALKAAKFRLKAFLLRQDIRYTGQATWSPAPLRWRSEVVCPTPAQQIVFQEYVRAVTEHTERLERLAQELKDQVQTWRLRPVVDALQALRGVQFTVAVTAVAELGDLTRFDNPRQLMSYLGLTPSEYSTGDRRRQGGITKAGNTHARRALIEGAWAYRYPAKVSRHLQLRLEKVSKPIQDLSWKAQVRLCKRYRQLLARGKNANQVVVAIARELSAFMWAIAQEVPLTP

SEQ ID NO: 364943 - protein, 375 aa, unidentified
MKNKVRFLGLDVHAETIAVAIAEPDGEVRSLGTIANRADAIRKMVKKLGPVEQLKSCYEAGPTGYVLYWQLAELGVACEVIAPTLMPMKAGDRVKTDRRDAERLARSFRSGDLTAVWVPDEGSEALRDLVRAREAAKQDQLRARHRLSKFLLRSGQRPAAGVKAWTQLYMAWVRQLHFAQVAQESTRLDYLHEVEHMGERVARLEQAITEAVKLASPAVQEVVKGLQALRGIAQISAVTIAAELGNITRFEGARQLMGYSGAVPSENSSGGRTQRGSITKTGNAHLRRIAVEAAWSYRLRPCVGPALRKRQEGVPEEIKEIAWKAQVRLSKRYARLVAAGKDQRKIITAVGRELLGFVWAIGVKAEAAAKQQMAA

SEQ ID NO: 364944 - protein, 344 aa, unidentified
MVEFKQVRTFVGIDAHGEHCNLKALSRQGRGILELEVPTNSAELCAAVKPLPGPVWAMVESSSIAPFVVWSLEAVLDRVIVCETRENRWIAKSEDKSDPADADRLARLLRMGEFKEVYVPSRERQELRELVLLYDKMVGDTARAKSRLKAKFRQHGLAVSGSAGYSEAGRQSWLDRVRRRTVRFMLEALYAKLDAAEEVQEILARRLSAMLGSRREYRRLKTMPGIGEVVAAIFVGVIDNPHRFPDKRKLWKYAGLSVRGPWTGDPKQAKTGGSCTGNRLLKYAAMVAAERATVGSNRFGRRYQEMLARGLDRSMALKTTARNILATALAMWKSGTDYREPESA

SEQ ID NO: 364945 - protein, 424 aa, unidentified
MPFAGLDVHKQEIEAVVLDDAGRVLLRQRLPSEQKPLEEFAAKHLSQCEVALEATTNCWAIAHILQPLCREVVVSNPLKTRAIAESKIKTDRIDALVLAELLRCHYLPRIWSPDAATHRMRQRSTERANLSADRTRVKNRIHAVLHQRLIHPPMEDLFSQRGRAWLNQLRLDPEGAATLARLLRTLALIEEQISELDQQLAEAAYQQPQIKLLMTLPGVDVTVAQTLAAALGGIARFPNPDKAAAYLGLVPSTRQSGNHCYHGRITKQGASHARWMLVQAAQQVARHPGPLGVFFRRLARKKNRNVAVVATARKLVTIAWHMLKNNEPYRYAQPKTVQAKYSRLRIRATGNKKNGSSRGKARPSSYGSGVRTRAVASLDQIYASEQLPPLPVAAPGESSMLGRHGVAAYADSIRKPHRVPRRSQ

SEQ ID NO: 364946 - protein, 424 aa, unidentified
MNLTQNDRLKQVTSDTLIVGVDVGSQTHFCRAFDWRGFELSRRVFKFSNTGMGFLTFLRWTEELMNKTEMKKVIVGCEPTGCYWLTFQKFLQDHDVQLVTVNPFTVNRSMELDDNSPEKSDLKDPKTIALLVKDGRFSTSYLPSGVYAEIREASVCRDQIMKQHVRLSNQIQGWLQKFFPEYFECYADWDSTSGLMLLREAPLPQDILKIGAGGINQIWRDAKVRAAGIKRAQTLVEAAQNSVGLEAGEAARLEIWVLVNDYILKAEQLKRLDEYLEEKVKEVPNVEKLLAIKGVGMSTVIGFIAEVGDIGRFTDPKQIQKLAGLEIVKKSSGKKKGQPRISKRGRRKLRRTMYESARALMTWNPAFQDVFLYYRSRTKKPLGGMQAKIAVACKAIRIFYVVLKTGCDFDEEKFRKDIIRPEAA

SEQ ID NO: 364947 - protein, 334 aa, unidentified
MLYVGLDVHQKRSSMCILNNDGKPVKQELIKGPWPKLLERLEQIREPFSVCYEASCGYGHLYDRIAPLPRASHVSVAHPGQLRLIFRSKKKHDRVDAAKIAKLLYLDAVPRVHVPNVNVRSWRKLIEFRQKLMGKRVAVKNQIRAILRGNGIAGAKWQWTQKAIAALRQLELPDGEKLALDLALAALAELNVKIKRVEKELLKFSSKHPGVALLMTIPGVGIRTAEAFVAYVDDVRRFARNRQVGSYFGLVPCQDSSAGKDRFGHITRDGPPTVRKLLCEASWCTLRHNPTIRAFFERVANGDKDRRKIALVAVAHHLCRVMAAMLRTGETWRH

SEQ ID NO: 364948 - protein, 316 aa, unidentified
MNKLVVQNLNVGVDVGKDFLDIHIRPLGEYLKVSNDKKGIGEAIKRLRKLTVERIVIEATGRYEIAFVSACAKAALPFSVVNPIHVKRFAGAIGRKAKTDKLDAALIANFSEVIQPALSTLKPENIQKMADTVARRNQLLEMQTREKNRLQIMPKTVQSSIKAILTVLKKQIQKMDDELADLIESCPEYQAKSELVQSMPGIGKVSAAALISYLPELGMMNSKQVAALVGVAPMNKESGRYKGKQVTQGGRHQVRTVLFMAMMSAMQCNAKFKATYERLVAAGKPKKVAIIACVRKMVVILNSMVRDGVMWEEKAA

SEQ ID NO: 364949 - protein, 356 aa, unidentified
MSVYLGVDFHARTQTVCWCDQADGLVHQRTLDHQHDDVRGFYTQFAVPAVVGLEATGYARWFHRLLESLGHRLLVGDAYVIRKCALRRQKNDRRDAELLLDLLLHGDFPAVHIPPMASQAVLRLLRYRQRLVEIQTKLRNGTQALALNHQLRLGPKLWSKQGQQQLLALELDDADVLQREHSLELLTQIHTRIRTIEKELTLRADQDTRVRLLRTHPGVGLLTSLVVVHALQPVTRFDRARRVAAYCGLDPCETSSGETVRMGHISKQGNRLLRHLLVEAAHRAVHCKTDNDLRNFYFRLIERKKNAAVAITAVARKLVLRLYRMLRENIDYTEFRRRGREARRARKTASPVVGGC

SEQ ID NO: 364950 - protein, 388 aa, unidentified
MTKVDDLSRSLAALDQDSTLIAVIELSLKSWLVAGLVPGVERRPLKKLAAEPEAVRHLLERWRGEALKAGRRIKRVAVAFEAGRDGFWLARWLREREIEAHVIHPASVAVSREHRRAKTDRLDTELLMRAFLGWLRGERKHCQMCLVPSLADEDGRRPGREHEALTRERTRLVNRIKATMGWLGIAGFNAKLRRAAERLAELRTPDGLGIPPNTQAELRRAIERLRLIRQQIKEIETERLERLERTPAAKPQAAMLLLQRIVGLGLETADTLTNEVLLRPLRDRRAVGRYGGITGAPDESGAKRREKGLARAGNARVRQTMIQLAWRWLMFQKDSALARWYRERTENASKLVRKKMIVALARKLLIALWRYVTDGVVPEGAVLRPAAA

SEQ ID NO: 364951 - protein, 336 aa, unidentified
MNQKYFIGIDISKGKLDCAVILSDYTVVAENSIPNNVKKIKSFLKGFIKKHNTEFDQILVCCESTGIYNGPLRQVCSDLNIGLWEEHALKIKRASTDMRGKSDRKDAMRIAEYLVRYRDKALLYKQPSDVLKTLDQLNKVRETLLGSKLALQNQLGESKSFDPDGYKVLLKHYKQMIAQIESQLKKIDLEIQEQLNQHEDIQQNINLMKGVPGVGKQTALQLIIYTQNFTAFKSVKHLACYAGVVPFQNESGIVIKRARVSKMASKKLKSVLHMAALAAVRTKSELKAYYVRKIAEGKNKMCVLNAVRNKILQRIWAVVERQTPFLSNENFRPIWK

SEQ ID NO: 364952 - protein, 391 aa, unidentified
MIYVGIDVSKDKHDCYIVNSDGVVLADVFSVENNLDGFDLLLQRLKSVAPDLLNVKVGLEATGHYSYNIFGFLLDKGLATFVLNPLHTNLFRKSTSLRRTKTDRVDARTIAAMMSSGIVLKSYTAISYHNEELKSLSRYRFDKVRQRAKLKQAVSRLVTILFPELEKLVPSLHIASVYALLAELPGAKQVASCQLTHLTNLLSAASKGHYDRSKAVELRNAARRSIGSAMPAKSLELQHTIRLIRELDAEISEIEAAIKQIMDQIASPILTIPGISYRMGAMILAEIGDFSRFDSPDKILAYAGLSPSTYQSGKLDNAYAHMEKRGSRYLRYALYNAAKYVCHWDASFCAYLAKKRAEGKHYNVALSHAAKKLVRLIFALQRSGQPYCPTA

SEQ ID NO: 364953 - protein, 353 aa, unidentified
MEGYAERQFVGIDLHRRRSVIVRMTSAGERLETVRIDNDPVALALEIAKAGPDPEVVLEATYGWYWAADVLAAQGARVHLAHPLGVKGFTYRRVKNDVRDAADLADLLRMGRLPEAWIAPPAVRELRELVRHRAKLVALRTGLKAQVHAVLAKQGVAVRVSDLFGVAGRALLETVSLDPVYRGRVNSLLRLIDAYGFEIAAVSTRLTADLAREPGYQALLTLPGVGPVLAGVFFAEIGDVHRFPTAAHLVSWAGLTPRHRESDTTVHRGSITKQGSTLVRWAAVEAVQKTPADAGWLVARRHQLAARRGANIATVATARKLLTLVYYALRDGHVRALSPRPRPQPRPLAAASA

SEQ ID NO: 364954 - protein, 360 aa, unidentified
MSSSDALVVPTSTVVVGVDTHKHMHVAVALNALGARLTSCSASADRAGYAELVAWARALGPVDAFGIEGTGSYGVGLASFVRRHAIRVVEVSHCDRRKRRNNGKSDTIDAETAARAVLSGLATAVPKTADGAAAMVRQIKIARDTAVKARSAAVITLKTLIVNAPDALRESLSALTDKKLIDECAVLVPGEILEPMASTKHALRALATRWLTLAVEIRTHDEVLDAITQTAAPTLREAFGIGADSAAEMMIVAGDNPTRVRSEAAFAKLCGACPIPVSSGVTNRHRLFRGGHRQANAALYRIVTVRMRWHQPTLDYVARRTAQGLTKRDIMRCLKRFVAREIYHALINDHRSRTARLVAA

SEQ ID NO: 364955 - protein, 345 aa, unidentified
MKKVMAGIDLHSNNLMIGIMDMDGKRVASQKLSCGLKEVVGFLSPFKKRLEQVAVESTYNWYWLVDGLQRLRYPVVLANPAGMEQYSGIKHADDTNDAFFLAELLRLKILPTGHIYDEQLRPVRDLLRRRLTLVHHRTALMLSFKSLYTRTTGKEMTLSELKELEIKQAQDLYDHPANQLIAGMQIKHIEQLTESIERIEKVVLDCARELPLYTKLTTLPGVGTILGMTITMEVGDIKRFAEAGHFASYCRTVEAKRTSNGKKKAENNSKCGNKYLAWAFVEAANFARRYDEQCRKWYERKAAKRGKVIGTKALACKLAKAAWYLMALGTDYNAKRMFGQPATTQ

SEQ ID NO: 364956 - protein, 345 aa, unidentified
MDHFAGLDVSVKETSVCIVDDTGKIVREVKVASEPDALLAVLKNAALHFKRIGLEAGPLSQWLFSALAEADLPVICVETRHMRAVLKAQINKTDRNDARGIAQMMRVGLYRPVHVKTLRSQKLRMLLTHRKLLQSKAIAIDNDLRGTLRNFGLKVGMVGTAKFEARIKELVENLPDLAVLVEPMLIVRRVLREQLGILHRRLLAIVRDDDVCRRLMTIPGVGPVVALTYRATVDVPARFKNSKAVGAVFGLTPSRHQSGESDRPGAISRCGDEMMRMMLYEAAQVMLVRSAKWSWLKAWAMQIARHRGIKKAIVALARRLAVIMHRIWVEGTEFRWTREQATAAA

SEQ ID NO: 364957 - protein, 346 aa, unidentified
MKKLNVIAIDLAKNVFQVCKTDYLGTVFFNKTMSRNALKELLVKEKVSVVAMESCSGAHYFARHAKENGHTVKSISARSVKAFRQGQKTDANDALAIAVAARQPHIKLSRVITLEEQCLQSMECMRDLLVKQKVSLSNQLRSILLDLGYAIPQGDSQLKQSIPGILEDAENDLSIPFRSVLSCLWQRFLKTIEEIADVEKTLFREVRQDETCQRLQALEGVGPVGAIALRIVLSNPEHFKNGREASACVGVTPVQHSSGGKEKIGSISRLSGHNKLRSHLFKGALAVIRSLEKRPCRTPKEVWLKDLVARRGKKVAAIALANKNVRTAYALIKQNKEYKPQLLIAA

SEQ ID NO: 364958 - protein, 375 aa, unidentified
MGEITRALIARVGVDLAKRVIQVHAVDAAGRRVVSRAFRRDQFLAWCVQLPPGCLVAMEACSSAHHWGRKLRGLGLDARLIAANFVSPYRMEGRSGKNDATDAAAICEAASRPSMRFVPIKSCEQQGVMSLHRVREGFKEERTGCINRIRGVLAEFGLVFGKSPKALRAELADVIEDAGNELSTMARQVLQRAFEHWRELDEQLRWCDRQVGQHVRSSPAAQRAAKITGIGQLGASALTAGVGDFRQFKAARQLAAWLGLVPSQNSSGGKTSLGRITKRGDDYLRTLLIQGAKAAVMSAGKRHDPISRWLVQLVARVGWQKACVAMANKNARILWVVMTRDQGFDPGHVSEMPQAKKPANERIAPPEPPLATCPA

SEQ ID NO: 364959 - protein, 347 aa, unidentified
MKILALDLGKYKTVGCAYESESGAHQFQRTFTTPADLQRLVQEIKPDRVVIEVCSIAGWVCDLMGRLGVEVQVANTSDDAWRWRKVKQKDDRRDALKAARLSAVNQLREVYIPQITVRQWRALITYRRHLVGRRTKIKNHIRDLLVREGQILARGSRCWTKLGQELLSSMARPLAEVGVAELWRGELWEELQQLQMVQARIASVEEKLNAIGEADKRVQLLRTIPGVGPRLAEAIVALLDQPQRFRKASQVSGYIGMVPKAFDSGESERRGHITRQGSGLVRSLLVEVAWAGLRHNAWMRQTYQRLSGGGKKVRKKIAIVAVGRKLLVRCWAMLRDNCAWDWQPQIT

SEQ ID NO: 364960 - protein, 442 aa, unidentified
MSDLKEQSAEPEEPEFAAHIGLDWADQKHFWAMRTADGKQQRGELDNTPEAIQVWAVELGRRFGGRPVAVALEQARGAVIAGLCKYPHLVLFPIHPNTVANYRKAFCPSGAKSDPGDGLLILELLLTHPDRLRRLQPDTVETRRLQFLTEERRKLVNQHSSESQRLIGWLKQIFPQVLQWFDDPACALVGALLLRWPSLPALQKASPRVLRKFFAQQNCRSEDRIAQRLEQIRQAVVATTDEALLQTGMICIQNSVALLKDLREGIATFDQHIREAYRDHPDRAIMESFPGAGPALEPRLIAAVGSRRERFESATSMACFAGIAPVKESSGNAVWIHWRWACPKFIRQTFHEWAGCSIRTCDWARPFYDRQRNKGKGHHAALRSLAFKWIRIFFRCWRDHVPYCEQRYVKALEAKAPRAEPAPVKIGWKTHAGFSKVSILSS

SEQ ID NO: 364961 - protein, 413 aa, unidentified
MDRIVERCCGLDVHKSSVTACVRITEEGGRVRQITEEFAATTQGLLLLRDWLASFEVELVGMEATGVYWKPIYYMLEDNFELWLLNAEHLKHVPGRKTDLKDAEWICQLVEHGLVRPSFVPPKEIRELRNLTRYRKVQIEERTREVQRLEKVLQEAGIKLSSVATRVLGVSGRAMLDALIEGTTDPEILADLARGRLRSKIPALKEALEGSFSAHHALMASRILAHIDYLDETIAELSSEIERVLDPFSEEIALLDTIPGVNRKVAEMIIAEIGVDMSRFPTHYHLASWAGMCPGNDESAGKRRSGKTRKGSKWLRSALIGAAHAAGHAKESYLAARYARLKGRRGPKKAAVAVGHSILVIAYHILERGAPYHELGEGYLHQQRSEEAYSKRLVRQLEKLGYRVVLDSLPQPT

SEQ ID NO: 364962 - protein, 379 aa, unidentified
MINERNLKQRSYGRTTTRLMESEVTKNQTDRVDFTGDRIYVGIDVHKKQWNVSIMGAFKEHKTFVQPPDAAKLGNYLRANFPNADYYSVYEAGFSGFWAHEDLQKEGLTNIVINAADVPTTNKEKYQKRDSVDSRKLCRSLREGSLMGIHVPSREELEDRGTVRLRKRLITDISRCKNRIKGQLNYYGIDIPEQMGESYWPKRFIVWLSNLQMEHPSGNFTIRTLVCELLRIQELKRDLDRYLIQMGKEKYPGQIKLLRSIPGIGMIGAMTLITELGDCKRFKQFDQLCSYVGLIPNVYSSGETEHVGHLTNRKNQYVLPILLQCAWKAVGKDPALMKAYQDWCKTMKANKAIIRICRKLLNRIRHVMIHQQEYKCSIL

SEQ ID NO: 364963 - protein, 456 aa, unidentified
MKENELSMKIIHPNAAGIDIGSKTHWVAVDQVPGNVREFGVYTRDHQRLIEHLKSHQISTVAMESTGSYWQTLFHGLQKAGFEVILVQGSQTRDVQGKKTDILDCMWIQKLHSLGLLSSSFLLSDYLQTLRTYYAHRGHLVEQTAKYINKMQKALRLMNIRLDVAIRDLTGKSGRAILEAILAGKRDPDYLASLAHFRVKKTPQEIAAALHGNWRDDLLFELRSCLNFYDAYKKEILVCEQQIQLILSNFFPAAELLTLDNKAPEKPIRKQVNRNSPSFNVRQLAFAHLKTDLFQIPGVSHSTVLCLLCNMGNDIKRFSSAKRFASWLRLVPNNKMSGGRLISSKTPKGKNAIALALRQAANSIGNQKEHPLTPFFKRIAYRKGRNAAITATARKLAVIVWNMIINSQSYLQPNADFIIEKRKNEQIKNIKMRLSRLNLTQSEMTDLFQKTSFPSS

SEQ ID NO: 364964 - protein, 396 aa, unidentified
MVAHDSCGGMERRIRDGLAYQPPCIFPLGVGPRRSDSSSAPLVLKDRKEAGASLHISLKPVQLRGPKPASQGWAIRGDSNLATDPDGYVGIDVSKALLAVGVLPSGEGWEVTNDSRGLASLIRRLKPLAAKLIVLEATGGYEVPVAVALAHSGLPVVVVNPRQVRDFARATGQLAKTDKIDAHVLALFAQRVQPQVRPLPDEVSMAFDALLRRRRQLVTMLTVEKNRLTLASAPLRSAIARHVRWLEHELDDADQELTRTIRQSPLWRAKDDLLRSAPGVGRITSYTLLADLPELGRLNRKQIAKLVGVAPHAADSGTLRGKRLIWGGRSCVRQVLYMATLTAIRFNPAIRLVYQRLVRAGKPPKLALVACMRKLLTTLNAMARANAPWRPAGAPA

SEQ ID NO: 364965 - protein, 344 aa, unidentified
MNYYAGIDVSLESSSVCIVDATGEIVKETRVESHPDALVKFFKAFGLPLTVIGLEAGPLSQWIYAGLTKAGFVTSLMETRHVNAALSATTVKTDRRDARGISQLLRMGWFRPVHAKSAGSQEMRALLVARKQLQHKLRDIELSLRGILRGFGLKVGKVTDKTFEARIRELVTGHPMLEQIAEAMLAARAALLEQFNTLHKAVLKIVRQDEVCRRFMTTPSVGAIVAITYKSALDDPGRIKKSRNAGPLFGLTPKRYQSGETDIIGGISRVGDEMVRTALYEAANVLLSRVTRFSALKRWGLEVAKRRGLKRAKVAVARKLAVILHRMWIDGSTFRWTKAQEAHA

SEQ ID NO: 364966 - protein, 373 aa, unidentified
MEHNITVVGLDAHKNSIEIVTAETAGNQEVRHYGKIGGDMLSLDKAIRKLRSVRSSGAELRFVYEAGPCGYEIYRHLTKQGFQCAVVAPSMIPKKSGTRIKNDRRDAENLARLERAGELTKVYVPREEDEAMRDLTRAREDAVRAQRTARQLLGAFLLRHGHRYPGKQSWTPAHMHWLSDITMPHPAQQITLQEYIHAISESTERVTRLTEQIQELLPEWHMAPVAKALQALRGVAPIVATTTVAEIGDMNRFQKPGQLMTYLGLIPSENSSGESIKRGSITKTGNGHVRRALIEAAHAYCFPARVSRHLLKRQEDLPQSIREIAWKAQVRLCGRFQRLMARGKQRNKVVTAIARELAGFMWAIAREVQVPGV

SEQ ID NO: 364967 - protein, 427 aa, unidentified
MSEKKSLELRVSVDVGCRRHSVAVGLSDGQVLEEFEIRHRPEGFQEFFSRIEKHQKTHGCVVAVAMEGYNGYARPLDSLVRQRGYRLYNINSLKLARFKEIFPGAAKKDRIDARKGLELFQLSDHLPLAKEVLQEVTGTAKENEILKRLTRRRRRLVNERVRVVNNLQADLHAVCPGLLEITQDAGNHWFLHFLVSADTVAQLVRLRKSTLLKIPAVGRKYASLIAQWQKRAHFSEEAQWVSEMIQEDARRCLELDERIKALESKINEFANESTVAKILLSIPGFGPVCTSELAGEIGTVERFSKEGGLALYLGMSTLDNSSGKYQGTKQPKHVNTRAKAAMMTAIDRHRKYVPQSQKYYEKKRTEGKSHNQAIRALGRHLSRIIYKMLKEEREYQVRCEKGDTQGRVDSRSCVKTKMRRPKISATS

SEQ ID NO: 364968 - protein, 406 aa, unidentified
MDPTASNNPMEVIPMIIVAVDVAKDKHDCFITNTDGEVLFDPFIITNSQSGFEDLFDKIRSVTDSLQNVKVGLEATGHYHLNLLGYLLDKGLHTCLINPLQTSLFRKSLSFRKTKTDTVDARAIARLLMSDQTLQPYSLTSYQNEELKSLTRYRADKVRERAKLKSSLSRLVVILFPELEKLVPTLHMATVYDLLTEFPGASLVASAHLTRLSHLFSDSSKGRYGKEKAIEVREAARHSIGAVFPAKSLELRHTIEHIRFLDAEINEIEAQIFALLDKDPPKMLAIPGMGPRMAAVIVAEVGDFKRFSSPDKLLAYAGLSPTTYQSGQLTSTYAKMEKRGSRYLRYALINATKYVCIWDPTFRAYLSKKRAEGKHYNVAISHAAKKLVRLIYHLETTGETYLSKAS

SEQ ID NO: 364969 - protein, 387 aa, unidentified
MYFIGIDISKFKHDCAIIDEAGDTVTASWSFANNCEGFSLLKQLLDALDGQKKIGFESTGHYGHNLKLFLEANNFSFMEFNPLLVSKFVRSKSLRNTKTDSLDAVSIAQYLMTVEYKPYPPSFYHMDQLKSLTRFRDSLVRQHSRQLVELTNILDKVFPEFKPFFDGKFSATALYILTHYQSPEKIANMNAKSYEALRKKSRGKFSMVKFAQLKTLAKNTVGRSDAFLLKQMEITIDIENQLDAKIDETESQILECIRALNPPILTIPGIGELTAAIILSEYGNINKFENPAQLLSFAGLEPGYYQSGLAEHQGHMVKHGSSHLRYALMNACLPLITYEPVFAEYYAKKRAEGKPHRVALTHVAKKLLRVIFTLQTKNISYDPTLIR

SEQ ID NO: 364970 - protein, 338 aa, unidentified
MKLYGGIDVHSNNSVIALLDEEDKPVYRRRLPNDLKVILSELAAYQDVIEGLVVESTYNWYWLVDGLMETGYRVHLANTAAIVQYQGLKYSDDDSDARWLAKLLRLGLLPEGYIYPKAERAVRDLLRKRSQLVRQRTANVLAVETLLARNLGYSLNGNVIKRLTDEDVDRLLPDAYRALAVKSNLAILRSLDESIEQLEKTVKACSRHRSEFGPLLSVSGIGDILGLTILLETGAISRFAQVGHYASYCRCVGSERISNGKRKGRGNTKNGNRYLAWAFVEAANFAVRYNPQIKRYYQRKCARSNGVVAIKTVAHKLARACYYILRDQVPFDVNKAFA

SEQ ID NO: 364971 - protein, 414 aa, unidentified
MEDWPEAIPAFLYYQWEVHVMSFFIGVDVSKEKFDACCISEKEEKVFSLMCTMDRQGFEKLVLHLPANKTSLLLGMESTASYHLPLFSYLTAQGYGVVIINPLLINNFAKRSLRKTKTDKKDAFTIAQFLLREKEAFAPQTTDHLAAELRDLARRREKLVDHVTSLKGDMKRILSVIFPELEHITGAFTKCTLRLLMEYPSAHALRQADHAAVADIFITKSRGTRPRVSIKTLMEAAASSVGMVSPAKELTLKQEASLLIHVQEQMKETTEVIMNLLNQRMKHDMEILCSIKGIGENTALNFLIEMGGEIEMYENDKKLIAASGLDPSTYKSGKYEGKSRISKRGNRHLRRVIWLMATRVIINNTIFRVYFYKRRSEGLPYKMAVLATAHKLIRIMFVMLNRKTYFVEGGIKYS

SEQ ID NO: 364972 - protein, 429 aa, unidentified
MRTESTPGARGPVFCGVDTHADSHWLCVLDWRGRRVLSRRFPADAAGYEALAGAIAAAGEPACVAMEGTSSYGAGLTRHLASLGMPVREALSPAGTQRRRPGQGKCDEADAERAARAAMSGSKLGTPKSQDGWVDGVRCMLAARSGAVKARTSAINTARSLLTTAPEGLRSRFRGMGGPRLMEELPSVRSEGALGAALGALADLWAAARDAALDMERAIEASLEENCPALLAMYGCGPVSAAKLAVAAGDNPGRLRSEASFAAICGACPIPASSGKTVRHRLNRGGDRQANSALHEIARQRVMRDPETAEYAERARARGKSDREVMRCLKRYVAREAYRALMHPHEIRRPADASELVAARRAAKVSQVRAASILGTSEKYISMLERGQRELKPIRRAYEAWVEAGLPLNWDRQAFEAERKMDSKKHLAK

SEQ ID NO: 364973 - protein, 354 aa, unidentified
MPNTTRIEIAVIGIDIGKNSFHVVGHDKRGSIVLRQKWSRGQIEARLANLPPCLVGMEACVGAHHLARKLTELGHDARLMPAKYVRPYGKGQKNDFNDAEAIAEAVQRPTMKFVATKTADQLDLQALHRVREWLVSQRTGIINQIRAFMLERGIAVRQGIRFLRAELPIILASRTDVLSPRMLRVIEGLAGDWRRLDERIENLSREIETIARQDAGCDRLMSVPGIGPIISSAVVAAIGSGDVFSKGRYFAAWLGLVPKQISTGDRTILGKISKRGNRYLRVLFVQAAGVVLGKPQSGERHGLRAWIEAAKKRLHPNVLAIALANKLARIAWAVLAKGRGFEATRTVDGSPQPT

SEQ ID NO: 364974 - protein, 347 aa, unidentified
MNYNTAHKFYCGVDLHARTMFTHVLDHKGKTVYEKDLPADPDEFLHAIKPFRKNIVVGCECMFAWYWLADLCAAEKIPFVLGHALAMKHIHKSKSKSDKIDAAKLAAMLRGGLFPMAYVYPKAKRQTRDLLRRRSFFVRQRSQLIAHIVNTNSQFNLPPWTKKLSYAGNRSEAIAQRFTDPSTRLMIQSDLALIDNYDAQIAKLELHLTRTAKIDDPVTFGFLRTVPGIGPILGLILLYEIDQVKRFPEVGNFLSYSRLVRCEHSSAGKVKGSGPKKMGNAHLKWAFSEAACLMIRAVPAVKSWMQRQETKRGKRKALSVLEARIGRAVYHLWRKQQAFDLKRFLKG

SEQ ID NO: 364975 - protein, 341 aa, unidentified
MVTTIGIDPHKATHTAVAINKTETVLGELTVPADRSQTKTLLDWAQNLDGDGRVWAVEAAGGLGFLLSQQLIAHGEHVVDVPPVLASRVRLLGSGKSDKNDPNDARSVAIAALRQPGLARVRPEDHGQVLRMLAKRHLELTSLRTQAVCRLHSVLTQLRPGGMPPRLSATKAARMLGGMRNLDPIGEQRRSMARTHLGDIRRLDRDIKANNVLISKAVATSGTTVTDVYGVGPIVAAFLIGYTGDPTRFASADHYASYNGTAPIEVSSGGKKRHRLSMRGNRVLNHAIHMAAVTQISHDTAGRIYYNKKQAEGKTKKEALRALKRRISDAVYRKLVADQQS

SEQ ID NO: 364976 - protein, 392 aa, unidentified
MYIVGIDIGKNHHEASIVSPEGKQIGRSLRFATTHKGADSLMSFIFKNIGNSPCVFGMEATGHYWYPIYSFLKAKGYTIYVINPIQADSLRKMYIRQTKNDSIDSFLIAEVIRFGQFGTTSMADENILAMRQLCRYRDSVISSRTEIKLRIGTIMEQIFPEYEKQFSSLWVSTSMGILEKYLTPENIENAPIDELFEIIKDKSHNRLTRAKAISIKEAAADTFGIKIAQDAFSFQLKQLIDRMNFLDKQIEALDCQILEYYEKFDCYLHTIPGIGIIGAATILAEIGDISRFKNSSSLIAFAGIDPTVRQSGEFNSTHNHMSKRGSPYLRHAIFLAATTCSFHNSPLNAYYKKKRDQGKHHLTATGAVARKLTSVIYAVLRDSKPYEPKSFC

SEQ ID NO: 364977 - protein, 379 aa, unidentified
MRKDTRHAGFDVDSNKIAVAVAEPGGEVRSLGVIPNREESVRRLVKKLGPASRLRVCYEAGPHGYGLYWLLSGLGVHCDVVAPTLVPVRSGDRVKTNRRDALKLARCYRAGDLTAVWVPDAEHEALRDLVRAREVAKKDQLRARHRLGKFLLRRGLRAAAGMKSWTKNHLLWVKTLRFEHPAQEATYLDYLHEVERGAERVARLERAIDQAIEGLPAEMGAVVAGLQALRGIRKVSAATIVAEVGPLSRFPRPKPLMGYSGMVSSEDSTGDSVRRGAITKTGNAHLRRIVGEAAWAYQYRPAMSREMKKRQEGLSEEVKEIAWKAQHRLCTRYRRLVAKGKLRQKVTTAIGRELLGFIWAIGVQVEKEQRLTRTSARAA

SEQ ID NO: 364978 - protein, 349 aa, unidentified
METDIILALDLGRYNSVACWYDPRARVAEFRSIQTTPEEVRSVLVREPVSSVVFEACSQAGWVHDLCEAVGLSARVASTTGSAWQWKHVKRKTDRDDALKLARLEAVGEIDPVAIPDRNTRQWKSLICLRKRLVSERVRTQNRIRGVLVSQGLSSPRGFSAWTEAGLNGIATLALPLAECAPDQLWRGELSVLLERLRSLEEQVHLTETRLDGLAKGDHRVRLLLSIPGVGPRTAEVIAVHLPDAKRFRRADEVSAYAGLVPRQYQSGETDRRGRITRRGPRLLRAALVECAWCSLRYNTWARETWLRLQANGLSKKKAVIALARKLLVRAWAILRTGKPWCVAPATVA

SEQ ID NO: 364979 - protein, 343 aa, unidentified
MDHFAGLDVSVNETSICIVDGAGRIVRETKVASEPEALLAVLKNPAYHFKRVGLEAGPLSQWLFSALAEAGLPVICVETRHMKAVLKAQINKTDRNDARGIAQMMRVGLYRPVHVKTLRSQKLRMLLIHRKLLQSKAIAIENDLRGTLRNFGLKVGMVGKVKFEARIHELVENLPDLAVLVEPMLTVRRVLREQIVILHRRVLAIVRDDDVCRRLMTTPGVGPVVALTYRATVDVPARFRKSKSVGAVFGLTCAKYQSGESDWSGRISRCGDEMMRVMLYEAAQSMLLHSKKWSWLKAWAMQIARRRGMKKAIVALARRLAVIMHRIWVDGTEFRWTRDVAAA

SEQ ID NO: 364980 - protein, 343 aa, unidentified
MDHFAGLDVSVKETSVCVVDETGKIVREVKVASEPQGLLVVLANPAYHFKRIGLEAGPLSQWLYSALAEAGLPVICVETRHMRAVLKAQINKTDRNDARGMAQMMRVGLYRPVHVKTLRSQKLRMLLTHRKLLQSKAIAIDNDLRGTLRNFGLKVGMVGAARFEARIKELIENIPDLAVLVEPLLVVRRVLREQLGILHRRLLALVRNDDVCRRLMTVPGVGPVVALTYRATVDVPARFRKSKSVGAVFGLTCAKYQSGEIDRKGAISRCGDEMMRTMLYEAAQSMLFHSTRWSWLKAWAMKIARHRGMKKAVVALARRLAVIMHRIWVDGTEFYWTREAVPA

SEQ ID NO: 364981 - protein, 366 aa, unidentified
MKKISTLQAFSNEIVKEEKPTIGVDLGDRWSFYCVLDEAGKIILEQKVATTAEAMKQTFGKIPRSLIALETGTHSPWASRLLTELGQEVLVAHAQTVELITKSNRKDDRRDARTLARLARIDPELLGPVRHRSAQAQIHRTVIRARAELVSARTALVNAARGLVKSYGQRLPKCGTQQVNRELAAGLSTELREVLEPLLQEIESLNERIPEYDERMEKIAQEVYPEVSLLKQVKGVGTQIALTYVLTIEDPYRFEKSREVGCFLGLKPGRRNSGNSEPQKKISQEGDRYLRTMMVQGAHYILGPFGEDSDLRRWGLKLAERGGKNAKKRAVVAVARKLAVLLHRLWVSGEVYEPLRNSQKAMQAVA

SEQ ID NO: 364982 - protein, 318 aa, unidentified
MTHTAHTTVLSVGIDVSQQTLAVATYPTNTVRGIPNDANHCQALANELSQQPVQLVLLEASGGFERAVVRALQQANVPVVIVPPQRARYFAKSLRGNLKTDRVDARLLARFASCYCAPEATEVPAGQAPLKELWARREQLVQTLESEKKRLQVATHPLVRASLERTIATVREELAQIEAAIEALVASDEALAQKATLLQTVVGVGWVVASGLLAELPELGQVSPKGIAALAGLAPVRRESGRWRGYARIGGGRRRVCRLLYLSAVVAVAHDARWRAVYQALLAQGKPKKVALCAVARRLLVVLNAMVCDGRAYERVQE

SEQ ID NO: 364983 - protein, 384 aa, unidentified
MKANPTDAPASLEYVTIHIAFELSKSKWALGVMMPGAEKMSRYRIDGGDVAGLSILLAKLKTKAGRLGKPVRILSCYEAGLDGHWLHRWLTAHGVVNHTIDASSIQVSRRARRAKTDRIDLALLMRAFLAYLRGEPDVCSVVRVPTPEDEDRKRRTRERERLVNERTAHTNRITALLLGQGIRDVMPLKKNFLCDLDQLPTGDGRPLPPHLKDEIRREHERLLLAHKQIKELEAQNVAAHQAPVPHSVEAKAVQLAQLRGIGVLIAQVLANEVFYRDFKNRRQVGSCVGLTDTPYDSGASRRQQGISKAGNHRARTTAIELAWLWLKHQPDSELTRWFNARVGNVKGRIRKIAIVALARKLMVALWRYLETGLVPVGAVMRPSF

SEQ ID NO: 364984 - protein, 343 aa, unidentified
MGDVITIGVDLAKSVFQVHGVDAEGAVVVRRQLRRCQVLSFFEKLRPCLVGMEACATAHHWGREIQRLGHRVRLMPPRYVKAYVKTQKNDAADAEAICEAVTRPTMRFVELKTGEQQSILVLHRTRQLFVRQRTTLINAIRAHLAEFGIVAPIGRNGVEKLLQTIGDGQDARIPDVARTCLEALAMQLHLVNRQILEADRRVLAWHRTSEASRRLDRIPGIGPLIATALVASVPNPQAFKSGRDLAAWIGLVPKQNSSGGKERLGGISKHGNRYLRTLLTIGALSVIRYAETHGTAHRPWLARLLERRPAKVAAVALANKLARMAWAVMARGEAYREPKVQTA

SEQ ID NO: 364985 - protein, 350 aa, unidentified
MDRYIGLDAHASSCTVAVLGPSGRRIHSQVVEPNAGALIRVLRGIGGTRHLCLEEGTHASWLYEVLSPHVEEIVVAGVSESRGPKSDKLDAFGLAEQLRIGAIKRKVYKKRGEFGALRHRAKAYTLLVGDSVRVQNRIKGLFRSRGVAVAGKSVFSRAEREAWLKKLPVSARPLAELLMQEQDGLLELRREAEKAMLAEARRHGAWRLVKSCPGLGEIRTAQLLPIVVTPYRFKNKRSFWAYCGLGIVMRSSSDWVRTQSGEWVKAPIQQTRGLNRNSNRTLKGIFKGAATTVIGQAKDEPLYRHYLRLLDGGTKPNLAKLTLARQVASIMLAVWRNEEVYDAARVGQAV

SEQ ID NO: 364986 - protein, 462 aa, unidentified
MPPLVAGRHDRYWDVVPAPLRREHLSIRARAVLPRAAHAGLFRLRSGGREVLFAGDDWAEDHHDVEIQDETGRKLAARRLPEGAAGIAALHELIAGHLGQNGDPGQVVVAIETDRGLWVQALVAAGYQVYGLNPKQVARFKERYNLSGAKSDAADAHALADMVRTERHQLRAVAADTPEAEAIKVIARAHQTLVWERTRHTLRLRSALLEFFPALVAYAGLGLTGADTLELLVKAPDPASAARLSAAQITAALKRARRRDVAVKAEAIKAALRVRHLIQPAAITAAYAAAIRATASVLITLNEQISELEGQVEAHFRQHPDAAIYLSQPGIGTINGARVLAEFGDADGRYASARARKNYAGSSPITRASGRSKIVLARFVRNDRLADALQSQALSALTGSPGARAYYDKQRERGLGHNAALRQVSNRLVGILHGCLKTCTLYDEATAWPDHHATQHASRLAA

SEQ ID NO: 364987 - protein, 341 aa, unidentified
METTRHIGIDLHRNKFTCCMQLANGRNYLSEWRLENLPVFVKKLRPTDEVAVEVTGNTRLFYDAVAPHVARVVAVDPNQFRVISHSVKKTDPNDARNLALYLSKGLLPEVRMKEKTQAQIASLTQTRDTLVKLRTALKNKVNNILSAHGINLAKEALSSEKQLTEVLTVKFDPMIRIELKVIVEQIRSLNQSIAELEKTITQEGQKLEGHKNLTSIKGIGPLTGSILLSVIGNIHDFADEGKLAAYFGIVPRVNNSNETERSGHITKRGSKLGRTALVQCALIAQRYSPYLKKFYEKTKARRGTGKAIIALARKLLGIVYRTLKNNWVFKDFPNFILAEES

SEQ ID NO: 364988 - protein, 347 aa, unidentified
MRFYTKTHKFYCGIDLHAKSMYLCIINQEGEILLHRNIRTNPEVFLKTIAPYREDIVVAVECLFLWYWLADLCTQENIPFVLGHALYMKAIHGGKAKNDKIDAHKIAVLLRGGMIPMAYVYPQEMRSTRDLLRRRTHLVRKRAELLAHVQNTNYQYNLPDIGKKIAYKANREGVAERFPDEAVQKSIQLDLSLLNFYNPLLLRLEHELSLTAKVHDADSYFRIRSIPGIGRVLGMTILYEIHDINRFSRVQDFVSYCRLVKSAKESSGKYMGTSGKKIGNVHLKWAFSEAAVLFLRRNPQARKYRDKLMRKHGKAKSMTILAHKLARAIYYILKRKEVFHPVTFFAK

SEQ ID NO: 364989 - protein, 415 aa, unidentified
MSCSCGIDWAEGHHDIAIVDRDGKLVAKKRISDDPAGFIVLTEMLADAGDDPDDPIPIAIETPRGLMVAALRATGRPVFAINPMAAARYRERRSVARAKSDHADAMTLANILRVDAHVHRQLPADSELAQAISVLARAQQDAVWRRSKASNELRSILREYYPAFLDAFAGKSATNLAKPDARAILAIAPTPAHAAKLTRTRIATALRRAGRKRGIDNLADDILQRLRTSQLRQPDLVEKAMGRQALALLGMLDAACTGADDLEQAAAEEFRKHPDYTVITSFPGLADLTGARVLAEIGDDRDRFADDRALKAYAGSAPVTRASGKVTSITHRRIKNDRLAAVGWVWATYASINPGPARQHYRKRRDHGDRHAAALRHLFNKMIGQLYHCLQNRQTFDPVKAFSHPASTPQEPAAA

SEQ ID NO: 364990 - protein, 366 aa, unidentified
MTQNITTFVGLDVHKDSIAMGVARGVDAPWFVGTVACEVQLLKALQKLGVPAEQYVVYEAGPCGYGLVRRLRRSGYRCEVIAPGKIARGSNDRLKTDRRDALLLARLARSGDLTAVTVPDEHDEALRDLSRAREDAVAARLKARQQLQALLLRHGHRYTGKSAWTQKHQRYLATLCFAHPAQQLAFEEYRQAVQNADERVQRFTSALRTHLESWRMQPVVLALMTLRGIDLVAAVTLIAELGDLSRFAHPRELMGFLGLVPSEHSSGGTRRQGAITKTGNTHARRILVEAAWNYRFPARISRDIQVRQETQPQVIRASAWKAQTRLCARYRRLTARQLHHNKVCVAIARELAGFVWNIARQVQPRA

SEQ ID NO: 364991 - protein, 343 aa, unidentified
MECYVGLDVSLKQTSICVVSRTGSVVREGVVDSDPDAIAGFVRSKAPGATRVGLETGPTTTWLWTELKRLGLPVICIDARHARAVLKMQINKSDRNDAAGIARIMQTGWFKEVRVKDVVSHSVRALLASRALLVKIKRDLENQIRGLLKNVGLVIGRAKFNVFTMRTEELIADRPELIAVVGPLLKARQAIEQQTDDLDRKVLKLARYDAQVRRFMTVPGIGPITALCFKATIDDPTRFKRSRSVGAYVGLTARRHASGEIDWTGRISKCGDAMLRSYLFEAASVLLTRVPKWSALKAWGMRLAKRNGLRKATVAVARKLAVILHRMWIDRTEFNWSKKEVAA

SEQ ID NO: 364992 - protein, 360 aa, unidentified
MKEEVAGRPGIVGGVDTHKDLHTAAVVDEHDRVLGSECFATARHGYRQMLAWMRSFGELLRAGVECTGTYGAGLLRYLQHAEVTVLEVTAPDRSDRRKRGKDDTPDAENAAHAAFAGIRTVTPRSRDGMVGSLRVLKVCRKTAVAARRVALQLIKNTIISLPDELRESLRTMTRMQLVRTLAAWRPDLTDYRNLVSAYRITLKSPGRRYLELHDKIADLNVMIAALVQQLAPDLISRNSIGPECAAQLLLTAGDNSNRLRSEAGFAALCRASPVPASSGRVTRHRLNRSGDRAANSALHVIAIGRLRTDPRTKAYVERRVSEGHSKLEAIRCLKRYIAREVYYVIRKRNREIGQVQVAWK

SEQ ID NO: 364993 - protein, 443 aa, unidentified
MNVNYYMGIDVSKGYADLTILNQQKEVIEENFQLDDTFEGHNHLFNILSSFYVQHPEAKLFAAVESTGGYESNWFNTLHKLQFKMELSVARLNPFGVSHSSKASMSRIITDKQSAKFIAEYLISYPEVVNYESEDYFASERRQWTSIKMFTKQKTQLLNQLNSLLYIANPEILSFCRDGVRLWTLLLLEKYPTALKISRAKVTSLSQIPYLSKDRAEEIIENAKQAIASANDEITAETIIAIVKQIISLKKIIAKQINLLENSVDLPNEVELLKSFNGIGTYSAVGLMIEIISVERFQSSKKLASFFGIHPVFKVSGDGKSGFRMSKKGRKEPRNILFNITRYAIAHNDFIKEIYANHLKKGMSKLAAMGAIMHKILRIIYGMLKNNTPFNAHIDIDNRNKSNNEEKQSTKLNIERRYQKHDNIAPTSRKQNKLRKENEPLPK

SEQ ID NO: 364994 - protein, 364 aa, unidentified
MACSGDPLRSSTRLAYMKLELKEVPMRIVGGLDVHRAQITFDYVDLATGDQERGVIRPATRTEFRAFLEHFGNKEGAFALEGTTGWRFVVEELRRAGMEPHLAEPAETSFQRGPKRRAKTDRADARLLRDLLLMGRLPESWIPTDHIAELRTTVRLRKALIDERTAWLARIRAQLFHHGLPIAPDLMTYVGRQWLDEAELPAAARQVLDAGCRMVDRIDDEISEIDRELATIARRLPGCEVLQREWGVGHVLSVTILAELGDTRRFSSSRQAVRFAGLDVTVRASDTKRARGHLSRQGSPLLRWALYQAAGGAWRTRSPDHAYYLETKKRLGATQARLSVARRMLRRMHHQLVQAGETVFADAA

SEQ ID NO: 364995 - protein, 344 aa, unidentified
MKKLFVGIDFSKEKVDAAIIIADGLNEIAPRAYNEFKTTNSGYNQLVKWVKKHSGDTEESSWLFCGENTGDYSLGLCNYIYGKGLDFWLENAKSIKDASGIRRLKSDRADANMIAEYAMRNHDKAVMYEPLSENLRQLRELFLYRHKLVGKKCSLTVRRDEKKLTMEKSAAKNAIANMGRHLINEFDKSIKKLDDMIKELISSDEELKRIYDIVTSIPGVGTQNAVCLMVYTNNFKKFGYDSRKIACYYGIAPFGKDSGTSVHSDPHVHYMANRLVKSMLTQAALASVKFCPSIASYYIRHIESGKKKMVVLNNVKNKLIHMVTAMVKNGQKYNSEYRNLISVA

SEQ ID NO: 364996 - protein, 340 aa, unidentified
MSKNYRLAGIDVSAGKLDVVIDNSRGAEMHKVFENNPKGHAAVCRFIRPGKTPARVVLEATGKYGVDLALALVEQDIEVCVINPLAARRYMQFRMRRGKTDKVDATLLKDIAGSKEFARWTPPASAVLELRNIVRRVRGVTKQMVSDKNQLHAARATATTPDYILEDMLDAIATHKKRIAGLLKHAKAVVEASQELQDRFDAFQSLSGFGAPTSLMLLGELYGLDRSLSTRQVVAYAGLDPRPTQSGTRDPARRISKLGNAHLRSSLYMPALTAIRHEPVVKAHYEAVLERSGVKKVAIVAVMRKLLHTAWGMVKSPAAFDPEKYSPKYAQLIEKSEKAA

SEQ ID NO: 364997 - protein, 398 aa, unidentified
MRFVGIDIGAERHAVAVVDETGTILNKPESIGEEAAGYRRLRALLGDPGDCLVAMEATGHYWKNLFAWLTAEGFSIALINPIRTRRFAEEELQRTKTDHIDALGIARFAAQKRLEPTRLSDQSAQELRDLVHLRMRTIQHLGDRVRDLHRAIDLTFPEFTRYVRGLDTELATAILSRYPTARTILTASVRALTAVCFDGRRRVGHVLARTLISAALTSVGQHQTEPYERQVRYACQDILAMRTRARELETGIHRRLEGHEVGKLLTTIQGISTLTAAAIIGEAGDPARFRDAAAFASYVGVVPRLHQSGKRTFSGKGTVPLGNARLRRALWMPVLVAIRVNPWLSVYYRRLRAGGKPAKVATIACMHKLLAAVYSVAKHRRPFVAIVPAAAVTSAGRC

SEQ ID NO: 364998 - protein, 412 aa, unidentified
MLFIGDDWAEGHHDVVVQDGAGNTLARRRLSEGVEGIARFHELVASCWGEDREPDPARVVIVIETDRGPWVKALAAAGYRVHAVNPKQAARHKETIAVSGKKDDFFDAGALADMGRTRAHQIRELAADSDIAEAVKIAARAHQKLIWERTRHLLRMRSALREYFPAALEAYSALTLAGADTLELLAKAPDPASAARLTLTQITASLKRAGRRGDLAQRARDIQAALRAPHLAQPAVITEAYAASVQAGAAVITTLNQQVKAMEAKVSGLFRSHPDAGIYLSQPGIGDVTGARILGEFGDAPGRYASAKARKNYAATSPLTIASGKKKTVHARYIRNRHLTDALHAQAFTALTASPGARAYYDQLRARGTGHDDALRRVASRLAGVLHGCLKNGRRYDEATAWSHRARLTPAA

SEQ ID NO: 364999 - protein, 371 aa, unidentified
MADIDGVAGIDAHKHTFTVAVLDGRGGRCGIESFPTAPDGLTEVLALLDSFGFAIGRIGVEGSAGLGRHVAAFLVAAGYDVREVQANRTAERRRRRRRHKTDREDAEAIARETLADAGLPPAGKQRRPDPCWDELVAVRNRRKSLINQRVRLLNEAEAVLTSLPLTIRAVLPPTSRVRPRLRALDRGAASSIQITAADRVNLAWLVEAAGDIARLDARVTELDHKIPALLGRLGCTLTDEYGIAAVGAMELLVEVGDPTRFATEAQFARWCGAAPVAVSSGEGDQAPTHHRLDLAGNRQVNSTLHLMHVTQVRSYPPARDYIAKKRAEHKTKREARRAHKRHLANVVIRRMWADHTQRFETVADQATPAAA

SEQ ID NO: 365000 - protein, 454 aa, unidentified
MSKVRKAATAKSNVQLPTLHPHAAGIDVGATQLQVAVPCDADSRPVRTFTTFTDDLLKLRDWLKACGVQTVAMESTGVYWIALYQILEAAGIEVCLVNARHCKNLPGRKTDVSDCQWLQYLHSVGLLRASFRPPEQICAVRSFLRQRANLVRYASQQVMQLHKALTQMNVQIHNVISDIMGVTGLAILDAVLAGERDGHKLAQLKDHRIKASGDVIARSLVGDWRAEHLFALRQALATWRHYQILLTECDAATAQMLAGFESRVDVSANPPPPTTLRHKKPHANEPRFEARTELYRITGVELTQVPGLQASTALVLFGELGPDFVQRFPTAKCFGSWLGLCPDNRITGGRVISVKTRNVKSRAAEALRLAAQALWQSKTYLGDCFRRWKARLGTPKAITAMAHKLARILWHLVKYREAYDPKVWARAEEKLRAKKLKRLHQNATALGYKLITAT

SEQ ID NO: 365001 - protein, 432 aa, unidentified
MPGVSPADIGFAGREAVRVSVLGVALDPATVVVAVDPGKVLNRVWVSDGTGLLEKPASLPVSRTGIEALESLLAAHPGAGPVIAIESTGSLHRAWAVELERRHPGSIRLFAPSETKAARTQLGSGRFKTDDRDCAALTYLARQGAGRGHREESAVEELRAAVRHRRGLVDDRKVAQQRLHAQLNTLCAGLSAPAGYGRSLAIESSTGQAVLACAVAFAGRPPTRRSLNARSPGRLTQTTADYWITRWRGCLPPPPDSEQRARRLVRDLDRYRALQADIAALEDEIKVLLAGTDGQILTSLPGVASNRAAAFAAHSLPIARFPDAEHLYSATGLAPAMYESATLHRRGRISRQGLAEHRDALMGIAWGLSLFSPSFAQRNLEYRTRGMAPIEARVAVARHACRLVYRLLVTQQPFDEEAYRRGRLSTGRRRPR

SEQ ID NO: 365002 - protein, 337 aa, unidentified
MDKMAVCGLEVSARELVVAMVGKPVQRAANSAAGHRRLLAILTRGGKRVRVVMEATGMYGLDVALVLSAAAGVEVMVANPRSVRDFAKAMMQRSKNDPLDAQVLREYGERMPFRAWQRPSKNRLALWSIARRIEALTAQSRAEKNRRHAAGISQVTPACVRRDIARNLEWLQRSLGKLRQEARKCIAAEAELQRKFQLLVSVPGIAENSALQILGELAMLPGDRDIRQWVAYAGLDPTEYRSGESVRRQSRLSRAGNRHLRTALYMPALAALRCEPHLRGSYQQLVGRGKRKMQALLAVTRKLLHAIYGMFRNDRMYQGRLVFQLPSFAPATLAAKN

SEQ ID NO: 365003 - protein, 403 aa, unidentified
MRAVFGIDVSKASSEVAILVNGEKVHGYTMSNDAIGFARLLGDLRTVHKPEIIFEATGVYSRRLQAFLDEHGYAYTRLNPLEAKKQLDSLRVRKTDQIDAEKLAQSQFVLNRKPTYVQEEVYQELRDLSRFYQNLTEDIVRAKNRLHKVLQVTFSELETILSTPTGEQYWNLVIAFPCKDFVLDLSKDKLSESIRQSTSKRISDKRVAYLAEKLITLANQSYCAVCAVKKTSPILEEVRYYAKELLRLSEQRQVVLDQMVELAQPLPEYDILLSIPGIAETTATSIIGELGDIRRFQSANQINAFIGIDLRHYESGNFLAKEHITKRGNPYARKILFKCIHNIASASHTKPCHIADFYEKRKRQSQTTSTKPHTIASIHRLIRTMYYLIMHNKLYDYTLTQNQ

SEQ ID NO: 365004 - protein, 367 aa, unidentified
MDEVSTIGIDLAKHVFQLHGVDGAGEVVLHRRLRRGQVANFFAALPPCVVGIEACGTAHFWAREITRCGHDVRLMPPGYVKPYVKRNKHDAADAEAVCEAVRRPSMRFVPVKTPEQQAALVAHSVRDLLVRQRTMLVNALRGHLAEFGIVAPRGIQKAEELAAVVADESDGRIPASARNALRTLTAELATLDLRITRLETEIVAGAKTDAVVRRLATIPGIGPIIASRLSAMVPDPAIFRSGRDFAAWIGLVPRQSSTGGKLRLGGISKRGNGSLRRLLVGGAMAAMFRSKALQNNPWLSQLRARKPVLVAAVALANKIARTVWAVMRRNAVWRPAAVRSSSQPHQPGAVLAAVKTMPPTAVAFGQS

SEQ ID NO: 365005 - protein, 298 aa, unidentified
MSENTVEKFVGIDVSKGTLDIGIEPTGEALRVVYDDQGIAQVVKRLVAVGPTLIVMEATGGLEVRLASELAGKGLPLAVINPRQARDFARATGQLAKTDRVDAAVLAAFARAIRPRVRPLKDTDTRELDELLTRRRQLIEIRVQETLRLGTASKLPRKSLVAHIAWLDKRIADLDVDLTRRLRASDAWRAKDDLLQGIPGVGAVTSLTMLAKCPELGSLNRREIAALVGVAPLANDSGKHRGKRFIWGGRADVRAVLYMATRYRHPVQLCSQGLRRETQTGGETSQSGDRRLYAETAD

SEQ ID NO: 365006 - protein, 347 aa, unidentified
MNFYTQQHKHYCGIDLHAKAMYVCLLDQTGTILVHKNLPTTPEAFLRVIAPYRDDVVVGVECIFTWYWLADLCQQEGIAFVLGHALYMKAIHGGKAKNDKIDAHKIAVLLRGGMLPQAYVYPAEMRATRDLLRRRCHLVRKRAELLAHIQNTNSQYNLPEIGKKLAYKANREGVEEHFPDPSVRKTIEVDISLIDHYDKLLGEVELYITRTAKAHDGQTFSRLQSVPGIGKILALVILYEIQDIARFPRVQDFVSYCRLVKCAKESNGKRLGTSGKKIGNVHLRWAFAEAAILFLRQNQLGKEYFTKLEHKHGKAKALTVLGHKLARAVYSRLTREQPFDLHRFVSA

SEQ ID NO: 365007 - protein, 409 aa, unidentified
MNQLFVGIDVSSKNNVAYLMKPDGSKHSSFSVQNNLGGTKLLSERIVSALNAMQLSDVAIGLEATSIYGDSLVYALREDGSLGRFVRKIHVLNPKQVKKFKDAYSDLPKNDFVDAFVIADHLRFGRINREVYMDDYRYKALQTLTRARFDAVQNLTREKQRFGNYLFLKCSGLAQEKTLSQNTSATTIALMEQFETVDELAYADLETLTAFIAKSGHGKFSDPAATAKAVQAAARGSYRLPKTVRDSVNQALSVTVVAIRALESQIKTLDKAIEQQFEIIPNTLTSIPGIGKVYSAGIIAEIGDINRFDAQASVAKFAGLVWTQHQSGDFEAQHTKLIKSGNRYLRYYLLEAANSVRRCDSEFRRYYGLKFKEVNQFQHKRALALTARKLVRLVFRLLKDNRLYIPSER

SEQ ID NO: 365008 - protein, 362 aa, unidentified
MNYVGVDVHKKYSVLCALDETGRKLREGRVEGNASNGFAQFFAGLDGPSKAVVEASWNWGLVHDELEELEQVEEVVLAHPHKTRLIADAQIKSDRLDAHALSTLLRGNLVARAHVPRRETRARKNLLRQRLYWARLRTMLRNRMHVLLDRQRGLELPQCSDIFGVRGLGFLRRLQLPEPDATLLGEQLALHDLIAQQMKAQEKRIAAEFGSEPMHRRLLSVPGIGATLAAVIACEVDSIERFNSAEKLCAYAGVVPTTHSSGGKVAHGQLLPFCNKWLRWALVEASWVAIGCSPYFGTLYKQHRMRGKKANTAVLIVARRMCRIIWQLLHEKRDFEKRALSPNFTFPGCSVVRLRAVKASGP

SEQ ID NO: 365009 - protein, 336 aa, unidentified
MKSNKMEVPAIQWVGIDLAKLTFQVALWGHLDFPEMQTRSFDRTRKAMKPFLAWLKEQAPAGARLGLVMEATGTFAEEVASWVLDLDPTLWVAIVNPGQTSAFIQSLGFRNKTDDLDAKGLAKYGHERRPAPWERPTPEMAVLKDLVRIRMNLINTRTAMHLRLRDHQRASKTASSAMRKVILSLKAQIQVLDLAIKDHVAANKEIAHQVRLYTSICGIAQVTATTVMVELGDLRRFPRSRQMTAFAGLSPKKKQSGTSVHGKTRMCKQGSSRVRAALFMAAGSAVRFNPDMRATYLNLLAHGKEKRAALGAVMRKLLVLMRAVLMADRNWQGKAA

SEQ ID NO: 365010 - protein, 342 aa, unidentified
MRITTIGLDIAKNVFQVHGIDASEQVVVRKQLRRGQVLGFFKALPPCLVGMEACATAHYWARELTKLGHQVRLMPAKDVKAYVKRNKNDAADAEAICEAVRRPTMRFVPVKTAEQQSRLMLHRARDLLMRQRTQLINALRAHMAELGIVAAQGREGISDLLRIIASERDARLPVDAHTSLVVLAAGVQAVQTMIGSIEKRIVAQHRSDEASKRLRSVPGIGILGATAIAATIPDPKAFRSGRDFAAWIGLVPRQDSTGGKQKLGPISKQGDQYLRRILVVGAHAILKRARHQPEKYPWVTRLLGRKPFRVVAVALANKMARIAWALLARGGTYRAPSLAAKA

SEQ ID NO: 365011 - protein, 311 aa, unidentified
MILTHFIGIDVSKPQLDVALSDQTLFSVPNSAKGFQSLLKRLRKLAVESITLESTGIYSSGVATFLTESGYLVHLVQPGRIRSFAKSQGILAKTDTIDARVIALYGKKTEHLQPYVIPTAEERRLRALVDRRDQINEDLVRERNRKEGCEFPEMIRQINRHIRVLTKELGRMDVLIKEHIRSSAVFLAKSKKMQEETGVGLQTAAVLLGHLPELGRINRQEIAAVAGLAPYNNDSGPHKGKRTIYGGRHRVRTALYMAAMSASNHHHLLKEYYQKMLRRGKLKKVALIAVARKLLIRLNSMVGELLIAEHN

SEQ ID NO: 365012 - protein, 371 aa, unidentified
MKSIIYIGMDVHKKTYSLCALLKETGEIIGETKIPADVSLIIKFIENAKKSVDSDDVQIKTGYEAGCLGYSLYWQLAEKGIECDILAPSTMHRSAKNKVVKNDRRDAKNIAANLANGTYKSVYVPTDEYVEIKEYIRMMHDFKIELKKVKQHINAFLLRFGHQYPGKSKWIPAHIKWLKELELSDMYREILDEYLSQFEILSEKIERFKYRLEELSQKETYKEKIGQLRCIKGIDTTAAMTMHAETSDFDRFPTANAFASYCGLTPGEDSSGDSYHRVGITKQGNSIIRTTLVEAAQVLVRGTIGKKGKKVKSKQKDQDVKVIDYADKAVVRLQKKYHRMIFRGVKRNIAITAVARELACFVWGIETGHIS

SEQ ID NO: 365013 - protein, 343 aa, unidentified
MRYFAGLDVSLEETAICIIDETGAIVREARVVSEPDALVAFFDALGMTLERVGLEACSLTAWLYQGLSEAGIPAVCIEARQAKAAMGAMPNKTDRNDARGIAQIMRTGWYRAVHVKSPSCRSWRALLTARRMVLNKRRDVENGVRALLREAGLKVGTPSRKDFPARVRELAAGDAVLTGLAESLLSVISIMTDEVARLTKRVLDEVRVEPTCRHLMTVPGVGPLTALAFRATVDRPDRFRRSRDVGAHLGLTPRRYQSGETDVQGRISRCGDELARTALYEAAHSLLIRSTKWSSLRAWGMQVAKRRGMARARVAVARKLAVILHRMWVDNSEFRWGKQAVAA

SEQ ID NO: 365014 - protein, 374 aa, unidentified
MLSRVRSTGVQKAELNGNVDSENNHGGSSWRVCNYIGLDVHKRTISYCVKDASGQVLQEGKIGATRGELDSWMKTLPQPWSVAMEATIFTGWIYDHLLPHAVQTKVAHPLMLRAIAAAKKKNDRIDAGKIADGLRCDFLPECHMAATEIRDRRRTLRYRHLLVRQMVQLKNRVSGLLMETGVSYSKQRLHKVGYFRELLSSNEEIHSNIRPLLKLSRDAIVRLQKTEYALVSSLQRDPLLADRIKRLRTVPGVGPITALTWALEMGEVSRFPSIKQAISYCGLCGDEKSSAEKVIRTPLSKQRNKHIQRVLVEAAKLAPRENPELALVYETEKQKGNANRATLAVARKMVAYLLAVDRGKRNFVPAEDHRGVAA

SEQ ID NO: 365015 - protein, 335 aa, unidentified
MTTACSVTLGVDTHKDLHVAVTLDQLGRRLGVATFGTDDAHHASLWAWASDFGPIGQAGVEGTGSFGYRLAQFLTSSGVQVFEVNRPNRVTRRRRGKSDPIDAEAAARAVLAGDATATPKRRTGPAGQLRALLVARRSAIKARTQTEQQLRSLILELHDQQRQQVDRRRIVDLTSACATLTGADGTSLALQALARRWQHLDQEVGDNDQHVTAIIRRVVPSLLARPGIGPVCAAQLLVTAGDNPDRLHSQAAFAALCGASPVEHSSGKTQRHRLNRGGDRAANSALWTIANNRLMHDPQTRAYRTPAWTTWCITLTAGCSTWRSATPSAWPTKAP

SEQ ID NO: 365016 - protein, 391 aa, unidentified
MSLYFVGIDISKYKHDCCIISATDQKVISKFTIKNDKAGFEELITTFNSLSSPEDIRIGFESTAHYALNLELFLENANHSFMEVNPVLIKEYKKSTTLRRTKTDSIDCESIARWLMTVEYKPHSKGFYHAYSLKSLTRLRDRLIRQRSFYLVKITNVLDHTFPEFKPFFNERLSKTALYLLENYGSAEKMARMNSVSYEKLRSISRGKFSPQQFIALKELAANTIGVNNSIFDIELNSLLTLYKTLVSEIDTLEKEINRLIEEVHPHYLSVPGIGPISAAIIYSEYGDISNFDNPGQMLAFAGIEPGINDSGTESHGGRMVKRGSSQLRYALINCCLPLIRFDMTFATYYAKKRAEGKPHRVAITHVAKKLIRVIYALERQDTDFCVQKLR

SEQ ID NO: 365017 - protein, 377 aa, unidentified
MEKITRIGMDTSKSAFQLHGVAENEQPILRKKLRRRHVLEFFAQAAPTKIGMEACGGAHYWVRQLEALGHDVVLLPPQYVKPYVMRGKNDAADAEAICEAMSRPKMRFVPVKSVEQQAAQMLLGVRNGLLRRRTQVSNAIRGHAAEFGIVEALGLSQIEPILAQIAADSTLPALAKQMFVMLSGQYRHADAQIREIEAQLTAFHRSSEQSRRLAEVPTIGPITASALSIKVTNPKAFRSGRDFAAWLGLTPKDHSTAGKLKLGVITRAGDEMLRSLLITGATAVIQQVTRKKGQASPWLQGLLKRKPAKLAAVALANKTARIAWKLMVSGERYHPLQATAEPLHRAGPCAARREGSAQGSALRRNTSTTGAAMGVTA

SEQ ID NO: 365018 - protein, 359 aa, unidentified
MNQLHAQSVVVGVDVHKYSHTAVALDAWGQEKGTLDFSNDSLAAYTAWLNSLGRQSDITVALEDTNCYGVHLVKELVQKGFAIRYVPAILTERERKASTRRHKSDYIDAKRVGRVILTKFEETLPAKENIATEQELKTAQTLDLLLMERRDLVKQKTILKNQLHVLLHQYYGDHYADAFPKAFHPKALEFFRSDLKKQSGVLAAGILRRINRLELIEAQILEISKAVSGASADSREVAALTSTLHGCGTLTAGSILAEAITVKRFGTKEKFAMYAGVAPREHSSGARDRLYTNPFGNRRLNRALHTIALSQIACKGSDEGKRYYEKKLSEGKTKLWALRCLKRQISGRVFQVLKQVSGS

SEQ ID NO: 365019 - protein, 429 aa, unidentified
MIMGFTKPIEHFNLQQKKVITTNTLYVGIDVSSKSNVIYLMLPNGDKHSNFSVANSHEGSTLLVKKIYSALTSHSLDTVLIGLEATSVYGDNLVYFLREDATLAPFNRKIHVLNPKQVKKFHDTYNDLPKNDYVDSFVIADCLRFGRINKEVYMGDYRYKALQNLTRARFFAVQNLIKEKQRFMNVLFKKYSTMTQEKVFSDAFSTTALAVYDEFESAEALANMDLHELTDFIIEKGKNRFPDPDAVAKAIQKAARSSYRLPKTVNDSVNQVLSISITSMKALESQIKEFDKAIIALMELLPNVLISIPGIGPVYSAGIMAEIGDINRFDNQASLAKYAGLAWKQHQSGGFEAEVTRLIPSGNRFLKYYLCEAAFSLVRCDKEYSDFYHLKYKEVNRCQHKRALALTARKFVRLVFRLLKDNRLYCPAK

SEQ ID NO: 365020 - protein, 319 aa, unidentified
MFVGIDVAKAELVVSVLPGPERFTVTNDERGVRALVERLRALAPHLVVLEATGGYELLGVAALAAAALPVVVANPRQVRDFAKATGQLAKTDRIDADILARFADVVRPAVRALPDADAQELDALLARRRQLLEMLQAERNRLGQVFGRGKPLVKKSLKAHIAFLERELRIADADLSAMIRRSPAWRERDDLLRSVPGVGPVLATTLLAELPELGRLTRREVAKLVGVAPLSRDSGTLRGRRFVQGGRASVRAVLYMGALVATRRNAVIRAFYLRLLAAGKPKKLALVACMRKLLTILNTMARTHQRWSLEHATAALNTA

SEQ ID NO: 365021 - protein, 338 aa, unidentified
MNNSTIIGIDLAKTVFQVGVMTNGKLTSNKQVKRARLHSLIANHPPSTIAMEACYSSHYWAREFEALGHTVKLIPAQHVKPFTRGNKTDANDALAIIEASSRPNLRFVPIKTTHQQDIQSLHRIRERLVSNRTGLTNQTRGLLAEYGIVANQGKKGFMIAVQTGLNNGSLSGIVKAELHFALDELQQTSEHIAKIEAKLQTYLEQDENCRILHSIPGIGVINATALVCKYGNSSQFSKARSLPVSLGLTPKVSSSGTRFQMQGISKRGDPYLRKQLIHGARVLLMICDKRPDDALCRWASRLKQRRGTNIAAVAVASRLARLAWVLLQKREMYRPSPV

SEQ ID NO: 365022 - protein, 370 aa, unidentified
MAHTSTLFVGLDVHKETIAVAYVAEEREAELVSWGTIGTRQCDIDKLIRKLQAKGKTLHFVYEAGPCGYWLYRYLTKKKLTCRVVAPSSIPKKAGDRVKTDRRDAVQLARLLRSGDLTPVYVPAVADEAIRDLVRAREDSLKDGKAAKARLKAFLLRQDIRYEGRANWGPAHLRWLAKVVCPTPAQQIVFQEYVRAVSEHVERLQRLEADLQTQVKTWRWLPVVEAIQALRGVQFTAAVILIAELGDLTRFENPRQLMSYLGLTPSEHSSGERRRQGAITKTGNSHARRALVEGAWAYRYPAKVSRHLQLRLEKVPKAIQDISWKAQVRLCKRYRRLVARGKNANQVVVAIAREMAAFVWAIAREVEVAH

SEQ ID NO: 365023 - protein, 344 aa, unidentified
MSIVRNVVGGVDTHADFHVAAAVDSNGGLLGIESFPADSAGYEGLLGWLSAFGAIGKVGVEGTGSWGVGLARFLADTDIEVVEVDRPNRQTRRKVGKSDATDAVAAARAALSGAASVTPKARNGPVEQMRVLLVARRSARHQRIQTLNQLRHLVFTAPEPTRVRFKDRYKTGLVAEAANMRPRKGSDPVIYTTNLVIRNLARRVKAFNTEMKQIDRMLISLLEQTAPSLLALHGLGPDTAASLLVTAGDNPDRLHSESAWAHLCGVTPIPASSGKVTRWRLNRGGDRQANAALYRIVLTRMSSHPQTRTYVTRRRTEGLSTAEIMRRLKRYVARQVFKHLPAAA

SEQ ID NO: 365024 - protein, 346 aa, unidentified
MKQISTIGLDLAKNVFQIHGADAEGAPVLNRKLRRAEVLRYFEKLPPCLVGLEACGGSHYWAREIAAFGHDVRLIPPIYVKPFVKRGKSDAADAEAISEAVTRKTMRFVPIKSADQQAASMVLKTRALLVRQQTQAINALRGHLSELGVIAAIGTAKVAALIEIVRDEEEFRLPKAAHFALAEIADQIEALTRQIDKLERAIVAEAKRDEDMRRLTTIPGVGAITAANIKALVPDPDGFKSGRHFAAWLGLTPKPHSSGGKERLGSISKMGNPTLRSLLVCGATSVLRHVKGNDKAPQWLIGLLARRPFKVVAVALANKMARIIWALLTKGGAYRNTGAASSAASA

SEQ ID NO: 365025 - protein, 427 aa, unidentified
MKKIKIDYLSTLFVGIDIGSRTNVISALNFDQDFLIRMVPVANAQGGAEQMEEMVAQVLSQHHEFKAVIIGLESTGFYGVHIANYLSTSEKLAPFSTKVYCLNPNEVKQYKKSFNSLDKNDGIDSFVIADFARVGRIHTEPWRGAQYLALQRLTRHRLHITECIAREKTYMLNNIFLKFSEFAMLNKDEHPFSDKYGATAEAVLTDYLSTEDIVDASVDELVAFISSKSRGRIADPEQTTYLLQKAAQDSYRLDQCLYEPLTVSIGCSFNCISAFEKELKAINAAIQRAVKGLNPTEYQILTSVPGIGPVYASGILAELGTIKCFKSNDALAKYCGIVWKENQSGEFEAEDTPMNKAGNRYLRYYMIEAAGSVMQHCPEYKAFYDKKFAEVRTHQHKRALALTSRKLIRMLFGLLANGKLYSVEKSR

SEQ ID NO: 365026 - protein, 513 aa, unidentified
MRRHELTDFEWKIIEPLLPNKPRGVPRVNDRRVLNGILWRFRTGSPWRDIPERYGPSTTCYNRFVRWREAGVWDRILQAVSAAYEGDLIMIDSSCVRVHQHGASCKKISWASDRRIGEVRRSSHLRRPLMLYSPSADASFSDSTHTIFLALELSRRSWLVALHAPDAAKVELHRLPAGDGQAVLELLARIRTRVERRTGVSPHVSCCYEAGRDGFWLHRLLESHGVTSHVMDPSSLQVDRRARRAKTDRLDAQALLRALMAWSRGEPKVCSMVRPPSPDEEDARRPSRERATLLQERIRLVNRIKGLCATQGVDTYEPLRPDRRHRLTQLITGDGRPLPPRLAAEIARQLDWLELVLRHLAEVETMRDAEAAAAAKAASPSKLGALLQVRSIGSELATVLDKEVFYRCFASRRHVAAYVGLTPSPFASGRRSREQGITKAGNVRARKALIELAWLWVRNQPDSTLAVWFRSRVGSATGRVRRIAIVALARKLLILLWRYVETGTLPADVAVKP

SEQ ID NO: 365027 - protein, 346 aa, unidentified
MAYYVGLDVSVKETSICIMDDKGVVAGRTDISTDPDLIANFISKHASKVERVVHESGILAIWLTRELEKRGVPIICIDARLAHKALSGRINKSDQGDAEGLAQLARTGWFSQVHIRSEASERVRVLIGARERLIRMRKDLEGHVRGVLKVFGICMKSVGTRKIRGDFRAQLAAVADTDPAITMMAETFVPLHKTLCIARDALDDEVRKMARESNLACRLMTVPGVGPIVALAYIATLDDEKRVRKSIDVGAFLGLTPKRHQSGEVDWSGKISKCGDCDMRRLLYSAASTLISCTRKPSRLKEWATKLAERKGHKKAAVAASRKIAVILHCLWRNETVFEPGMEGAS

SEQ ID NO: 365028 - protein, 400 aa, unidentified
MRVVFGIDVSKVSSEVAILVNGEKVHNYTMSNDAIGFSRLLGDLKTVHKPEIIFEATGVYSRRLQAFLDEHGYAYTRLNPLEAKKQLDSLRVRKTDQIDAEKLAQSQFVLNRKPTYVQEEVYQNLRNLSCFYQNLTEDIVRAKNRLHKVLQVTFPELENILSTPTGEQYWNLVIAFPCKDFVLELSKDKLSESIRQSTSKRISDKRVAYLADKLIALANQSYCAVKKTSPMLEEVRYYTKELLRLSEQRQAVLDEMVELAQPLPEYDILLSIPGIAETTATSIIGELGDIRRFQSANQINAFIGIDLRHYESGNFLAKEHITKRGNPYARKILFKCIHNIASASHTNPCHIADFYEKRKRQSQTTSTKPHTIASIHRLIRTMYYLITHNKLYDYTSTQNR

SEQ ID NO: 365029 - protein, 332 aa, unidentified
MVIIGCDLHSRYQVIAMLGTETGEITTRRLEHEGGEAERFYRGLEKPALIGIEATGYTQWFERLVGELGQELWVGDPAEIRARAVRRQKTDTRDAEHLLDLLVSKRFPRVWVPTPEERDFRQLLKHRDKLVKMQTSVRNQLHFLAMSQGVCRKRRLWSAPGRRELQGLRLGPWASRRRQELVDLLDGLGPRLEELDRAVKAEALRRAEAARLMEQQGVGPVTALAFVLTVGPVERFANSRKLVSYLGLNPREDSSGGHQRLGHISKQGHEMLRWLLVEAGHTAARLDPELRRVYQRLKFRRGGRVAKVAIARRLAVRLYWSLRRYAAASHVQ

SEQ ID NO: 365030 - protein, 364 aa, unidentified
MLIIGCDYHPSFQQIACVDTDTGELSEHRLAHREEAEAFYRILKQRNLSVRVGMESSGHSRWFERLLCEVGFELWIGDPAEIQTRRVRKQKTDRQDAQLILQLMMENRFPRIWVPDAENRDLRQLLWHRHRMVQMRTRVMNQLHVVPLNEGLRRKKALWRPAGRKELESIALPPWASRRRQDLLDLLDQLTPKIQELTRALEQEVEKRPVTRLLRTHPGVGPLTALAYELVIGTPERFHCGKQLASYVGLVPEEKSSGDRRRLGHISKQGNVLLRFLLVEAAQVTVRSQPEWRNKFFHLAMRRGRKIAKVAMARKLAVHLYWLWRQGCEYGQTPKLGSHAGEPGNPDGELQITDVMIGHPAPSK

SEQ ID NO: 365031 - protein, 387 aa, unidentified
MEVRMVNTPSAGTNNEPVHCFVAIELSKSNWVVGFQTPLTDKTSRHQVKAGDAKELLELIERVRMRVARQLRRPVKVMSCYEAGYDGFWLHRVLEVRGIENHVLDPASLQVSRRARRPKTDRIDTERMVRALIRHLRGEPEACSVVRVPSVEQEDAKRLHRERRRLIGERVQHVNRIKGLCATQGIYDYSPLRKDRLARLDGLRTGDGRALPMRLKAEIVRELKRLEVVLEMIATVEAERDAILTSAASTHLNSGKIKMLAKLKAIGPEFATTLVGEVFYREFANRRKLGSYVGLGSSPFCSGSLDRDQGISKAGNPTARSMMIELAWTWLRYQPDSALSIWFRERVGNLKGRPRRIAIVAMARKLLVALWRYLETGLVPTGAVLKA

SEQ ID NO: 365032 - protein, 373 aa, unidentified
MAYRHYWVGLDAGHLETAVCLIDAEGRLLFEAICETKSGPIRDILRRFGVEAAQCLTIEAGNGTQMVRELRSYGFPVQVVDVRKSSKFLAIRRQKTDVHDARGLAELGRLARSMGSQVFVKPMEHQNIRTLINVRRTMLKNRARTDALIQSIFRLYGGNVKLLNGRGALAAEVNNQVRKMRQHGLEIGVNLQPLVEISEALREQISALDRQMRDIASNNPTCRNFQTIPGVGAVIALSFYSAIGDPHRFERSRDVGAYLGLTPTLYQSGATSRRGRISRHGNKLTRMHLITAATVVLCRIEIESRLRTWGLELAQRVGFLKARVAVARKLAVIMLGMWKSGSPFRADGEPSLFLQQEEAGLDPVLISGTQISL

SEQ ID NO: 365033 - protein, 347 aa, unidentified
MIIIGCDLHTRFQQIAKLDTDTGEVVEKRLEHENGEAKRFYQSLEPPVLVGIESTGYTLWFAEMLSEFGHELAVGDAAKIRASETRKQKHDRRDAWHVLELLSEGKFPRLWLPSVEEREVRVLLEHRHQLVQMRTRAKNGLQAIALNHGLRRRHRLWTAAGLKQLEGLPVGEGTERRRGDLLRLLHQLDGWVGELDRRLEAEVERRPEAQRLMTHPGVGPLTALATVLILGEVERFAETRQVTSYVGLIPAEASSGGKQRFGHLTKQGSRLLRFLLVEAGQSASRGDAGLSRLYKRLTFRKGKSIAKVAIARKLIIRLYIMLRDKIDYQEFCRRGSHAGMLGDVALA

SEQ ID NO: 365034 - protein, 338 aa, unidentified
MNKRDIDRLDDSMRMFVGLDVHKKYTEVAIVDEEGVITEQGRIENEPGLVEEFSDRLSNADMVLESSSSWYWLYEILSRKHKVVLSNPAKTKAIASAKLKTDKVDALMLANLLRGGYIAESYVPSRRVMSLRELVRYRANLVRMRGSVKNRVHAYLLMNNIRIGCSPFTKGFLEELRKVEDIRVQGYLRIIDGLNGEIREASKKVCDEALNDENARLLMTIPGISFYSALLLISEIGEIGRFPDSAHLVSYAGLASSTHSSGGSTYHGRITKAGSPYLRWVLNQCTWVHVRNEPGGSIAVFYERLRRKKGHSKASVAASAKLLKVVYWMLREKRPYHG

SEQ ID NO: 365035 - protein, 343 aa, unidentified
MEHFAGLDVSVKETSICIVDDTGRIVREAKVASEPDALLEVLKNPTYSFKRIGLEAGPLSQWLYSAFAEVHLPVICVETRHMRAVLKAQINKTDRNDARGMAQMMRAGLYRPVHVKTLRSQKLRMLLTHRKLLQSKAIAVENDLRGTLRNFGLKVGMAGKLKFEARIRELVENLPDLAVLVEPLLIVRRVLREQIAVLHRRLLAIVQDDAVCRRLMTIPGVGPVVALTYRATVDVPARFRNSKAVGAVFGLTPSKYQSGEIDRTGGISGCGDEMMRVMLYEAAQSMLHSKRWSWLKAWAMQIARRRGMKKAIVALARRLAVVMHRIWIDGTTFRWTREEALAA

SEQ ID NO: 365036 - protein, 339 aa, unidentified
MNEVTVIGIDLGKHSFHLHAQDAAGRMVFRKKLSRQQLLRTLANVPCCRVVMEACAGSHWLARQLAGMGHEPRLISPQFVRPFVVGNKNDFGDAQAICEAACRPSMRFVSPRNEAQQTVSAMHRLRERLVRERTATVNQIHGFLLEFGISLPRGAALMSRLPTVLDHETLPPRLVGLVVRLHAQVHYLEEQIRQVVQDLKASLREDDKGRRLLEIPGIGPITASALAVELGDARQFANARQFSASIGLVPRQYSTGGKPTLLGISKRGDRNLRRLLVQCARAVMQHTASRTDALSLWVKTLSTRRHSNVVACALANKLARIAWAILARGTHYEARTLTT

SEQ ID NO: 365037 - protein, 412 aa, unidentified
MKDLLEISCGLDVHKDKIVACILTGPLGKPTNSEIREFTTLIPDMIALRDWIVSQNCHHVAMESTGIYWMPIYEILEEAFGGDITLLVVNARHMKNVPGKKTDMRDSEWISTLLRAGLLNGSFIPEKRIREFRDLNRYRKSVIRDITSQKNRVEKFLQSSGFRLSSFISDIFGASGRNIIRHLTEHGQIDRSALDSCLKTKTRNRIDEILMSVNGTLSEHQKAFLKILMDHYDSLKEHLVEIEKSLEADMAPFALQVEQLSSIYGISTTASCAIIAEIGIDMKPFKTAEHICSWAGLCPGNNESAGKRKSTSVTKGNPYIKSMLCEIAWVIAGKRNTYLSAWYWRIKQKKGAKKAIIALARKLLVIIYTMLKQGTLFDESCFEARRKSCEQKQLSRYIRELEKHGYHVEAQA

SEQ ID NO: 365038 - protein, 385 aa, unidentified
MVVVGTDAHKYSHTFVATDEVGRQLGEKTVKATTAGHATAIMWAREQFGLELIWGIEDCRNMSARLERDLLAAGQQVVRVPTKLMAQTRKSARSRGKSDPIDALAVARAVLRETDLPLATHDETSRELKLLTDRRDVLVAQRTSAINRLRWLVHELDPERAPAARSLDAAKHQQALRTWLDTQPGLVAELARAELTDIIRLTGEINTLAQRISARVHQVAPALLEIPGCAELTAAKIVGEAAGVTRFKSEAAFACHAAVAPIPVWSGNTAGQMRLSRSGNRQLNAALHRIALTQIRMTDSRGQAYYQRLQDAGKTKRAALRCLKRRLARTVFQALRTVHQPSSEHTQPAAACHRSYCCRRDLIGAWLSPRLRCVRRPAQPQHSLK

SEQ ID NO: 365039 - protein, 403 aa, unidentified
MNNVAGIDVSKGKSMVSVLRPFGEVVAKPFSVGHTGSELKELADYLKSLDGETRVVMEHTGRYYEPVARFLHDEGVFVSAVNPKLIKDYGNNTLRKVKTDKADSRKIARYGIDNWAELRQHTPMDTIRMQLKTLNRQQSLYSKTKTMMKNNLIALLDQTYPCVNALFDSPVREDGSQKWVDFATTFWHVDCVRNMSLTAFAERYRKWCKRHGYNFSQSKAVEVHAGAQDLIAMLPRDALTKTMVRQAIDALNAVSASLERLKAEMQALAAQLPEYPVVMAMHGVGDSLGPQLMAELGDVTRFTHRNAITAFAGVDPGADQSGTHEAKSTRVSKSGPPELRRALFLVMDCLLKTQPQDDPVYRFMDKKRAEGKPYLVYMTAGANKFLRIYYGRVKEYLASLEGN

SEQ ID NO: 365040 - protein, 404 aa, unidentified
MRSIGLDIHRDFCEVAIAEGGGVRSPGRIEMTPEALELFAQSLGRSDRVALEVSGNAWEVARIIRPHVARVVVVSPADTGIRSARAKTDRLDARALAKLLAAGSLDSVWVPDETTRAMRRRLQRRRQLVGVRTKAKNEIHAALMRRLITKPALSDLFGVEGRSWLAGLELVEEEQETIDGCLRQLDFCESEIAGIERVIAGEALGSAEIRRLMTVPGVNVICAATFMAAIGDIRRFEERRKLVGYLGLDPKVRQSGLSQTSRGRISKHGSASARHALVEASWSVVKAPGPMHSYYQRIRARRGAQVAIVATARKLACLFWCLLSREEDYAYGQPSLTRKKLRRLELAAGACKGDGGSGVWSTNKAMRQAEQELARQAEAAYERTVADWQAQRKKGVGATPGRAS

SEQ ID NO: 365041 - protein, 352 aa, unidentified
MEQFIGCDAHKKFSVFVAVNEKGQAGEALRVMHDRLLYREFLARLPPHSVIAVEASGSYSWLVDEMERAGHHPKLANPLEAKRRMALTKKTDKLDARGLAILLRNGTLPEVWIPPSELRDQRELLRLRIFLVHLRTRVKNRIHGTLARHNVQVPGADLFGVAARLQLGTRLPELPVHSREAIEQELATLDFLETQIESTEQRLEMIMKVSVEADLLKTLPCVGKILSMVLMLEIGRVDRFPTAAHLASYSGLVPRVHSSGGHTRMGQVCTNVNRNLKWAFVETGNLVVINQRGLAGTHVVRLYQRVKRAKNHQKAVVAVARHLAEAAWWVLTKQEVYREPLGPRQALSSTQG

SEQ ID NO: 365042 - protein, 426 aa, unidentified
MNRSRNERINQVNENTLVIGIDIAKKNHYACAVDLRGRELTKVWRIHQSKDGFIHFEQAVRQLMETHNKSNVLIGFEATGHYWMNLAAMLEAFEFPFVIVNPMHVKQSKEMDDNSQTKNDAKDARVIAKLLPNGYFSIPRKMTTAEHHMRHGSAIRERLRKDISSVKNRIQRWKDLYFPEFNQVFSELGQQALAVLKLTPLPQDVPHLSVEEMVRQQKKAGAKYAGKPKMVTLIEVARHSIGVTRSQEMSRLEIRSLVQQLELLESQLEEVTSQMVEQAQSLEEFQYLVSIPGISENTVSELLAETGSMRNYRHPRQLIKLAGLTLRENSSGQHKGTKKISKRGRKRLRALLYKAILPLIQNNASFRQLYMHYHSREQNPLTKKEAMVVLCRKLLQVFHGLSKKQAMFDPERMLIDSSNYPQNKAA

SEQ ID NO: 365043 - protein, 344 aa, unidentified
MENYAGIDVSLELSSVCVVDAHGKILKEAKVASEPDAFVEFFEKLGFAVKRIGLEAGPLSQWLHAGLKRAGFETVLLETRHVKAALAAMTVKTDRKDARGIAQLIRMGWFRPVHAKSIGAQEIRALLVARKQLLVRLIDVELSIRGILRGFGLKVGPVTRKNFEARIRELVAGQATLERIAIAMLSARLALKAEYGRLHKAVLAIVRDDAVCRRLMTVPGVGPLVAITYKSAIDDPHRILKSKAAGALFGLTPKKYQSGEKDVTGGITLAGDEIVRTALYEAANVLLSRITRFSKLKRWGMDVAKRRGSKRAKVALARKLAVILHRIWVDGTTYRWAEAGSIAA

SEQ ID NO: 365044 - protein, 356 aa, unidentified
MRVYIGVDFHARQQTISYLTTEDGQIQRTRLEHLAEDIVHQNVRNFYSQFKGEVIVGFEAGGYSQWFEEMLEQLGHEIWVGDAAEIRRLARRKQKNDKKDANLILELMVEKRFPRLHRRSARSREILRQIGYRHKLVKMRTMAKNSVKAIALGAGLVVRSQFNSQAGRQRLEKLKLTASVSRQAEELIELIDQLNEKIKRVEEWLKEAAAKDERVTLLQTQPGIGLLTSLALVSTLEPIERFSTSRKVTAYVGMDPVEDSSGDRKRIGSISKSGSKLMRFLLSEAAQVAIKKDDELGKFFHRVMKRRNTPKAIVAVGRKLLVRSFIMLRDGIDAEEFARRGVKARSSRVAHRPSNA

SEQ ID NO: 365045 - protein, 347 aa, unidentified
MTVYIGVDFHARKQTVSYLTTEDGEIEQVELEHEKDYVRTFYEQFRGQKVIVGFESSGYAAWFEELLEELEYETWVGHATAIRQFARRRQKNDRRDADLILELMVRGDFPRLHRYSRESRERLQQLRYRQRLVKMRTMVINSLRFMVGSRGVTLRGTLQSRPGQARLRQVALPGPLGQQRDELLRLLLEIQQKVETVEEWLKQKAEADPRVQRLRTHPGIGLLTGLGLVATLESIGRFSHSRKVTAYVGLDPVEDSSGERRRMGSISKQGSRLLRLLLVEAGQVAARRDVELGQVYRRVTLRRGHATAKVAVARRLLVRAFIMLRDEIDYAEFCRRGVAARSSRGNA

SEQ ID NO: 365046 - protein, 339 aa, unidentified
MKTYAGIDLHSSNNYIVVIDENDKRLFEKRLPNTLEAIAPALERFKETLTGVVVESTYNWYWLVDGLKDIGYNIHLANPAAIQQYSGLKHADDKWDSFWLAHIFRLGILPEGYIYPKEFRAVRDLLRRRLLYVKQRTTHILSLQSMITRNLGLRMSGNAIKKLEAEDAEELFTDSYLVFTAQQNIKTIEFLKNIIKDIEKKVLKVAELAPEFIKLKTFPGIGKILGLTIMLEVGDIKRFSKVGAYSSYCRCVKSERISNGKKKGENNKKNGNKYLSWAYVEAANFAIRFSPEAQRFYQRKKAKRNGIVAIKALSNKIARASYYVMRDQVDYDVEYLFKK

SEQ ID NO: 365047 - protein, 388 aa, unidentified
MHTVGIDIGKRHHVAVILDGNGQPVGKALRFANDQAGFAQLLERLAAVDEILLVGLEATGHYWLALYSALAEAGYNLVVLNALQIHAYRKSGIRKRKNDRYDAYWIADYIRISQQPPVSQPQPELLQLRELTRFRASLTDQVGDCKRKVISILDRVFPEYETLFSNVFIQSSRRLLAEALTPDEFADFDLTELTQLLTQTSRGRHGQAKAEEIQALARRSVGIGFLGDALRVQMNCLLQQLALLDAQRQQLETEISALMTQLPQHITSIPGIGPVTGAIILAEIGDVHRFDAPEKLVAYAGIDPTVYQSGQFTASQTRMSKRGSPYLRHALWQAAFMATQHDPQLRDFYQRKRAEGKAHGTAVGAVCRKLLHRIYVVLKEERPYVIRD

SEQ ID NO: 365048 - protein, 474 aa, unidentified
MKEHKKTKAKTKSQATKVLREQEPNAAGIDLGAEEIWVAVPSERDQNPVRRFEAFTQDLNSIVQWLVGCGVRSVAMEATGLYWIPLYQLLEDAGLKVCLVNARHVKNVPGRKSDVRDCQWLQYLHSVGLLLGSFRPAQAICATRSIYRYRQNLISMATEHVQHMQGALDQMNIKLHYVIDDLTGFTGQAIIEAILKGHRDPVQLAKLRDKRIQASEEKIIKSLEGDWRKEHLFVLAKAWAQYQEVQKQIQDCDRELLQYTQELEACTTVLKPVKVMRLRAELVDSEPRAKLPTTKKARRKTSKNQPQGPWHQELERFFGVDLTLIPGISVLSGLTLMTELGNDLSAFKTPHHFASWLCLCPDNETSASKVLRRRTRRSQNRVRQALRMAASSLHHDKSYLGEKYRRLRARLSPPKAVTAMAHQLARIIWTLITRQVPFDLSLFAQQEKLNARHRFKRLTASARQMGYQLTPLAA

SEQ ID NO: 365049 - protein, 339 aa, unidentified
MAIITIGIDLAKNVFAVHGVDETGKPNLVKPKVQRADLLALIAQLPPCLIGMEACSGAHHWARLFQQYGHTVKLIAPKFVAPYRLGGKHGKNDAADAAAICEAVTRPHMRFVPIKSADQQALLTLHRTRQGLVEDRTATYNRIRGLIAEFGIVLPQKVERLRREIGAHLADLPGWANRCIGDLLQYASQLSERIDSYSDAIAQQARQDDRARQLQRQPGIGPTTASALLASIGAGHDCDSGRQLAAWIGLVPGQYSSGGKTRLGRITKAGDAYLRSLLVMGARAVLAGLGDKQDRYSRWARNLQSRRGYWKAVVAIAAKNARMAWAILRYGHDFTVLAD

SEQ ID NO: 365050 - protein, 423 aa, unidentified
MEVMHERVAGLDVHKATIVACVRVMSEGKVKRECRTFETSTAGLEALLDWLTASGCTHVAMEATGVYWKPVWNILSDGAFELIVANAAHIKNVPGRKTDVNDATWIADLVACGLIRASFVPDETIQELRSLLRARKQLTREQTSHIQRIQKTLEEANIKLDSVISDIMGVSGRRMIEAMIAGVRNPHKLAALADRRIKAAPKVLHDALHGRLTDHHRFMLELYLGQHDALSQAIAKIDDAVDAATARMDEEVEAGQASFRSLILLLCSVPGINILGATIILAEIGRDMSRFPTAGHLLAWAGMCPGQNESAGKRKSSRLRKGAPWLKTILVQCAWAATRKKDSYYGAQFKRLRAKRGPKKAICAVAASMLTAIYHMLRDGTHHQDLGADHFDRRSNEVKARHHVAQLARLGFHVELQPVAQAA

SEQ ID NO: 365051 - protein, 393 aa, unidentified
MICVGIDVAKDKHDCVILNSEGKALTGVFTIPNNADGFDTLLQKIRSCTSSDDKIKVGLEATGHYSYNILGFLINQGLPTYVINPLHTNLYRKSMSLRKTKTDRVDAKTIATMLMSNVDLKSYTDTAYHNEELKSLTRYRFDKVRERAQLKQSVSRLVTILFPELEKLVPTLHMSSIYALLIEFPGAKQITEAHLTHLKSLLKDASKGRYGRDMATEIRDAAKHSIGSVMPAKSLELRHTIRLIRELDSEIEDIEAAIEAIMEELQSPITTIPGMGFRMGAMILAEIGDFARFDSPDKILAYAGMSPSTYQSGQLSLAGTYSHMEKRGSRYLRYALYNATKYVCHWDPGFAAYLAKKRAEGKHYNVALSHAAKKLVRLIYAMEKSRQPYKRAA

SEQ ID NO: 365052 - protein, 344 aa, unidentified
MYLCILNQDGEILVHRNMPAGPEPFLKAVAPYREDLVVCVECIFPWDWLADLCAREGIPFVLGHALSMKAIHGGKAKNDQIDSQKMAVLLRGGMLPQADVYPAAMRATRDLLRRRMHLMRKRAELLAHVQNTNSQYNLPGMGKNIAYKANRDGIAERFPDPAVQKSIAVDLALIGHYDPLLNDVEFSIVHTAKQPDPQTLSRRQSVPGIGTILSLVLLYEIHTIDRFPRVQDCVSYCRLVKGAKASAGKRYGTSGAKIGNAYLKWAFSEAAGLLLRTNPAGQKSLARLEKKHGQGKALTVLAQKLARAVYSMFKRKTAFDMPMFLQSSSGAERVSPTSHWTLSG

SEQ ID NO: 365053 - protein, 458 aa, unidentified
MGNARARKVPAQLVEDEDYQLRYERVAGIDIAKAKADVCTRLPPARDGGRRASRLEEVPATASAILALAERLAADGVELAVMEATSEYWRIWYYLLEAAGLNVQLVNPSHARQLAGRPKTDRLDAQWIARLAEMGLLRPSFVPPPEIRALRDLTRTRLQLVHDRSREWQRLEKLLEGALIKLSSAVWSLALSKSAHAILEAITGGERDPKVLAGLAAPQVTGGRAAIQQALDGMRIGSHHPMLIRLHLDRVTLLDRSIAAIEDEAEAALAAIPAAWGTDTSGETGPEAGRGKDAAVLPAVERLAEIPGVSPKLAQAIIAETGLDMTRFPTAGHLVSWAGLTPVTRQSGPRTRKPKKGHGDAYLKGYCTQAATGTAKTDTFLGERLRRLSRRIGGTRARCAVGRSILTIIWHLLANPDARFTDLGPDWHTRKGDRDRKIRAHLRQLQALGLDVTITPAA

SEQ ID NO: 365054 - protein, 379 aa, unidentified
MSTPMFFVGLDVHKETITIAVFRNRDPEPMRVDRLPNEHKRLRRYFQRLSAEGSVRACYEASGAGYVLQRALTEWGIDCELAAPSLIPRRPGEQRKTDRRDAIKIGRDFRDDRLVLIHVPTEADERVRDLVRCRETFQREIVKSRHYILKFMRRRGFIYRDGTHWTQRHLNWIRQVLAPGTLAEEDGVVLAEYLALLEYKLQRRDELDARIEALALTPRYKPLVDRIRCFRGFKTQAAMVLATELGDVRRFESPRQLMAYVGLVPGEHSSGERRRLGAITKAGNARVRHILIQAAWHYRRRPAVGATLRRRQQGQDPDVIAHAWKCQNRLYKVFHRLAAKKPKPVAATAVAREMVGFLWAVLKDIDVAQLQDTEVSRAA

SEQ ID NO: 365055 - protein, 337 aa, unidentified
MTDHYVGIDVHKTESQVAVIDEMGEVTEEVRVENANLEEIAQKYAGNEAALEATSNYFTIYDTLDEYLDVTLANPVKADWLAGQKQKNDRVDAKQLARFLRLNEVPESYVPSRKLRRCRALARSRKKLVNKRTDFKNEVSALLDQTGNVYDGKLWTEGGREFLAELTLEEPYEMVLDQWLEAVDEFTVKIKRLQRKIETVATELEETTLLMSAPGVAAYSGVMILSELGEVDRFDRSSEAVSYAGLDPVVRESGDSRTEHGISKEGNGYLRWILVQCANTAVHNAKDPYLSEFYWRLRETRNKPHKVAIVATARKLLVSLFHMLSREEPYDPPGVSA

SEQ ID NO: 365056 - protein, 431 aa, unidentified
MNSRLNQRIEEIGITTLIVGVDIAKAVHWARFVDYRGVEIANAVSFKNDRLGFESIVTRIEEIRGDRVLRLPYDMVLIGMEPTGHYWKPFANHLMKAGFRVVGVNPYHTKRAKELDDNSQTASDRKDAITIARLIKDGRYFDPYLPQDIYAELRMLTNARVSVIKRMVSVKNTIIALLDEYFPEIFTIWGKVLEAKSSRQILKSCPFPSIILSMGEEGVLAEIKRVAIKSVGRKKVHQIMEAAKNSIGAEYGLEAGRLRLHLLLEELELHEHHIVKIESEMERMLKATSYAEQILSIKGIGVVSAAGFLGEVGDPLRFQSARQIANYAGYNLVEDSSGKNKSGTCISKRGRSQLRALLYQMSFSMVGNNAEMNTFYKYLTTRVDNPLKKKQAFVVVSKKIITVIHALLKKQEVYNPELVLGSVRRAMVIAA

SEQ ID NO: 365057 - protein, 462 aa, unidentified
MEQAMYLGIDVSKGYADFYLMDSSKHAKEKSFQLDDNHEGHQELEQYLIHHTSLENKIICGLESTGGYEQNWLMALKDLTKKLPVEVYKLNPKGVKHQIESSLKRTITDSVSAEGIAAYLANNYEEKKLDWHNSTFQEDQTRSGRHCLRFVNGLIKQQTARNNQLEKLLYQNFPELLTYCKQGIPNWMIRLLIKYPGVSSVKKAHVTGIDAVKGISRKKAETLKELAKTSVVLSSNSVEEQMIKILAEDMQHHQQRIDQLKTFLLDIYKNPLLNILLSLRGIGDWTATALLMLLDPIDRFESTDQIASFFGVNPKFRQSGDGKWGMHMSKQGNSAMRCLLYIAANNVVLHEPYFKQLYHHYISKGMKPKVVRGIIMHKLLRVVYGMLKNRARFDKSIDENNQQKNQNHNEQPITNNSRRYQKLNADAPISRSNYKKRRAVLECQISETDIITASSSTTQLQI

SEQ ID NO: 365058 - protein, 387 aa, unidentified
MPQSNDLSRSLVALDQDSTLIAVIEMGQASWLVAGVLPGVQRHPLKKIAADRDLLLLVLRRWKDEAEKAGRPIKRIAVAFEAGRDGFWLARWLRGHEIEAYVIHPSSVPVNREHRRAKTDRLDTELLKRAFLGWLRGEPDHCSMAAIPTLEEEDAKRPGRERESLVGERTRIINRIKSALARLGIRNFKPTLRKAPQRLEALRTPEGTALPPNMLAELQRDMARLSFVKQQIEEIESARLERLQRAPGDRGNAMVLQLTRVVGVGVETADMLVQEIFCRELRDRKAVARYAGLTGAPSESGKKRRERGLAKSGNARVRRGMLQLAWGFLVHQKGGPLAEWYRARTADARGGTRKVMIVALARKLLIVLWRLVTTGEAPEGLLLRPAT

SEQ ID NO: 365059 - protein, 352 aa, unidentified
MAKGTRIVIGGVDTHGRTHHAAVLDEQGRLLGDQEFPANRGGYRQLLSWLGHHGQVGVVGVEGTGSYGAGLARYLLDQQVRVVEVDRPDRRIRRQRGRSDPIDAEAAARAVLAGTATAAPKRRDGIVESIRALRTARSGAVKARTAAINQLKALLVTAPANLREALDGRSTPALIAACGRLRPDQNALADPAHATKAALAMVAQRIQLLEAEITLADQRLAILVGRAAPRLLGLLAIGNDHAGQLLVTAGQHPERLRGEAAFAHLCGVAPIPASSGKTHRHRLHRGGDRDANRALHLAVVVRMRFCPRTRAYVQRRTREGLSKPEIIRCVKRYLAREVYHALVADFEALHTT

SEQ ID NO: 365060 - protein, 416 aa, unidentified
MKLFVGIDVSSEKLDVCFLTDDDQLSTLSEISVSNDIEGASLTREMILEFNENYLFDQIIIGMESTSMYSFHPSMFFHEDEELKKLNTLVTIENPFRIKQFRRMFDEDKTDRNDALRIADFLRIQRFTTSPIKEEKYMALQRLTRTRYQLIKQLTRTKQHFLENLTYKCNTLVREMKDESTSLFSATVISLMTEDFTLDELAELPLEAFSDLIQEKGRGRFKQPEKIAKAIQRAIRSSYRLGTVAQESIDIVLGVLVCEMRALEKNIKELDKAIEQLVIVIPEYQCLTSIPGIGKVYAAGLIAEIGQIERFEDQTKLAKYAGLSWKVKQSGNYQSQNTPLTKQGNRYFRYYLVEAANSVKNYLPEYKAFYQSKYKEVPKHQHKRALVLTARKFTRLVDTLLRNHQLYMPPRSVIDK

SEQ ID NO: 365061 - protein, 482 aa, unidentified
MKKKNIYVNQSQELLTLFEEAGNSAKIMCIPIDYAKKDHVVMFCNGYGDILRKPFSVKNTPEGVSYLTEQVTRSCHNRSINPKYVFFGGEDVGSYAENFASTLRSEGWLVAGVNAHDAKKQRANIQASTDRLDLMGIATMLLNRRCNCSPAQSGIYLNLRTLVRHRRRLVVMTTEVRNRIHAIVDRLFPGFLDEQKSGIAPFSKGTLWLMENRFSAQQIRRRKRSALIEGFRRLGTPKPDCVTTKLKEYAARVLNTSDEYVATLQLSLAQHVKHYRCLQENIEQLEKEIAVWLSQTQGAFLTTVRGIGIVLAAGVTAEIGNPNGQKPLNNLVSYAGIIPRVIQTGGPEGEIYTGKVAKRSNRILKDYLVQSASHLGLHGPEDLMSDHKRRDAAGQHADFGIARRYLRMAMALMRNSQIYLPSRLRKKDSKPEERTSYYLMTWPYLRDKWQKLDALKAGFAEDRPLGRWRNMVQGIYDIKLKL

SEQ ID NO: 365062 - protein, 343 aa, unidentified
MVISVGIDVSKDKHDCFIVSSEGEVLADVFTIPNNMDGFHRLLQRIQDCTNSQDKIKVGLEATGHYSYNLLGFLLDNGLTTYVLNPLRTNLYRKSLSLRKTKTDRVDARTIASMLLSDAGLKPYTSTAYHNEELKSLTRYRFDKVKERAKLKSSISRLVCILFPELEKLVPTLHMTSVYSLLEELPGAEQVAAAHLTRLKTLLETASKGHYKRDMALEIRDAARNSIGSRMPAKSLELQHTIRLTRELDREIDEIEEQIQSIMGELHSPITTIPGLGFRMAAMILAEVGDFTRFDSPDKLLAYAGMSPSTYQSGQLKNCYRYTFFEPSLFHHHHSFSGLIFNS

SEQ ID NO: 365063 - protein, 449 aa, unidentified
MAKKQTNQGSYYKNKKAVLKKINYNVAGIDLGSEEMFIAVIEKDVRKFSTFTNGLEEGTEYLKSERIEKIVMEATGVYWIPVYEYLEKKGFNISLVNGAHSKNVPGRKTDVLDSEWLRELHTYGLLRASFIPDEKIRELRYYVRLRDDHISMGATHINIIQKNLDMMNIKLHKVIDSVMSKSGLLIIHAILDGERDAKKLWDLCKHYINNKKEIDVINSLKGNYRNEYLFGIKQALQMWEHYQAMQKQCDSKIEELLLQMTADKENPQNLNTAKQIKNNKPEIENFHLLMTKLTLGKNTTAIAGINDYSALKIISETGTDLSNFKDEKHFTSWLGLAPSAHQSAKKKRKKGRRHCNRAGMIFRQLAVNVGNGKHTALSSFYKRIRSRAGKMIAIKATARKIAVYYYNLMTMGHGFVEEGIKKYEQRYLQQQELFLQRKAKEMGYSLVKI

SEQ ID NO: 365064 - protein, 355 aa, unidentified
MKFYSGIDLGARKSHVCLIDEDDHKLLDMKMDNNLGVIEAALRPYKSSLEVVAESTINWEWLVYGLQKNSYEVKLAHTLGLKAITWSKKKTDTWDAFTLAKLLRGRLIPEAYIYPYELRPVRDLVRERVRLVTKRATEYGAISRTLLKYNIQGFDRNAVKHLSEKDMHELYQHPFVRTKATMELQRIDLLTEQIKHIEKALFERARQNTTFSLLRTIPGIGDILALTILYEVGDINRFAHARGFCSYSRVVPGIHQSSGRTYRSPNSKQGNRYLKWSFSQAAIMAIRYYPQIRKLYERLAAKRRKAARLVARSIIAHKLSQAAFHVMKHQVAYKEELLFRFSKDYAEGKAVTPSE

SEQ ID NO: 365065 - protein, 402 aa, unidentified
MYSSFVGIDIGKWNHQAAFLEVSGKETARSLAFQNTSEGFQSLLDSLAPFDKGQTVIGLEATGHYWLALFSFLVDNGWTVKVINPMQSDALRKMNIRKAKTDRKDCVVIADVLRFGRYTETVLPDEDLLQLRELSRCRVAHVELLGDLKRRVLGILDRVFPEFASCFSTVFGAAPTELLQECTDPEELADYDIDKLIKLLEKESRGRHSREKAEELKAKASRSVGTRFGRDALKFELKMLLEQLDFIKGQVKEFDKFLKKLMKNHELIYTIPGISVTLGSAILGEIGDVKRFGTPQQLQAFAGMDPSVTQSGNFQGTQGKMSKRGSPYLRRAVYLAANAARRFDPVFKDFYDRMIARGKHPKQALAAVGTKLLRVIHAVMTSQKPYNPQKLLTPAAISQLNP

SEQ ID NO: 365066 - protein, 350 aa, unidentified
MTIIVEPTRAVTGGVDTHLDVHVAAVLDEIGGLLATEAFEANQGGEHRLVRWLGSFGPLARVGVEGTGSYGAGLARLLAASGVDVVEVDRPNRQVRRRQGKTDTLDAIEAARAAQSGRAAGRAKSRDGNVEAIRVLVVARRSARTTKTKSLNQIRHLGFTAPNPLRERLSGLTAARLAVEAASMRPRAGTDAVTFATKTSLRILGRRVLAIDAELVELDTLLSALVTATAPRLLELHGVGIHTAALLLVTAGDNPQRLRSEASWAHLCGVSPIQASSGKVTRHRLNRGGDRQANAALWRIAMVRLSNDPATRAYVQRRQTEGKTKTEAMRCLKRYIAREVYNALPKSALA

SEQ ID NO: 365067 - protein, 347 aa, unidentified
MATMLENTRALTGGVDTHADVHVAAVLDPVGGLLGVESFPADPAGYGRLEAWMAGFGQIALVGVEGTGSYGAGLARYLARAGLVVVEVDRPNRQERARAGKSDPLDAIEAARAAQSGRAFGVAKTRDGKVEAIRALMVARRSARESRTKALNQIRQLVYTAPDELRERFRDVPVWRLAEGVAAMRVRADADPVRMATKTSLTSLARRALALAEEGAFLDAQIARLVDEVAPELVELVGVGPDTAALLLIAAGDNPSRLRTEATWAKLCGVAPLEASSGKVTRHRLNRGGDRQANHALWRIVITRMSCHATTKAYVARRTKEGKSKREIIRVLKRYVARDVYRYLPQM

SEQ ID NO: 365068 - protein, 460 aa, unidentified
MKRSITYKSVPVKNVSLRFLKTVACRSTIYVGIDIGKRKLYVSVRWTPPRSKAVVHEHPWFVENTGEIPLLIAKLRKIASQNKLIVGIESTGTYGDPLRQALSDVGLVVHQVRTKTTHDYAEIFDGVPSQHDGKDAAIIAELVSQGKSTLWPYESQDETENEIQYLTKKMIDRHEEIERQRGKLEGLLARYWPEITSILTLTSMTLLKLLRYYGGPGALFADKESILNIRKFSCGRTSEEKSKEIRDAAKQTCGVRQGVWDLQTCKDIAIRMLELYKQSSSCKKRLKALIEQSRVSLQRMSKVLGVGTASVVWCRIGDPKRYHCSDAWIKAMGLNLVERSSGEYQSNHHISKRGDSETRRWLYMSSLRWVQKSPVKEWYQRKKLRTGRKIPGEENKVTGGRAVVAVMRKLMKGLWHALVHDTPFDPEKLFFKEGSRRKDVTPGRPRQKRHIALQVSKKVF

SEQ ID NO: 365069 - protein, 452 aa, unidentified
MDRRQLKGLPMVRVRVGGIDLGSERHWVCAPTQDGKEREVEDFGATTPELMRMAEWLKARQVESVAMESTGVYWIAPHEILEGQGLEVLLVDTRQLARVPGRDKKSDPSDCEWIQRLHSCGLLRGSFRPAEEICMLRTLVRDKATLVAERSDWVRRMQKSLDQMNVRVHRAVSSIEGVTGMAILRAIAAGERDAGKLAQLRDPHCRQSEEEIAEQLSGHWREDHVFSLQQALQMYDAIEERIGAYEKEILRKLGELERPEQQGKNAPPLGNVNKARSIRQRGQEAKRNALFRLNGVDGTQIDGVGVETLEVITSEYGPDLSRFPNEKEFVSHLRLAPSVPKSGGKPLPKKQRKGRSTRAANALRMAVLALRHSDTALGAHYRRLAQRLGADVAVFASARKVATVIYRLLRWGQPYVDEGAQAYEERYHELRVKSLISRAKQMGFQVTPAPAS

SEQ ID NO: 365070 - protein, 344 aa, unidentified
MSVYVGMDVHRKRSQVALVDEHGVQLANRNLPNDSAELVAVLGRLAPGTPVAFEAAYGWGWLAELLNELSLEPHLVHPSRCKAIAAARLKDDRVDARTLAQLLRAELLPEAWIAPQAVRDQRGLLRHRAALVRVATALKCRVHAVLADRGVGVQESLWGPAGRAFLAELALPAVQRAIVTDCLALIDAISPLVARLERDLVTRARPDPRVQALQSLPGIGPITAMTLVAEIGDIGRFPTARKLCAWAGLTPAVRNSDRKVRHGHITKMGSPWVRFVLQEAAQRAKTRPPFAAFYAKTAARRGTHIATVAVARKLLARCFHVLTELQATTGEGQPAGCARPITCA

SEQ ID NO: 365071 - protein, 353 aa, unidentified
MMIIGVDYHPSFQTIAFLMEETGEYDERELSHNDGEAERFYRDLQQRGIRARLGMEATGYSRWFERLLSELRFELWIGDPAEIKAKRVRKPKTDREDARLLLRLMREDRFPRIWVPSPENRDLRQLLWHRHRLVQMRTRIMNQLQALAMNEGMRWKKKLWGERGRSELEKLVLAPWASRRRQELLELLDQLNPTIGELTAAAEQEANKRPEALRLMTHPGVGPITALAYVLIIGTPQRFPRGKQIGTYIGMIPSEDSSAGKQRLGHISKQGNSLLRYLLVEAAQAAARINPEWRRRYIHLAMRRHKSIAKVAIGRRLAVRLYWMWRNGCDYSPSLEFGSYAGQLEKRQGQTPR

SEQ ID NO: 365072 - protein, 317 aa, unidentified
MERCKPNTTIAGIDVGKARLDVALYGRSETLVINNSPAGIASLLDWLKSHGVTRVGLEATGGYERAVREAMGFAGLEVVMHQPLEVRLFARLKRMKAKNDRLDAALIAAATAQVDAVRAASDPRLSQLAERLTAYEQMSDQAAQMKTYLEHVTLKDIIRSYQARIRSLENLKARLLKDILALVAVHPDLAQRLALLRSLPGFGPVVAVAVLIRMPELGALEPGKAAALLGVAPFDSESGQHKGQRFIQGGRSRPRRLVYIAALAAKRIDTGFRAFAERLRSKGKPPKLVLVAIMRKLIEAANLILRQQRPWRTRPAQ

SEQ ID NO: 365073 - protein, 365 aa, unidentified
MQKISTMRRNGKNIFKGQLTIGLDLGDRFSAYCVLDEAGEIILEQKLPTTPEAMKQTLGKMRRSRIAMETGTHSPWVSRLLAALGHEVIVAHAQNVRLIVKSRRKDDRLDARTLARLARIDPELLSPVRHRSAQAQLHLTEIRARAGLVSARTALVNAARGLVKSYGERLRKCGTQQFRRETMSGLSAGLREALEPLLQEVESLNERIQEYDQRIERMAKERYPETALLKQVKGVGDLIATTYVLTIEDPHRFRKSRDAGCFVGLQPGRRNSGESEPQMHISKEGDEYLRTLLVQGAHYILGPFGEDSDLRRWGQKLAERGGKNAKKRAVVAVARKLAVLLHRLWVSAEVYEPLHNSQKVMSAVA

SEQ ID NO: 365074 - protein, 455 aa, unidentified
MKRKNTYRTVPVQDVRLSEYLPMLMAGCIVALDVAKTKFVAALATWAGETLKLIRFDHPVDTRAFLALVEEIHRNVDASKVRVVMEPTSTYGDAIRYQLQARGVSVSLMPTKKTHDAAEVFDGVPSMHDPKASVVIARLAGQGLGTEWPVDCESRRKLRALVDRRRYEMDHRERCYGRIEAMLAKHWPEFQSSLDMRQQESAAVLLRAYPSPARVSVDEEGARGLLKKASCSQLSGTRIDEVVARAKSSLGVPMYEQEEELLKRLVSQVKDADAAMDGFDDEALAIAACNEAFARLAKFLGVYSAAVIVTHVDPMRATNAKQFEKACGLNLRHHSSGEHVGRLSITKRGPGLVRQVLYFAALRLIHKFPVARAWCSRRKEYGERSKMRANVALMRKLARAIFHVARGAEFDPTKLFDVRRLKLERPSEESLRSEGAARTAPPFAPSLRCEASTSP

SEQ ID NO: 365075 - protein, 337 aa, unidentified
MDYFAGLDISMDETHICVVDRDGAVVYEGKSASTAEAIADKLSGAPSCHRIVFETGRMAPILFHGLSQLGLPAVCVESRQAYQALRSLATHKTDRNDARGLAHLARTGFFKPVHVKSLSAHALRSLILARKKLVGQRVTLENQIRGLAVVFGIRLPRALTAAFIDQALKASEGVAGLSAAMRGLIAARTAVMSAVAAIDADMRRMTRASEACRRLMTIPGVGQLTALAFVAAIDDPSRIRRSRDVGAYLGLVPKRYQSGEVDYVGGISKCGDRRVRTLLYEAANVMLTRYNGQLKLKEWAFAIARRSSMRKARIALARRLAIIMHAMLRNGTEFVVA

SEQ ID NO: 365076 - protein, 436 aa, unidentified
MRGCRCSMIMGFTKPIEHFNLQRKKVITMNTLYVGIDVSSKSNVVYLMLPNGDKHSNFSVANSHEGSTLLVKKIYSALTSHSLDTVLIGLEATSVYGDNLVYFLREDATLAPFNRKIHVLNPKQVKKFHDTYNDLPKNDYVDSFVIADCLRFGRINKEVYMGEYRYKALQNLTRARFFAVQNLVKEKQRFMNVLFKKYSTMTQEKVFSDAFSTTALAVYDEFESAEALANMDLHELTDFIIEKGKNRFPDPDAVAKAIQKAARSSYRLPKTVNDSVNQVLSISITSMKALESQIKEFDKAIKALMELLPNVLISIPGIGPVYSAGIMAEIGDINRFDNQASLAKYAGLAWKQHQSGGFEAEVTRLIPAGNRFLKYYLCEAAFSLVRCDKEYSDFYHLKYKEVNRCQHKRALALTARKFVRLVFRLLKDNRLYCPAK

SEQ ID NO: 365077 - protein, 321 aa, unidentified
MNHHSGAYVGIDTSKLRNAVAVAEEGRGGEVRYLGEIDTTEAATRKLVTKLAAKYRQLTFCYEAGPTGYGLYRLIRKLGHDCIVAAPSLIPKKPGDRVKTNRRDAVGLAKVLRAGELTAVWVPDERHEAMRDLSRAREAARKDLKGKRQQVSSFMLRLGRHYPGKKTWGRAHMNWLMLQKLEHPEQRIVLEELLGAVRQESERVERLDQAIRNAVPEWSLADIVTALQAMRGIDLVAAVTVLAEIGDLSRFQTSRELMGYLGLVPSESSTGDTVKRGGITKAGNGRARRILVEAAWSYRHPPRARRSGDQDLVRAGPVGHL

SEQ ID NO: 365078 - protein, 421 aa, unidentified
MDVMHERVAGLDVHKAMIVACVRLVEGGKVSRECRTFETTTVGLLALLAWLRESGCTHVAMEATGVYWKPVWNILSEGAFELMVANAAHIKNVPGRKTDVNDAMWIADLVACGLIKASFVPEEEIQELRSLLRARKQLTREQTSHIQRIQKTLEEANIKLDSVISDILGVSGRRMIEAMIGGLRNPFKLAALADRRIKAQPKALYDALHGRLTDHHRFMLQLYLEQYDALAASITKIDQAVDAAIARMDEEVEAGQATFRSLIILLCTMPGVGTLAATMILAEIGRDMSRFPTAGHLVAWAGLCPGQNESAGKRKSSRLRKGAPWLKTMLVQCAWAASRKKDSYYKAQFNRLRGKHGPKKAICAVAASMLTAIYHMLKDGTEHQDLGASHFDRRSTEIKAKHLVGQLAKLGFAVELKPLAA

SEQ ID NO: 365079 - protein, 394 aa, unidentified
MSMVCGLDLHREQITFDALVLESGESLRGRVWHPDRERFRRWLVHDVTARAGDVLVALAVEGCTGWRYVVEEITAAGFEAHVAETADTKAARSRKHRAKTDRTDARPLRDLLAAGELPESWIPPTDVLEWRERVRLYKSLVDQRTKWCQRIHAELFQPGVSVPEGAIRTAPVRARIANKDVQLSPAARQRIQVGYQMIDATDTEAMPLKRALTRFGERQPACRALVNAQYGIGGLLAVAVWSELGACQRFSRSRQAVRHTGLDVTVDASNRRRANGYLARQDPKRCGGRCTKLRRTHRINAVPNTPTTSNSKTVTAARSLRSRSHVFSRDAAICIYCAISIPTSCTPSRPDPDRERRRRPPLAHQGRPRSAPEMHCPPAFVLDGLSLDPPIWRR

SEQ ID NO: 365080 - protein, 377 aa, unidentified
MKKELYLGLDVHKDCIITAVAQEGRKGEVRDTGVISNDLHALEKWVGRLRKAHGSDVILRACYEAGPCGFGIARRLKQLGVECEVVAPSLTPKRAGERVKTDRRDARKLARLLRAGELSPVYIPESTDEAIRDLCRARTDAVDDRCRSRHRLKGFLLRHGYHYQGKSSWSAAHERYLRELVLPHPAMKVILEEYLQGIAAAGERIARCEEAMRALLEKWHLRPAVEALMAMKGFRTVAAMILVSELGEVHRFSHPRQVMAYLGLVPTENTSSDRRRQGHITKCGNAHARWLLVECAQHYATPPKVSQELSRRQQGQPAQVRAISWRAQNRLHRRYTCLLARRLQRNKAIVAIARELCGFIWELLRTQDCYQAQSTPV

SEQ ID NO: 365081 - protein, 342 aa, unidentified
MDYFAGLDVSVKETSVCIVDDTGKIVREVKVESEPEALLAVLKNPAYHFKRIGLEAGPLSQWLFSALAEAELPVICVETRHMHAVLKAQINKTDRNDARGIAQMMRVGLYRPVHVKTLRSQKLRMLLTHRQLLQSKAIAIENDLRGTLRNFGLKVGMVGKMKFEARITELVENRSDLAVLVEPMLIVRRVLREQIVILHRRLLAIVRDDEVCRRLMTVPGVGPVVSLTYRATVDVPARFRKSKAVGAVFGLTCSKYQSGEVDRNGRISRCGDEMMRVMLYEAAQSMLRSKKWSWLKAWAMQIARRRGMKKAIVALARRLAVIMHRIWVDGTEFRWTRETVAA

SEQ ID NO: 365082 - protein, 362 aa, unidentified
MVVTVGIDVHKDTHCAVAVDAAGRQLGRDRTFRAIDAGHRQLLRWVLTEFGREVEFAVEDCRQFSNRLERSLLAAAQTVIRVPPKLVALTRQNTRTRGKSDPLDAVNIARAAVREPGVPRAEHPHASRDVKLLVDHREDLVGSGTAIQNRLRWLLHELDPRIDPEPRQLDSMRELDRVRDRVAALPVTTETATVIRIALEQFGDIRQLTVRARELEKELVLLVQQQAPQLLDLPGCGVLTAAKLIGETANPCRFRSEACFAMHAGVAPIPASSGRTQRHRLARGGNRHLNAALRRIAVTQARLDCPGRDFYQRRKTEHQDSTMEVLRVMKRKIARIVYQLLNTPTTTAAACQPVAARHRSNT

SEQ ID NO: 365083 - protein, 349 aa, unidentified
MTMVCGLDLHRRQITFDALEVDSGEEWRGKIWQPDRDWFGRWLRDDMTRRANGGLVALAVEGCTGWRYVVEEIEAVGFEAHLAEPADTQAARGRKHRAKTDRSDARLLRDLLAAGELPESWIPPEGVLEWRERVRLYVSLVNQRTVWCQRIHAELYQHGVAVPEGAIRTVKTRALVGDESLVLSPAARQRITVGYRMIDATDAEAQPLKKDLQRFGARQPACRALVDAQYGIGGLIAVAVWSELGDCRRFARSQQAVRHTGLDVTVDSSDRRRAGGFLSRQGPETLRWALYEAAKNSSHLRSPDHDYYAKVKARHDGKIAAISVARQLARRCYHVLRNVDPDLVYAMPA

SEQ ID NO: 365084 - protein, 347 aa, unidentified
MTTVGVDIAKNCFQVAEADTQYRLIERKRLTRLQFSRWMGTHQPWQVIMEACGSSHHWARVLKGYGHQVRLLPAQHVRAYVRRNKTDAADAAALIEASRSGDIRPVEVKSVDQQILQQLHRARTQWQAARVARINSLRGMLREFGIDIPEGAVRGIAAIREALEIADNGLPDLLRPVIEQLLHEIEESAQRMKDVERLLESLTAEDATVQRLQQIPGIGLLTSTALRAAISDIHRFRSGRYMASWLGLTAREHSSGDTRRLGPISKRGDVYLRTLLAHGARSALRMAKTVASRGRPLDRLRRWALETEKRIGHNKAVIALANKLARIAWATWKHERTFEGNWMRAAA

SEQ ID NO: 365085 - protein, 310 aa, unidentified
MQNLCGVDISKDRLDCFIQPDHFIQFENSPEGIGLLADLLQSHSCALVVMEASGGYERMVFYQLWELKIPCAIVNARSVRDFAKACGHLEKTDRIDAEVIAQFGAVMKTKPMPAPAQNQRRLSALSARMQQVVSDLVVQKQRLHTAHIDVARQGILNLIALLKSESKFLSAEIAGLINADPLWAAIDKTLRSVKGVADRSVATIMADLSEIGLYSNKAIAKLVGLAPLADDSGKRSGKRHVKGGRASVRSILFLVANIVCKFDQTMQAFKHRLTEKGKPKMVIRIALAHKLLVRLNAKVKETRQTFAVNA

SEQ ID NO: 365086 - protein, 412 aa, unidentified
MEVIVERPAALDVHNASVMACVRAPGDGRRRVEHVAEFHTTVQGLLALRDWLEAHEVDQVAMEATGVYWKPVWAVLEHRFSCLLVNARHVRQVPGRKTDVQDAQWLCQLLEAGLLRASLVPPKPVRTLRNLTRYRKSQIRDRQREMNRLHKVMQDTGIKLDCVATDMMGKSGRAMLDALVSGTTDPVVLADLARGQLRKKIPALREALQGRFDSEHSLVVGRILAHIDYLDEAIDELSGAIEEQLGPFAPAVELLCTIPGVGRRAAEVIIAETGGDMSVFPSAKHLASWAGMCPGNDESAGKRRSGKTRKGSKWLSQTLVECAKSANRTKNTYLAAQYARLRARRGANKATIAVCHSILTAVWHMLTTGETYTDPGGDFFARRDPERTRKRLVGQLERLGYTVTLKEEAAAA

SEQ ID NO: 365087 - protein, 371 aa, unidentified
MKKGTTRYLGLDVHKATVTVALAEDGSQPVVYGTIANDPSSVRKLVRQLGREAKLVVAYEAGPTGYALHRQLLELGAGCTVVAPALIPRRPGDRVKTDTRDALTLARLLRSGDLTPVWVPGEEDEALRDLVRARFDAKADVLRAKHRLSKFLLRRGIQVPPGTKAWTARYQAWLNQLSFPQAAAQVVFDDYRATVRATEDRIRRLETELRSCAQDSRQAALIAALQTLRGIGFLSAVTIAAESGDIRRFANAPRYMSFTGLTSSEYSSGQSHHRGAITHAGNAYLRHVLVQAAHNARHAPNCSRELQQRQAGLPSDLVALAWRAQLRLHQRYRHLIGRLGRPKAVTAVARELAGFVWAVGQRMAEQEVSPA

SEQ ID NO: 365088 - protein, 337 aa, unidentified
MKLYVGIDLHAKRSVIVVKDENGKRVACKRVTNELELIRLALEPYREKVAGVAVESTFNWYWLVDGLMDVGYKLHLANPSRMKQYEGLKHTDDVTDAEWIAEMLRLKILPEGYIYPREERPLRDLARRRMRFVRQRTGSVNSMLGIMSNNTGHRPKTNEVKAWTDDDVDELFADADLTLAAQANIEVIRCLTKQIETIEKSILSRARLRPEYKVLKTVPGIGDILALTIMYETGDLGRFSSVGNYASYCRLVDSKWLSDEKRKGSGNTRCGNGYLHWAFIEAAHFAMSNERINRFHQRKARKRKQKMIATGAVAHKLARASYHILKKQEEFDVERAF

SEQ ID NO: 365089 - protein, 438 aa, unidentified
MIHPHAAGIDIGSREHWVAVPEERDEPSVRRFGCFTADLYALADWLKRCGVETVAMESTGICWIPLYQILEDRGFEVKLVNARHVKNVPGRKSDVQDCRWLQRLHSYGLLSGSFRPEAQVCVLRSYLRQRDNLVRYASAHIQHMQKALGEMNLQLHKVLTDITGVTGMRIIRAILAGERNPAALAALRNYRVKSTEDEIAKALEGDYRTEHLFSLQQAVELYDTYQQKIAACDGRIEALLGSFEPRVKGEPCVPATPRKRRKNEPYFDLRGHLHRVTGVDFTQIKGLDTSTVQTLLSEVGLDPTRFPSEKHFCSWMGLCPDHRITGGKVKKRSTRKVSNRAADAFRLAAQTLANSASALGGYYRRMRARLGAPKAITATAHKLARLFYRLWKTGDAYQDPGADYYERMYKERILSNMKRKAKELGFTLELKPLERAVS

SEQ ID NO: 365090 - protein, 317 aa, unidentified
MESHSTFVGIDVAKAELVITMRPALDRWSEPNTEAGIAALVTRLSDSSPELVVLEATGGYERAVAAALVERGVRAVIVNPRQVRAFAKATGQLAKTDRIDADVLALFAERVRPAWRPLDDEATTDLAAVLLRRRQLSDMLTAETNRLGLARPPVRASLKKHIAYLARELRITESELRERIEASPVWRVNDDVLQSTPAIGAVTAQTLLAELPELGQLRHKQISALVGVAPRADDSGASRGKRTISGGRARVRQVLYMATLVATRHNPVIRAFYHRLLAVGKPKKVALIACMRKLLTILNAMIRDQKPWSATLTPAQP

SEQ ID NO: 365091 - protein, 445 aa, unidentified
MPIIRSNAIRIKRFRELKETLRTNRNRLLVGIDIAKAEHVAQVRLAHTQLVDKQLTIPNTQVGFERFWAHLESRRAETGLTELVCAVEPTGTYHEALARFLESHGADVVLVSTTVAHHNRRTLDGTWGKSDPKDAHNLCDLLERGHVLFYSLPDGPLADLRRLVRLVRQARTELAACKARFRNTLLPRLGPAGEPPPPALVATLPGPLRVLVPKPAPTPRPRRCAASRLACATAGDPGLPAGAWEYTDLAARLTAVQARITQLEVALIQVATPLPAYGWLLSLPGIGPTLGAILLAEIGDIGWYTKFSQLRKLAGLDIIGVASGKWTGTTRISKCGRPLLRWALYQAAMGACRNPGWHARREALIAKRQGDRYAFLKANTELAAKLLHLVWGVWRSGQPYDPRHRSGGPAALAPARRRGTPPAHIVKPRRRQAFDPHPGPHQQAS

SEQ ID NO: 365092 - protein, 391 aa, unidentified
MVCVGIDVAKDKHDCCILDSDGTIRADCITIPNNMDGFKQLLQTIRDCTKKSDKIKVGLEATGHYSYNILGFLLDNDLAVYVMNPLHTNLYRKSLSLRKTKTDRVDARTIATMLLSDVDLKSYTDTAYHNEELKSLTRYRFDKVRERAKLKQSVSRLVTILFPELEKLVPSLHIASVYALLSEYPGAKQISEIHLTKLTNLLATASKGRYGKDKAIQIRDAARTSIGSVMPAKFLELKHTIKLIRELTSEIDEIEVSIQKIMDELNPPILSIPGVGIQSAAMILAEIGDFSNFESPDKILAYAGCSPSTYQSGKLTNCYAHMEKRGSRYLRYALYNATKYVCHWNPVFAEYLAKKRAEGKHYNVALSHATKKLVRLIYALQKSGKTYLTAA

SEQ ID NO: 365093 - protein, 403 aa, unidentified
MNSVGIDISKGRSTVAVMRPFGEVVISPFEVRHTDSELSELARQLKSLNGETRVVMEATGNYHAPVAKLLHDAGLYVSVVNAKLVHVYGNNDLRRVKTDRKDAVKLANYGLDRWLTLPRYVPEDDTRLLLKNCYRQYRQYSKVQTVLKNNLISLLDTVFPNVNRLFSSPIRGDGSEKWVDFVAEFWHCRCVSEKSQKAFTSKYQRWCRKHGYNFSEEKAHTIHAEASGYIGVMPKSETTKLLVEQAVAQLRATSAALTALKHEMLALAAQLPEYPVVMGMFGVGPTLGPQLIAEIGDVRRFYSKKALVAYAGLDAPPNDSGDVTGKHKSMSKIGASSLRRTLFLVMSVYLQNAPLDEPIFRFMDKKRAEGKPYRVYMMASANKFLRIYYATVKAYLESLEHTA

SEQ ID NO: 365094 - protein, 310 aa, unidentified
MANKLLFHYQSTNDKAGIEGFIKLLKLHCPDANFSNSLYCMEHTGIYNNHILNFLHLKKAKIWLEHPIHIKDSLGMIRGKNDKVDAQRIATYAYKNRDEVRLWIPKRDIIQKLDRLTATRSRLVKVRKILKSPLTDSKDFLSQKDHKEAKKACEKSIDALKKDIQKIENQIHDTIQGDSYLKELFELIESVKGIGPVIATEILIITNEFKDINDAKKFACHAGVVPFEHQSGKYKGRSKTSNKANKQLKALLHNGAASAIQHSKEIKEYYVRKTAQGKNEMLVRNNICNKLIHRVFSCVHRNGAARAGKI

SEQ ID NO: 365095 - protein, 360 aa, unidentified
MRVSIGIDIGKRKCDYCVVDSRGKVLERGHYINKPKFAAEVAKRLKAKYGKDIRAACETTGNMWNFTYDAFENAGIKILLANTYKMAIIAKTGKKTDKIDAEKIANIVRMDFIPECYVPGKKIRGLRALVRQRNSLVQDRTRYINRVHSLLDRHDLEIDASSMHSKKALIQLFAAKLDPIEDEMVLQRYARQIVNLTAEIEDMDEELADEAAQNEDAKLLASMTGIGPYTSLLLAVEIADVKRFAKARQMISWAGLCPMIAQSGDKTYSGKIKHMDINKRVRWAMSEAANTAVRFDTRMKAIYETARRRHAGLHGPAIIVVANKMINIAWYMLRSRTPYESRNENLYKRKLARLERKRKK

SEQ ID NO: 365096 - protein, 309 aa, unidentified
MIPIYAVDIANENNVCFDGTSVKNFKNTESGVKVWVDKLKPNSIVALEPTGGYSELVATAAYKAGHTVFMIQPAWIKSHRSSLGRRAKTDPTDARLIYDYVESKKDKLFAWKPMDEDLANLKRLVRQRQGLAQDRSRMRQRLKALQVHPTLIATVLDGVETVIKELEVQIKAALKTFPESKFLLSIKGIGPISAAYLLTVLKHIEFKNVDSFIAWIGIDPVPSDSGNRKAPRRISKRGDKHLRSALFVGAMAAIRSATWSARYERFIAKGLKPHQALVAIAKKLATVAYHLFKKQVVFDPDMVALPKAA

SEQ ID NO: 365097 - protein, 414 aa, unidentified
MGLPRWVGRAIGLDVHRDFCVVAICEDGVTRSAGRVPSTPEGIAALADSLRSSDRVALEVTGSCWEVARILEPRVNRVVVVSPDDTGISGARAKTDKLDARTLASLLWKGELEAVWMPDERCRILRRRLARREQLMRSRTRVKNEIHACLQRRLQERPPCSDLFGVKGRQWLAGLELPLEERESVDAGLRQIEFLDSEIAAVERLIAQQALCWPEIRRLMTVPGVNLICAATFIAAVDDPHRFLTSRKLVGYLGLDPKVRQSGDAPARSGRISKRGSASARWALVEAAWTAVLQPGPLHAFYTRIRARRGHGKAIVATARKLAILFWCMLIRSEDYAHQQPSLTRKKLRRLEITAGAPKNTARSAGIWSTNQLMRTAERELAEQAEASYQRMVKDQQAGAPAKRVGASATLERA

SEQ ID NO: 365098 - protein, 411 aa, unidentified
MGIEGKEVVSFGTFTSEFRQAASYLLEHGIRTVAMEATGNYWVILYDILEEAGIDVWLVDGRQTKQVPGRKTDVKDCQWINQLHSYGLLNRCFVADGLIKELRGYQRLREDHIRSMSMHINHMQKALVEMNIRLPEVLSQVQGVSGLAIIEAILSGERDPHKLVSLCQKDLIRRKGEELLKALEGYYSPVGLFSLEQAYQGFKFYRQQVASCDQKIQECLQRNQTDLSDIQLDDPRKPIRHNKPQVEDLGKHLLKLFEGKDATKLSGITDYSWFQLYTETGADLSRWPTEKHFTSWLGLSPGQNHSGKQKRSKSKGVPKTGQIFRMTARSLLQSKKIALGEFGRRLRARKGTAVAIKAVARKLAEQYWRLMVKGQEFVEYGIQHYHEKLQAQKKKYILRLAAEMKMDFKEG

SEQ ID NO: 365099 - protein, 353 aa, unidentified
MTITFTKEYDTFIGIDVDKNNFSFTIIDNDIIKKPKTIPSDPKQLYNYVHKHYSDKKILCAYEAGPTGYGLYDHFESNKCTCLVVSPNTIPKASNEKVKNNNMDSRKIAENLRAGKLKSIRVPVGHYRELRNLVKIRENYADARKVAKQRIKSLLLHASLYQFIKEPDKSWSNRFIQDLKQIPCTNAVRTRLDMLLMDLDYARNQLLESHRYLRKFVNNTADIHRNIEFALSVPGIGFITAVTFFAKSGDPAHLQNTRELAGFIGLTPTEHSTGDTEHRGPISHLGDSKLRILFVEAAWVAIRRDAELRHFYHRIASRNHPKGASQKAIVAVARKLTERLYRVLKDQRKYLVH

SEQ ID NO: 365100 - protein, 372 aa, unidentified
MKKIIVGIDISKEKLNVCLLEGMNIVHEDEIENTVASLHKWFGRMRKSLKCCMDEVLLCAEFTGRYIYPLAVACQEEEAFLWMEDPSRIKNSFGLVRGKSDSVDARRIAEYAFRHHDKAVAYRLPSKELASIKILMADRELVLSDRKKYEAQLSDQKRFMSKEDYAMQSKMWKSIVKELQKQLDFIDEKIDKLVSDSETLSRQVELLKSVDGIGQRIAVAMVVFTDAFSRFDNARQFNCYAGLAPFTYTSGKSIYSKAKVSQRANKQIKALLHLAAVCAATHMKSSDYKEYYDRRIAEGKHPLCVLNVIRAKLVSRMFAVIKRNEHYIKNYDRPSSEKSYQHPCKYHKNTSTVSFIDPFMHPVRPLPPTAPP

SEQ ID NO: 365101 - protein, 342 aa, unidentified
MKEVSIVGLDLAKRVFQVHAAGSDGSVVLRRKLSCSQLVTFFTELPKCTVAMEACATAHYWAREIGKLGHDVRLIPPAYVKPFVKRQKNDAADAEAIVEAETRPSMRFVVPKTKSQQACSMLFRTRDLFVRQRTQLINALRAHLAEHGVIAPQGIANLALLAEIIEDSEAGLELIVVETGRLYLDQIDALSSRIASLEKALRSEAKRSKSTARLLSMPGMGPITAMAVEAFAPTMVTFRRGRDFAAWLGLVPKQHSSGGKQVLGRTSKMGQRDIRRLLVISAMTVIRWACRKAPPENSWLARILARKPRMLVAIALADKMARSIWAMITRNEDYKDSVLPAV

SEQ ID NO: 365102 - protein, 338 aa, unidentified
MQATTIGFDIAKSSFQVHGADERGKTVLRKKLARGRVLEFFANLPPCVIGMEACGSAHYWARELIKLGHEVRLMPPQYVKPYVKTNKHDPADAEACCEAVQRPGMRFVPVKSEQQQSLLMLHRIRDRLIAERTGTINAIRGHMAEFGIVAARRGAGLKDLLAIISDLEDERLPPLARELLVDQAEHLRAIEARIADLDGRLVRQTRDDEACRRLTEAPGVGPVIATAVVATVGDASLFNSGRGFAASLGLTPRQHATGGKERLLGISKRGDGYLRRQLMHGARSLVRVAKGRNGQPWAWINELLVRRPFNVVVAAVANKLARIIWAMLSRGEAFRATA

SEQ ID NO: 365103 - protein, 292 aa, unidentified
MQTQSTELNFEGQNLFVGIDVHLKSWTVSIVTDHLMHKTFTQPASAKVLSNYLNRNFPGGVYNSVYEAGFSGFWSHYKLKEMGINNIVTNPADVPTTQKEHLQKDDPTDSRKLARSLRSGELKAIYIPDPSTLEDRSLVRMRATLIKDMTRFKQRIKSFLYFYGIAYPQEFEKSGSHWSKRFMTWLNEEVSLQHDSGTQTIKILVQEAGQQRKLLLEVLHKIRSLARSEKYAKNIVLLRTIPGIGFITAITFLTEIEKIDRFENTDHFAGFVGLVPNRHSSGEKNNNGEMTR

SEQ ID NO: 365104 - protein, 364 aa, unidentified
MLYLAIDQHRKQLTVNLRDEGGVVLLRRQVSTRWEPVREFFHVLLEQSAAEGGFVAVVEVCGFNDWLLKLLPECGCREIIVVQPEKQSRHKTDRRDANTLGELLWVNRQRLLAGQKVQGLRRVQIPGAVDQDDRRLTSLRQSSGRELTRTINRIKAILRRHNLEQECPTKGLQTKGARQWLEALKLSAVEQLELNQLVARWDLLQTQQQELETRIKARQTQNPQAVILATLPGSGAYTSLALASRVGNVCRFPHPRSLANYWGLTPGCRNSGEVTQRLGSITKEGSRVARFLLGQMVLHVLRKDGAMRNWYRQIRRRRGSKIARVAVMRRLATIIWHMLRKQEGYQCGGPPRRKLRQVVVSAGG

SEQ ID NO: 365105 - protein, 424 aa, unidentified
MKVTYQTCCGVDVHKSFLVATIVKTTGGIEPSYQKKRFSTFNNSILEFKQWLLDNDCHDVCMESTGKYWVPVFNLLEDDINVVIANPKWVKAVKGNKDDTKDSKWIGDLFRLGLVRGSYVPCKKIRILREYTRYRYKLISCRSSQKNRYQNALTVCNVALDSVVSDIFGKSSTSIIDYLLEQSGTSINHEEIASKLLRSLKSKEDAVIESVEGYQMTDAQKYRMRLVRAHMDYITAEINDVDKMMENMISSNPDFENAVQFLCTIPGVKRDSAITIISEIGTDMSQFSSSKRLCCWAGLTPGSNESAGKKKSVRITRAGVYLKPALVQCAHAAVKSDKSPYYKKKYDSLVKRRGKKRAIIAIARMILTAIYQMMSTGEQWNPSDLYKIDMPVALVEKQKAKAIKQAKKLLQREGLLPPDEPLAS

SEQ ID NO: 365106 - protein, 384 aa, unidentified
MEQSIIYVGLDVHKDTIAVALAEAGERARERGLRGEVREHGKIPNTAAALKALSVKLAGKNRALRFCYEAGPCGYGIQRHLSAIGHECAVVAPSLIPRKPGDRIKTDRRDAINLAKLHRAGELTPVWVPDPAHEAIRDLVRARQAAVRTLRQARQQLSGFLLRHGHHYHRPAWTLLHRRWLATLKFDQANHHIVLEDCIAAIEAATARRDRLEAHIEAALPEWSLAPVVQALQALRGVGLVAAATLMAELGDITRFSNPRQLMAYLGLVPSEHSSGRTRRQGGITKAGNGAARRMLIEAAWSYRFPARISREQLLRQERLAQPIRDIAWKAQERLCRRYRKLARAGKLPTVITAAIARELVGFIWSIAKQVQSTAGQRQDEVSK

SEQ ID NO: 365107 - protein, 394 aa, unidentified
MPKLFVGIDVAKDTSSAQGIDSDGKGKFSVTFAMDSEGFMQLWKEIVAHSKDLSEVTAAVESTACYHINLYSFLTAKGIQTVVINPLLISNFSKLSLRKTKTDKKDAMSIAQFLLVHRETISQMTLSQDLQDFRDIARERESLCNMITAHKVEVKRLLQSTFPELERIANLSTRVMQEFIVEFPSARLVKMAKPKAVQRILRRKGVETRLTYTAEDLIQAAKPSVATISPAKELILQGKVRTLQHLQERHEELTRILTEYCRSSMLEDLEIITSIDGINKGTAPTFLAEIGCIGNYASVKKLIAFAGIDPTVYQSGKFQGSSRISKRGNRHLRRVIWLMTKNVIHHNAMFRKYFTKKRKEGQPFKKAIFATAHKLIRVIFAMLSQRTMFKEACA

SEQ ID NO: 365108 - protein, 333 aa, unidentified
MKTVTLGIDVSKATLDAALWLADRSKWHTKAKVDNAPAGARTLLDWLRAKTAVAPSACRVVLEATGVYHEAAAQVFHDAGCEVVIANPKRVRDYAKGRGLLTKTDAVDARVLARYGAEGDELVAWLPPAPEIRTLRALVARLDAVLQDLQREENRWEKAQATDTPGPVRDSLQRSISALHAERDRLLRAIDDHYDQHPPLRQARDQLKTIPGVGDATARRLLCLLKRHRFTSARQAAACAGLIPIEYQSGTRVHKRPRLSKQGDPRLRATLYMAAIVAARHNPPLRTVYLDLIGRGKTKMSALGALMRRLIHIAFGILKHQMPFNPALVSKIA

SEQ ID NO: 365109 - protein, 539 aa, unidentified
MTPENVDTLVTKLDSEYVVDFQISRHAVVIDIEEQAFGDLSRFLRDLFGKLRDRSELSGIVILKRRSCALRIAEIVRQLRTEPAMLGDELRLFHDLLNAFVFGQAQAFEAFVVMHGVFFRPLDWRGFQHLADVCLDGLDALLCVDPRTVQDAVIVGRQADGIIGRHIAPGASAPNAVTPITCGKEGTSGQNKEKTVMKYFAGIDVSLNESSVCVVDESGAIIREGKVPSEIAPLVDWFDGIGVTCERIGLEAAPLSQHLHEGMAAAGLSPVCIETRHVKAVLSASINKTDRNDARGIAQMMRVGLYKPVHVKTQTSQEQRVLLTSRKFIVHKRQDVENEIRGALRNFGLKIGNAGRARFEVRVRELVQDNAFLRDVVGPLLEVRHCLREQEAALHKQVLRIAHRDPVCRRLMTAPGVGPIVALTFRATVDVPARFARSKSVGAHFGMTPKTYQSGTIDVTGRISKCGDGLVRVALFEAANTILTRIVKWFPLKAWAMNVAKRRGAARAKVALARRLSVILHRMWVDGADYNWGNEPCAA

SEQ ID NO: 365110 - protein, 411 aa, unidentified
MVKENFIYVGIDLHKETHTAVMIDCYNQKLGEITFPNRPADFPKLVTKVKKCNTDAKEVVYGLENAYGYGRPLAVWLIDKGYFVKDVNTAISHRQAKHRGAMYRKSDSDDAEAIALATLNMLDKLPDACPNDAYWSLGQLVHRRDNIMKQRTRLVNQLHEQLCIAYPSYKQFFNDISRPTALYFWEHYPSRKYLKGKSVEDLRAELVPVSHNKCSTKTCEKILDAVASDKVKNNAYQDARDMVTLSIVSDLQHYDSQLAEVDKMLEQMYKMLGCTLTTIPGVNVITAVKILAEIGDIKRLSNANKLAQFAGIAPLHLSSSGKGKDLATKQGNRRLQATIYFLAIQMVHISSKGTPRNPVVRAYYEKRKAEGKTSQQALICISRRLISIIYGMLKSGTEYRMPVVENAGENR

SEQ ID NO: 365111 - protein, 343 aa, unidentified
MNSTTIAVDVAKAVFEVAVSEHAGQVRERHRFSRERFRRYLGEQPPATILMEACGSAHYWGREAQTRGHRVVLLPPHAVRPYVVRNKTDRTDAKALLEATRNDEVRPVPVKSETQQALAALHRLRSAWLATRTARINIVRGLLREFGVVIPNGARHVVPALGLLEDADVGVPSLLRPALAEAAREIRELEGRIRTVEHQLDAVAEQTPVVSRLCSIPGVGLLTATALVAAVGDVQRFPSGRHFASYLGLTPRERSTGQRRQLGAISKRGDAYLRMLLIHGARAVLCHAKTKTAPAPDRLRAWALHLERFRGHNKAAVALANKLARIAWAVWKYDTDFAAAPAA

SEQ ID NO: 365112 - protein, 360 aa, unidentified
MKQYIGCDLHRDYSVFASVDENGRIEGPWRVEHERERAELRKFLRRFPSGTPVAVETTGSWYWMIDELEAAGLQPMLANSYEARQRMRGPHKTDPLDARGLATLLRNGTLPSVWIPAAKLRDLRALMRTRLALVAQRTTIKNRIVAAVNRYGLRDDSCGDLFIGKGRLRLNVYIAGMPAQTREAALEEWVVVDELREHIENLEQRIAQHIGRIGYVRLLKTMPGVGEILGATIWLEVGDVERFPSAAHLASYAGLVPTVHASGGKVHLGPTTRQSNHYLRWAFVEAACSIVALQHRHGPIHTVLLYQRLKQHKCHGKAAVAVARHLAESTWWILKQKQPYREPVPLAVSSSTHGQARRPF

SEQ ID NO: 365113 - protein, 438 aa, unidentified
MSNKFIFNLDDLFISVGIDVGADFSWMSIALPNQQIIGKPYKILHNQMNSLATAVSKIKEAEELYSLESRIFLESTGIYHYPLFCYLRDKGFNCSVINPIITKNSTNINIRKVHNDRFDSKKAALVGLKPDLKVSLMPSDLALNCRNLCREYYDLMDNRSAYVNKLQGELRMAFPQYLGIFSKITANTSLTLLETYTSPSAFIEADPQEIIDTIKSTARLGVAYAASKYNAIIQAAHDANEFGYILDSNIKRIRLYISFIRKYDEEIKNILDAMHELIDANEETDFVKQIHLVETFKGAGFLSAVTLMGEIGNFSAFSKPKQLFAYFGLDPAVKQSGKFEGTKIQISKRGSAIARRAIHTLTLQSISTSRTGEAKNPVLRDYYLKKCESKPKLVAMGAVSHKVCNMIFAILRDNKPFEIITPQEHIQQYNAAKCDIAA

SEQ ID NO: 365114 - protein, 320 aa, unidentified
MQSPSAVLNIGADVAKDAIMVACSEGSFPVREVANQRPAVLAFLKGLPAGSRIGVESTGTYHELFAETAHQFGFRVFLLNPKDTRHYAKAVGLRGKTDRVDAELIARMIAHEHTQLHVWNPPTPQQREIDRLIKRRATLISLREAVEMSLHDLGGFADELKALRTHFNQLIARIDLRTKALVEASPDRKQNFTRVCTITGVGPVIGTALVNTLERVPVKSADAFVAFTGLDPRPDDSGQHRGKRRLSKRGPGELRRLLFLAAMSAAKTKTWRPLYEHYRAKGLSGTAALVVLARRIARTAWSIYTHKTEFDPARLMKPLT

SEQ ID NO: 365115 - protein, 395 aa, unidentified
MKALYERCCGIDVHKRIVVACLKCGKKQEIREFGTTTEELRSLTEWLSDSKCQMIAMESTGSYWKPLYNIFELSSLAAIVVNARDMRNVPGRKTDIKDAEWIADLLQHGLLRASYIPNREQRELRELSRYRKSLIEERARELNRLQKMLEGGNIKLASVVSDINGRSARNLLTHMLKRDTSLTKEEVSFLVRGRLRHKVEAIMKALDGFLTPLQKQLMLKVVDHIDDMTKRIGEMDDLMNQYLTEYHEAIQKLDEIPGIGRQSAETILAETGLDMSRFPTAKHFSNWAGLAPGNNESAGKRRYGRTTKGNITLKTTLIQCAKAAVKKTDSFLSAQYQRLVVRRGANRATVAVAHTMLISIYHMLKNNVPFTDLGANYYNRFNTKSKIQHYLKKLK

SEQ ID NO: 365116 - protein, 413 aa, unidentified
MTDIIITQTAPVLVAIDISKARDEGLIAIADKKRRRRLTVLNQLDDFNRLITSLACYGRPVRVAFEATGNYHRALAYHLAAAGFELKLVSSVALARTREALHNSWDKNDPKDAQVILHMMEIGNEQFYHAPLVRGTNDIQELSKTHDIVSKSKTELWHRVLTHYLPLYFPEADRFHRSSRSSRSDWFFAFLERYPSPHLISAMSKEAFIADAWDVVGLKVAKERLLSDIYETAKVSVGLPVAADSDAISMFRLVLGEGRSLIAQRNQIEDRAVALLKDLPDYKLLTSIPGIGPINALTILAEAGDVRRFRHHRQFLKFCGMDLATMQSGTFRGQTKLSKYGNARLRRTLWMAGQVAILQRTNSFRDKFERYIAKDRHNTHLRRKAYTAIAAKMARTVHGIIKHGEPYRPFFEG

SEQ ID NO: 365117 - protein, 376 aa, unidentified
MQNDITLFVGLDVHKDSITVAYALGSGEVEGLGKIGTSARDIDRLCKKLQSKARHVKIVYEAGPLGYDLQRRLAAKGFECMVCAPSLIPRKAGDRVKTDRRDAIKLVRSLRAGDLSAVHVPTVEDEAFRDLARVWAAARDALKRARQALKSFLLAHAVRYAGTANWGPSHRRWISSFSFGNAWQDLAFTELRRAIEDRFAQCERLESALREAVPQWRFYPAVLALQTMRGIQFTTAVGLLSEIVDVTRFAHPRQLMAWLGVTPSEYSSGGSRRQGSITKTGNSLARKLLIEAAWSYRHTAKVSPEIQQRHEGVPKVIIDRAWDAQLRLCGRYRRMVAKGKNKNVAIVAIARELAGFIWDIGRLGMEQAINTPKPAV

SEQ ID NO: 365118 - protein, 371 aa, unidentified
MQVVYERCCGLDVHKKTVVACILIALASGEVQRHIRTFSTMTVGLLALSDWLESMSINVIAMESTGVYWRPVFNLLEEGRTVILVNAQHMKAIPGRKTDIKDSEWLADLLRHGLLKASFIPPAPIRELRDLTRYRKTLVQERADEVNRLHKVLETANVKLTAVATDVLGKSGRAMLDALVKGTTDPEILAELARGRLRQKLPQLQEALDGRVEAHHRLLLKHILAHVAFLEPTREQLQQDIEERLPPFEDAMTLLMSIPAIAELAAATILGEIGDDMSRFPSAKHLASWAGVSPGNKQSGGKRLNGKTTKGNNTLRAILTEVVWVLSHMKDNYLSAQYHRLARRLGIILSNGIVHDSRIVRFDSWRPSATR

SEQ ID NO: 365119 - protein, 368 aa, unidentified
MSSVASPEGLIHLGMDTSKNTIVVATLLPGEESPVTDRIFNEEEAIRRLVGRFPDRSVLRAWYEAGPGGYDLYRLLASMGVACQVVAPSLIPKGGSDKVKTDKRDSRRLARLGRAGELTPIRVPSPGEEAVRDLARARDAVLADRKRARQRLTAVLMRHGRIWRGGSYWTAAHRAWIAAQRYGEPALASAIGYYRATLEVREAELAAVEAELMPWAGREPLAGPVARLGCYRGIAELGGLTLAAEVVDWRRFPAARAFMSYTGLVPSEYSSGERTRRGHITKAGSEPVRTALTEAAWAYRHAPAIGAGLRRRQDGAAAETLARSWTAQRRLHARYVHLVHAGGKAAPEAVVAVARELAGFVWAEMTAA

SEQ ID NO: 365120 - protein, 356 aa, unidentified
MSVLAEIVDAVIGVDTHRDTLSAAAVTSIGAVLGETKVNADAAGYRELLDFGRTQVPGTRCWAIEGAGSYGAGLSAYLTEQGERVVEVARPKRPPRAGGRKSDSIDAVRAAREALSCEHLIDPRRRGQREALRVLVSTRTSAVVARTRAINHLKALIVSAPESLRAELRGMTSDNQITYCAALRPRPTRDLEHRTTVRVMRSTALRILALRHEAIDLEAEIKPLVAVMQPQLLALPGVGPISAAQVLISWSHPGRFRSEAAFAAFAGASPIPASSGLTTRHRLNRSGDRQLNRALHTIVLTRARLDPETQAYIDRRTAEGKSTRDANRCLKRAVARQLYRLLQPAVKARESIKIAA

SEQ ID NO: 365121 - protein, 349 aa, unidentified
MSCTLNTDIAVVGIDIGKNSFHVVGLDDRGAIVLRQRWSRGQVEARFANLPPCLVGMEACVGAHHLSRKLHGLGHDARLMPAKYVRPYSKGQKNDFRDAEAIAEAVQRPTMKFVATKTADQLDLQALHRVRERLVSQRTGIINQIRAFLLERGIAVRQGQRFLRAELPRILAAPTNVLSPRMVQVIEDLTGDWRWLDERIEGLSGEIEAIARQDSGCERLMSVPGVGPIISSAMVAAIGAGDAFSKGRDFAAWLGLVPRQMSTGDRTILGKISKRGNRYLRVLFVQAAWVVLIKPKSWERHGLKPWLEAAKKRLHHNVLAIALANKLARIAWSVLARGREFEASKLQVA

SEQ ID NO: 365122 - protein, 339 aa, unidentified
MNDVVYDHYIAVDWSAKNMAIARMTKRSNKITAIDVPSDILEPQVYLKNLEGTKILAIEETTTSQWLYTELKDYVNKIIVCDPTRNRLLDDGPKTDKIDATKLVQLLRAGLMKEVYHSADKFLYLRRLVSAYEDLVKSGVRLKNQRYSLLRICGMKGKEKKDITLGRSGERYVLEYLDRQIESYEKEKKGYEKEFEKLARKYVEIRNQISLPGIGVINAVKIISRVVTPYRFADKGHYLSYCGLIKLDKISGGRSYGKKNPRYCRQLKCVYKSGILAAIGNNNSINDYYEYLMKEKGYPAYNARHKASRRLAILSLGVFKSKRKYQPYRRGYLEHNQAN

SEQ ID NO: 365123 - protein, 354 aa, unidentified
MKYFVGMDVSLEETAICVVYETGQMIKEARTTSEPDALHALLASFNLPFERVGLEACSLTAWLHGELTSAGWPAICIESRHAKAAMGAMPNKTDRNDARAIAQIMRTGWFKAVHVKTPTCRSWRSLLVARRAVLNQMRTIENVVRAILRETGLKLGTPARKDFIVRAREFVAGEKGLAMMIDPLLEILATMLREFTRLTKQVLVIVRDEPVCRRLMSTPGVGPMTALAFRATIDQPERFKKSRDVGAHLGLTPRRYQSGETDIQGRISRCGDELARTALYEAAHSLLIRSKKWSALRAWGMKIAKRRGMARARVAVARKLATILHRMWVDNTEFRFGREQAANPTIKAITVVAA

SEQ ID NO: 365124 - protein, 389 aa, unidentified
MKIFVGIDIAKLNHFAAAISSDGEIIIEPFKFTNDADGFQLLVSKLESFDKNSIIIGLESTAHYGDNLVRYLVAEFYQVCVLNPIKTCQMRKNNVRKTKTDKVDTFVIAKTLMMQDDLRFITFFDLDMMDLKALGRFRQKTIKQRTRLKIQLTTYVDQVFPEIQYFFKSGLHQHAVYALLKEAPSPKEIASMHMTHLANLLKVNSHGHFTKELAKELRVLAQKSVGANDSAISIQITQTIQQIELLDSQLEKIEAEMTDIMKFNDSVIMTIPGIGYINGGMILGEIGDIHRFSNPNKLLAFAGLDPSVYQSGNFQAKTTRMSKRGSRVLRYALVNAAWNVVRNNATFKAYYDAKRAEGRSHYNALGHCAGKLVRVIWKMLTDEVEFNLE

SEQ ID NO: 365125 - protein, 422 aa, unidentified
MLAVGIDWAEEFHLVALGSPGQGVMEVFRVEHTPTAVQALVARIAGLEPDPATVRVVIETRHGLLVERLVDAGYTVLPVNPDLIARRRGPARKKDDATDARLACLLALDRHANLRPLVPHGELAGELRAIARDDERAARDERRLLNRLRADLVATFPAALQLAGDRLGGPTMLRLLERWPTTQALRAASRQELLAFALASKHGWPERLADQVAAALATDHFTPRAWLVRAKADTIRLAATQLLAIGTQRRVWERRMGQLLGGAPRHGRTKQPRQDQPGRAVPGGKVYLSFPGLGDRLAARVAGEIGDHPQQFSSPNALQCYAGKAPVTRRSGKRELVVSTRQACNRHLADAVQQWAFCSLSRSGWAREFYDQQRRRGKGHHAALRALGNRWLEVLWHCLRNHTLYDEATHVANRNRALGRAA

SEQ ID NO: 365126 - protein, 410 aa, unidentified
METIVERPAALDVHKAQVTACVRVPAAAGGREQHVAEFATTVRGLLGLHDWLLAHGVQQVTMEATGVFWKPVWAILEDDFPLLLVNARHVKQVPGRKTDVSDAVWLCQLAEAGLLRASFVPPKPIRALRNLTRYRKTQIQERAREANRLHKALEDTGIKLDCVATDILGVSGRAMLAALIEGTTDPEVLAELARGRLRAKLPALKEALEGRFDRIHGIWIGAILAHVDFLDEQIDGLSDAIEEQIAPFVPAVRLLCSIPGVQQRTAEVIIAEIGTDMSAFPTDKHLASWAGQCPGNDQSAGRRRSGKTRHGSKWLDWTLEEAALAAVRSKDTYLAAQYNRLRPRRGHKKALGAVKHSILIACWHMLTTGELYRDLGGEYFQRRDPERTTRRLIKQLEALGHHVTLEAVAA

SEQ ID NO: 365127 - protein, 370 aa, unidentified
MKEFSKYVGLDVHKETIAVSVAEANGGEVRYLGDIANTPEAIDKVIRQLRKGGAELSFCYEAGPCGYGIYRQLTELGWDCKVVATSLIPKKAGDRVKTDRRDSLMLARLLRAGELTAVWVPDGLQEALRDLTRAREDMKHLQRQAKQRLLAFLLRHGKRYDGKSNWTQTHFRWFETVKFEQPVQQIVLQEYIDTVKACGKRVDSLDRQIEQTAQASATWPVIEALMALRGVNLLTATTVVAEIGDLTRFANAPQLMAYLGLVPSEHSSGGSVRRGGITKTGNSHVRRVLVEAAWAYRHPARKTAVLQRRAERTPEAVQEIAWNAQKRLCGRYRSLEGRGKLKVQVCTATARELVGFIWAVGQAVPVTASK

SEQ ID NO: 365128 - protein, 313 aa, unidentified
MQLFIGIDVSKDDFHVASSPSSFRATFANDPEGIRDLVRSLRLIKPQLIVLEPTGSYHVALRNALHAADLPVRVVNARHTRCFIQADGELAKNDDIDAAGLALYAERMRPIVREVPDERQQQLRELMSRRLDLVEMMSAEKNRRECASPWILRKLNKHIRELQADIDAVEAKMTALLQADSQRWLRYQLLLTVPGVGKVCGFILLAMLPELGRINRKEVAALVGVAPFNFDSGRYEGKRCCWGGRSEVRRVLYMAAVSARKHNPIIKDFYERLTGSGKPPKVALVACMRKLLTILNAMLRNQTPWQPETALTA

SEQ ID NO: 365129 - protein, 536 aa, unidentified
MATKRNSRKSRTIGPAVLGKPNGVIQPRVQAVGPERFGIVAVDCAKARSKWMLCDFYGKVLIPPTVVEHQRAALRMATLQLQEACRVHGLGDHVVAVEMTGTYHRPVQRAFRRAGSETRLVHPFASRHYRLPAHGDNKTDDHDLEGIFRAAVNGFGLREPVWEETYLGLQLLARHRRDLVDKRAKLQCQIRQYLERCLPGYAALFPGDDLWAHAAPMAMARRGGSAEALGKAGAAGVRQWLDEAKVRAQSRTIERVVAWAPNAAEPDPLLVPLTAVWHSLHDDWLAKTRRIDRVEQELAEILVKTPYILLLSHPGIGVLSAAELAGEMGPIEHYAHAKAITGRAGLFPSRYQSDEVDRADGPLARHRNARLRAAWLRVADNLIKCNAHFRGKFQLWKQRGVDSRDIRCRVANRAARTVFQMVSGRKLYHHPSRLDRGYVLDKLLAFHRKHGTPPHEILRDLRQAAGQIPRGEYPAEAAPLKPIYQRTRRARRPGPQAIGDVLVAVLAQLGVGELPSETEAPSLDANVSKTSTRQRR

SEQ ID NO: 365130 - protein, 314 aa, unidentified
MTTKAEYVGIDVSKKNLDVACWTNQEYRQFGNDPKGIMDLIEWMKSLPTELVVLEATGGLELPLVAELAYAKLPVAIVNPRRIRDFARSIGQLAKTDKLDARVIAHFGAATHPEARILPTVEEERLIALITRRRQVIEMLTAERNRLHSARFAMQERIETHIAWLEKELHDLDDEITQFIHQSPIWQEKDKLLRSVPGIGPVTSATILAMLPELGTINRQKIAALVGVAPVNKDSGKRQKKRRVFGGRASVRSVLYMAALSASKFNPRIKAFYDHLIQKGKEKKVALTACMRKLLVILNAILRHHKVFALQSPS

SEQ ID NO: 365131 - protein, 419 aa, unidentified
MSKSMFCGCDVSLENNTVWLMLDDGSQPTKLFNVDNSQLGAEVLVERIYSIAKEHCVSDILIGTEATSMYDWHLLEYLSESKLSLEFNLKLYRFNAKWIKNFKKSLAPRGKTDPIDSFAIAERLRIGRLPKEYVPDSKYQPLRKLTRFRFHLMQQIAREKDFFLANLFLKASAYSRVAPFGSTFSATSLAVINDFFSVDELAAMPIEELTEFILEKGKSHFSKPSEIVDNIKRVARESYRLKPELTPTVNLILASTYNNIRCYKEQVKLVDSAIAENLKAFKHTLDSISGIGPVYAAGILAEIGNVNRFSNDSALAQFAGLTWPKHQSGKFQAEETRMSHTGNQYLRYYLVEAANSVKRYDATYKAFYEKKYAEATKHHHKRALVLTARKLVRLVWTLLVRGVLYQPGFCSFEDLPKIG

SEQ ID NO: 365132 - protein, 353 aa, unidentified
MSNVKYVGMDVHKSITVIVVLDAIGQVESRSQVKTKAENLCDFFRGMSGKVEVVFEEGTHSAWLHKLLKPLVASVTVCDPRHNKLIEDGNKSDDEDAETLALLLRLGAVKAVYKGDDQQQQLKEICRAYDNLVEDSSRVQNRLKAIYRGRGIDCSGHTLYRADQRSEWLAKLGDEAARFRAESLLEQLESLSQLRKQAKQRLVAQARAHADYQILVKLPGFGPVRVAQLIAAVGTPHRFRTKRQFWPYCGYAVVTRSSADYQIIEGKIVKQRKKVSTRGLNRNHNPQLKHVFKSAALTALRHESIKAYYQRLISKGTRPELARVSVARKLASIALTIWQRREEFDAKKAFAQD

SEQ ID NO: 365133 - protein, 402 aa, unidentified
MRFAGIDVASQIHVLAILDETGRVLLKPTSFSEDTTGYARLFDLLGAAADLLIAMEASGHYSKNLFATLTAKGFAVAVLNPLRTRRFAQEDLTRAKTDAVDALAIARFAAQKRPAPTPPPDPLTDTLRELVRFRDRLIKDFTSRLRQLHRLVDLGFPEFTRHVRTMDSRLATAVLHEYPTAQAFDRRCFVRLAGISHGRGHRVGKPLARQLIDTAATSVGRHHGPAYAAQVRYICEDLETLRHKIHELASQIDQALRDHKVGSLLTTIDGIGPPTAARLIATLGDPAHFRSAAALASYVGVVPGTNESGLRRPGRAPLTPIGHAHLRTALWMPTLAAIRKNPWLRAYYDRLRARGKPAKVAVTATLRKLLTVIYSVAKRQKPFVSPPFSPADPAPPQVQSWP

SEQ ID NO: 365134 - protein, 422 aa, unidentified
MRNSDMIKPGVDEVFVGIDWGTSHHQLCSVSATGARLRQVRLSHDVAGLNRLDAELAQLGTGLPICVERAEGLLIERLQAGGHRVFPVNPRIAARARERYRVASSKDDVFDAFTLADTLRHEHTHWRPLPVASAALAELRALSRDRDRLLESQQRVEAQLHAILDAYHPAPAQLFSSIDRDITLAFIADYPTPQAAARIGEQRMAAFCRRQSYRGRVDPAILAQRLKDNLLSGAEGTVAGKAHSAQAFAELLGLLNRQLADYDDALDRVLAKHPDAQIFRSFPGVGLLTAATLLAEIGEDRDHYPAAGVLLAEAGLAPVTRSSGRSHRVGFRYAANTRLREACMWWAYNSLKTSPWARAAYDDARARKQHHHRALRGLGARWMRVLWRAWTDGVPYDQARHLKTGPASEDRTARLTEATAAA

SEQ ID NO: 365135 - protein, 338 aa, unidentified
MDNIITIGVDLAKNVFQVHGVNVSGEPVIRRQLRRSRVLPFFKKLSPCLVGMEACATAHHWARQLSELGHEVKLMPPHYVKPYVKRNKNDAADAEAICEAVTRPSMRFVSVKSVEQQGILMIHRTRELLIRQRTMLINAIRAHMAEFGLVAPAGVPQVKKLLRIIADPDDARLDPVARTCLEALVRQYQSLDQEVEAAEKRILTWHRSNEVSRRLESIPGIGPIIASALTVSISDADVFRNGRELAAWIGLVPRQNATGGKQRLGKISKQGDQYLRWLLVAGAMSVIRHAKRRGTLNQPWLDNIIERKPAKVAAVALANKNARIVWALLRHGGMYQKA

SEQ ID NO: 365136 - protein, 523 aa, unidentified
MATARSRKRSRSRPQQVLQKPRGVVHPRVQKVGPEHFGIVSVDCAKARSKWMLCDFYGNVLVRPTVVEHTRAGLDAALAQTRQACEKHGIQDLLVAVERTGRYHRPVQRAFAAAGFEVRIVHPFATKQFRQPSDPGYKTDDTDLAAIHRAAVNGFALIEMDLDETWKTLQLLIRHRRDLVFKMSLVCCQIREHLEAAFPGYAACFDKLWESGCAWHLVQRFAAPQDIAAAGLARLCRGLDEAGVRYQCPTIQRILDWARSAAAPDLAASQHRAIALALNDDRTRKTQEILGLERQIAARLVHTPYILLLSFPGINVVSAADYAGEAGPMEHYANHRCITGRAGLRPCRYQSDQVDRANGPLVKNCNRKLRAAILGIADNLICCNHHFNILGHHWKAAGKDPRDVRIRVAQRFCRISFHMVAGRQVFRHPCLQGRHYILDKLSAFHGEHETPGPELLRDLEAAVAQLPRKEYQAEARPLHEELAKIQAGRRRGPQLLGNILPIVLARLGVGAVQSTASGEEDPR

SEQ ID NO: 365137 - protein, 340 aa, unidentified
MNYYAGIDVSLEASSVCVIDASGKIVREAKVASEPAALIAWLGSLGLELTRIGLEAGPLSQWLYAGMREAGLVVELLETRHVRNAFKIMPVKTDRKDAHGIAELMRLGWFRPVHCKSMEAQETRAMLTARKLVQKALHEVEMSLRGVLRGFGLKVGKVAPARFEARIEELVEGHPNLAVIAASLLAVRATLRREFNGFERRLRAIARSDTRARLLMSVPGVGTIVALTYAAAIDDPARFTSSKTVGAHFGLTPTKYQSGETDRSGCISKIGDGSVRAALYESAHIIITKPIKGCTNLKSWAMRVAKRAGMKKAKVALARKLAVIMHRMLADGTTFTTQPA

SEQ ID NO: 365138 - protein, 369 aa, unidentified
MSEANTKVTFVGMDVHKESIDIALAEVGGEVRHHGRIGGDMNALTRTVRKLESLGQPLVFVYEAGPCGFGIYRMLTTRRHACWVVAPSNTPRRVRDRIKTDRRDCLKLAGLARAGELEPIYVPDPVDEAMRDLVRAREDAVIAQRQVRQRLGALLLRNDVRYAGKTPWTDAHRRWIARLVLPNPAQRIAFEEYVQAVAESTARVHRLTQSIEGELEGWRWQPLVSALQACRGIQLIHGVRIVAELGDLARFTHPRQLMAYLGLIPSEDSSGERRHQGAITKAGNSSARRALVEAAHAYRYRAAVTPVIARRQSRLPKAVTDIAWKAQLRLCARFRQLSARGVNRNKIVVAVARELAGFVWAIAQQVKPK

SEQ ID NO: 365139 - protein, 383 aa, unidentified
MTGTEPHAWETGLMDTITYVGLDVHKATVAVAVAEGGRGGEVRQLGVFENRSEILTKLAARLSKPGRRLSFCYEAGPCGYGLHRLLTGGGHDCVVVAPSLIPVKAGDRVKTDRRDALMLAKLHRAGELTPIWIPDAAHEAMRDLVRARATAGRVLSKARQHLQSFLLRHDQIYRGARAWTLAYRRWLTTVRFAHPAQQIVLQDYIHAVQDAEARLDRLTRQIEELLPSWAMAPVVAALQAMRGVALVVAVTVVAEVGDFRRFANARQLMAYLGLVPSEHSSGTSVRRGGITKAGNVLARRVLIEGAWTYRMPARVSRKLHDRNEKLSPAIRDIAWKGQIRLCSRYRRLAAAGKPKVVVTTAIAREMVGFIWAIARIAQPTLPG

SEQ ID NO: 365140 - protein, 354 aa, unidentified
MIIIGVDFHPEFQQIASVDTDSGEFQEQRLQHREEAERFYRELAGRGVAVRVGMEASGHARWWERLLAELQVELWIGDAAAIRSKRVRKQKTDRQDAQLILQLLLEDRFPRIWIASWENRDLRQLLWHRHRMVQARTRIMNQLQAVALNEGLRCKKRLWRDAGREQLESFPLAPWASRRRRDLLELLDRLTPTIAELTQAIEQEVEKCPEAQRLRTHPGVGALTALAFVLIIGRADRFQCGKQIASYLGLVPLEESSGQRRRLGHITKQGNSLLRFLLVEAAQVTVRSDPEWRSKYFHLAMRRGRKIAKVAMARKLAVRLYWMWRKGWDYEQLKRFSPYAGQPGNRHGVRLNTE

SEQ ID NO: 365141 - protein, 385 aa, unidentified
MDLKYSVGLDVSSKKIDGSICVIDEKQQVSFKSKIVFSNTLEGFEKLEAWIVRWHKEPAIPLVICMEATGIYHENCALFLFEKNFKTSIVLPNKAKKYLECLGLKSKNDSIDARGLSQMGAEQCLELWQPLSRYYYELRHYTRQHQNIQELKSVINNQLHALELGMYRTESIIHQLKSTLALFDLQLKELDKNMKLHIKSNENIERKTKNILAMKGLGTLTLATILAETNGFELFKNYKQLVSYAGYDVVESQSGTRVGKTKISKKGNSRIRRALHMPSLVVIQCKEKPFLDLYNRTFEKHGIKMKSYVAVQKKILVMVYHLWQKEEVYNPNYKQNIQEKEQELSSLLAFEKGIYAEIKSKISPKQVEAKQGKHPAKNHSMLPLC

SEQ ID NO: 365142 - protein, 361 aa, unidentified
MNATTVAVDLAKSVFQLAVADEHWRIIETQRLTRTQFERWFINRDVRLVIMEACGSAHHWARWLNGLGVEVRLLPAQYIRAYVKRNKTDAADAAALLEAARASDIRPVRVKSVEQQALQGMHRIRSLWMGTRTSRINALRGFCREFGIAIPVGARTGIEAISRVLADPGTAVPVLIRGTAKLLIEEIRLLEARIAQLERELAALARLSPACTTLLSIPGIGLLTATALVAATSGDVSHFKDARHFSSWFGLTPKEYSSGNSRYLGHISKKGDRYLRMLLTHGARSVLRAAKVAEGAGKQVCGVRRWALDVQSRSNHNKAACALANKLARICYATLRDKEPFGEQTVRLGKKINRESFVMPA

SEQ ID NO: 365143 - protein, 316 aa, unidentified
MTQTSTTAGIDTSKSKLDIALHGRPERWQVVNSVSGWRILTDKLTTAGVSRVGIEATGGYERGVVQHLRAAGFTVQVLQPVQVKAFGRVHLRRAKNDVLDAVMIAACTATLDQVRDAPDPRLAELAEQLTFLEQIEEDIKRYKIRLEHIGEPRLRRLMLAEIKRLTTRRLTQIRFIARQLRAHRDLAVRLGLVLSIPGIGERTALAILIRMPELGRISREEAAALAGLAPFNNDSGQHKGQRRIAGGRARLRHSLFAAALPAAFRWNKALIALYQRLTAAGKPHKAALIACARKLLIYANTVVQRGTPWTERPIGV

SEQ ID NO: 365144 - protein, 403 aa, unidentified
MKKVCGLDVHKDSIFCAIYNGEKYSEVKEYETTTVSIYSMGEYLQFENVTEVAMESTGIYWTAVWDLLLEMGFTLTLVNPFLIKQMPGRKSDAKDAQWIAELLHKGMIRSSFVPPPLIQELRVYSRKYIKLQQQVTRVLVGMDNILITCGIRASSCLSRITTKSYMLIVEALINGYCDPDYLTGLVYGNTKNKRSGKLKEALTGNVKEHHRQQLAWAKDEYDMYQKQITDCLQAMKRICDAHFSLAVKLLQTLPGVSQLAAMIIIAETGGDMSVFENSGKITGWTGLRPRNDESAGKYKSTATTKGNKYLRSILVQCAWAASRMKGSYFKDKFSKMAMRKPRKKALICIARKLLVVIWNVLTYSVAYNPKLVHVYDPVKVKARMAYYKKEYEKTADLLNMKVE

SEQ ID NO: 365145 - protein, 353 aa, unidentified
MNNDITIGFDLGNKKHKVVGLDVCGKIILKCELSNDKETLGAFFNEHAGATVAMETGTHCRWISSLAKRCGCDAMVGNARKLRAIWESSQKNDWKDAQMIANIARTSRELFHPVSLRDDEHHALVQLIELRDIVVAQRTQVVNAIRGMCKACGYMLPKCDAGCFHRHLDDIPPSEYWKFEPLVDRMESLAENISMYDWMIQDYADVHFKEDVALLRTVPGVGPVTSCAYAAFAPDPKKFGNPRDAGCYFGLTAGQDQSGDIDKPKTITKGGNEMMRKLLVTAANYILRESSKDSALKRYGERICARGGKIARRKAKVAVARKLAVIMMAMLQSRKPYQDNLAARTDAAGPAMA

SEQ ID NO: 365146 - protein, 393 aa, unidentified
MSTSVGIDIAKELHWVSVIGSAGEILLDRKLANTPEDLLRLAEELKALPAPVRIGIDVLGGIASLVQAVLLEAGFELVHVSGLSVNRARQGTVGGESKSDPRDARVIADQVRTRRDLRRIEAPSELDIELRLLVSRRRDLTTDQTRRLSRIHDLLSSIFPELEQALDLTAKAPLLLLSAFVTPPELRQVSDSRLRKLFGSRAKHPYVIELISVARACAQRQPMQLPGEALTANLVRELAREALDALERLAAIDAEIEQRLARHPDAALIRSLPGMGAVLTAEFIAQAGSIERFKSSDGLAAAAGLAPVLRQSGKVRFLRRAAGGNKDLKRIFYQSAFASLRCPQSKAFYTRKRQEGKRHHQAVLALARRRVNVLWAMLQNRQPFSPHPSSKSG

SEQ ID NO: 365147 - protein, 313 aa, unidentified
MSQEDIFVGIDICKAQLDVAVSPLQEKEVFAHTEEGLGRLVERLKPLSPALIVLEATGGLEMDVVAALVAAELPVVVVNPRQVRDFAKATGQLAKTDALDAQILARFAESVRPQIRLLKSAEAQDLSALVARRRQILDMITAETNRLRTAPLCTRKNLEAHIAWLKRCLKDLDKELGQASKKSPVWRQKDEVLKSTPCVGRVLSATLLAEVPELGLMTGKEVSALVGVAPMNCDSGQFRGRRKVWGGRAHVRTVLYMSTLSGIRCNPVLRSFYRRLRLAGKEHKVAMTGCMRKLIVILNAMMKNHSHWSPTHA

SEQ ID NO: 365148 - protein, 371 aa, unidentified
MNSILYVGMDVHKENYTLCCYSFEKDDLLYKQTIDPDYKMILKYLEQIRVRQSEEIEFVCGYEAGSLGYSLYHQLTDHGIKCVILAPTTMGITNTSHIKTDKRDAGNIARCLAFRTYSVVFVPTHQDNEVKEYIRMRDDQKKALKIIKQQILALVLRHGYRFTEGRNYWTMKHIKWLKSLNMDGILQESLDEYLITYEYLSNKIERMDKRIEELAEDERYQINVKKLSCFIGVKTHTALSALVEIGDFKRFGKAEQMAAYLGLVPGEDSSGGKHKRGGITKAGNSHVRRLLVEAAQSYTRGAIGHKSLDLKKRQTGCEPQIIAYADKANERLRRKFYRMTLQNGTKRNVAATAIARELACFMWGVMTDHVA

SEQ ID NO: 365149 - protein, 377 aa, unidentified
MKAPSTRPAAVLGLDVGKSSHWACLIDRDGEVLASAPVRNREAELDALFASAPAGTLVVVDQFRNIGSLAVRRARAAGLGVAHLPGLAASRAAGLFAGEAKTDERDAAVIARTALGVPDSLSGVPGRGEALEAARALSSQRDHVVACATRDKNRLRAVLLESCPALEAAVDLSDRRWLELLAGFGGAWGIARSGAGGPRAEAAGEAAAASTAPPPALVEAENRQVRFLAARISEALDEAGALDAETAALLEGDETYACLLTVPGIGPRTAAQLAVSVDIGRFPDHDHLASYCGIAPRVRSSGTSVRSVRASRRGDARLKSLLIFSCNSLVRSSGRYGEYYRACRARGMGHGRALKAVARKRLRAIYAVMRDRVPYRE

SEQ ID NO: 365150 - protein, 427 aa, unidentified
MPHRIAGIDVHKRMLAVVVSDVEVADEYQFERRQLGSNPAQLRALAEWLLEQQVQEVVMESTAQYWQPVWGALEQYWKPLCQKSEGARPRSGSLHLAQAQSNRARRGRKRDFLDAERLVRGVGANELVVWFVPDPEQRLWRTLMRRKYQMTRNRVQLQNQLEALLEEAHLKLSSLVSDLLGASARRMLRALADGETNAVALAALADYRLQATPAQLQDALGACAGLDPTYRRLLSMALEELQLLEKQIGQLEQEMADRLRPHQDAVQRLAEVPGLGADSAQQILAEVGATAATFPSEGDLASWVGACPGDEESAGRSYSHRSPKGNRQMRRLLNQAANAAVKLKGSIFALLYRRYVTRLGHNVTIGIIAHRLCRLIWKILHQGIRYEERGPAASEQSKRQRARRMIRELRSLGYRVELPNPQPAVPA

SEQ ID NO: 365151 - protein, 370 aa, unidentified
MEKLVYVGLDVHADTIAIAVADDGRNGEIRFHGVIENTADSVQRLTKRLVAANTRPTFCYEAGPCGYGLHRLISKLGFDCAVVSPAMIPRRTGDRIKTDRRDAEMLARLWRAGELTPVWTPDEEQEAMRDLIRTRKQSLDALKIAKQQLQSFLLRHGLRYSRPTYWTKIHWRWINDLRKFRFPHQQLAFEELKRTIRQIEERISSLDQAIEDAVKDWRFGDLVDALRSLRGVNTIIAATLAAEIGDISRFENPRQLMAWLGLVPSEHSSGSTVRRGRITKTGNALARTMMVEASWSYRHPAREGHPYLKRCQHQPQEIKDIGWKAQTRLCKRYRDLSKTGKPQPRVLTAIARELAGFIWDIARHVPMQAR

SEQ ID NO: 365152 - protein, 354 aa, unidentified
MRRTKGKLIAGLDLHGNNVMIGVIDQSGKRLTHRKLDCDLKQVTGFLEPFKAQLQSMAVESTFNWYWLVDGLRAAGYPIDLANPAKIEQYSGIKHADDKDDAFHLADLQRLNILPKAHIYDPELRPVRDLLRRRVGLVHQRTALLLSFKSLYTRTTGQRLEQSQAKKLEPEEAAQLFTHRANQLIAEVQTEHIQALDQSIHRVEKMVLGCAQKIPMYEKLLTIPGIGRILAMTITMEVGDIGRFKTDGDFASYCRMVDAQRLSNGKQKAENNVKCGNKYLCWTFIEGANFARRYDLQCRCWFDRKAAKTNSILATKALGCKLSKAAWHVMAKRCEFDPNRMFGPLTNKKMKPKA

SEQ ID NO: 365153 - protein, 370 aa, unidentified
MDERIKFFVGLDVHKDSISIAACDMSREPARFVGTVSSDVRQVVKALSKAGEPSEICVVYEAGPTGYGLYRELRRRGYRCEIVAPSLIPRRAGDRIKNDRRDCARLAELARAGELKAIWVPDEAHEAVRDLCRAREDAVGARLKARQQLKAFLLRHDRRYPGKSSWNKSHERWIAEQRFDHAGERVALAEYQLAVQAAEQRVERLTDALGEAIKGWRLEAVVAALRGLRGIDVVSAIGLVAEIGDINRFDSARRLMGYLGLVPSEHSSGNSVRRGSITKTGNAHARRLLTEAAWNYRFPARMSTALRERSAALPEEVRSHAWKAQMRLCKRFAQLSARGVQVNKICVAVARELAGFVWAIARQATPPAQA

SEQ ID NO: 365154 - protein, 409 aa, unidentified
MRYYLGVDWADQTHAVWVVDASGAKITARAVAHTAEGLGEWGRALDEWRAQGIDLWAAIERPDGRVVDFLLDHGVVVYPVNPKALDRARDRFRQSSAKSDPFDAHVLADFLRTDHTHLRALQPSSEAAQELKLLTEDCQRHIRQQTRLVNQLTATLKAYYPRALEVAEVTSALAREFLPAYPTPAAVTALTERQWQRWARAHGLSAARAGDLWAVLRQPHLPVPAHVVRAKARLMQALMEQLMPVVTAVAQYRKAIDDFFASMPAARWARTLPIGKHGITAPTLWARLGDAPGRWESFRHLQAHAGAVPVTKRSGKQQVVHFRFACDKALRHVVDQVAFLSLLSSAWARAYYDQQRARGHSHRQALRALGAKWLKIIFVMWQRQVPYDEQYHLATMTRQQRQRGQKQCA

SEQ ID NO: 365155 - protein, 317 aa, unidentified
MTQTSITTAGIDTSKAKLDIAVHGRTERWQLANTLSGWRRLAANLAEIGVARIGIEATGGYERGVVEVLRAAGFTVLVLQPIQVKAFARVHLRRAKNDALDAVLIAACAAAMDPPRIAPDPRMSDLAGYLTFLEQIEEDIARFKTRLEHIDEPGLRRIVNSDIARLKARRVAQIRDIANRLRGHDDLAVRLDLVLSIPGIGERTALALIIRMPELGQISREEASALAGLAPFDDDSGKHKGQRHIAGGRGRLRRSLYAAALPAAFRWNKALSSLYARLIACGKAHKAALIACARKLLIYANTVVQRGTPWIERASAL

SEQ ID NO: 365156 - protein, 366 aa, unidentified
MGKSSTVFVGMDVHKESIELATADEREARHYARIGGDAAAVDRAVRKLRSVHRELMFVYEAGPCGFWIYRRLRAQGLACMVVSPSMTPRRAGDRVKTDRRDCLMLARLARAGELEPIYVPDAKDEAMRDLVRTREDAVCMQRQVRQRLQALLLRNEIRYVGKTAWTAAHRRWIAHLKLPDAAQQIAFEEYVGAVEEAGARLVRLAQAIGAQLEHWRWWPLVGALQALRGISVIHAVRIVAELGDLARFVSPRKLMGYLGMIPSEDSSGSRRRQGSITKAGNSSARRALIEAAWAYAHPARVSWVIARRQTGLSKSVTDLAWKAQLRLCARFRRLAARGLNRNKIVVAIARELSGFVWAIGQNVKPA

SEQ ID NO: 365157 - protein, 346 aa, unidentified
MLIIGCDYHPSWQQICWLETSTGETGEEKLEHSSGEATRFYSQLSGHALIGMESTGNCQWFVEMATTAGHDVWIGDAARIRASDSRQQKHDRRDAALILKLLLEGRFPRIWTPSGEEKDLRQLLIHRYKLVRIRAQVKNELQHLAMNQGISKKRKLWSKAGEKVLRELPLKPWASRRREDLLKVRGMLDEQIGLLDQAVVAAAEKSEKTKLLMTQPGVGPITAMAFVLTMGDVNRFKRGKQVASYLGLIPREYSSGGHQRFGSISKQGNRFMRMLLVEAAQVAVRCDPQMRNEYLHRCHRKAKGVAKVAAARKLAIRLYWMLRTNRSYPEVVRVESSSRVPLVSAS

SEQ ID NO: 365158 - protein, 360 aa, unidentified
MDTDKEKSAPSKLKTWFIFGDVTMSYFGVDLHTNSFTVCRRTQQGKNSIRTFQIGRIDEFRKTLRSRDFLAVEATGNTAWFVSQIRDRVKKVTVVDPYKIEVIRKSVKKTDKHDTRTLAFYLSKDMLPEARMKTKENAQLNSLATTRDKLVKQRTALINKIHGVLNSHGIKFKKESLGTEKGLKSIWAFEWDEIVKIELEVLIEQVRSLNKNIKTVDKEMSEHGKKLKGHKNLSSIKGIADRSATVLLSVIGDVNDFADENKLAAYFGIVPRVSDSNETVRHGRITKHGSKLGRTTLVQCTLVAKRYSPYLRKYYQRIKSHRGSGKAIIATARKFLGIIYNTLKNGWVFEDFPNFVIASS

SEQ ID NO: 365159 - protein, 357 aa, unidentified
MEGNQERSDRRIVGGVDTHKDLHVAAVVDEVDRVLASQCFATTRHGYKQMLAWMRTFGSLQRVGIEATGSYGAGLLRYMQKAGIEVLEVTTPDKHDRRKRGKNDDLDAQNAAHAGKRTVTPKSRDGMIESLRVLKACRKTAVAARRVALQMIQNTIVCAPDELRETLRKMTRMQLIRTRAAWRPDLTDYRNVASAYRITLKSLGRRYLELHDEIADLDTMIVAIVDELAPALVARNSIGHETAAQLLLTAGDNVQRLRSEASFAALCGVSPVPASSGKTTRHRLSRGGDRAANSALHIIAIGRLRTDPRTQAYVAKRITEGHSKLEAIRCLKRYIAREVFSLIKQRSQERHPAPTAA

SEQ ID NO: 365160 - protein, 408 aa, unidentified
MNAVGIDVSKGKSMVAALQPMGEVALLPREFLHTEVGLEQMAYAITTLGEDTRVIIEATGRYHEPVAAALHKYGIYVCVLNPLYIKQSGGGSIRKVKTDKADAMKIAKYGLDNWVDLREYTPMDTVRQQLKLCSRQYNLYMKTVVSLQNNLISLTDKTFPGVNELFSSPERADGHQKWVDFVMTFWHCDCICRVSEKAFTERYQKWCKRKGYHFSTEKALDLYAGSCGHFTTLPKNDNTKLLITTAAQQLLAGKMTLAALRAEMTRLAMQLPEYNTVRAMYGVGETTAAQLMAEIGDVRRFPRRSSIVGFAGVDPGVDDSGKHSAKSVPTTKRGSPHLRKTLYQIVCTYLRKAPANELVYQFLEKKRAEGKPYFVYMTAAQNKFLRIYYSRVKECLAAFDAQQDTTQS

SEQ ID NO: 365161 - protein, 369 aa, unidentified
MRKVALDLGARKTAYCEVAKGAVIQRATVTAVETLKSLLGPEAPPAVVALEACREAWHVHDLLRSWGNDVLLVDTTRSRRLGIGQHGRKTDRLDAEVLAFALERGGIPVAHVLSPHRREMRRLLNVRRALVEARAQYVTTARGLAREQGVRLTQCKADVFSRHARQCEEHVLAVIEPLLKILDAINLELEVVDAALSKLCETEPIVALLMTAPGVGPIVAASFVSVIDDAKRFRSSHHVESYLGLVPSEDSSGGKKRLGAISKKGNSYLRSLLVQGAWAVMRGTDRQQPLRLWADAVAERRGKKIAVIALARRLVGVLWAMWRDGSTYDPALLAAASSRGIRRSSRAFENQASQMSSLSHRASEVAASS

SEQ ID NO: 365162 - protein, 343 aa, unidentified
MDHFAGLDVSVKETSICIVDDTGRIVREVKVASEPEALLQVLGNPIYRFKRIGLEAGPLSQWLFSALAEAGLPVICVETRHMRAVLQAQINKTDRNDARGMAQMMRAGLYRPVHVKTLRSQKLRMLLTHRKLLQSKAIAIDNDLRGTLRNFGLKVGVVGAVKFEARIKELVENLPDLAVLVEPLLMVRRILREQFSVLHRRLLAIVRDDEVCRRLMTVPGVGPVVALTYRATVDVPARFRNSKAVGAVFGLTPSKYQSGEINRTGAISKCGDEMMRVMLYEAAQIMLVRLAKWSWLKAWTMKIARHRGMKKAIVALARRLAVIMHRIWVDGTEFRWTREAAVA

SEQ ID NO: 365163 - protein, 355 aa, unidentified
MFHVGLDIHTKRISICALDEKGQVVHRSQVRSIQDLLRVLTDLPDRFQVCYEASCGYGHFHELLRPLATRVVVAHPGQLRLIFRSRNKNDRNDAERLAKLLYLGEAPAVHVPSADVRTWRELINCRSQVIAKRTRAKNAARALLRGAGVTPPKHPGLWTKEGLAWLRRLELPTASQQLRRDLLLEEMETLLRQVQRIERQLTQQAQRTPAVVRLRSIPGVGLRTAEAVAAFIDDPHRFPNAKAVGSYFGLVPCQDQSGERNRLGHITRQGAPVVRQLVAEAAWQARRRSPTVRAYFERAQRDDPQRKKIALVATAHYLVRVMWAMLKRGTDWQEGPALATASGAAAGGDPAPEVD

SEQ ID NO: 365164 - protein, 397 aa, unidentified
MIAVGIDISKAKSTVAVIDSDGTVLASPFTMAHTQPEMESFVTYLKGLGEPTTILMEYTGHYHYPVLKKLQDEGFPVCIVNPYQMKKYGDVEIHKAKTDKKDALRIAAYALEKSYKLVPYSSMEQKYEDLKFLSRQYSQRITYVAKLKVQLIALLDQTMPGITRILPLNSRNPEKCALLLFIKRFKSFDEIQRIGKARFLASYDVLAKKTSERSASSKGLSIYELAVDSITTRGEDPYIWLSQNQCVDLLSATQNAADEIISQMRNIAETIPEYKVLRAMHGVGDRLGPIILAEIGDVHRFHSGKALNSYAGNDAPPYQSGQFESRNRHISKRGSSTLRKACYEVMQALKLTKPQDDPVYLFMLKKEQEGKPFNVAKMAGVNKFLRIYYARAMELYK

SEQ ID NO: 365165 - protein, 343 aa, unidentified
MENLFIGIDYSKKSFDVSAYISSEKSKEEKMKLHLLGHQNFSNDETGYIQMLSWLGTLTSLSPKHWLFCGEDSGLYSYSMSHYLYIKGFSIWLENPLHMKRSMGLVRGKSDKKDSGLIALYSYRFRDRRVDFVPKQDTIQRLQDLEAYRHRLIKAKKLLGDSSKELNLYEQTRDTAVLVYEKSMELVEQIESQLKEVEVQIQQVLKSDKEVYDNYERITSVKGISWKTAVVLLIYSHNFTRFETARQFACYAGVAPFEYSSGTSVKGGTHTSRLANMRVKSLLGMAAMSAKRFNKDIAEYYNSKKEKGKSHRVIMNNISNKLIHICFALVRHQTMYQYTYKLV

SEQ ID NO: 365166 - protein, 341 aa, unidentified
MNITTVGLDLAKSVSHLVCCNQAGKIVRKKMLRRNQVLHFFSELSPCLVGVESCASAHYWAREIAKYGHQVKQIAPQHVKAYVRGNKTDFNDALAIAEAVVRPEMRFVQTKTQTQQDIQALHVMRKKCERDRTANSNEIRGLLNEYGIILPVGISHVYKSLPELFDRQVENGLSELFKELLERHYQKLVELDEHLDWYTKKIKQLSQHEACRRLQSIPGVGPIIASALYQHIGNGSEFKNGRAVSASLGLVPKQHSSGGKHNLQGISKRGDSYLRTLLIHGARAVMRVSKHKETPLSQWIKRIEQTRGRNKAAVALANKLARIAWALLAQGGDYQPELTTA

SEQ ID NO: 365167 - protein, 412 aa, unidentified
MDRFIERCAGLDVHKASVKACVRVPDGHGGRRSETRTFRTTTAGLVLLGDWLASHQVQVVGMESTGVFWKPVYYLLEDDLECWLLNAQHLKNVPGRKTDVADAAWIAQLVEHGLVRPSFVPPRPIRELRELTRYRKALIYERTRETQRLHKVLEDAGIKLGCVASDVLGVSGRAMLEALVGGTTDPEVLADLARGSLRNKLPALREALQGRVARHHRLLVAELLAHLDYLDEAIQRLSGEVAQMVAPFSPLLALLCTIPGVDRRTAEVILAEIGVDMTRFPTAGHLASWAGLCPGNNESAGKHFSGKTRKGSRWLRTTLSQPANAAARSKGTYLAAHYARIKGRRGHKRAIVAVAHSILVIAWHLLTRNQPYTDLGGDYFLERQHSEAYKNRLVRQLERMGHKVTLEPAQVA

SEQ ID NO: 365168 - protein, 311 aa, unidentified
MSIYDHIIGCDVSKRSLDIFDGESETFECIANNDKTISAFVARLTNRRLLVVFEATGSYDARLRRTLERAGVPFARVNPNRSRSFAKAEGILAKTDRVDARMLALMGRKMELVPDPASCPTRRKLTALMKRRDQLVATRKQEKIRLHEVDVPEIAENIRTHIAWLKTRIDEIDDQVQALIANHEALSRDARIMQSIPGVGDVTSSLLLALMPEIGSASRRAVSALAGVAPVNNDSGMRRGQRHIRGGRKRVRDALYMAALSAVRNSPRFKAFYEALREAGKPAKVALIAVARKLLVIINAMIRDKVEYQTT

SEQ ID NO: 365169 - protein, 343 aa, unidentified
MKLMRIGVDLAKNVFQIHGVDCHKKPIWRQRLPRDRWLQTVLEKVEPGCEIGMESCGGAHHWARQLEALGFRVKLIAPQFVKPYVKSNKNDANDAEAICEAMSRPSMRFVAIKTIEQQDIQATHRIRAGLIEQRTAKANQIRGLVAEYGLVAPKELLMLRRAIPCWLEDADNGLTARFRRLLDGLWDDLRALDGRVSKLDGEITAIATNEPSAVRLQQLRGVGPMIATALVVALGDARQFANGRQFAASLGLTPRQHSSGGKDRLLGISKRGDTYLRTLMVHGARSALRTAKSKEDRLSQWAVRLAERSHPNVAAIALANKTARMAWAMLRHGTDYQPNQAAA

SEQ ID NO: 365170 - protein, 351 aa, unidentified
MAFPSIAHEPGAGITVGVDTHGEVHVAAAFTSDLGRPLGHLEIPTTPAGYGRLLRWAQAFGDETPRFGVEGTGAYGAGLARRLRGAGCTVIEINRPNRQTRHARGKSDPIDAEAAARAVLSGESCSIPKSDEDRVGMIRTLRVARRSAIQSTTQISNQIKGLIVTAPAELREQLRSLGGRALIETLAALRPGSITTPMAASKMTLRSLARRHQYLGVEIATLNAELERLTQEAAPQLCAIKGIGPDVAGALLVAVGDNPDRLRSEASFAHLCGVAPLPASSGKTTGRHRLNRGGNRQANNALWRIVIGRLRWHQPTKEGLSKKEIIRCLKRYVAREVFRVLVARPHLVMAA

SEQ ID NO: 365171 - protein, 351 aa, unidentified
MWIIGVDYHPSVQQIAFVNNDTGECGERRLSHSDGEAEKFYRELKAAGCKVRVGMEATGHGRWFERLLAELGFELWMGDPARIKAKRVRKQKTDRLDAALLLQLLLEDRFPRVWVPSPENRDLRQLLWHRHRLVQMRTRIMNQLQAVAMNEGVRRRAALWSKSGRAQLESLLLAPWAARRRHDLLELLDRLNPRIEELSAAVEQQAQQRPEVLRLMTHPGVGPITALAFVLIIDSAERFACGKQIASYVGLIPCEDSSADRRRLGHITKQGNTLLRFLLVEAAQAAVRRDPDWRRRYTHLAMRRERRIAKVAMARKLAVGLYWMMRKEWNYLQLKTFGSYAGESKYGHGVQ

SEQ ID NO: 365172 - protein, 372 aa, unidentified
MGHHTEVFVGIDTSKSRNAIAIADGGRGGEVRYLGEFPATEAAIRKLVAKLAAKCCHLTFCYEAGPTGYGLYRLLKSLGHDCLVVAPSLVPKKAGDRVKTNRRDALSLAKLLRAGELTAVWVPDERHEAMRDLSRARLAVKKDLQGKRQQISSLMLRLGRIYPGKTTWGRAHMRWLMEQKFEHREQRIAFEELLEGIRQESERMERLEDAIREVVPDWSLAEVVAALQAMRGIDLIAAVGVLAEIGDLSRFQNPRELMGYLGLVPTEDSTGDKVKRGGITKAGNGRARRILVEAAWSYRYPPRVSRDKQPKVEAAPRRAREIAWKAQTRLCGRFRSLERKGKRRTVIVTAIARELSAFIWAINRELLPPRQA

SEQ ID NO: 365173 - protein, 340 aa, unidentified
MCLSTTSFTPNPHIVAVDVSYKTLDYCMASAPKVKQMANTVPKITAWIEQLPKNSLVVFEPTGTYSDKLQRTLESFQMAYSLVNPLQSRAFARAIGKHNKSDVEDARTLLQLGKSLNLQANKVPSKKMLDRKQLLSSLNALQKQRQQLNNQIHALDQYLDAVPLATSALRTTLAVVEQQIEQLQTAMRTYTDEEEAKVRKLMMSVSGIGPKSADLLIQLTDCLKNFETAKQLIKFTGTAPTTYESGTSVRHAGRVSKKGNAQLRRTLYMAARSARQHNPDCKAIYNRLREKGKPHKLAMVAVINKLLRQVFTIVKTQKPFDKDYELKKQENKEKDNLLAK

SEQ ID NO: 365174 - protein, 433 aa, unidentified
MGAGSRTDAVVALTQLNGRIIVRLSAQEVFGPALSDWPATPPRSAQTTQGRPITGSRDGPPCMSELPAGTKPARLKVGASPRPPWAREPGTELGAAPAFAVPNPDSRLGSSPHSQGRVMDEPPAVFVGIDVSKDRLDVHLRPSGKAFCVPRDAKGLDGLVGRLGSLPIALVVLEATGGFEATVAAALAGAGLPLCVVNPRQIRDFARAMGRLAKTDALDAEVIALFAERVRPQARPLQEPERSHLAELVGRRRQVIEMIGMETNRRGQTVDKQLARRLDRHVAFLEKELADVDRDIGQAIKASPAWREAEALLKSVPGIGDVTARTLLAELPELGTIGRHQLAALVGVAPINRDSGLMRGRRAIGGGRTSVRGVLYMAALTAIRRRSPLRAFYDRLTTRGRPKKVALVAVMRKLLTILNAILRDRTPWQPLKA

SEQ ID NO: 365175 - protein, 444 aa, unidentified
MKVLHVLQPNASGIDVGATAIYVAVPPDRDAEPVRHFDTFTEDLHKAAKWLKTCGVQSIAMESTGVYWIPVLQIFESYGFEVVLVNARHVKNVPGRKTDVQDCQWLQYLHSVGLLAGSFRPTEDVCAVRSLLRHRDNLIKMASSHVQHMQKALTQMNVQIHNVISDITGVTGLAIIDSILAGERDPQKLAALKDRRIKADQSTIAKSLEGDFRSEHVFTLKQALQVYRYYHQMITECDREIESLVNDFDSRINPDETPPPPSRSRKRKPKGNEPNFDLRTHLYRILGTDLTLIDGIDVTTAQVFFAEIGPDLSKFKSPGNFCSWLCLSPNNKITGGKVISSRTRPGKNRFAQALRMAAQGLWNSRSFLGLYFRKMRARHDSAKAITATAHKLARIIYHLVKNGKQFDQAVFAQQEELHHKRLERRLRSQAKTLGFLLVPCTQGA

SEQ ID NO: 365176 - protein, 354 aa, unidentified
MIVLGADTHKRSHTIAAVSATSGELLGEQTVLSGARGAAGLLTWARGLGEERVWAIEDCRHVSSSLERFLIERGERVLRVHSTLTARSRREARGRGKSDSIDALAVARAALREGLETLPAAHLDGPELDLRLLVDHRERLVRARVAINNTLQWHLHDLWPETQFPGSAPFHGTWGPRIARRLARAQQTTRVRIARDELCRLRELTQTIKALEAEIADLVAQIAPHLLTEPGFGPLTAAKLVGEIAGADRFSSDAKLARAAGIAPIPVSSGNTNRHRLDRGGNRQIDATIHRIAITRLRCHLETKDYIARKRAEGKSTKDAIRCLKRHLTRRIWHLLQTPAPIPDQTLTATTSLT

SEQ ID NO: 365177 - protein, 368 aa, unidentified
MIVPIMTYERSTLVNSEKYIGLDVHQATISVAVMDSKGKIVMESILETKAVTILEFFAGLRGTLAVTFEEGTWAAWLYDLLKPHVAKLVVCNPRKNALLKHGNKSDRIDARKLADLLRLNDLEPVYHGETGVRMLRELARSYLTIVKDLSRVMNRLKALYRSWAIPCAGRDVYYTRHRSEWLGKIPEAGTRRRAEQLYLQLDMLQHLRQQARRELLAESRKHAITAKLRKIPSLGPIRSALAVALIQTPHRFRTKRQLWAYTGLALETRTSGEHRYVRGQLQRSKKQISIRGLNKDHNHDLKGLFKAAATRASVQPGPFQDFYQRSLAKGIKPTMVRLTLARKIAAITLTLWKKGENFDVEKLKSQAA

SEQ ID NO: 365178 - protein, 404 aa, unidentified
MTSEAAEDTADQDVFGGVDSHADTIHVAVISDNGGHLADAEFATTSAGYAAALAFLTAHGRVTAIGVEGTSSYGTGFTRAARAHGHQVIEVNRPDKAERRRTGKSDPIDAYAAARAALSGRADSAPKDDTVGGIRALHNAARSAVKARTAALNQIGHVLITAPEAIRAKYGQLKGTDRTEALARLRPAGDALHVTVLTALKSLARRVKELTAEHDALTRALDAEVTAHNPGLRAAYGVGPDTAAQLLITAGGNPERMRTEASFAALCGAAPVPASSGRTNRHRLSRGGDRAANAALYRIALVRMSSDARTRAYVAQQTAAGRTKKEIIRLLKRAIAREVFRCLTTTVTSPGTADLRPLRQAKNITLTAVAQHFGVWPTTISRLERGLSRADDLAHAYRDWLQAA

SEQ ID NO: 365179 - protein, 410 aa, unidentified
MEVVVECCAGLDVHQATVVACVNRTGRGGRSHKEIRSFSTMNDGLIALRDWLKAAGVTVVAMESTGVYWKPVYAVLEGHFELIVANAQHIKNVPGRKTDVKDCEWISDLTRHGLIAPGFVPPKPIRELRELCRYRRKVNQNQAAERNRLIKLLESVGIKLAGVASDVLGVSGRDMIRALIAGEATPQAIAALARGQLRRKHNDLVRALDVPLAAHQRFMLSTQFHRIEAAEADLVRIDAELRTMAARYDAEIGLLMTLPGFDWVNAVSVIAEIGVDMSAFASAEHLASWATLCPGNNRSAGRQRSGKTRKGNVFLKATLVNAAITGCRRGRGFLGEKYRRLAARRGKLRAAVAIAHKLLVTIWNMLKDGTAYQDIGADFLDRQDRTRTAKHLVRRLTAMGFGVEITDTAA

SEQ ID NO: 365180 - protein, 347 aa, unidentified
MAFIGVDLHSNTFTTCRREDDGSETFETFQLCPTELDRFCMTLSADDEVAVEATGNSRYFHDEVICCVGRVVVVNPSQFQVIRKSVSKTDRNDARALALFLSKDMLPETRLKSKVHGELASLTQTRDLLVKQRTRLINKIHALYNRHGIKVKKEKLTSKRNLVQLDLGPFSELERLELCIVRDQALNLTVSIKALDRHVETAAEPLEGYQGVNSIKGIGPRSTAIFLSAIGDVNDFESADKLAAYFGIVPRVSQSNETDHRGRITKRGNKLARTTLVQCTLVAIRYSGYLNAFYQKIKAKRGAGKAIIATARKLLKIIYDTLKNGWVFEDFSNFKLVEPVTSAGQTS

SEQ ID NO: 365181 - protein, 387 aa, unidentified
MLTEDTACPAVIGLDVGKFSHWACHVTRQGEILASGPVANTEHDLDSLFARVDAGTLVVVDQVRNIGSLAISRARLAGLPVAYLPGIAAHGAAKLFAGDAKTDERDAAVIAKTALGIPDSLLPVPRRDERLEAARSMAAQRNHMVTCSTRDKNRLRSILLESCPAFEALADLADPHWLKMMESLGGPWGILDAGKPAVGAVTRGANRARIDAALAAISSSTRPSEYQVMAENPQVRMLARRIRESAEEAARLDTEITALLVEDGTYECLLTIPGIGPRTASELVISIDIDDFPDHDHLASYCGIAPRNRQSGKSISSVSASRQGNKRLKNLLIFSCNSLSRSRGRFGDYYRKCRDRGMCHGEALKAVARKRMKVIYAIMRDKVPYSA

SEQ ID NO: 365182 - protein, 413 aa, unidentified
MEQLIQRCAGIDVGQAESMVCVRVPDAVTGVPAELIASYGTTTPDLLELVDWLRGLGVTHVAMESTGVYWKPIYYLLEDDFTVLLVNAAHIKHVPGRKTDTIDAAWIAQLLAHGLLTASFVPPPPVRELRDLTRYRKALINEKTAQVNRIHKVLQDAGIKLTTYATDVMGVSGRAMMRALIAGQSDSAALAELAKGRMRTKIPDLRKALTGRFREHHGFLLKRMLDHVEAQEAEIAALDERIEAALAPFVAQVELLATIPGVDRRSAQVILAEIGPDMSVFPTSGHLASWAGMCPGQRDSAGKHGSGKTRKGSKWLRGALVQSARAASRSKGTYLSERYRQVMRRRGDAKAIVALGHEILLAAYRVLATAQPYTDPGPTAFSRLTTGRLTRQAVKRLQDLGYQVTIAPRTDAA

SEQ ID NO: 365183 - protein, 341 aa, unidentified
MSVKTIGIDLAKEVFQIHGIDEHGNRLFNKQLKRAKMLSFFANIPPCLIGMEACASAHFWAGKLISMGHNVKLMAPQFVKPYVKTNKHDAADAEAICEAVTRPNMRFVPVKSPEQQAVLALHRSRQSFIKQRTAQANQIRGLLAEFGLVVPRGIQRLQLQLPEILEDADNSLPSLFRVQLSLLQHHMTYLFDVIATLDKQIEQCYRQNALCQRIGKIPGIGPVTATALIATIGNASNFENSRQLAAWLGLVPRQHSSGGKQVLLGISKRGDVYLRTLLIHGARAVLQSVKRKQDAVSEWASRLLARRNNNIASVALANKNARIVWALLAKDQEYGAAVMNV

SEQ ID NO: 365184 - protein, 335 aa, unidentified
MYTHFLGVDVGKDTLDVALLSADHRLCDQQQLSNEPAAIRQWVKDLVRRVPGFSLAHCLVCLEHTGLYNRPLLAALQALAVPVRVERAAHLKACMGLVRGKTDKVDAERIARCAARYRDQAKLWQPARPVLAELDRLLARRSRLVKVIRMLQTPLSGSQGFFSATEQRAEERGSAAALAALRADVQAVERAVKALLRDDPALAHLYERLGSVPGIGLVTAAEVLVTTNEFMTSADPKQYACYAGVVPFEHSSGQRRGRPRVSHQANKRVKMLLHLAALAAVRHCPALKAHYERKVAEGKNKMLVLNNVRNKLVHYLFACVQKDRNYDKTYALALA

SEQ ID NO: 365185 - protein, 343 aa, unidentified
MRHYAGLDVSIKETSVCIIDESGKVCRETKVPSHPEDLARALHDRAWCLERVGLEAGPLSQWLFSGLAATGLPVVCIETRHTKAFLQAQVNKSDRNDARGIAQMMRVNLFRPVHVKTLTSQKRRALLTARKLLQEKALAVDNDIRGLLRNFGLKVGPIGASKFEARIRELVEGMRELAEIIDPLLEARRKLRELFAVLHRKLLVIVRDDTVCRRLMTVPGVGPVVSMAFTATIDVPARFKSSKAVGAALGLTPILNQSGESKRLGRVSLCGDGMTRTLLYEAAQVMLTRTTKWSWLKAWAMKVAARRGIQKAIVALARRLAVILHRIWVSGTDFRWTREVQSP

SEQ ID NO: 365186 - protein, 409 aa, unidentified
MEMIYQCCCGLDVHKRSISACVRRLVENGNIHQETRTFGTMSRDILELADWLAAAGITHVALESTGSYWKPVYNLLEGRFQLVLVNARHVKYVPGRKTDVKDCQWLAQLLQAGLLRGSFIPERPQRELRDLTRHRSQLVGERTRAANRIQKILEDANIKLASVASDILGASGRDMLRALIRGETDAKKMADLARRQMRSKIPELRPALEGKVTEHHRFMLGELLNHLEYLENRIEEFSRRIEEVSRPFAPAITKVATLPGFDQRSAQNVVAEIGANMDVFPSAQHLASWAGVCPGNNESAGKRKSGKTTKGNRWLRSALSQSAWAAALKKNSYFQAQYRRLAGRRGKKRAIMAVAHSLLTIIYHMLRDASDYRELGCEYLDKLNANRLLPHLLKRIKDMGYQVTLQEAA

SEQ ID NO: 365187 - protein, 464 aa, unidentified
MKRKSLKMKIINPYCAGIDVGSRSHFVAIGQGAEEVKEFGVYAVDLQELSTWLLQNSITSVAMESTGNYWQNLYIELISKGIKVVLANGKFTKSMNRKKTDVMDCQWIQKLHSLGLLNSSFLPDNKTEILRTLCRHRQNMIEMKADTSNKMQKFLKLLNFRLDVVVRDVTGLTGIKIIEQICKGNLDPEFLAEFRHYNCRKSKEEIAKALVSNKREDYLFGLKQEYERYLFYLHKIDQCDKRIARYLKNMTKNSKGKPQEKPYKRINKNGIKGIDLNIVSYHYFGGIDLFQIPGVSHSTILALMSEIGVEGFKKFPTAKHFASWLRLAPNNKISGGKTLSHRVPKGSNRLKIALRNAANAVGNLKDTHLSRFFKKIAFKKGRQKAITATARKIAIIIYNMIVKQQPYNPPEQYLFLDQKRKQIAHIRSKIAKFGINPDEIGIFSRPEYEAKYRLKMSAVNQEVT

SEQ ID NO: 365188 - protein, 399 aa, unidentified
MNKTDRTAVMIGLDVHRRFSTVTGRNAKGKIAWRQRLQHEDRKLFRERLEDWPRGIPVILESSFGWEWMCEELEQAGLEPCLASSRKVAAWRNARGMAKSNRTDADLLSELGSQTDRWWQVWLPPREVRDRREWLRYRMSLVRLQTGLKNRIHAIFHRHGILHDFADLYGVAGRRMLTRLANDEKDRRLRESARATLKGYLQLLDHLRRQIAAVTRTIYRQLQAMPEGKRLQGLPGVGAVLAHTILAEVGDFARFKSAKHLASYSLLAPRAFDSGEETGEAPKGRHVGHMGRRTLKWAWIEAAHGAVRRGGRFRHVFDRYTDGGKRNRNRGYILVGHELCRTAYAISKKETEYHDHPPERPGLLRTKTASAQRNRRRSGTAQNSRPGTGQPDHRLVVVG

SEQ ID NO: 365189 - protein, 363 aa, unidentified
MTEITAGVDAHSDTHHAAALDERGRLLGDSAFATSAEGYRQLLAWLESFGEVTRVGVESTGSYAAGLARFLAARGIAVVEVNQPHAHTRRRRGKSDPLDAEAAARKVLAGEATAVAKHTGGIVESIRQLRVAREGAVKANTAALNQLYELLITAPDELRQQLAAPKTSRGKAVLCLRLRPDRARLHEPLQAAKLALRSVAERVRELDRQIRLLDQHLAPLVATAAPRTTSLLGVSTQHAGQLLTTAGQKIERLANDGAFARLCGASPIPASSGRTSRHRLNRGGDRKANRALHLIAVCRRRYCARTRAYANRRTAEGLTKPEIIRCLKRYIARELYHTLRADLADLGPSITPTQPPRAFFPRP

SEQ ID NO: 365190 - protein, 365 aa, unidentified
MIRLTRKDTPCHGIKVPNMVQFSEQSTLGVSNMNSNVFGVDIAKQVFQIHWVDQETGEIHSDKVKRKDFVQYFANQQPSMIGMEACGGAHHWGRLFKEMGHTVKLLPAKKVKPFVYGNKNDVVDARAIWTAMQQPDMKFIAVKTEEQQAILSIHRMRELLVKHRTAQINSIRGLLTEFGLVMPKGKQAFKEKLPDCLAKLEEDTPSAFMCALQVQVERLTQLDEDIKQLEKQIQSWFKHDEDCQRIAKVPGIGPLTATALIASMGDASAFKSSREFAAWVGMVSRQTGTGGRVHLHGISKRGDVYLRTLLIHGARAVMTHSKEKSEWLVSLQARRPKNVVTVALANKIARTVWALVANQTEYQPC

SEQ ID NO: 365191 - protein, 347 aa, unidentified
MKFYTTQHPYYCGIDLHARSLYVCILDAAGDTILHREIKALPENLLNLLTPYIGNIVVGVECMHCWYWVSDFCAEHGIDFILGHALYMKAIHGGKAKNDRIDSYKIAHLIRGGNFPLAYVYPPQMRAARDLLRRRTRIVRHGADLKAHVKNTVSQYNLPPTNLDLKYPYAREAMRDCFADQFVQRNVDLDLNIIAFYRHELSSIECFIEKHAKHHNGNDYHILTSFPGIGRILALTILYEVGNIERFSTVQDFASYSRLIKCKAESAGKSYGTQGNKIGNAHLKWAFGEIAVLYLRGNDKAKAHLLKLQKRMSKAKALSALAHKVGRCVYYMLKNQKVFDEKRFLAG

SEQ ID NO: 365192 - protein, 352 aa, unidentified
MEKRNKLDFGGQHIYVGMDVHKKSWSVSMHTEQFEHKTFTQPPEIEKLTDYLQRTFPGATYHTVYEAGFSGFWLHDKLREKGIDCMVVHPADVPTKDKERAGKTDRVDCRKLARGLRNGEIRGIYVPSRVKVEDRSLVRTRQSMVRKQTRCKNQITSILFFYGIVIPEEGRWSRRFINWIESIRMERTSGDLALKAHLEELKHLRQIIANLNRAILNLSRDEEYRADVLLLKSVPGISTLTAMILLTELADVSRFSSLDKLASYAGLVPCIRSSGETEYATGITFRRNAALRALLIESSWIAVRKDPALTMGFNKLSARMKKTKAIVHIARKLLNRIRFVLKNRQKYVPAVV

SEQ ID NO: 365193 - protein, 317 aa, unidentified
MTIWIGIDVSKLHLDAGWLEDGKKVHRKVRNSKKGFAALMAEVPESAHFVMEATGTYYFNLALFLHQADRFVAVVNPAQTKHHIKAELTRSKSDKSDAFSIAKFGEEKSPSGWNPHEREVYELRQLVALDEKLQQKIVQFGNMFEAFVETDYHSEQALKYLQEVTGQLKAQRTKIQKDMAKLADKLFPQQVEILSSIPGVGKASAIKVMAEVGDFGRFDSSRKLVSFSGLSPTLKQSGTSVRSKGHISRMGGCRIRGTLYMCAMNALRCNDQCKAMWNRLHAEGKHGKIIMVAIMAKLLRQMWAVITKNETYQPNLA

SEQ ID NO: 365194 - protein, 355 aa, unidentified
MNQEKYIGMDVHDASISVAVKNAQGRLLMECVLETKAATILEFIQGLRGTLALTFEEGTLAAWLHDLLKPHVSRLVVCDPRKNALMRDGNQNDRADACNLAELLRTNQVHAVYHEKHGIRTLKELGRSYLALTQDSTRVMNRIKSVYRSWAIPCAGTNVYSRRHRGEWLAKLVEPGVRMRAEHLYQELDSLEPLRQAARRELLRESRKHAAVKLLRQIPAIGPIRSALLVAILQTPHRFRTKRQLWAYSGFAVQTYDSGEYRFVRGKRQRNRERITVRGLNRNHNHDLKNLLKGAAVSAMERPGPLQDFYVALVEKGMRPSMARLTLARKIAAIILIMWKKGVSFDPKQLQRQAA

SEQ ID NO: 365195 - protein, 304 aa, unidentified
MFGIGIDVSKATLDVAVHGEQFRQFSNDKRGFVRLIRWLKTWPIKQVVLEASGGYERAALDVLHAAGLPMVRLNPARARRFAQGTGRAAKTDRLDATVLAQMAHLLPLTRYVPPAPWQQRLAEFAQCRRQLVQMRVSEMQRLRRLVDPDLIAMKQRHIAQLSDDLKQLDKAIAEQLEGQPGWKNIGALKGVGPILISTLACELPELGSLGSKAIASLVGLAPMNRESGTWQGQRRISGGRAVVREALYMAALTAIRYEPRLRAFYAGLKAKGKASKVALVAVMRKMLVILNARKRDAEVALGCP

SEQ ID NO: 365196 - protein, 373 aa, unidentified
MPKYSTAFGMDVHLRSTTVCALDADTGEAVTRRFPGNPWGEIAGWMDGFPGPSLAAYESGYLGFAPQRELAGLGVECVVAAVSKIPRSAADSASKNDRNDAARMAKAILAHDISPVWIPSPEVEGIRDLAGAYDGATARLATAKQRLLAFLARRGFVYGGTTPAGNPRKYWTYDFLRWLDKVRPEDDGGVRTLAALRNEVEAAAEARADLLSEYRAAVDASPIAAEVAALQSIKGCAFALAAAFSAEVGDFTRFRSGRQVTAYFGLAPSQRSSGDSVRLGGISGAGNALVRKLAVEGSWCYAAARHQPKLMPRDTGVPLEIRMHGRKGSERLLRRREEMLARGVPAAKANAATAAELVRWLWALGMMCREGAE

SEQ ID NO: 365197 - protein, 323 aa, unidentified
MTERMFVGVDVAKAELVVAVRPSGAQWTVANDEPGRRTLVERLAAERPQVQLLVLEATGGYELSAVAALVAAGLPVVVVNPRQVRDFARSTGQLAKTDRLDAAVLALFAERVQPPVRALPDAATHALEALVARRRQLVEMLVAEEHRLAMARGRGPSARPITASLQQTIAFLRRQLATTDRELGTMIRTSPVWRERDDVLQSVPGIGPVVAHTLLAALPELGTLNRRAIAKLAGVAPLNRDSGTWRGQRTIHGGRASVRAAVYMAALVASRHNPVLRAFYHRLLAAGKPKKLALVACMRKLLTILNTMLRTQQPWAPNIALDA

SEQ ID NO: 365198 - protein, 356 aa, unidentified
MAEGTWVGLDVHARRVVAGVLDAGSGELRSLRAPALPVETVEWLRQLSAPVRVAYEAGPTGYGLARACAAAGIACTVAAPSKIQRAPADRVKTDRRDAERLARLLRLGELVAVRVPEPQEEAARDLVRAREDARGELMRARHRISKLLLRHGLMYETSAWTLAHDGWLRRQRFDSRPLQLAFEESYAAAVQAKTRRDALDHAIAELAAEPPFAEIVGRLCCLRGVATLTALALTVELGDWSRFRPQSLGPFLGLTPSEDSSGERRRLGAITKTGNTHARRLLVEAAWQQRRPLRESATLARRRQGQPAAVRAQADRSARRLHQRWHALERRGKRRTVVAVAVARELAGHCWAIATM

SEQ ID NO: 365199 - protein, 388 aa, unidentified
MIYVGIDIAKLNHFASVISSDGEILIEPFKFTNDGDGFQLLLSKLDSFGLDNLIIGLESTAHYGDNLVRFLVANGYKVCVLNPLATSAMRKNNIRKTKTDKVDTYIIAKTLMLQNSFRFITFYDLDIMDLKTLGRFRQKTIKQRTRLKIQLTSYVDQVFPELQYFFKSGLHQKSVYALLKEAPAPRDIASMHMTHLAHLLEVSSHGHFKKDDAKELRVLTQKSVGNSDSTVSIQITHAISQIELLDSQLKRIEAEMTDIMKFNDSVIMTIPGIGYINGGMILGEIGNIHRFSKPKRLLAYAGLDPSVHQSGNFNASHTRMSKRGSRVLRYALMNAAHNVVRNNSTFKAYYDTKMAEGRSHYNALGHCAGKLVRVIWKMMTDDVEFNLD

SEQ ID NO: 365200 - protein, 468 aa, unidentified
MGKRNGLSRGDARRNARLIRLRGVVRHDRAILAIDLADTKQALALCDHDSRVLARRSVRGHAWQLEEALRWGRGVAVQHGFAGIVVGCEPTGHRWRIVAELCDRLGMDLVCVQPLLVARAREGEDLTGAKSDPKDAVVIARLVGELRCYLPERADQIWARLRQLGARRVQLTTTAGACRQQLRDLLECAWPAVLDTAAKPLDSVTFRAAVSVVLARDQGDPAGIGRLGYARFARQVTSQLARWGGRRRCQRIMRAVWTAATDPGMLTDGVLAQRPGALERARLTLGDWHHALGQLAEAEQRMTGILDQLQLTGLVGSIQGLSAVGAAAILAESGDLARFDTARALVKHAGLCPRANESGAYAGTTRISGRGRPGLRLAAWRAVWGALAHNPVLAARHAHLTTRDHNQLTTAQARTALAAALLRWLWVVVTTRTPWQATIAAGQELPLQALLMSAERPLTGYTIEIFYP

SEQ ID NO: 365201 - protein, 347 aa, unidentified
MERLASGVDMSKVSFVGAIWVEGRALALGQFANEASGFQALQQALQHQQVEQGASEIHMVVEPTGGYELALVAFAYEQGWLVSLPNPRQVRAWARGIGKRAKTDKVDAQLLAQFAAQRQPPAQPALAAEVSELHPEGTRLLARRNDLETMLRQEQNRLGELRQRPGVPKSVLASLEQVIQALEQALQEIAPRGYPAIQQHLQRHPYLLEHRKRLLTIPGIGPKTVLPLLVLLLRCGDPLGALTDGQGNDKGLTALVGLDPQPYQSGSSVFQRPTISKMGDGEIRRLLYMGALGALRGHNPLHAFYDRLVGRGKAKKLALVAASRKLLTWSWAIFASGTVWNPALFAA

SEQ ID NO: 365202 - protein, 384 aa, unidentified
MKESSTLYVGLDVHKDSIDIATADAGREGEVRHVASLGGDLVGLDKALRRLISKGHRLHVVYEAGPCGFVIWRHLRAQGIECEVVAPSSIPKRSGDRVKTDRRDAMMLARLSRSGDLTAVRVPGAADEAVRDLARSREDAVRECRNARHRLKALLLRNGIGYAGKSAWTAAHLRWLATLKLEHAAQQIALQEYLHAVTDATARIARLEQAMRDTLPEWSLAPVVQALQAMRGVQLVAAMTLVAELQDFLRFDNPRQLMAYVGLVPGEHSSGPKRRQGSITKAGNSAARRMLVEVAWHYQHSPRVSPIIAKRHDELPKAVTDIAWKAQLRLNAKFKRLVARRMLKNKAVVAVARELTGFVWAIGREVQTCGWQGIKTELAGNTAD

SEQ ID NO: 365203 - protein, 391 aa, unidentified
MPEDAPRPAQAAIRTDLGAIFVSMELSRRVWLITSLSPGGGEKMSKHSVPASDVFGLLRRFAELRRKAAARTGRDFPIIVIQEAGLDGFWIHRVLQSEGIESHVVDAASILTSRRRRRVKTDRIDGETLVRTLMAFKRGEPRVCSMARAPTPQEEDRRRVCRERRTLVGERVKHVNRIKGLLFAQGVFSYEPLRKGRRERLEDLRTGDGRPLPVRLKAQIIRELDRLEVLLEQLKTVEAERDAMLKPATDEAASPAAMLARLKGIGPETAAVLWSEGLFRQFDNRRQIAAYAGLAPTPWKSGSIDHEQGVSKAGNPRLRTTMVELAWLWLQNQPTSALSLWFHERVRRLGGRMRKTTIVALARKLLIALWRYTTAGVVIEGAVMKAAPATI

SEQ ID NO: 365204 - protein, 390 aa, unidentified
MESPGGTVSVIIGMDPHKRSATIEVIDEQATVLAVGRYGTDKAGYAEMLAAARKFADRVWAVEGCNGIGRHLAHRLVHDGEIVFDVPPKLSAQVRVFATGNGRKTDPVDAHSVALAALRAPGLVQVRVEEDLVVMGMLADRRDELGQARTQVVNRLHRLLLELLPGGARKFLSARQARTLIATVRPRDLAGKTRRRLAVELISELEAIDKKTRALDKELTGLVIARGSTLMDLHGIGPSGAARLLADVADVHRFARRDRFASWNGTAPLDASSGSQARHRLSRAGNRRINRVLHIMAVVQLRNQTKGRAYFDERRAGGMPSMMAMRALKRRLSNVVFARMLADQKRREAGPGGQSGTPADSSVAGPDPRTPALRTSHVPGPLHSLNGVLT

SEQ ID NO: 365205 - protein, 404 aa, unidentified
MYNAVGIDVSKGKSTVTVLQPGGTVIRKPFDVPHTSQSLNELAGYLGTLDGDTRIVMECTGRYHEPMLKALSEAGLFVSVVNPHLIKDFSNNSLRKVKSDPADARKIARYTLDNWPELRQYSGMDNTRTQLKTLNSQFSFFMKQKVAAKANLIALLDNTYPGVNKLFDSPAREDGSEKWVDYAYSFWHVDCVRKIGLKTFTERYKVFCKKHHYNFQPDKPEKLFTASKELVSVFPKEKTYKLLIQQSIQQLNLASGHVERLRQEMNALASTLPEYSTVMGIYGVGKTYGPQLIAEIGDVSRFTHREALTAFAGVDPGVDESGQHKSKSNRASKVGSARLRKTLFQIMTTLLQNAPEDDPVYRFLDKKRAQGKPYYVYMTAGANKFLRIYYGKVKECLRNLEQAE

SEQ ID NO: 365206 - protein, 319 aa, unidentified
MNVLGIDVGKSDLHAALLQGDRSASKSVPNSQAGIAQLQTWLKNRQAERLHVCLEATGGWSEQVAISLSEAGHVVSIVNPARIKAFAQSEMVRTKTDRIDAAIIARFCRLHQPEPWTPPPPEVRILQGLVRRQHSLIDMRVEEENRRAAPMASVAVIASIEATIEHLARELARVDREIEQLFDDYPTLRRQRELLISIPGIGESTAARILGEMPNIAEFRDVKAVAAYAGLSPRHYQSGTIERRSRLAKTGNAHLRRALYFPAISAIRFNPPMRAFAKRLSARGKSKMTIVAAAMRKLLTLAYGVLKSERAFDPLYGNA

SEQ ID NO: 365207 - protein, 336 aa, unidentified
MIHVGVDLHQRFCYMTALDARGRLIRAGQVANEEAALRNYFQQFRGPVQVAVEACSFWPAFRQAMPKKVELRMVHPQRVKAIAAAKLKNDRIDSATLAHLLRCELLPEAWMADEATRELRQQVRMRATLVRQRTRLKNQVHAILHQQGLRYEGSDLFGRGGRAWLKQVSLPAAGGTAIQVYLKLIDEFSGHVQAQQQQLEKRWEKDPRVRWLKTIPGIGWYSAILLVAEIGDVRRFADKRALTNYAGLVPWLRESADKRRSGSITRVGSPWLRWILVEAAQTALRKYPEVQRWAKPLLRKKHKNTVVVAIARKLLVAVWAMLHEGVAYDEKHFAVC

SEQ ID NO: 365208 - protein, 371 aa, unidentified
MNNYIMVGCDLHDKSMLIKLAHNRAEPVQKSFNNTPGGRKKMISILKESAEAANNARIVFAYEASSLGFGLHDELTDVGIDCYVFAPTNIPRSVKHRRRKTDARDAQRILEIVRGHFLAGNKMPTVWIPDPQTRDDRELVRMRLGVGKKITAIKAQINILLKRNKFRKPGDIGNNWTKKHRTWLAKSAGSDSALSIGASSALNSLLRQLAAMEEEVIYLDKQIRVLAQTDRYAIPVRELSKLKGVGIFTAMVYLTEMGDLSRFKNRQQVGSYLGLVPSSYETGNTSDRKGHITHHGPGRVTRVLCQACWSRVRTDHHERAVHKRICDRNPKHKKIALVACMRRLGIKMWHDGLKAQLIANSFTPKTNQTTA

SEQ ID NO: 365209 - protein, 406 aa, unidentified
MHYVGVDIAKRTHSAAVLDDEGLLVAEPFMFENSSQGFAFFLMKLGSIGADCNECAIAMESTGHYWFALLDFLIAHGFDPIVLNPIQTDAYRKVDSVRAAKTDLVDAVLIADLIRVKRFAPWNRSDELCDALKQLTRYRSTLVGQSTRIKNKTTAALDRVFPEYADIFTHPYGPTSKAVLEQCPTPQQVMRFGIHRLTRLIETASNGRCGRDYADMLMAAARTSVGASHSSDALALQIRLMIEQLDFLESQMKSLDDEIARILDETPGRWLTTIPGVGPTLAAQITGEIGDPHRFSSARKLVAYAGMDATVRQSGESEEAGHMSKRGSAQLRYALVRAADGVRRLDPYFRDYYEKKIGEGAHYFRAVSGVARKLSGVVLALMREERAYEPWPPDAEEIPTVMKPSP

SEQ ID NO: 365210 - protein, 315 aa, unidentified
MTTITPQAAHVTPCCVGIDVAKAHLDIAMAGTRQRIAYTPQALAGLIEQLGMIGEPLVVMEASGGYERLCADTIAEAGFAVAVVNPRRVRAFARSLGQLAKTDAIDARMLALYGARMRPARRHNPDPARARLAALDTRRRQLVAMRTAERQRLDLADPAIARAIARHIRQLERDIAAVEQSIDGALAAHPLWSILHRALRTVPGIGARTATAIIVGMPELGYLNRRQAAALGGLAPINRDSGSMRGHRFVQGGRQSLKTALYMAALTAARCHPTLKHVYASLRNAGKAPKVALIAIAQKLLLIANAVAKQTLHTA

SEQ ID NO: 365211 - protein, 358 aa, unidentified
MVDKVTEAAVVGGVDTHKDLHVAAVVDQNNKVLGTQYFSTTRQGYRQMLAWMTSFGTLKRIGVECTGTYGSGLLRYFQNAGLEVLEVTAPDRMERRKRGKSDTIDAECAAHAAFSGIRTVTPKTRDGMIESLRVLKTCRKTAISARRVALQIIHSNIISAPDELREQLRNMTRMQLIRTLGSWRPDASEYRNVTNVYRISLKSLSRRYLELHDEIADLDVMIAAIVDELAPELIKRNAIGYESASQLLITAGDNPQRLRSESGFAALCGVSPVPVSSGKTNRYRLNRGGDRAANSALHIIAIGRLRTDAKTKEYVARRVAEGHTKMEAIRCLKRYISREVYTLLRNQNRRINSIPITA

SEQ ID NO: 365212 - protein, 404 aa, unidentified
MHYLGIDVSKASHQCVILDAQGEALGKSFTVQSSKDDFAKLVKKLSDINIPKSDITAGLEATGNLWENIYIYLKDQGIKVILLNPFQTNKFHQVMMKKAKTDSIDALVIAGLLRSGCAASSYIPDEDIQSLRDLTRLRDGYLKDMKTYKRKAYSLLNLVFPEFLTLVKDPFNISCTEILSKYQTATDFKNIKPKDLLRVARGHQGNNYDEAWTDKVIQAAKDSIYSGKASKARGVAVKSLVLNIKNLKEQTDSLDNEIQNILKPDDGSSNDKIDNLLTIPGVGPKTVAVFLAEVGDIQRFSCCKDFVGFVGLYPKIEQSGSSLNKARLTTKGSRILKHALYMASVASLIHNPYLKTVYKNKLSQGKSAKQALIVVSRKLACIMYSMLKNNSVYNPERVAIAVAV

SEQ ID NO: 365213 - protein, 405 aa, unidentified
MFEIEDVGVFLGLDVGKSAHHGHGLTPAGKKVFDKPLPNSEPRLRAVFDKLREKFGTVLVIVDQPASIGALPLTVARDAGCQVAYLPGLAMRRIADLYPGEAKTDAKDAAVIADAARTMPHTLRSLELTDEITAELTVLVGFDADLAAEATRTSNRIRGLLTQFHPSLERVLGPRLDHQAVTWLLERYGSPSALRKAGRRRLVELIRPKAPRMAQRLIDDVFDALDEQTVVVPGTGTLDIVIPSLAASLAAVHAQRRAMEAQITDLLEAHPLSPVLTSMPGVGVRTAAVLLVTVGDGTSFPTAAHLASYAGLAPTTKSSGTSIHGEHAPRGGNRQLKRAMFLSAFACMNADPASRSYYDRQRARGKTHTQALLRLARQRISVLFAMLRDGTFYESRTPKDVELAA

SEQ ID NO: 365214 - protein, 358 aa, unidentified
MRELYFIGLDIAKNVFQVFTADDKAREISNRKLSRNAMTRYFTQLPESVVGIEACGTAHHWVRTLTAFGHTVKLINPHRVKAFLGSRNKTDAADAKAICEALMHPGTTFIRAKSIEEQDIDHLLARRERLVQNRTQVINQIRAFLCERGIAIPQGRHSFMKVLPQLLAEKWEEFSGKFQAVLTDNYADYLDLESKIAKLDKMIRVEATNTEPCKRLMQVSGIGPQVALALFAHVGNAIHFKNGRQMSAYLGLTPREYSSGGKQRLLGISKRGNVRLRTLLLLGARAAILGLRRRGRGEDGQPIRQSYLDRWILGMVEKIGLFKAAVALANKICRIAWALLARNEEFNPMKLCRLVKAA

SEQ ID NO: 365215 - protein, 421 aa, unidentified
MDVVFERCAGIDVHKRMLVVCRRTVDAAGHPLAQTRTFGTTTGDVLRMSDWLAEGECTHVGIESTGDFWKPIFNVLEGVFEVWLLNAQHIKAVPGRKTDVKDAQWIAELLAHGLVRPSFIPPREQRDLRDLTRYRVSFVRERATLVNRVQKLLEGANLKLCSVLTDVMGVSGRAILSALLAGETDPQTLAELACGQLRKKRAQLAQALQGQLRPHQSFVLAELLTQIETLDETIARFDAQIQAACAAAADEAVVVALLDTIPGVSTTTAQILVAEIGTDMQRFPCAAALAAWAGLAPGNNESAGQQRSGRTRKGNTWLRAVLVQAAQAAAHTKHTSLAARYRRIAARRGAKRAVIALAHTILVIAYHLIARREPYQERGEDYLQHGDPERRTQRLVRQLGHLGFEVTLRPTTTFVPSAEGS

SEQ ID NO: 365216 - protein, 342 aa, unidentified
MELHTIGIDLGKTVFHLVGLNLRGEVVVRKKFSRLQLLRFTANRQIQLIGMEACGGSHFLGRALREQGHEVRLIPAQYVKPYVKTNKSDYIDAEAIAEAVGRPTMRFVPIKTDDQLDLQSLHRVRERWVMRRTAVVNQIRGLLLERGITLRKGRCHLDAALPGILEDGTSKLSGAVRLLLAQLKLELDQLAIRLEEADALVQKTAQQSEVCRRLDAIPGIGPLTATALVAAIGNGAAFRKGREFAAWVGLVPREHSTGGKQKLLGISKRGNSYLRRLFVQGARAVLQFREKQSPGLSAWLAQLTARTHYNVAGVALANKLARMAWAVLSTGEAYRPPVLACR

SEQ ID NO: 365217 - protein, 340 aa, unidentified
MNLTTLGIDLAKTSFSLVGMDQHGKIVLRKTLKRSQLLPFIAQCPSSLIGMEACSGAHHWAREFTKLGHKVGIIASKFIAPFRKGGKNDNNDAEAICEAVGRSTIWFVPVKTAEQQAQLCVHRVRQGLISERTALINQLRGLLSEFGIVMPKGRYPAQREIPMILEDTNNGLPMLARQMINNLWERIKIANEQILFYDRELHKQAHHHPVAKQLLTIPGVGEQVASAVVASVPDPSLFKNSRQFAARFGLVPRQYTTGGNVRLGRITKQGDRYLRMCLVHGARAVLANLKDKHDKISCWARELIARRGYLRAVVAMAARNARLIWTLMVKQEDYKVIAAS

SEQ ID NO: 365218 - protein, 354 aa, unidentified
MQRTTKYVALDVHQATTVAAVRAASGRVIARAVLPTEEPAIVEFFRGMRGAVHVALEEGTQAQWLHDVLVPLVDRVVVCDRRGERQQGNKGDQVDAAELAERLRQGSLRAVYHGSPHRAVLKELTRSYANLVEDTTRVMLRLKALFRARGLQTPGKSVYHPAHRAQWLTQLEDAGARSRASVLYAELDVLRQLRPQAKAAMLAEARRDPAWAVLQTIPFFGPVRVALLVATMRTPWRFRTKRNLWAYAGLAVVTQTSAEYLLVDGRPVRRRRAPLTRGLNRNHNRVLKDVFKGAATAATARPGPLQAWYQGRIAQGMRPELARVTLTRKLAAITLRLWKTGERYDPTQLTMQAR

SEQ ID NO: 365219 - protein, 350 aa, unidentified
MSLRTCFNLEEAEMKYCGIDLHSSNSVVVVSDEVDRVVVQRRVPNELGRILDLLAPYGEELAGVVVESTYNWYWLVDGLQAAGYPVQLANTAAIKCYEGLKHRDDEADAAYLAQLLRLGILPTGYICPAAERARRDLARKRLQLGRSRTSHILAVENILARHLGARMTSQAIKRLSGSALAELGLADDVVRALGANVAVIQTLNAEIGKLEARLRQDMRSRPEYGLLASAPGIGQTLAPIILLELGTIERFAQVGDFASYARCVDSTHWSNGKKKGEGNVKNGNKYLAWAFIEAANFARRYCPEAKRFYERKKANTNGIVATKALAHKLARACYHMLKTRQPFDVKRCFG

SEQ ID NO: 365220 - protein, 362 aa, unidentified
MTTQDKNSITIGLDLGDRRHRFCVLDGNGKVTEEGTLANSRECLTELSSRYPGALMVMEAGCHSPWISRYLEEAGCEVVVSNPRKTRAIYQHERKSDRRDALMLARIARMDRALLYPVRHGSEQAQEDLLRIKLRDSLVRARVGLINAVRFTLKSLGYRITNPSTERFHKVIEGEIPESVKNVIAPSVQAIEELSLRIKVLDREIMTLAHNYTETAWLQQIPGVGPITALYFVLKIGEPARFERVRDVGAFLGLCPRRDQSGESDPQLRITKRGDVYLRRLLVSAAQYILGPFGPPSALREYGLTLAAGGTARAKKRAVVAVARKLSVLLLTLWKNQSAYEAFPGHEDKMRTSDRERLRSIV

SEQ ID NO: 365221 - protein, 326 aa, unidentified
MEPMTTAQLYAGVDVSKDRLDVCLRWSEHERRDGDVFFVTHDDAGIDTPISGLLEEHPVLVILEATGGFERAVVGALAAEGLPVAVVNPRQVRDFARATGQLAKTDTLDARVLARFAEAVRPAPKPLPDEEIRALQEILARRRQLLGMLTAENNRLHSASKPVAKRIAAHVGWLEKELERTNRDLDGAIKGSPTLRENEALLRSVPGVGPVLARTLLAEVPELGTLTHKRLAALVGVAPLNRDSGTLRGRRSVWGGRAEVRAALYMGALVAARRNPAINWEFYERLLAAGKPKKVALVACMRKLLSILNAVLKHRTPWRSPHYIPS

SEQ ID NO: 365222 - protein, 290 aa, unidentified
MKQYSEAFIGFDTAKKKHAVAIADVGREGEIRYLGEIDSSPAAVERMIRKLAGRYEELHFCYEAGPTGYGLYRQVRALGHNCSVVAPSLIPKKSGERVKTNRRDAVTLARLFRAGELTSVWVPDAIHEAIRDLVRARETASQDLRRKRQQLLSFLLRHGRIFGGRQHWSRAHLHWLAQQKFDHPAQQIVFQDAVDAIEDAATRLRRLDEQVVAIVPSWSMAAVVAAYQAMRGVSFVVALTFVAEIGDLRRFDNPRQLMAFLGLFPWERSTGEKVRRAGLTWPATNAPGGR

SEQ ID NO: 365223 - protein, 348 aa, unidentified
MDYYAGIDVSLEESSVCVVDSDGKIVREAKVLSEPDALIAWFGGLGVGLSRIGLEAGPLSQWLYAAMKEAGLAVELLETRHVRDAFRAMPVKTDRKDARGIAQLMRLGWFRPVHCKSMSAQEVRALLTARKLVQSKLLDIEMSLRGILRGFGLKVGATKPNRFGCRIEELVAGHATLETVAKALLAAHEVLLRELKGFEKRVRAMARDDQRVRLLMSTPGVGAIVGLTYVAAIDDPGRFKSSRDVGPHFGLTPKKYQSGEKDISGRISKIGDASVRAALYEAANVILTRPIKGASSLKSWAMKLAGRAGMRKAKVALARKLGVIPHRMWADGTPFAAQPAGAHKPAAA

SEQ ID NO: 365224 - protein, 465 aa, unidentified
MTTAKLWRNRKERKDWARRLRSEDPGLEVVHPRAAGIDVGNSAHYVAVRPDRDPEPVRRFECFTADLYRLAEWLESCGVKTVAMQSTGVYWIPLYEILEDRGFEVYLVNARHTKNLPGRKSDVQESQWLLKLHTYGLLNNSFQPPAEIRVLRTYWRQRAEHVSGAATCIQRMQKALTQMNLQLANVISDLSGVTGQAIVRAIVAGERNPQKLAQLSNPRIEASREEVAKSLEGNWRPELVFVLRQEVEMYDAYQRRIAECDQQLQKHLASFADTELPQSPKAESKEHWAKSTKNAPRFDLSSELKRITGVDLTRIDGIDVMVAQTLLSEVGMDMSRWNTEAHFSSWLGLCPDNRISGDKLLGKGTRHVVNRAATALRLAARNLIRSRSYLGAQYRRLRTKLGAPKAITAMAHRLARLVYRMLKYGQQYVDKGTEYYENRYRQQQIHLLQKNAAKLGLQITVAAQS

SEQ ID NO: 365225 - protein, 400 aa, unidentified
MGNCAGIDWASEKHDVLIADEDGEELLAATFPRDESGITSLCRAMVRHDVEVVAIERPDGVLVERLLEAGVRVLPLHPNQVKAARDRFRASGGKSDRFDRFVLCELARTDRHRFRLLEPDLDETKALRALTRAREDLVSARVALANQLRAELERFWPGPVGLFADIDSAISLAFLARYPSPMDARGLGEKRLAAFLKAHHYSNRKPPAQLLERLRSAAAGRGGALETARRRSIVPRLTRTLQMMVEQIRELEREIAEALDTHPDGEIFRSFFRCPGSVICAATLLAEIGDDRGRYPHRDALAADAGQAPIAVESGKRKHAKFRWACNKRLRNALATLAHTTRRWNPWAAARYAAARARGHAHRRALRTLGRAWSRIIWRCWRDRTIYDPQRHTGLQQLGG

SEQ ID NO: 365226 - protein, 343 aa, unidentified
MEIRTLGLDLGKTSFHAVGCDARGQVVLRRRFSRPQLLRFMATLPSCLVGMEACCGAHHLGRAFQSHGHEVRLMPPQYVRPFVKAQKNDYLDAEAIAEAVQRPTMRFVPLKTMDQLDLQALHRVRDRLVSRRTGVINQLRAFLLERGVTARTGRQHFARMLPTLLVDAGETLSPAILHIIECLQTEWRMLEEAIRDLTRQITVIAQRDVACQRLVEIPGFGALSATALVAAIGKGTTFRKGRDLAAWLGLVPLQKTTGGKPMLLGISKRGNGYLRRLLLQGARSVHRLANRSRLACGAWLTALDARAHPNVVAVALANKLVRIAWAVLTRDERYRPPALAAAV

SEQ ID NO: 365227 - protein, 442 aa, unidentified
MAWPWKGQQHCWPWKGQAALPLRVGSSEYERTSRNLYSALSAKIEVLKSICSGKGKSMSKLIEEAVRREAALHSVVRVGVDLAKQVIQVHAVDRAGKVVVSRAMARDRFAGWCAALPRGCMVAMEACGGAHHWARRLRLLGLEVRLVAGAFVTPYRMAGKRGKNDANDAAAICEAASRPHMRFVAVKSAEQQGWLAVHRLREGFKEERTACINRIRGLLAEFGLVFGQRPEVLRAALPEVLEDGSNELAGVARLGLQRALQHWIELDEQLAWCDERIALHARQDAKAKAIMALPGLGPITASALVASVGEFGQFDSARQFGAWLGLTPSQNSSGGKTSLGGVSKRGDTYLRTLLVQAARSAVQTAQRRADRLSRWVLALRERRGWQTACVALANKNARIVWAILTRGECFDAEHVPEPPAPKRPKAGTVGATKATTLLPAPT

SEQ ID NO: 365228 - protein, 403 aa, unidentified
MITAIDIGKDKNWVIYRSPDGQDSRSFKFSNTRVGFDSFYNQLLWFKNHYHTNDIVVGFESTGVYTEPLVHYLRNKKICLVLVNPVHSKKVKEIRDNSPNKTDKKDPRVIADLIELGCVLSVIVPESDGAELRHLIHARERAINERNGLLSQLHDLVYKIFPEFHRVFKSLNSKTARYLLMHYPIPEDVSATDINELASELRSISRGRIKRSQVEEFHTLAQRSIGVKESRNAIAIEMVHFVKLLKFQEEFIEDIEQEISVTLLRVPVSQRILRIKGIGEVTVAGILGETACFQNMHNSKEIEKLAGLNLFEISSGRHKGQKRISKRGRGVLRKLLYFAALNVIKHDGVFRDKYQRYLKTGKPKNKGLIAVSRKLIRVIYALVRDDVNFNDNYHQEQSYSKAA

SEQ ID NO: 365229 - protein, 338 aa, unidentified
MAQNKIIGIDLAKSIFFLFEINHKGKNISRKKLPRSKLLNYIAQQNECTISMEACSSAHYWAREFSKLGHQVMLFPPQHVKNQRHKQKNDYNDAEAIAEITLYQRHHPVPHKSIEQQDIQSVIKMRKLLITERTRLINQVRGLLSEYGIIIPKGKTAFGKAIPSILEDAENQLSSMLRELIYHQHERYNYINEQVSWFDNKLNHTIQHFANAKLLTSIPGFGPLTSQAVAVWMGSGQQFKTGRDASAAMGLVPKQNSTGGKTTLLGITKQGNTYIRSLLVHGARAALRRAKFKSDKLSLWAVDIEKRRGANRAAVALANKLMRIAWAVISKSEEYKPA

SEQ ID NO: 365230 - protein, 374 aa, unidentified
MENTITYVAMDTHKKQHKIALHYPCREEIVEFSVNNTVRDIKKMVNKITKHAPGKVEFCYEAGVCGFTLKRRIEQFDCLCSVIAPSLVPRKPGERVKTDRRDARKLLMMLKAGLLTEVHAPNEHQEAARELTRLRETAKDNLKRIRHQLLKFLTRHGYIYSNGNHWTQRHIAWLRTLEFTAPMLTSVFESYFNEMIYCIGRLEALDKEVELLAGSQEYKEIVGLLRCFHGIDTLTAITIITEIFEFGRFESPRYLMSYLGLTPSENSSGDKQKKGSITKTGNKRIRRLLNETSWHYRHRYVPSKVLKKRRKGQPQWAVEIADAAGRRLSKRHRHLVSKGKMTCKANIAVARELSGFIWFVVTQYHARKNTKDAA

SEQ ID NO: 365231 - protein, 460 aa, unidentified
MWAVPWCFEPEDQIRFPPAVSTGIRACGSFELREVAGMDRVADDDVIIDRVAAIDVGKAEVVCCARTPAPDGRGRSRRVQEVRKSSTMTRSLIELGDWLASLGVTRVVMEATSDYWKPVFYVLEAAGFETWLVNARDVKHLPGRPKTDTLDAVWLCKVAERQMLRPSFVAPPPIRRLRDLTRYRVDLVADRRRVKQRAEKLLEDAGIKLSVVASDIFGVSGRSMMQALVAGERDPGVLAQLALRSLRTKIPDLQEAFTGRFDDHHAFLLGGMLRQVDTLDADIAALEVRIEELVNPFADQIARLTAIPGIGVTAARAIIAEIGVDMSRFPTAAHLASWARFAPGVNSSAGKTKGSGATGHGNKYLAGVLGEAAISASRTKTFLGERYRRIARRRGKQRALVAVGRSILIIIWHLLYESDAVFHDLGPDHYTNRIGSQRAIRNHIRGLNALGYTVTLNPAA

SEQ ID NO: 365232 - protein, 371 aa, unidentified
MAESTLTVGMDVHRDTIAVAVLRDGAHEPDLENTLPNDPRKIERFFQSLAARGGRVTSCYEASACGFVLKRLLDERGIACEVVAPSLIPHRPGDRRKTDRRDALNLARLYRAGQLTAIRVPSDAEERVRGAVRCRETLMREVHRSRQYILKHLLARGFVYRDSGNWTKRHGEWLRKLRLEGQDQEVLETHMALLDYKLTLLAKADAGIEALSRMEPYRGPVARLRCLKGIDTLSAMTLVCEIGDVLRFDSARRLMGYVGLTVSEYSSGQRQRYGGITKAGSSRVRRILVEAAWLYRFPPRLSADMRKRMADQPPELIAHCMRAQERLHRRFGKLLQRKEKAVAVTAVARELAGFVWAAMHDDPQMWRTHDR

SEQ ID NO: 365233 - protein, 413 aa, unidentified
MKPHSELTHFAGFDWAKDHHDVVVVDVQGCIAGEFRIEHSIAGWQQWKDQTAAFPHLGVAIETSFGAAVEQLLDSGVTVYPVNPMNAKRYRERKCSSGNKTDHDDAWALADALRVDGQGWRPLTVQDPVIAELRILARDEVGLIEERTALVNQLQQALHEYYPTALEAFDDWTSGGAWSFVEVFPTAEALIKAGKRKWDKFLHSHKLYRPQTYQNRVAIFEQADKWRPLASTVAAKSFLALTRCKQLRCLQLQLDAYRKRIEELFASHPDSGMFGSLPGAGPKLAPRLLSEIGSDRALYQDAQGLQCMAGTAPVSYQTGKIHKASIRRACNKHLRHAMHLFADKSRPQCAWAAVYYDALRQRRMTHAHALRCLGQRWLKIIWRMWQNRTHYDPELHMRNQLAHGSWVFQIQSS

SEQ ID NO: 365234 - protein, 358 aa, unidentified
MAEEKIGLEPEFVAFVGIDWADRKHGWCLEAAGSRKRETGELEHKVEAVEAWVAELGRRFGHRPIAVAVEQVKGALVFLLNKYECLHIFPVPSTMTAKMREALYPSGAQDDPRDADLLLDRLGQHRDKLHRLSPDDEVTRRVQNLVEERRKLTAEKTAQSNRLTSYLKIYFPQMVEWFEKLDMPLVCDLVERWPTLEELQTVSREELRTFFRQHHCHRGLRERRILAIGGAIPAGGDRAVIEAKSTVVKVMVQLIRSLLQGIAELDRKIEESAAEHPDFFIFESLPGAGAVMAPRLLAAFGSQRDGYSCADELQTYSGIAPVTERSGKRKWVHFRWACPKFLRQSFHEWAGHSIAQSA

SEQ ID NO: 365235 - protein, 382 aa, unidentified
MPAYADPTPTPISADTIFLAFELSGTSWLVALHAPDADKVERHRLSAGVAAEVLGLIARTKARVTRRLGTTPRVACCYEAGRDGFWLHRVLEAEGIASHVMDPTSLQVDRRARRAKTDRLDAQALLRALMAWSRGERQVCSMVRPPSPEHEDERRLSRERGTLLKERLRLSNRIKGLCAAQGIYHYEPLGADRRERLARLVTGDGRALPGRLAAEIGRQLDCFELVLRHLAEVEAVRDARAAQAREEGGSKLATLLRLKGIGPELATVLELEVFHRHFANRRDVAAYAGLAPSPYASGGTSREQGISKAGNRRARKALIELAWLWLRHQPESALARWYRDRVGTATGRVKRIAIVALARKLLVAIWRYVETGLVPAEAAVRT

SEQ ID NO: 365236 - protein, 350 aa, unidentified
MLIIGCDYHPGFQQIAWVNTETGEFQERRLPHREEAEKFYRELAVRGVQVRVGMEASGQARWFERLVAGLQFELWIGDAAEIRARRVRKKKTDREDARHILQLLVEDRFPQIWVPSWENRDVRQLLWHRHRMVQMRTRIMNQLQAVALNEGLRCKKRLWRERGRQQLESFPLAPWAGRRRRDLLELLDRLNPTIAELGRAIEEEVEKYPAAQRLMTHPGVGALTALAFVLIIGEAERFRCGKQIAAYLGLVPEEDSSGESRRLGHISKQGSGLMRFFLVEAAQVTARSDPEWRSKYFHLAMRRGRKIAKVAMARKLAVRLYWMWRQQWDYEQWKKFGPHAGQPGTGVGVQ

SEQ ID NO: 365237 - protein, 363 aa, unidentified
MEEKKKAATRYVGIDLGKRSYEVAVVEKSGVKKSNGKTHVAGRQGLYKKLRAGDKVALEAGNLAFIIAKELEASVGCRVYVLNPSHLPLIYASMKKTDKEDSLKLAHILQDFQEERLPVVSVPSDKEMMRRKLLACYRRAQQSRIREINRLHGLFLAQGITTMDRQDLSAGESRKEAIRVLSGIELQEANYLVACLDLHEGQIESLKGQIKKESAGDEAIGRLQGVPGVGPMVAFAFVSHVAADRFENAGQVSNYLGLVPRVYISGDTVKYGRITKRGNGYLRALLVQAAWSLTRAKEGGKLKERFRYMTVEKSKSKKKAIVAIARRMAELLYTLMRDGTGYEARPFIREKKGEELAQLAMSA

SEQ ID NO: 365238 - protein, 359 aa, unidentified
MDLVHPRCAGLDVSKRDAKLCVRVAGAGRSGATETVTTWGSVTNQVLALRDHLVAEQVTSVVMEATGDYWKPFYYLLEDCPFELMLVNARHVKNLPGRKTDVSDAAWLAQLGAHGLVRGSFVPPEPVRQLRDLTRTRTTLMRARAKEIQRLEKLLEDAGIKLSSVASDISGVSGRAMLEALIAGQRDPGELADLAKRRLRSKIPALTEALTGRFGAHHGFLAKVHLDLIDQHSHAVDELTKRIEVVIEPFRSARDLIVSIPGISTLVADVVIAETGADMSRFPTAGHLASWAGTCPGSNESAGRIKSTKTRPGNPYLKGVLGEAAAAAAKTNTFLGARYRRLVRRRARRKRSSRSAAPC

SEQ ID NO: 365239 - protein, 406 aa, unidentified
MFYGGIDVAKYRHEVCVVDESGNVVLQMFMNNTKKGLDKLLQNLNRLEIEVSNVEFCLEATGHYWLSLYCHLTELGYKIHVINPIQSDAFRNFYVRKTKTDRKDAQLLADIIRFGHVSETKLASETVLKLQSLSRLRFEFVRQVGGLKNRVLGILDRIFPEYPQCFSNVFINTSRELLKSFTAPEDLAAADLSELTAFLNEHSRGRLGADRAKQIQALAKGTFGINIALDAFTLELRLLVEQIEFIEEQISVIEEAIDQVMEEMRPSNDTAYRHVLETIPGIGPVLAASIIGEIGDINRFPNAKALVAYAGLDATVRASGQFEGTCNRISKRGSPVLRHSIWLAAVSARRFNPEMKEFFEKKRSEGKHTQVATGAVARRLVHLIYSLWKDNRPFDPNYQWSPTNSH

SEQ ID NO: 365240 - protein, 464 aa, unidentified
MKKKTGTEKLRQRRVQGHLEQVNLYAAGIDIGSNSHYVAVPQELDENCVREFSCFTGDLNRMADWLVKIGIQTVAMESTGVYWIPAYEILEERGLEVLLVNARHVKNVPGRKSDVQDCQWLQRLHTYGLLQGCFRTPEESIALRTYMRQRQSLIESASDHIRHMQKALRQMNLLLDNVVSDITGKTGMGIIRAILSGERDPQELTKLRDPRCKENNKTIAASLEGHYREEHLFSLKQSVELYDFYQQQIITCDEAIEQQLHTLESKGDGDDLPLIKKRKGKNSLNFDVRSELHRITGVDLTKIDGMDENSILKVLAETGTDMSAWPSEKHFASWLGLSPGNKITGGKVLSSKTKPTANRAAASFRMSAYGLFNSKSALGAYFRRQRSRLGAPKAITATAHKLARIFYSMIKKGEEYVDHGQEYYEEQYRGRVVKNLKKKAQSMGFLLVADVAASDGSDATLSTG

SEQ ID NO: 365241 - protein, 316 aa, unidentified
MSEPQLFVGIDVAKAQLDIALRPTGARWAVPNDDTSIAALVSQLVAAHPTLIVLEATGGFQRAVVAALAAAGLPVVVVNPRQTRDFAKATGQLAKTDALDARALAHFAEAVRPTPRPLPSAQEADLRALLARRRQLVAMRTAEGNRLSNAPASVQADLAAHIAWLNQRLATLDDTLDTTLRASPVWREREALYRSVPGIGPVSARTLLLDLPELGILSRQRIAALAGVAPFNCDSGTMRGRRAIWGGRAPLRATLYMATLVAVRHNPVLRVCYERLLAAGKVKKVALVACMRKLLTILNAMAKHQTPWHSQEVAIA

SEQ ID NO: 365242 - protein, 348 aa, unidentified
MQSTAQLPVIGMDIAKNVFQLHIVDVETGEIQRRKLKRAKVAEFFANRQPSLVAIEACGGAHHWARTLQAKGHEVKLLPAKHVRAFVLRDKTDALDAQAIWVAAQQPHIREVPVKSEQQQACLSLHRMRAQLMKMRIMQTNALRGLLYEFGIVLPEGHNKLLQSIQGELAKAQQENRLCDVVVLSVQEQLTRINAMQDDIDRLDKRLAAMVRQNQHMLAVQAIPGIGPLTATALVATVADLSTFKSGRQFAAWLGLTPRQVGTGGKTQQLGISKRGDTYLRTLLVHGARAVVGRSAHNSWLERLLQRRHFNVVVAALANKMARTAWAVLAKGKAFDQVKWNPTEAAAT

SEQ ID NO: 365243 - protein, 319 aa, unidentified
MAQNDLVVAGIDVAKDKVDVCVRSLSLKRTFASTAEGRREFTSWLRRRKVGKAVMEASGGYERDWAKALRNAKIEVRIVDPKRVRSFAQSAGRLAKNDTIDAEMIAWFAETFDEARGQAYDATREQLHQMVNARQAMKDMQTKLESQGEHALPATVQRMHARIMKTIAVELVKIEAAISAMVQATPHFTELAEIIESVPGIGRTTSAALIAAMPELGQANNKIVAALLGVAPYDDDSGRRRGERHIKGGRRRTRNVFYMACLGAATQHNPVLKAFYDRLVAKGKQKKVALVACMRKLISILNIMIERRQKWDASRYAVS

SEQ ID NO: 365244 - protein, 449 aa, unidentified
MSDRSGVSRGDRNRNARLARLREAVPVTNAIAGIDLADSKQMVVVTDHESRVLARRVFRRRAWELGAALDWAAARAAVAGFAGVSVAVEPTGHRWRVVGQLAAERGMAFVCVQPLMSAWARRAEDLTFDKTDDKDAVLIARLAAQLRCYLPEPADELWGRLRHLGIRRARLVAESVSQVQQMRDLLECAWPAVLDAARQPFKSTTWHAALTVALARADGGDLGRVTRLGRRRFDSAVRRQVVRWDAVHPWQKIIDGVFTACADPAGVTALRRGALERVALLLADWHDTRARLADTEQRMVTVLGELGLAGLATSITGLSAVGAASVLAETGDPRRFTTGRALVKHSGLAPRQKNSGNSTGRTRTTGQGRPGLRLAAWRAVWGALKSSPVYAARFTHLTSREHNKLSTGQAHAVLAATLLRHLHAVITSGQRWDPAIAAAGRTSPALHAA

SEQ ID NO: 365245 - protein, 351 aa, unidentified
MPHKSTVHAVTAIGIDMGKNTLHMIGLDLRGAIVLREKVSRGRVASRLANLQPCLIGIEAGMATHYVARELAALGHDVKQVPPTYAKPFRQGHKNDFRDAHAVAEAVQRPTTRFVPAKTNEQLDLQALHRVRSRLVSERTAVINQIRGFLLERGIIVRQGVRFLRQQLPDILAKRTDVLSPRMVRIVTDLAGDWRQLDERIETVTDEIETLAKSDDNCRRVMTVPGIGPIISSAMVAAIGSGAAFARGRDYSAWLGLVPKQMSTGDRTILGRISKRGNGYLRTLFMQAARVILLRPANWPKHGFGAWLIRAAQRLHPNVLAAALANKLARIAWTVLAQERSYEARVTKAAA

SEQ ID NO: 365246 - protein, 432 aa, unidentified
MQDTQDEPLFAERVAGLDIAKAEGEVTIRVPSDTTPGRRQQETRTFGTTRRQLPDLADWLRSWGVTKAGMEAGDCWKPVFFLLESRGFDCELYNAAQVKALPGRPKTDRADSIWLARITERGMISSSFVPPEPIRRLRTHTRYRRHLTQARTAEKQRVEKLLEDGHLKLSSVISDIHGVSGRDMLDALAAGQRDPRALAQLARGTMRGKIRRLEEALECSFFTDQHAAVLAMMLTTIDHYTTQIEALTARIEVLIEPYLHQAGQLDEVDGIGVICAQDIIAETGTDMTVFPTASHLVSWARWSPQVKQSAGKRKGSNATGRGNPYLGAALGEAASSAGRTQSFLGARYRRLTRRMPKKKALVATGNSMLTIIHALLSDPGARYTDLGADYYETRMHARRQARNHVRSLERLGYQVTIQALNPTAGPPLTATA

SEQ ID NO: 365247 - protein, 357 aa, unidentified
MESQEVKYVGVDCGKKSIEVVRINSENSLERRQFSTTESGINNLLQWLTLNDIVGLEAGSQSFRIAKSILNKGVQVIVLNPGNLATIYQSLKKTDKEDSLKIARLIQRHSIEELPTVPIPNDEEEDNRRLCSEHENWTKQLTQGKNRLHSLFTQAGLTQITKKHLRTKVSREASVTLLSDRYKKEAERILKVLDLVELNLKLIEKEIQEALKKNKAYVQTIMSMPGIGMITSLAIMSYMGDCKRFSSAKQAAYYAGLVPRVDISGDTVRYGRIINRGCHSIRRVIVQAAWSLVRCQHGGKVKEFYQRLYLKKGAKKSIIATSRKMIEVLYAMIRTGKLFDSMPENILNRKLTQYGLM

SEQ ID NO: 365248 - protein, 338 aa, unidentified
MKLYGGIDLHSNNSVLVLIDEEDRVVVEKRLKNDLALMLAELARYRKRIAGLVVESTYNWYWLVDGLMEAGYRVHLANTAAIKQYEGLKHTDDRHDARWLAHLLRLDILPEGYIYPREARAVRDLLRRRHRLVQQRVGNLLSIQNQFARLGMNGFSAERLKRLAPAELEALIADGNVRSAMAANLALVACLNGQIARLEREVLAQVKLAAQFEPLLSVTGIGKILALTIMLETGEIARFAKVGHFASYARCVDAQRFSNEKKKGSNNAKCGNPYLAWAFVEAANFAIRYSPRIKRFFDKKCARTNRIVAFKACAHKLARAAFHVMRDRVVFDETRAFA

SEQ ID NO: 365249 - protein, 346 aa, unidentified
MNKHDVGGVEVSATCLLAGLEREGGPRTRREFPNTSEGHKALVNWLVAPDSLVRVVMEATGLYGLDLALRLDAEPGLELMVANPRAVRHFAHALMKRSKNDPIDTDVLVEFARRMPFRRWVRPSLAALALHALAHRLESLTEMHAAEKNRLHAAQLSPALPAAVVRDLQRSLRALERAVNRLTRQAVEVIGQDPDLNLRYQLLLSACGIGPTSAVQILAQLAVLAPHLDVRQWVAQAGLDPRQYSSGSSVHKKTRISKTGNRHLRRALYMPALVAIVHQPHLRTFYEHLLARGKTKMQALVAVMRKLLHAIFGMFKHQQPFDGAKLCPLSQHPSRSIPHLSTTEAA

SEQ ID NO: 365250 - protein, 343 aa, unidentified
MLTGHSIIGLDLAKKAFQARGASADGAVLFRRKLSRAQLLKFLGEQPPCMVAMEACASAHHWGRAIGDLGHEVRLIAPAYVKPFVKRQKNDMADAEAIAEAASRPTMRFVAAKSEEKQAAAMLYRTRDLLVRQRTQTINALRAHLAEQGIVAPVGPAHVGRLAAAVDGDDGALPAAVRDLARLLLDQIAGLSEKIAGLDGELRRRASADDTARRLTTIPGVGPITAAAITSFAPPMESFSKGRDFAAWVGLTPRQHSSGGKERLGRASKMGQRDIRKLLIVDAVAVVRWAARKDTPEGSWLARMLARKPKMLVTVALANHMARTACVLMCKGEDYREPAISAA

SEQ ID NO: 365251 - protein, 344 aa, unidentified
MDHFAGLDVSVKETSVCVVDDTGRIVREVKVASEPEALLTALKNPSYHFKRIGLEAGPLSQWLFSALAEAELPVVCVETRHMQAVLKAQINKTDRNDARGIAQMMRVGLYRPVHVKTLRSQKLRMMLTHRKLLQSKAIAIENDLRGTLRNFGLKVGIAGKTKFEARIKELVENLPDLAELVEPMLVVRRTLREQIVILHRRLLAIVRDDEVCRRLMTTPGVGPVVALTYRATVDVPDRFRKSKSVGAVFGLTCSKYQSGEIDWSGRISRCGDEMMRTMLYEAAQVMLTRTNKWSWLKAWAMQIARRRGMKKAIVALARRLAVILHRIWVDGTEFRWTREQAVAA

SEQ ID NO: 365252 - protein, 354 aa, unidentified
MVVLGVDVHKDTHTTVAVDEVGREIGCKTVKARDRGHAALVRWARAEYSGERVWAIEDCRHVSTRLERALLAAGERVVRVPPKLMAGARASARTRGKSDPIDALAIARAALREPNLPAAEHDRTSRELKLLVDHREDLVTERTRMQSRVRWHLHELDPDLDVPSRGLDRFCVLDRLLAWLEQLQPQAESVVVARIAIELLTDIRASTVRINALERELTRLAEQAAPQLQTLPGVAGLTAAKLIGEAANMSRFRSEACFAMHAGVAPIPASSGRTNRHRLARGGNRQLNAALHRIAVTQARMPDTLGHTYYQRRIAMGNTKMEALRALKRRLARVVFNLLTDTTNSTTGRQPVAA

SEQ ID NO: 365253 - protein, 391 aa, unidentified
MNRNTGMYAGQVIGWMSGLQVVGMDIAKSVFQLHTVDMKTGELRDKRLKRDKVLEYFRLMAPAMVAMEACGGAHHWARQLQKLGHQVRLVHAQAVRPFVQGNKTDVTDARAIWLAVQQSGMRFVAVKTEAQQAALTLHRQRQQLIKMITMQLNGLRGLLYEFGVTLPLGRKAMLAQVVGAIDSVAPVLPKMTVDSLLQQVQRIVQLRQAVDEVEVSLKQLISQDRQMQRALSIPGVGILSATAAVATMGDPHHFKSGREFCAWLGLVPRQEGTGGKVKLLGISKRGDKYVRTLLVHGARSVLLRKDQSSDWQTELQKRRHKNVAVVAQAAKIARTIWAVLAKDQDYQANHKSVRPQHSSAAAQEPSQDGSPTCPPRRSFVAGDARRRGQVS

SEQ ID NO: 365254 - protein, 422 aa, unidentified
MVQVETTKEKERRKAMISVGIDISKEKITVCALEQGSKIIWKPFDVSLNKTKVEEFLEKLKKLKEKVKITMEATGKYHLPILYELKERGYFVAVINPLKMKQFCRALNFRKAKNDKIDAKQIAEYGLMYWKELEEYKIDEDNYMVLKELNRSYQHYMDLRINQMNYIEQTVHQTFPGIKKLIPHNSGDFSKDKLLDFLEKWWHKDLVLEKTEEEFIEEYKTWAKEKRYHPNANKAKAIYKLAEDSISTQPSHNSKIETNIREGINLIKQINQILNSILSQMIEISEPLEEYQEAKKFSGISEKLAVQIVAEFGDLSKFKNKKSLISFIGIDAPPYESGNFKADQRKISKRGNAILRKVGYQAMKCMMSAKDPENEIYKYMIKKEKEGKAKKVCKFAGLNKFLRIYYARVMESKAEKKELKAA

SEQ ID NO: 365255 - protein, 338 aa, unidentified
MSLYAAIDLHSNNSVLAICDEADHAVRLKRLPNELPTILSELAPYREQLAGVAVESTFNWYWLVDGLMDHGYPAQLVHAAAVPQYAGLKHGNDDTDACHLAKLMRLGVLPLGHIYPRAQRPLRDLLRRRAQLVRIGVSLMLSMLATWSRYTGQCLGMKAFLRLTPEQIAKGLPDASTRLGLRMQFAQWRFVHKQIERIEAWVGERMEQVPALERVRCVPGIGPILGLTIVLETGAIERFASVGDYASYCRMVSSERFSNGKKKGEGNRKSGNKYLAWSYIEAANFAIRWSPEMRRWYDRKRSKRHRMIAIKALAHKIARACYFILHDGTRFDVQRAFR

SEQ ID NO: 365256 - protein, 373 aa, unidentified
MEHNITIVGLDVHKNSIEIVTAETAGNQEVRHYGKILGDMTSLDKAIRKLRSVRSNGAELRFVYEAGPCGYEIYRHLAKQGFQCVVVAPSMIPKKSGNRIKNDRRDAENLVRLERAGELTKIYVPREEDEAMRDLTRAREDAVKAQRAARQLLGAFLLRHGHRYPGRTTWGPAHMRWLSDITMPHPAQQVTLQEYIHAITEGTGRVTRLTDQIQKLLPEWHMAPVVKALQALRGVAPIVATTSVAEIGDMNRFEKPKQLMTYLGLIPSEHSSGESIKRGGITKTGNGHVRRAIIEAAQAYSFPARVSRHILKRQEGLPQSVREIAWKAQVRLCGRFRRLMARGKQRNKVVTAIARELAGFMWAIAKEVQVPSV

SEQ ID NO: 365257 - protein, 287 aa, unidentified
MTILTSPTVVGIDVAKAEIVAYREDLNATQAITNDRDALGRWLNTLPANSSIALEATSTYHLDTAELAHEIGHRVYVVDAYRLSHYRESIGQRAKTDPCDARLLARYLSSEQKRLRLWSPPPQAYKLLKSLLHRRAELINLRVSLTLSWSGEPLLKDELAQQLKSFKQAEQVIQKLLHKVSKEAGITENIKRCKAIEGVGDLTATGLATAFMRGQFANGDAFIAFLGMDLRPKDSGKKAGPRHLSKRAIQSCGALLTTQRWPLADLRPGNRTTSPTWPEDWQRPKPW

SEQ ID NO: 365258 - protein, 342 aa, unidentified
MEFAVTIGLDLGKSVFQIHGVDAGGAVVIQRRLTRGRLLAFFAKQPACLVGMEACAAAHHWGRELQKLGHRVRLMPPRYVKPYVKRQKNDAADAEAICEAVTRPNMRFVEIKTCEQQGILVLHRVRLMLTRQRVQLSNAIRGHMAEYGLVAPVGRNGLQRLIAVIDDPDDARVPAVARASLAPLVRQLRLVNDQVLENDRLVRASARSTELGHRLMEVPGVGPVLASAMVATVADPTAFKSGRDLAAWIGLVPRQNSSGGKEKLGGITKQGDRYLRQLLVAGALAVIRYAQRHGTRRPWLMHLLARRRPKIAAVALANKMARMIWAMMVTGERYREPKVSAA

SEQ ID NO: 365259 - protein, 369 aa, unidentified
MEKDNTTEEASASWRKKVVSGKCTIGLDLGDRSSSYCVLDEHAQVLKQGTIATTQKGLNQVFGALPRAVVAIEAGTHSPWVSRHLKKLGHDVIVANPRRVRLIAQSRNKHDRLDAETLARLAHADPQLLYPIRHRSETAQADLTMIRVRAGLVESRTALINTARGLTKSFGERLPKCDAAYLNAEFAKPLPDALRQALEPLLEQIAELTKRIKSYDAEIEKIAAERYPEVELLTRVQGVGTLIALTFILTIDDATRFGHSREVGSFLGLRPGRRESGKMRRELGITKEGDVYLRKLLVQSAHVILGRRGGDSDLRRWGLKLASRGVKNAKKRARVAVARKLGVLLHYLWVNGVIYEPLHNSREQEAKAA

SEQ ID NO: 365260 - protein, 420 aa, unidentified
MSKIIERCAGIDIGKRFLLCCVLTGAADEEPTSQTLRFETTVPALEHLREWLCEQGVTQVAMESTGSYWIPVFNLLEDQFPVVLANPEEVKSRKGHKTDRNDAKHLADLLRHGHIRSSYIPPKPVRQLRDLTRRRVQLIQDATRERNRVQKLLEQANVKIASVLSDVFGVSGQHMILALLGGQATPEQIANLARGQAQRKIPQLVEALEGHRMSEHGRLVICSCLRHLACLEEELEALDAELLRRMQAPPFQRPFVLLQSLPGVGQLSAAAILAEVETDLIAFPTPQQMASWAGLCPGNRESAGIQRGRHTTHGNPYLRTTLVQCAWAATRKQGSVFQMRFQQLAPRRGQKRAIVAVAHLMLTILYWMLNQDVPFRGAEALSQQRRRQRRAHHHLRCLRRLGVAVQVITAPEPSPPEFRS

SEQ ID NO: 365261 - protein, 453 aa, unidentified
MARKAEKERTKDGLKLKIVNPNAAGIDIAYGEMQVCVPEDRDGENNRCFGSFTCDYEEIASWLKACGITTVAMESTGSYWVGLYFFLEEKGFDVLLANAKDVKNVSGKKTDEADAEWIMLMHSYGLLKPSFHPDAAAREIRELARHRDNMLRSAGKEIQHMQKSLVLMNIKLDTVISDILGKSGKAIVEAILAGNHDPKSLAQLADRRCKASKETIEKSLEGTWDSVHLFELRQSYDLYKYIHMQIADCEAEMDRLLTGYTDGSGTDMQGYVPTKKRVAKKNAISFDAEKHAFSLWGVNVMEVPGMSLGALAVLTGELGSGFTEKFTSAKSFCKWCNLVPNNKISGGKLLSSKVPKQKNRVGQVFRLCANSVKSVKTGLGVYFRRQKSKGGHLQAIVATANKIARIFYAMVTTKTPFEESKVGLDEKELLQRKIALAQRTLDRLNLRLSVAEG

SEQ ID NO: 365262 - protein, 341 aa, unidentified
MRAIGIDTHKDSLAACAIDELGGVLGEATFGNDPAGHAQLGSWARGLVPGGRIGIEGSASYGAAAARVLDAAGFDVCEVPPQLSHRERRRTRRAGKSDPGDALAIARVTAREGVLPPIRRADAAGELRLLLEARTDLVAEATRVRNRLHADLVVLVPGYGGRVPNLVAQRHLRAAAGLLARVPGVHAGLARVRLADLRRLGVRVRELEREIASRVAGHPLLRLPGAGALTAGILIAHAGDVSRFRSADAFAMLAGTAPIPASSGQTQRMRLNRGGNRRLNFALHVITLAQAFRHPPAKAFIARKRAEGKTWREALRALKRHLSRVVFRLLVEGATTREIAA

SEQ ID NO: 365263 - protein, 405 aa, unidentified
MPYILALDVSMGHSYSVLYKDDTCLFEDEIEHTQRGFHALLEEIQHLPERPLIVFEATGIYSRPVEKFFQDHHFSYCLLNPLEAKKQMEESTLRSWKTDKSDAHRLAQTHLKNQRQPKEVQSNFYLEMRDLARFYQEIEKKITRLRMDLHNCLQLTFPELEQFFSNRLTPYALTLIRLFPHPDFVLASTRTKIKNKLINETRKKISANRAEQKADQIIHYAQCAYPAVEKDSIHCQKTIYYAELLQDLLEQKEALATQMIKKAEGSPCFLLYQTFPGIDALTAALLLGELGDITRFKTHKQLNAFVGIDIRRYQSGKYTGQDRINKRGNPKARKIIFFTIRNMIRQQRAAPNHIVDYYYKLKKQPIPKKDKVATVACMNKLLKCMHAMVRAHTEYDYAYAVSVDH

SEQ ID NO: 365264 - protein, 413 aa, unidentified
MRRCIGLDVHREFAEVAIWQEGLVRPAGRIETTPEALRLFAESLCEQDEVAIEATCNTHAIARLLERHVGRVVVSNPQKTRAIAEAKVKTDKVDARVLAELLAADYLPGVWLADDETQALRRQVARRAHIVRQRTRLKNRVQAILHRNLVPRCPAADLFGLKGRRWLAEQELPVDERQALEALIRQLDFHAEELRLVDAELARVALASEEVKRLITIPGVDATVALSIVAAVGDFARFSSPDKLVSYLGLNPRVRQSGAHPATHGRITKQGRAQARGMLVEAAFAAARVPGPLRAFHERVRARRGMQIAIVATARKLAVLCWHLIAKGEDYAFQRPSLTAKKLRALELRAGMLSRRGRKGAAGAAGAYSLRDVRRREAALAEQGEHAYRQLVANWQSKPPVKAGAGAATGERL

SEQ ID NO: 365265 - protein, 362 aa, unidentified
MTAAWARRRTRERVEVVGGVDTHKDTHTAAVIDTAGRLLGSAQFAADPAGYRALLAWLQGWGTLQLVGVEGTGVYGAGLARFLAEQPVAMVEVDRPDRKARRRQGKSDPVDAEAAARAALGRVRTGVPKQRDGQVEALRALRIARRSAVSQRADTQRQIKALIVTAPEPLRGQLRGLGDRQLLQACAALRPDRARAADPSTATKIALRSLARRHQALSAEVAELDQLLAPLVAAINPALLEIHGVGVEIAGQLLVTAGQNSQRLTSEAAFAMLCGAAPIPASSGKTHRHRLNRGGDRQANSALWRIAITRMRTDPRTKNYVARRTREGLSKPEIIRCLKRYLARELFAALTTPTPQQHALAA

SEQ ID NO: 365266 - protein, 415 aa, unidentified
MSDNPLIVGIDVHRKSQTISLMDRQGQEVASRFRIDNNRPGAQDLVQRIAQQVVVGDFDAIAIAAEATGWYWWHFFQTLEQDATLQQWPLALYALNPRLTANFKKTYVDLDHCDPVDAFVAADRLRLGRDLPAPFHCDELYFPLRCLTRYRRHIVQALAREKAYCLSMLYLKFSEYTHPDKQPFANVFGAASRAVMQEFASLEDIAALPFAELVEFIDSKGKRRFADPSVNARKLQAVVNDSYRLPQALQQPINLILSLSLQHIADLEGRAKRLNTAIAQALQPLPHTLDTIPGCGPVFSAGIIAEIADLQRFDYDQAKVAKFAGFKWRRHQSADFEAEHTPISPNCNHHLRYYLCEAANAIRQRDPDYAAFYERKYHEVRHHQHKRAIVLTARKLVRLVVRLLTTNQPYRPRRL

SEQ ID NO: 365267 - protein, 349 aa, unidentified
MRKEIAVLGIDLGKNSCSLAGLDARGAVVKRRRMRPENVAMFTAGLPACVIAMEACCGAHHLARLLTAQGHEVRLMSPEYVRPYVKAQKNDDRDAEAIAEAATRPTMRFVSPKTEEQLDMQTLHRARDRLVGERTALINQLRAILLERGTTVPQGRTRLERYLVETFDGDQVASPPALTPRIRALIADMRAEWRELDRRIAAFEEEFVARAREDEATRRLITIPGIGVMNATALIAAIGNGEMFSRGRDLAAWLGLVPRQITTGGRPRLIGISKRGNTYLRKLLIHGARSALPSLLTSTTPLGGWLRALITRAHKNAAVVALANKLARITWAILRHGGTFNSRAAAAMA

SEQ ID NO: 365268 - protein, 440 aa, unidentified
MRVRETLTVMHPNAAGIDIGSASHYVAVSPTKSDEPVKEFGCFTEDIEAMADWLVECGVDVVAMESTGVYWIAPYEILESRGLTVYLVNARHVRHVSGRKSDVLDCQWLQQLMSFGLLSGAFRPTGEICALRAISRQRDSLLREQARQVQRMQKALTQMNVQLTNVITDIAGKTGQDIIRAVVAGERDPLKLAKLRNYRIHASEETIAKSLEGNWREEHVFCLSQALALFDTYQTLIAATDAKLEELIKPMRQHQAALVADKNKGRGKNAPAFDVRKALYEWAGVDLTRIGGIDVSTALKVLVEIGPDLSKFENAKRFASWLGLCPGTKISGGKKLSSASKRIPNRVAQALKLAAQGLHRSHCALGAYYRRMAARMGVGKAITATAHKLARLIFAMLTNGSEYVERSQEQYEDQMHKRTVAYLKRKAAALGFSMQPIEAV

SEQ ID NO: 365269 - protein, 312 aa, unidentified
MSNYIGIDISKQRLDVDWLGEPIEFINNIIEIDQLITRLQLLLKQNQLALVLCEASGGYEQRLVRACHFASIPIHVVHANNIRYFAKSQGIKAKTDRIDARSISAYGNERKPQADNFVLNKNTQKIRDLLKRREQLLADKRRENNRLDKIDEVVIKELIASHIKWLSDSIKEIEKLLLQLQKLDYVKEPHALLKSVPGIGNLLACYLISYLPELGKLSHKAIGALVGVAPFNHDSGEHQGKRFIQGGRSVLRQMLYMAAMTSITWNRDLKAFYERLCKAGKPGKVALVAVMRKLLSMVNSVMLRQTPWRENY

SEQ ID NO: 365270 - protein, 408 aa, unidentified
MEVLYPRCAGLDVHQQTVVACARVASGSTVQQDVRTFGTATADLLALADWLAAHGCTHVAMESTGVYWKPIWHVLDGQFELILANALQIRTVPGRKSDVNDAMWIADLLAHGLIRGSFVPPAAIHELRDLTRTRKQLVREVAQHTLRIQKVLEDANLKLTSVISDVMGMSGRAMIEAIIRGEENAERLADLSQGRLKASRPAVIAALQGRVTSHHRFLLRLHLTQIDALEVAVRDVEARLGDALTPFQAAGDRLLTIPAVGRTVARVIVAEIGFDMSRFPTAGHLVSWAGLCPRLQESAGKRLSTRTRPGNPWLKTTLVQVAWVAARTRNTYLRAQFLRLKSRRGPKKAILAVAASILTAAYYILKDEVTYHELGADYFERRDKAHITKRLIRRLEDLGLSVEVRPAA

SEQ ID NO: 365271 - protein, 360 aa, unidentified
MDFLPIHKDQETLVILGIDTHADVHVAVALDGHGRRLGHKSVPSTEAGYAALVAWVEEFGTLEHAGIEGSGSFGVGLARFLRARGVEVVEVNRPNRQHRRRFGKHDTADADAAARALQANTATGEPKSADGPAEMVRTLHVVRRSALKARTQAANQLRALLLTAPEELRAQLRGLSTAKLVATAACFRPGCFPDDVRSATKLAMRTVARRHRWLSEEIVELDEQIGRLVSEAVPALVALRGVGTDTAASLLVAVGDNPERLKSEASFARLCGVAPVPASSGKTVRHRLNRGGNRDANRALHVLALGRMSWDERTREYVVRRTTEGKSKREILRCLKRYVAREVYRILTAPGALPSSVSVP

SEQ ID NO: 365272 - protein, 487 aa, unidentified
MELKYRRCCGIDVHKKSVTVCVLPPVGKPEMEVRKRNFRTFTRDLKQLRTWLKNCKVTEIAMESTGQYWRSIWNLFEGHFDKLILVNPQHIKGLNGHKTDPKDAQWIAELLETGKLKGSWVPAREIREVRDLTRQRVHVLEDMNRVKNRIEQLCQTGNIKVSSVATDLFGVSGRRMLKAVVEGKHDAGWMADYAKGSLRGKRRELELALEGSFTGNQRWLLDKELRQLEWLESQIPVLEQEIERQLAPFQEPMRRLMTIPGIDRKTAWTIVAELGVDMGVFTDSKHLASWAGLCPGNRESGGKRMSGRTRKANRYVKRGMCQAAWAASHTKNTYLQAFYRRIQMRKGAPKAVMALAHHMIAIVYNTLARGEEYVELGGDYYDQRNKPRVVSRLVARLTRLGYYVSLKPVGPESSYEPSSVMELSLPQPQPAIPASHNPLSMPGSVAPARPKRGRPCKCLERGIICKHTTSPGINSLKQHDLSPSRFS

SEQ ID NO: 365273 - protein, 344 aa, unidentified
MKPETSFSQLYCGMDLHSNNVYCALIDETGALRSKKRLLLDIMQILDYLEPYRDKLEDIAVESTYNWYWLVDGLQESGLSVRLANPAVMTKYSGIKHTDDKSDALWLAEMLRLGILPEGYIYPKRIRPVRDMLRRRLLLVRQRAQTLMSLQSMITRNKAKTISCSTLKRWTLKDVNGCFEDPYLRQTACSLLEVARRQDRVISELGAQAENMVKLCGSYRQLLTEPGVGSVLGMTIMLETGPIERFESAGNYASYCRGVGSSRTSNEKKKGQNNRKNGNKYLAWAFVEAANYAKRYYPQVCSWFNRKKARTNRIVATKALGCKLSKAAYYILRDNVEFDMEKMF

SEQ ID NO: 365274 - protein, 332 aa, unidentified
MSQDGARLVHRHRKTAPEPFLKAIAPYRDGLVVAVACVFTWYGLAALCAHEEIPFVLGHALYMKAIHGGKAKNDKIDSQKMATLLRGGMLPKAYVYPAEMRATRDLLRRRTHLMRKRAELWAHVQNTNSQYNLPEIGKKIAYKANREGVAERFDDPAVQKTIEVDLALITSYDQMLSDLELFILKTAKQHDAHTLYLLQTVPGIGTILSLVLLYEIHQIDRFPRVQDFASYCRLVKCAKESGGKRLGTSGNKIGNAHLKWAFSEAATLFLRGNEPGQKYLARVEKKHDKGKALSILAHKLARAVYFMLKRKTAFDLEPFLRTSGGRAGEPGA

SEQ ID NO: 365275 - protein, 334 aa, unidentified
MNNYIGLDGHSSTSTFCVVDENGVEIDSTTVRTNGRLLVNYLRSIKGKRILTFEECELSSWFYEILVKEVDEIVVCNPVHNRDYKAKKTDKLDARKLANLLRGNFLTPVFHNGSQREQFRDLMSAYTDLVEEAVRIKQRYKSLFRKNGYRITGERLYSDDSFLEDLERKDHNFIGENLYQSLQQLEESREKYTKEIIKFSKSFKEIRRLKTIPGIGVIRAAQISAQVIDPKRFPSKYQYYSYCGLVRHERESGEHKYGSKKIWGNRVLKCVYKMAAQNTIKGNNGLSKYYESLREKGITEKNARNAVSRKIAAISLALWKKNINYDDKKVTTVI

SEQ ID NO: 365276 - protein, 315 aa, unidentified
MDVTHSGSRFVGIDVGKAHIDVHVRPSGEAFRLTRDPAGLAELVARLQPLAPALIVLEATGGFERVVTAALCGVGLPVAVVNPRQIRDFARATGRLAKTDRVDPKVIAHFADAVRPDQRPQPDAAARELADLITRRRQVVAMISSETMRSHQARLPAVRRRLAAHLDWMNQELRQLDADLDTAVRANPAWQERATLLVSVPGVGDATTRTLLAELPELGTLGRRQIAALAGLAPVAHDSGQHRGTRHIRGGRGTVRAALYMAAWIGSRWNPTLKDIYQRLRAAGKPRKVALVACMRRLLTILNAMIRDKAPWRAA

SEQ ID NO: 365277 - protein, 406 aa, unidentified
MELTPIYKRVIGLDVHQAKISACAVAEQPDGSVCVEMREFGAFKRDRKALAEWAREFAPEVVVMESTGIYWKSPYAALEQVGIAAWVVNARHVKTVPGRKTDVADAQWLATLARAGLLRASFIPPADIRHLRLIARQRQKLGGMLASEKNRLHKLLADAGVRLNVLVSDMHGQTARAMVKALIAGHSMSEILSHAGRLKASREALFEALQPEELSEPHLFVLSEIMAHIEELEARMARFDQALLQGLSAWQPQLILLQTIPGIDLMGAAMLLVEIGTDMQSFGSAERLASWVGICPGNNESAGKRKSGKTRKGNAWVRRLLCEFAQAASRSRCALKEKFGALNIRKGHKKSIVALAHKMLRILFAMLKNNTPYQDRAVDYEALSVQRNAPRWLKMLRKHNLLPAGA

SEQ ID NO: 365278 - protein, 366 aa, unidentified
MTSVTGTRESIYLALDVHKNSITAGALEPGATSAVMTRIGPDDAAVRRLIGKFSDRKQLKVCYEAGPTGFALARALTKWGVDCEVIAPSRIPKQSGDRVKTDKRDAATLAVLHRAGMLTAIRVPTEGGEALRDLCRARQDAYDDLKRVRRRLLAFLLRHGQVYRTSSTWTREHQRWLNQVRVDEPAARAAFEHYLAVERLRETEVEAMTRELLGWVDREPFATSVHRLAAYRGVAYISALGITAEIGEWSRFHRATGFMSFTGLVPSEHSSGDRRHQGEITKAGNVYVRTHLIESAWQYRHHPVVGAELRRRHEHVGPDTIARSWKAQQRLCGRYRRMNARLVNPNIIITAIARELGGFLWAEMTS

SEQ ID NO: 365279 - protein, 400 aa, unidentified
MRVVFGIDVSKVSSEVAILVNGEKVHNYTMSNDAIGFSRLLGDLRTVHKPEIIFEATGVYSRRLQSFLDEHGYAYTRLNPLEAKKQLDSLRVRKTDQIDAEKLAQSQFVLNRKSTYVQEEVYQNLRDLSRFYQNLTEDIVRAKNRLHKVLQVTFPELENILSTPTGEQYWNLVIAFPCKDFVLELSKDKLLESIRQSTSKRISDKRVAYLAEKLIALANQSYCAVKKTSPMLEEVRYYTKELLRLSEQRQAVLDEMVELAQPLPEYDILRSIPGIAETTATSIIGELGDIRRFQSANQINAFIGIDLRHYESGNFLAKEHITKRGNPYARKILFRCIHNIASASHTNPCHIADFYEKRKRQSQTTSTKPHTIASIHRLIRTMYYLIMHNKLYDYASTQNR

SEQ ID NO: 365280 - protein, 345 aa, unidentified
MKKVMAGIDLHSNNLVVGIVDQDGKRVGQKKLPCDLKEVVKFLGPFKRRLEQVAVESTYNWYWLVDGLKALGYPVVLANPAAMEQYSGIKSAGDTHDAFFLAEQLRLKILPTGHIYDAELRPVRDLLRRRLLLVHQRTALMLSFKSLYTRTTGQEMTLSGLKELEIKEAQELYDHPANQMIAGMQIKHIDHLSESIEKIEKAVLASARELPFYSELTSLPGVGRILGMTITMEVGDIKRFADAGNFASYCRTVAAQRTSNSKKKGENNSKCGNKYLAWAFVEAANFARRYDEQCRQWSDRKAAKTSKVIATKALACKLAKAAWHVMSQGSDYDAERMFGQPATAK

SEQ ID NO: 365281 - protein, 402 aa, unidentified
MNCVGIDVSKGKSTIAVIRPFGEVVVSPFEVLHTDSELSKLARLLKSLNGETRVVMESTGNYHTPVAWLLHGAGFYVSVVNAMLVHDYGNNSLRRAKTDRKDAVKLANYGLDHWLTLPRYVPEEDTRLMLKACYRQYQQYSKVRTMLKNNLISLLDTAFPDANRLFTSPPRADGSEKWVDFVATFWHCECVCGLSEKAFTTKYRKWCKKHGYNFSEEKALGIYASACGHVGIMPKTNTTKLLVEQAISQLQATSAALVALKQEMQSLASYLPESPVVMEMFGVGPTLGPQLMAEIGDVRRFHSKKALVAFAGIDSPPYQSGQMNVCGRSISKRGSASLRRTLFLVMGVYLKNAPTNEPVYQFMDKKRTEGKPYRVYMMASANKFLRIYYASVKAYLDSLEHA

SEQ ID NO: 365282 - protein, 337 aa, unidentified
MDRAWAGVDIGKQHHHAVVVDDQGTRVLSRRVANDQVALVELIGQVTELAGAVTWAVDLHSSEAALLVALLLAHDQTVVYVPGVMVNRAASAYRGAGKTDAKDAYVIAEQARMRRDLQVLRADDELIVELRLLVARRQDLRADRTRAVNRLHDRLVAVCPALERVLDLGNRGALVLLTGFQTPAALRAQGVAGLEAWLGSHKVRGAGKLAAAAVDAANAQTIRLPGEQVAACLIADLAEGVLALDEQIKQVDELIQGRFRRHPAAEVILSLPGMGVLLGAEFLAATGGDMAAFGTPDRLASLAGVAPVPMTRGGWSATCTAPSATTGACSGCSTPRR

SEQ ID NO: 365283 - protein, 361 aa, unidentified
MKKRKLYCGIDVSSETLDICYETSEGDKVHKQVKNDKTGFMIILKQCRGDYHFIMESTGIYHTSLMFYLHEQNKVYSVINALQIKRYIQMHLERNKSDKKDARRICEYGIDRSPEPTEMPDLAYFECRSLNNAIDDLTKEITKLTNQIHSISRAPFDTQTIIRSYRSLILKLEKEKKKMDFRLQEKLKEWQPELMELVQTVKGIGKRAASELIIYTRGFKNMTSYRQLISYAGLSPVEFSSGSSIKGRVKICKQGGKKLRHILYMGALNAKVTNRACRELYERLVARGKNKKAAIIAVCNKLLKQVFGVVKNKRAYEDNYQLNFNLIYFIWFFTQFMLPACAIYAVFFKSVSCPTKSCNEK

SEQ ID NO: 365284 - protein, 338 aa, unidentified
MKLYGAIDLHSNNNVTVLTDERDKVVYQKRLTNHLPLILEQLSPYASSIEGIVVESTYNWYWLVDGLMEKGHRVYLANTAAIQQYEGLKYTDDDSDARWLAHLFRLGVLPEGYIYPKEERAVRDLLRKRCQLVRQKTANLLSIQNLYSRHTGQSISANRIKQLTSEKVDALFTSSDLALAVKANLTVMRSLETEIAVLERVVRERVKLKPAYRYLLTVSGIGQILALTILLETGDIRRFPKVGNFASYCRCVGSEKLSNGKRKGIGNTKNGNKYLSWAFVEAANFAIRFEPLIARYYERKKAKTHRVVAIKAVAHKLARACYYVMRDEVPFDVNRAFA

SEQ ID NO: 365285 - protein, 315 aa, unidentified
MDTAIYVGIDIAKDRLDIAVRPTGTSWSVPNDDAGIDDLRNRLAGLAPSLIVVEASGGYERPVVAALAGAGFPIAVINPRQARDFARSIGQLAKTDALDARMLAHFAEVARPTVQPMRDDEARALSDLVTRRRQVVGMLTAERNRLHGAVVPLRERIEAHVAFLEAEVSALDAEVERAIRRSPLWRENDARLRSVKGVGPVVSATLLSTLPELGAVEHKRLAALVGVAPFNRDSGKYRGKRAIWGGRAQARQALYMAAVVAARHNPVIKPFYQRLLAAGKPKKVALTACMHKLLTILNAMLKHQTSWGQQAARTI

SEQ ID NO: 365286 - protein, 342 aa, unidentified
MNIVYVGVDLGSSNFHQVAVNEAGVSKVNREFATSEANLIKAFADQRGEIHVHLEAGELAPWALSIIRPLVSRVVCSHPQSNAWIAKDADKSDRIDAFKLADLLRLNRFKEVHYPQQQSRRDFKTLVQHYDELTQQQARLKTKIKARLRMQGVIVRGEGLFSSKGRKAVLAAVKSVAVRTAIKQLYAVLDQSIESQTEARLLMRRAAQAFPEIRILQTAPGVGPIGACRFSAYIHTPSRFSSTRKLWKYCRLSVSHRSSNGKPLRRPRLDRNGCGRLKDVTRKAFEAALRTQRDNGFQRAYRRALETTHDRTHARLTVQRKIASTLRAMWLHQTPYRDELMR

SEQ ID NO: 365287 - protein, 386 aa, unidentified
MQHATTLPAPERTCSRGDCATLFVSLELSRSTWVATALAPGSSKMSKHTLVGGDGRKLLDLLARLKTRAEQRIAAPVKVVAIQEVGLDGFWIHRLLEANGVESHVVDPASIAVPRRHRRAKTDAIDGETLLRTLMAWQRGEPRVCAMTVPPSPSQEDRRRITRERAKLLQERIRHTNRIRGLLFGQGITNYNPLHKNRREGLEQLRTGDGRSVPAHLKSAILREIDRLELVLRQIGEVETERDEMLQLTQPSSPAALLMRLKGIGAEFASVLYLEGLFRRFDNRRQLAAYAGLTPSPWKSGSIDQEQGISKTGNPRLRTTMVELAWMWVRYQPASALSCWFRQRVGSKRGRIRRISIVALARKLLIALARYVSHGEIPAGAVMKAG

SEQ ID NO: 365288 - protein, 341 aa, unidentified
MFYAALDVSLRSVAVCIIDDEGKVRFERSVPSDVPDLVRCLNAFGEPIHQVGLEAGTLTQHLTYGLREAGFEVVCMEARQVAAALSAMRNKTDKHDARGIAQILRSGWYSRVHVKSVESHHLRALLTSRKVMQRKCIDLENEIRGLLKVFGVKLPMRLSRGAFDVAVRDTIESDPGLSLALIPMHARQMLFATFMELDRRVRKAAHEDEVCTRFMGIPGVGEITVLSFKAAVDDPPRFKSSRTVGAHFGLTPRRFQSGEKDNPGRISHAGDSDVRAALYAAANAMLMRSIKWSSLKAWGMRLMKTKGRRRAIVAVARKLAVVLHRMWADGSKFRHGSEVAA

SEQ ID NO: 365289 - protein, 432 aa, unidentified
MSHRNFVAEKDNFMAKRIHANGKASVQARYNITGGCDTDKNIIVAAIYHAETGNLEAREFKQHKADALRAAEWFRSQEVELVIIESTANYHMLYYDTLREEGINIAVINPIVVKALLRVEGKSDKGVAMTLARLAANFDLKTSNMPDSQQRELRLLFKRIDSWKQQRTQVTNRANGILTGYGFTVFRLVTLNTPAGLNILQGIIDRRTPEEIAALHRNRNKRPEIVKCAEVPLPDYILPYLEEVLGDVTMLNDRIKQAEFEILDKISLSNLEKQVDLMTTVPGVTSMLALRIIAELGSNYHQRYCTAEAFSKAIGVVPANEVSGGKLLKRRSSHGNARVKFHLLSASKAFAIHGKGPLKAWFDQYRSRVHYYKATSALARRIAEGLWWVMVKNEPYRYKLDQIEEIESRSILVNNRLIDPATGEILKSFVEE

SEQ ID NO: 365290 - protein, 394 aa, unidentified
MRFAGIDIASETHALAIVNAEAAVELKPVSFAEDAVGYQRLLSLLGDPAELLVAMEATGHYWKNLFAVLAAAGYSIALLNPLRTHRFAGEDLARTKTDALDALGIARFAAQKRPSPTLLPDAATEELRELVRLRERLLHDFGDRVRQLHRLVDLGFPEFTRHVRTLESELAGAILRDYPTAAAFRGASVRRLAGVRYDGRHQVGLELARSLIDAARCSVGQHHSAAYRIQVRYACDDLAVLRSRLREIDRDIESKLREHEVGRLLTTIDGIGPNTAARIIAAVGDPADFHSAAALAAYVGTIPRLRHSGKRQPARAPLTPIGNASLRAALWMPTLTAVRSNPWLRAHYERLRARGKLPKVALVACMHKLLFAVYSVAKHRQPFVPMLSAPSADV

SEQ ID NO: 365291 - protein, 450 aa, unidentified
MGNGSGVSRGDRNRNARLARLRVLVPVGNAVVGIDLADRKQMVVVTDHDSKVLARKTFRCRAWDLGVALDWAGKQASVKGFAGVTVACEPTGHRWRVLGELAGARGMPFVCVQPMLMSWARRSEDLTVDKTDEKDAVIIARLAAQLRCYVPEPVDETWGRLRHLGARREQLLVDAGSQVQQMRALLECVWPAALATAQQPFRSCTWTATMSVLLDRDAGDLAPTRRLGLARLESAVRREVLRQGRQKPCLRIVRALFSALTDPAGVIAHRRGALERVALLLGDWQQTHQRLIDVETRMTAILNEHKLTELVTSITGLSAIGAAAILAETGDPHRFATARALVKHAGLAPREKLSGAFVGRTKLTGQGRPGLRLAAWRAVWGAQRANPVYAARFAHLTTREHNKLTVTQAQAVIAAAILRHLHAVITTGRRWDPVVATHGAGHPTAIPIAA

SEQ ID NO: 365292 - protein, 412 aa, unidentified
MQDILTVAMGLDVHRDIIVACLIKGQIGLEPETEIRTFSTLIPEMQKLRDWILETDCRNVAMESTGIYWQPIYEMLESCFDSEINILVVNARHMKNVPGRKTDMRDAEWIATLLRAGLLKGSFIPSKPIRELRHLTRYRKSVVHDITAQKNRIDKFLQSSGFRFTAFLSDAFGASGRNIIRHLIENGRIDRAALDKCLKTKTRNRIDEILVALNGSLSVHQRSFLRMIFEHLLALETHKTAVEYAITEEILKHEETMNLLCSIPGIDITAAASIIAEIGTDMRSFPDAQHICSWAGLSPGNNESAGKRKSTHINKGNPYLKSMLCEVAWIISGKRTLYLSGWYWRVKQKKGAKRATIALARKLLSLIYTMLKTGVPYNEECFEERRKHSERKRAGRMINELQKLGYMVVVPE

SEQ ID NO: 365293 - protein, 325 aa, unidentified
MKKIFIGIDISSKTLDICLKIDGRIQYLTIQNELKAIRAFFKRHVAKGAVVAMENTGRYNWNLFEVLTDLDLLVYVLSPLHLKKSLGLSRGKNDKIDSFRICNYIEKNQHESVIWKASSISIRKLKILLTEREARVRMRGQLVRQQHDYKLMKSLGIDKELLKLNKKLIEAIHAQVKKIELDIEKCIVGDCELKKKAELIRSVPGVGKVVCWTMMAKTEGFTTITDPRKMACYCGVVPFDHQSGTSIRYRSRVSVFADKGLKSLLHLAAMSAIRLNNELKTYYRRKVEEGKNKMSVLNAVRNKIVHRIFAVIKNQTMYKNDLVLS

SEQ ID NO: 365294 - protein, 343 aa, unidentified
MSGAYEGRQIVGMDLHRRRSVLVRMSETGEHLETVRISNDPEYLREVMTRAGEAPEVVLEAAYGWYWAADALAELGATVHLAHPLGVKMFGLRRVKNDERDAADLADLLRMGRLPEAWIAPPATRELRGWVRHRAKLVALRSGLRCQIHAVLAGAGVQVPMSDLFGVSGRELLTTAALTVESRSRVESLLRIIGALDFEIDLYTKLVASRLRTDPGYHAIQAIPGVGPVLAAVFVAEIGDITRFHRPAELASWAGLTPRHHESDTTVHRGRITKQGSRLVRWAAVEAVQRVPARTRLGQRRDRVAERRGHNIGVVAAARDLITLVFYGLRDHHVRCLPTKAAP

SEQ ID NO: 365295 - protein, 358 aa, unidentified
MDQVIIGVDPHKLPVTIEARDSREVLRATGRFGTDTQGYRQLLRAARQWPQRVWAVEGANGIGRPLAQRLLADGERVLDVPARLAARARVSGTGQGRKTDATDAHAIVMVALRDTGLRELSSDAGLMVLRLLCDRRDEISRARAQALNPMHRLFLELLPGGAPVKKSTGQYKAMPARVRPRDLAGKTRRRMAAGELAGLARLDAKLKAMKAELKAAVQASGSHLMDIHGIGPAGAARILADVGDVARFPDRNHFASWTGTAPIDASSGEHTRHRLSRAGNRRLNHVLYMVGIAGSATTPPAGPATGASGSSPGPPWKPCGACAGACPTWSTASSPPTPPHGQQQHQIRQAREGTRGRL

SEQ ID NO: 365296 - protein, 364 aa, unidentified
MKRKVYVGMDVHKETIQIAILPSNTKALVKEQQIKHEEGQIKKFIQKLKSEGTEIHCCYEAGVTGYPLYRYLKTLGVNCIIAAPGKIPRQSSDKIKTDKRDAIKLARLLRSGELESIHVPSEEDEAVRDYLRSRDSLRLDLGRNRQRLMKFLLRKGITYSTTKYWTASHYKWLNNLHFENEILQATFNDYYSRVRVQEENLKAMDQKIREIAESEPYREKVGILRCFRGVDYLTAMFLLSEVNDFKRFKTAGSFMSFLGLVPGEYSSGPKRKQTSITKTGSPRLRRILVEAAWQHRFPGTGSKVVVARRVGQSALVVSLAEKASLRLHKKFKSMQLRGKTPQVMITAVSRELSGFLWAAMNLVA

SEQ ID NO: 365297 - protein, 425 aa, unidentified
MNETPPFACTIGLDWADQKHDLWICPAGSSKSEHLRLDQTPEALHQWVAKLRARFDNQRVAIGIETSRGPVISGLLAYDFIVLFPVNPKALKDYRAAFSVSGAKDDRTDAMLLEEWVRLHRDKLKALEPDTELTRKLAGLAENRRHLVDERTRLVNQLHSALKTYYPLVESLLERQMTHPMATEFLIRWPDLEALKKTRAQTLRAFFYKHNSRSASLIEQRLQAVQQAKALTTDPAIVEPARGLVSALAGMLRPLHKSLGHLDQQLQHAMDQHPDAALVRSWPGAGPALAPRLLVAFGTHRERFGSATEVAQFYGIAPVVQQSGNTKTVHMRHRCPKFGRQTFHENAACALKKEPWAKCFYESHKNKHDGKHHQACRALAYKLVRIYFRCWKDRKPYQPDQYLQALQKHGSPLHKSLADQPPKPL

SEQ ID NO: 365298 - protein, 389 aa, unidentified
MGSSLHLNTPAACGEHGTMFVAFELGKAQWKLGIVVPGKARLSRYVIDGGDAEAAWQLIAKARARAEKQLGGPVRVMSCYEAGYDGFWLHRWLLARGVDNQVIDPASLQVNRRKRRAKTDRLDLEQLIGALIRLLWGDRLACKVVHVPSPAQEDDRRAWRERERLVKERTAHINRIKGLLHGQGVRDALPRAKAFGGWLGSQRTGDGLALPAHLVDELKREHGRLMLVEAQIGEIEAQAEAAREAAAPSPLAARINQLIELKSLGPVSSQTLVGEVFFRDFKNRRQVGSYFGLTGTPFDSGDKTREQGISKAGNPRARTAAVELAWLWRRHQPASTLSRWFEERVGHQKGRVRRIAIVALARKLMVALWRFLEHGVVPEGANLRAAPHG

SEQ ID NO: 365299 - protein, 367 aa, unidentified
MSESYEGKQVVGIDLHRRRSVLVRKTEMGETLETVRISNDPEYLRQVMARAGEAPEVVLEAAYGWYWAADTLAELGAHVHLAHPLGVKMFCYRRVKNDERDAGDLADLLRMGRLPEAWIAPPATRELRGWVRHRAKLVALRSSLKSQVHAVLAEAGVQVPMSDLFSPGGQHLLAAARLSVESRARVDSALRLIINVDFEVELFAKLVTNRLREHPGYRAIQQIPGVGPTLAAVFVAEIGDVTRFPGPAQLASWAGLTPKHHESDTTVHRGRITKQGSRLVRWAAVEAVQRVGEHTRTGAVRERVAARRGRNIGVVAAARELVELVYYGLRDGHIRRLTPPQPHTPPQPHTPPHIPPQPHTPPGRSAA

SEQ ID NO: 365300 - protein, 348 aa, unidentified
MKYYIGLDAHSTTSTFAVVDENAQCVLRETVKTSEQSLVHVINKIHGERHLTFEESTISQWLYIQLKDKVDNLLICNPTYVAKKQGAKTDFRDALHLAQELRTNHLQPVFHDTSHWMEIRVTVSGYSDIVEEIVRFKNRLKAVFRAEAIPTDENSFYKNKIRIKELKNPAAKFVAEKLFDQIEFLESEKDKYKEVFEKNRKKYRPIRNLMTIPGISIIRANIIAAIVCQPARFENKHKFWGYCMLVRHIQESGGRIYGNKRFFGRRELRNVFLGAAENVMRLDGELRDQYDALRAKGVDHKDAKISLARRIASIALCLLKNNDKYNENYREYLKERKKLRKEFFESNL

SEQ ID NO: 365301 - protein, 337 aa, unidentified
MKYSGIDLHSNNSVVTVTDEEDRIVAEKRLPNDLAKILGLLMPWREEIAGVVVESTFNWYWLVDGLQAAGFKVHLANTTAIKKYEGLKHSGDESDARYLAHLLRLGILPTGTILPPEQRAVRDLARKRMQLVRSRTTHILAVENITARQHGARISSNQVKRLSAETVDQMPLPADVALAIKANVAVITTLSAQIELLEKRLQEKVRVRAEYGLLTSVPGIGQVLATTILLETGPIERFAAAGNFASYARCVDSVRTSNGKKKGEGNTKNGNKYLAWAFVEAANFALRYCAEAKRFYERKKARTNSVVAIKALAHKLARACFHILKERKPFDVTRCFA

SEQ ID NO: 365302 - protein, 344 aa, unidentified
MDHFAGLDVSVKETSICIVDDRGRIVKEVKVASEPEGLLKVLGNPAYRFRQIGLEAGPLSQWLFSALAEAELPVVCVETRHMQAVLKAQINKTDRNDARGIAQMIRVGLYRPVHVKTLRSQKLRMLLTHRKLLQSKAIAIENDLRGTLRNFGLKVGMVGKVRFEARIQELVENQPDLAVLVEPLLIVRRTLREQIVILHRRLLAIVRDDEVCRRLMTIPGVGPVVSLTYRATVDVPARFRKSKSVGAVFGLTCSRHQSGEVDWSGEISRCGDEMMRTMLYEAAQSMMHSKKWCWLKAWAMQIAKRRGMKKAIVAVARRLAVIMHRIWVDGTEFRWTREQAAAAA

SEQ ID NO: 365303 - protein, 349 aa, unidentified
METIIKQSAGIDCGSKELVVSFGQLYINGSFYCRNTKAFTNTTKGFDELVQWITTVHNEDMQVHYVMEATGVYHERLAYYLAANGYYVSIVLPNKVNAFAKTCSSKKQDDCQASKVLAEFGCVKQLDLWQPPHQLYANLKQLTREKHQLQQELTLIHNQLHAEETKAITSLSSIKRMKARLKLLEKQILEVEKEIVNLIDKEESIKERIENVCTIPGVGLQTVITVIAETNGFNLVRNSRQLVSYAGLDIIQKVSGTSVRGRAHISKRGNPHLRCCLYFPAFTAVKYNLPLQKLHNRIVEKQTIKMKGYVAVQRKLLMLIYTLWKKNEPYELPIKFLEQPVEAALTELD

SEQ ID NO: 365304 - protein, 401 aa, unidentified
MGRAVPVTSCTVIVAVDVGKNEFAFSVTDATRKVLCKPQLGRAMTAPAMRGMLGEIGRVLPVDAAVKVGIEAAGHYHRPLLESALWPAGWELLELNPGQVAEQRKVLGKRTIKTDAIDLTAMTELVLAGQGNPRVGAAGLVFGELKAWSAHRISRVGIRSALKTQLLGQLDRSFPGLTLALSDVLGTKVGRLVAAEFSDPARLASLGAAKFIAFGANRGVQIRRPTADKLISAARDALTTRDSAVARTVMAADLLLLAELDTQVETATGELAPPLLTVPGWGPSRVGDYGGAMGDPTRFSSPRQIYRSAGLNPIQYESAGKRRDSRISREGSVELRRALINLGIGLWLSDPAAKDYGAGLKARGKKGGVIACAMAHRANRIAWALIRDQGTYDPARWARED

SEQ ID NO: 365305 - protein, 416 aa, unidentified
MLFIGDDWAEDHHDLEIEDQDGHRLARARLPEGLEGITRLHALVARHAPAVWADLPPEQVAGQVVVGIETDRGPWVTALRAAGYQVFAINPLSAARYRQRHSTSGAKSDAGDAHVLAEIVRLDRDHHRAVAGDSDLADAIKLLARAHQSAVWERTRQVLRMRSTLLEYFPAAVQAFADLAAPDALALLGRAPDPDRAAKLTRSQLVSALRTARRHHVEVKADMLLAVLRAPALRQPGTLQGAYAAVVTGQVGIIAALNEQLAGLHEVMAEHFGRHPEADIYLSQPGFAVVLAARTLGEFGDDENRFASSRARKNYSGQSPITRASGKKSVVLARYATNRRLGAALHLQAFAALGASPGARAYYDALRARDVGHHAALRQLANRLVGILHGCLKTGTVYDENTAWQHHQITTQTVAA

SEQ ID NO: 365306 - protein, 461 aa, unidentified
MSTNGKKKMSRVAKLPNEFEQINTNAAGIDIGAQKHFVAVPPGRDPQGRDVRHFDTFTTDLYALADWLQHCGIETIAMESTGIYWVPIFEILEQKGFHVRLVNPRSIKHAPGRKSDVVDCQWIQQLHAYGLLTGAFRPEEDISVLRAYHRQRTMLVNHAATHIQHMQKALEQMNLKLTNVISDITGSTGMKIIRSILAGERDPQKLAQHRHARCKKSLQEIQKSLHGNWRDEHLFALRQAVELYDFYQGQIQACDKKIQAQLCRFENRSGTGKLPPPSDKRNRSTKKLSFEAREHLYRMAGVDLTQVVGLDTPSVLTLVSEVGLDMSRWPTAKHFASWLGLCPGSKISGGKSLSSKSKPSANRAAHAFRMAAYSLHRSQSAIGAFLRRKKAQLGAPKAITATAHKIARIFYTMIKTRTEYKDLGVDYYQNRYKERMLGNLKRKAKAFGFTLVDQNQLVIEN

SEQ ID NO: 365307 - protein, 324 aa, unidentified
MICGVDIASSSLAARIGRDGIAATFANTTDGIAQLAAFCQSHEVELVAMEATGGYEQRSFAQLSEHGLPVAVLNPRAVRQFAQSMGALEKTDAIDAGMIAWYAETKRSQPLCLAPATQLELRARVTRLRQLTEVRTAQSNQQRLVTNATVRKGFSAMLRFLDEQIEELEQAIAALIDADPLWHQLNRAFRTIKGVASRTVSRLMAEMPEIGTLSNKTISKLAGLAPLANDSGKRQGRRAVRGGRAAIREILFIVGSVVARYEPDFIAFQQRLRAAGKPPKVVRIAVAHKLLVRLNAKAREVRTGLPLTKGTPACLQFGKSQLCS

SEQ ID NO: 365308 - protein, 407 aa, unidentified
MAPVMIGIDPHKASHTAVAIDGAEISLGELRVRASSTQVGRLLAFAKTWPDRIWAIEGAGGLGYLLAQQLVADGERVVDVQPKLAARVRLLATGSSNKNDPNDARSIAIAALRSPAVREVHAEDHAAVMKIWVRRQRELGSARTQLACRLHAVLCELVPGGCSGMIYAAKAASLLDEFEPGGAVAAARYELARQFVDDLRRIDEQMRDTRARIAAAVTASKTTLTEIFGVGPIVAATVIGDASEVTRFASRDHFAAYNGTAPIEVSSGPRKVYRLSRRGNRRLNHAIHMAAVTQIRNRHSEGRTYYDRKIAEGKTRKEALRALKRRISDAIFAHLQADARRAADARGKVGPGGQPGNDSVASAAGSHPEHRLFGQATPEPAISLRRPPRRSPGAQPGPAIKKARRVS

SEQ ID NO: 365309 - protein, 342 aa, unidentified
MALKIVYKICCGIDVHKTFVVACIASTDSKGVTTYEHHRFSTYTKGLKDLLQWLLKHNCKDVCMESTGKYWIPVYNVLENDCTIVLAHPKYVKAIRGKKTDKRDAKWIADLFKHDLVAGSFMPPADIRQLRDLMRYRFKLTCFMSSEKNRLQNCLTVSNIQLGNVVSDTFGKSAQAILDKLLENPADTSFDLEPLVYKSLKKKLPELRDAIDGYITPEQAGKLKVIKAHYENLESRKAELEELILALAAPYQQELAILQTAPGIRSDFTAIGIISEIGTNMEAFPSAKHLCSWAGLTPTNNESAGKKKSVRVSKAGCYIKPLLVQCANAVITSKKHPEIRNR

SEQ ID NO: 365310 - protein, 437 aa, unidentified
MISQERWFAGIDWASQKHQVCLLDAAGKILGERQFAHSGTGLAELCDWLVATSHGQPANIAVAIEVSHGPIVEILLERGFVVNALNPKQLDRFRDRFTVAGAKDDRRDAYVAADALRTDPQCFRTLAPAEPLIVELRAWSRLTDELQHERTRLTNRMRDELWRYYPQALQLTDDFASDWFLALWQLVPTPDKARRLRESSLAQLLKNHHVRRITAADALRLLRQPPLVVAPGTTEAACAHIRSLIGRLALVNRQLRQAQTKLDTLSSQIADAGDDTPGQSNEPRDAAILLSLPGVGRIVLATLLAEAAEPLKSRDYTALRALSGVAPVTRQSGKRTLVVRRLACQRRLRDALYHWARTAAQFDPSMRQRYHALRQRGHSHNRALRTIGDRLLAIACAMLRNATLYDPHHQNGEGPNQPSPLRTRAVIGSPACTAASV

SEQ ID NO: 365311 - protein, 441 aa, unidentified
MFTFPSLARKVVFCLKKAALLSALFVGIDIGSRSHVVALLDFVSQKPLLRFEVTNNQPGAVELAQRLKEFLQSRKDLSRLVIALESTSFYGIHIANYLSSCEVLAPFHTLVYCLNPKVIRNYKKSFIDLGKNDAIDAFVIADFARANRITTQPWRGSQFLALQRLTRHRLHLAKALTREKAYMLSNIFLKFSEFAMLEPDEQPFSNSFGATASSVLTDFLSTEEIIEMPMEDLIHYICEKGHHHFPAPADTASLLKQAARNSYRLDKCLYEPLTVSIASSFTVISTYKAEIKAVNKAIEKTLRGLDPNAYQCLLSIPGIGPVMAAGILSEIGYIDAFHSQEALAKYAGLVWRENQSSRFTGEDTPLSKAGNAYLRYYLLEATSHVKNHCSEFAAFYQKKYAEVKTHQHKRALALTARKLVRLIFGLLAKHQLYSSNRVGQA

SEQ ID NO: 365312 - protein, 466 aa, unidentified
MKKAGKSSKTGRRAVPMALQAIRPMVAGIDVGSREHWVCGPARADGEPNVRVFGTTTAQLEELVDWLAEQGTESVAMESTSVYWIPLFELLESRGIEAVLVNARQLHNVPGRKTDFHDCQWIQLLHSCGLLRGSFRPGHAIVAMRAIHRQWANLVEERTRCVQWMQKALDQMNVQVHRGVTDITGTTGMAIIRAIVAGERDPVRLSLLRHHRCQKSVEDIARYLTGTWREEHLFNLTSALQLYDAIEKLVAAHEARLLDAVAALQSEERKDAKVPPHPNPTKEKSIQSRGDQTARTALWRLAGFDLTRIDGIGIGGARIILTEVGLDLSPFPSEHHFVSWLRLCPRRPISGGKPLSKRRNALGANRIAGALRMAASSLQRTKTALGAAYRRIARHKGANVAVFAIARRLAQLVYRMMRYGQDYIDVGEQAYDRQFEARRLAGLKEAARSMGYSLTAAPAQAQVPAG

SEQ ID NO: 365313 - protein, 313 aa, unidentified
MSTNNSIIYIGLDIGKTSLQVNLQNQNFSLPNSPAGHRKLIRRLKALAAPLLVVCEATGGFERHIVAAFHAAAVPVAVVEPARVRHFARACAQRAKTDRIDAQLLTEFGRRTTPGAQAPLSKSTALLRELVRHRLQLQDMMQTVSQHSRHLTVPALRKQNALLLRQLRTHLGKLQLQIDALLAEDAELQHKAQSLQQVPGVGLKTATALLAELPELGTLNRGQAASLAGVAPHARESGHWQGKRFIGGGRPMARKALYMAALVASRYHPTFKLFYAQLRQRGKPGKVALVALMRKLVILLNTLLKNHSIPLAN

SEQ ID NO: 365314 - protein, 346 aa, unidentified
MENIALDVHKKYTWARVEDSEGRELYASRLAHSRGCIKNFIGRWTPGCSVAVETVGNWYWVVDEIEAGGGKPQLVNARLAKLMMGNVNKSDKLDAKGMNRLQRTGTLPTVWVASSAVRDARELPRTRMVLSRQRTQLKNRVHATLSKYGHVVDEVSDAFGKRGREIINELLTKLPPHTGQALQHVLDQLDEVVKNLQAIERDMIGAFSPCSQTALLKSLAGVGEILAVVIWTEIGIIERFNRAEQLASYSGLVAREHSSGGTFYRGAVRRDVNVYLKWAFVEAANSSILNRERSNYQHIDRLYQRIKGRRGHQRAKVAVARHLAEATFWMLKKGEPYREPMLSTQR

SEQ ID NO: 365315 - protein, 372 aa, unidentified
MPTMTQPEPAPQHDPFATVSEEITGGVDTHKDTHTAAALDAAGRLLGSRQFPTTTAGYGELLAWLRRFGTLAQVGIEGTGVYGAGLAQHLHLAGVAMVEIDRPDRKTRRRQGKSDPVDAEAAARAAQAGRRTGTPKHRDGQVEALRVVRIARRSAVAQRADTQTRIKTLIVTAPDSLRAALRELTDRQLIDVCAAKRPDRATAGDPRTATVIALRSLARRHQQLTVEIDELDTLIAPLTETINPVLCALLGVGPDVAGQLLVTAGQNPERLRSEAAFAMLCGVAPLPASSGRTQRHRLNRGGDRQANAALYRIVLCRLRWDPRTRAYAQRRTTEGMTKKEIIRCLKRYIAREVHTALLNPHPSSIPASTSAA

SEQ ID NO: 365316 - protein, 402 aa, unidentified
MNCVGIDVSKGKSMIAVMRPFGEVVVSPFEVRHTANELSELAGLLKSLDGETRVVMESTGNYHAPVAWLLHDAGLYVSVVNAMLVHDYGNNSLRRAKTDKKDAVKLANYGLDHWLILPRYVPEEDTRLMLKTCYRQYQQYSKVQTMLKNNLISLLDTTFPDANRLFTSPPRADGSEKWVDFVATFWHCECVCGRSEKAFTTQYQKWCRKHGYNFSEDKALDIYASACRHFGVIPKTDTAKLLVEQAISQLQTTSSALAALKQEMQSLAASLPEYPVVMGMFGVGPTLGPQLLAEIGDVRRFHSKKALVAFAGIDAPPYQSGQIDVRSRSISKRGSASLRRTLFLVMSVILQCAPIDEPVYQFMDKKRSEGKPYRVYMMASANKFLRIYYASVKAYLESLEHD

SEQ ID NO: 365317 - protein, 406 aa, unidentified
MNQSTLQRPNSFWCGIDWGGRFHHLCVLDGTGQQLLSRKVAHTVDGLAVLVGLIASFTGAVRIAIERAEGLLVEYLQHHCDAEIYCVSPKISARARERYRMAAAKSDEFDAYVLADTLRHQYAQWRPLAVPSPLLAELTAVSRDRQRILDMQVDTENRLRSILDAYHPCPLHLFSALDRDITLSFIRSYPTPVQAGRITAARMGAFTSRHGYSGRHKPETLVARMQPHLLSASDGTVAGKALAAKAFTEQLALLNTHLRAHDKRLGELLEAHPDTPIFTSFPGIGPVTAAVLISEMGEERSRFPSAPSLLAETGLAPVTKVSGRTGQVRFRYAANRRMRHAIDWWMFVAVREDLWSADIYQHARAAGHPHHRALRGLGARWCRILWRCWHDHNPYDPAIHHRATAA

SEQ ID NO: 365318 - protein, 393 aa, unidentified
MYLVGIDIGKLKHSFCLLEKETGEILVEPVFFENSRDGFNVLLSSFKHLPQKDILIGMEDTGHYNLALLKFLLDRNYQVALINPIATNLTRKMQGGISKNDKLDTLTICDVLSSNQRVKSYRISKYSSFDLYEQKLLTREHHNLKEEENQLTNRLQKCIDVVFPEFNSLFKSKYGIVYMNILKEFGSADAIAHADIRTIRKCFDTGRGKHISLTAEELKEAARNSIGFPSSSEATQIKHLVARIELIKEQIAEIDKKIEEFSIQNNSPILSIPGISHFSGTSILAELGDIHNYSKPSQIIKFAGVAPLTYESSQFTAQHTAITKKGCKYLRKTLYQIITPVIQYNPVFRKFYLLKIAQGKGHRCAQGHCVRKLMRVIYHLLSTGTQFDPALLR

SEQ ID NO: 365319 - protein, 338 aa, unidentified
MKIMTIGIDLAKNVFAVHGIDEQGKAVLVRPSVRREQLLELVASLVPCVIGMEACSGAHHWARAFAALGHTPKLMAPKFVAPYRMAGRRGKNDAADAAAICEAVQRPNMRFVPIKNVDQQGTLCLHRVRQGFVEERTATINRIRGLLSEFGIVLPKKADTVRRQARAALEDLPGWANCAIGELLSHLHTLDVRITEYDTHIRHVAQADARSRRLMQMPGMGPITASALVAAIGNGHEFKCGRQLAAWVGLVPGQYGTGGSVRLGYITKAGDPYLRTLLILGARSVLATASTKTDRLSRWACSVHERRGYGKALVAIAAKNARTAWALLAKGEAFAPLP

SEQ ID NO: 365320 - protein, 356 aa, unidentified
MEQVKQLDFSGQKIFCGIDVHKKSWKVCIRSEQMELKTFSQKPSAIELVRHLRKNYPLANYQVVYEAGFCGFSPQREFSKEEVSCMIVHPADVPTTDKEKKRKSDAVDCRKLSATLSDGKLTGIYVPGIEQQDDRSVIRTYQQFVKDQTRCKNRIKGWLSFQGISILDDDDDNKYWSNNFIKWLKELSLTQSARISLDLLIQSYEQTRKIVLAATKQVRVLSKQERHKEKIKLLRSIPGIGQIAALLFTTEIGDINRFKTFDQLCDYIGLVPNVYGSGERETILGLTNRGHHKLRETIIEASWVAIRLDPAMTMAFNEFTKTMKKNKAIIKIGRKMINRIRFVMKNQSEYIMAVVE

SEQ ID NO: 365321 - protein, 402 aa, unidentified
MAYCGGLDWGSAEHGVCIIEHDSGKIIARFPVAHDAAGIADLMRRLARLARPADLPIAIERPSGLIVDALVAAGHPVVPIHPNVVKASRPRYRAAGGKSDRGDPYLLADLLRTDGHRFRRLMPCSDEIKALRALVRGRDALVAQRLVLANQLRALLDSFWPGAVAIFADIDSPIALAFMQRYPTPDSAARLGEKRIKAFMAQHRYCGRRSASELLARLRRAPPCLAGDSEADAKGELVRAWAAVLTVLVAQIAELASRIEHTIGELPDGKIVTSFPRAGRICAAQILAELGDVRERFQAEDQLAAEAGVCPVTHQSGKSRGVVFRWACNHRLRAAITCFADNSRHSSPWAADIYQRARGRGCDHPHAVRILARAWVRVLWRAWQDRTLYDPARHRLSRASAA

SEQ ID NO: 365322 - protein, 400 aa, unidentified
MLKTSFSSFLGIDISKDKFDAHCIDMNGEKQFYLSCSMDRTGFEKLVNCLEDLSVNKEALLIGMESTACYHINLFSFLLADGYTAIVINPLLISNFVKMQLRKTKTDKKDALVIAQFLLMHVETLAQRSISPQISDLRDLSRQRESLLSQMTALKCDMKRILTIIFPELEKVTGVFTKSILKLLCRFPSAHNIVQADPAEITQLLIEHSMGKNSSKAAETIIKAAHSSIGTTSPAREVILKQKAEVLIHLDGHLKELTAVMVELCRSGMGDDVDITTSMRGIGEKTATNFLVEMGGDIRQFKDHKKLIATAGIDPAIYQSGKHYGQGRITKRGNRHLRRVIWLMTIRVIQFNDCFRNYYKKRIQDGLPFKKAVLATAHKLLRVIFAMLTQKTFFSYEVKS

SEQ ID NO: 365323 - protein, 343 aa, unidentified
MKLFIGLDVSLAKTAVCVINEHGKIAKEAQVPSEPQAIVDFANTLDGVVAIIGLEAGPLSQWLHRGLTDARLDVVLMETRQVKGALKAMPIKTDRRDAEGIARLLHLGWFRPVHCKSVSAQEVRALLSARKAIQQGMITLELSLRGLLRNFGLKVGTISRGQFDARIRELVDGNAMLQAAAGPMLRARASLRQELAGLERQVRLLAKDDAVCRLLMTMPGIGAVVALTFRSAVDDPGRFSSSKKVGPWVGLTPSRNQSGERDVIGGITRAGDANLRRALCQAATVMIHRGRSTWLRSWAAQVAKRRGAKRAMVALARRIGAILHRMWKDGTEFSSVPLLAKST

SEQ ID NO: 365324 - protein, 357 aa, unidentified
MRIIGCDLHTRQETIAMLDTETGEVVEKTLQHEGEKVREFYSALPRPVQVGIEATGSMLWFLNLMEELGIDSQVGHPAKIRAAEPRKQKHDRRDADLLLKLLMENRFPSIWMPSKELRDLRALLCHRHQWVRTRTRVQNALQAMALTNGLRRGKSLWSQEGQHAIASLPLGPHAAHRRTALQALYKQLDADIKALDKRVLEQALERPEARRLMTHPGVGPVTALATDVFLGDPVRFEDAKALASYVGMIPSEYSSAGRQRLGGLSKQGNPLLRFLWCEAAIHAVRRDPLLQRFYRRKLVQKGMGKARVAVARKLGIRLYIMLRDQIDYEEFCRRGQMRQKNGAARAGIPEVGYGPSL

SEQ ID NO: 365325 - protein, 343 aa, unidentified
MQAITTIGLDIAKSVFQVPGIDAAGQVVMRRQLKRRYVLAFFQKLPACVVGIEACASSHYWSRELQALGHTARLMPPAYVKPYVKRQKNDMADAEAICEAVTRANMRFVPTKTPEQQSGLMLHRTRHLLIRQQTSVINAIRAHLAEFGITAPVGRRGVEELLRVIADPSDKRVPEIVRSCLAALGSQLLSLKKQILEFDRMILAWHRNNQTSKRLNCIPGVGPLLATALVASVGDPKSFRSGRSFSAWIGLVPKQHSSGGRERLGSISKQGDRYLRSLFVAGALAVIRYAKLHGTDHRPWLTALLARRPTKVAAIALANKLARMAWALMASGERYNYPVALRP

SEQ ID NO: 365326 - protein, 340 aa, unidentified
MNATTYGLDVAKQLFQMYWVDAQTGEIANRRFRRDELISFLAQRSRGRVALEACGSAHWWARKIKALGHEVVLLHPKFIRPFVQTNKTDAADARAIWTAVHQPGMRTVAAKTEDQQAMLALHRMRSLLIKFRTMQVNQMRGLLYEFGVSFRAGRVAGLTEIRAHMAELEDALPATMITSLQDQLTRIDAIELDIDQLESKISFWHKKDEACRAIAEVPGIGKLTATALVATIGDAKAFKSGREFASFLGLVPRQTGTGGKIRLGSISKRGDPYLRTLLIHGARSVMCHAKVPTSWQKAIQARRPANVVAVAMANKMARTAWAILARGSTYDKHYVSLRPE

SEQ ID NO: 365327 - protein, 473 aa, unidentified
MIKSVGIDLGGIGEHKVRCLDEKAQMCDGFSFETTRAGLAKLEERVFSNGSNPVIIFEPTGLAWLLVAVYLKSRHPDSRLVRVQAQKVVALRKYLNRSSKSDKIDSLTLAKMPFIDPEKLEEIYFPPAKIYAIQRLARQRRRLENEIAGRKKRIGSIVDGHFPGIRSAFSDPWSAHARAFLRSRLNPLAVVRSGEKALCAFLSKARKHCRIEASVESHGVYLVCREVAALYKASSSIKTIDNDFFSALQDEISRELRLMEIEETESAAIANRLEKLYLEIHPSDNLRTIPGVGDHTAPVFLATIGDPARFRSQSSFANYCGIVPGANQSSDSEAKGLRMTKAGPAIMRWALFQAGYIGRSHDPQLACVYYREMVHNGKNHMQAMGAVMSHMSARVLAVLREDKPYELRDKDGRLVSREEARKIILTRYQVPEEIRRQRRRRKTPGSPNLQKKLREMLVPRVYEAADAHQPVVT

SEQ ID NO: 365328 - protein, 393 aa, unidentified
MIYIGIDVAKDKHDCFITNSEGEVLFNAFTIPNNADGFHDLFQKISSLTNDFSNVKVGLEATGHYNYNLLGFLIDKGLPTFVINPLHTNLFRKSLSLRQTKTDKVDAHTIALMMMSGVNLQSYSNTSYHNEELKSLTRYRFDKVQERAKLKTSISRLVNILFPELEKLVPSLHMVSIYALLAEFPSSAQIASCHLTRLTNLLANASKGHYNKEKAIEIRNAAKHSIGSNMPAKSLELKHTIRLIQELTSEIDEIECFIKSIMDEIRSPILSIPGINYRMGAMIIAEIGDFNRFSSPDKILAYAGLSPSTYQSGQLDGCYSHMEKRGSRYLRYALFNATKFVCIWDNQFSAYLAKKRSEGKHFYVYMTAAANKFLRIYYARVTEHLNLFTTTTA

SEQ ID NO: 365329 - protein, 339 aa, unidentified
MREVTTIGLDLAKNVFQVHGVDHAGAVVVRRALRRSQVLAWFAKLPPCLVGMEACATAHYWGRELRRLGHEVRLIPPAYAKAYVRRNKNDAADAAAICEAVSRPTMRFVTIKTEQQQAVAGIHRVRDLLIKQRTMLRNQLRGLLAEFGVVAAQGRRGLNELLAILSDPEEQRIPSPLREGLMAIMETWRGIERKLEEIDRQMVAAGRADATCRHLITAPGYGPILSSAMAALVIDPGAFKRGCDFAAALGLVPRQDGTGGKVRLGPISKRGNGYLRRLLVNGATSLIKCQRARQDPWVAKLLASKPRKVVAVALANKLARIGWALMTRQEDFRSRLAAA

SEQ ID NO: 365330 - protein, 390 aa, unidentified
MFIVSIDIAKRNHEATLIDHAGKVYGKSLRFANTIMGFNKLMDFVNSYVGEEEVEFGMEATGHYWLALYAHLRNNGYTLHVINSIQSDALRGLYIRQTKTDSKGSFIIAEVIRFGRFSETDVSSPDMHAMRELCRHRFFIVDSVLDIKRKVIALLDQIFPEYETLFTNTFDKTSLELLSEATTSKEILALDTQKLFEIINTASRWHFGMDKAVRIQETARNSFGILLSTSSYALLIRQYIEQINFVEAQIAEIDTEIARLLAGFDTQLTTITGINTTLAAVILSEIGDVRRFESSAKLAAFAGIDPAVKQSGDFNGTHCKMSKRGSPYLRRAIWLAATVAAFHDPAVSILYQKKRAEGKSHGTTMGHICRKMISIIFAVMRNNTPYLTAI

SEQ ID NO: 365331 - protein, 340 aa, unidentified
MTQHKIIGIDLAKNIFFLFEINHKGKNLSRKKLQRSKLLSYIANKAPCTIAMEACSGAHYWAREFSQFGHEVILYAPQHVKTQRRKQKNDYNDAEAIAEVALYKRPHPVPHKSVEQQDIQSLIRMRRLLVTERTRIVNQVRGLISEYGIIMPKGAAAFRKAIPEILENDENQLSCILRELLSHQYERYLYIDEQVKWFDDKLNQTAKQFENAKRLMSIPGFGPLTSQAVAVWLGSGQQFKTGRDASAAMGLVPKQDTSGDKVVLLGITKRGNTYIRSLLVHGARAALRRAKFKSDNLSKWMLELQERRGPNRAAVALANKLMRIAWAVITKNEEYQPTQS

SEQ ID NO: 365332 - protein, 311 aa, unidentified
MTKIICGVDVSKHRLDAHVVPSGTVGSFDNDATGIGALAQFCHQQGADFVVMEATGGFERQAFLLLWQAGFPCGLVNARSVRRYAEAMGILEKTDRIDAAVIARFAIAKELKPTPPPTQAQQRLNALVARLRQVTSDLTVQKQRRSCAMSEEMRTSIDEVIALLKRQTKSLAGEIGSLINDDPLWSQLDVALRTKGIADRTVARLLAELPEIGIYSNRAVVKLAGLAPLAKDSGAKAGQRHIRAGRAGIRSILYLVADIVRRFDHSLADFHRRLTAAGKPKMVVRTAIARKLLVRLNARAREARACYALAT

SEQ ID NO: 365333 - protein, 361 aa, unidentified
MKEEQATAGRRSVVGGVDTHKDLHFAAVVDEHDRLLGSESFPTTRHGYKQMLLWMRSFGELVRVGVECTGSYGAGLLRYLQQAQVTVLEVTAPDKSDRRKRGKDDTLDAYNAAHAAFAGVRTVTPKTRDGMIESLRVLKVCRKTAISARRVALQLIHNTIISAPDELRESLRAMTRMQLIRTLAAWRPDLSDYRNPTSACRIALKSLGRRYLELHDEIADLDVMIATLVDELAPDLVSRNSIGYESASQLLLTAGDNSDRLQSEASFAALCGVSPVPASSGKVTRHRLNRGGDRAANSALHIIAIGRLRTDARTKAYVAKRVSEGHSKLEAIRCLKRYIAREVYYVIRQRNRQITQTQISP

SEQ ID NO: 365334 - protein, 362 aa, unidentified
MNSSKYVAMDVHTATISVAVRDAAGKLIMESVIETKSSTILQFIQGLRGDLYVTFEEGTWAAWLYDLLRPHVTNIVVCDPRRNALLNEGSKSDRIDARKLSELLRANLLRSVYHGENGLRTVKELSRAYLTIGKDLTRVMNRVKAIYRGWGIPCAGKSVYHPHHREEWLRKITQASVRRRAELYYEQLDVLVVLRKQARQELLAESKKHKAWKLLRSIPALGPIRVAVLMAIVQTPHRFRAKRPLWKYSGFGVVTHTSADHRYVNGQLERSKRPVSVRGLDPGHNHQLKYLFKSAAIQASTAKGPFQEFYEALVAKGMRPEMARLTLARKIAVITLTVWKSMPTPRLCRLDQVSSLLPSVIR

SEQ ID NO: 365335 - protein, 317 aa, unidentified
MPAEEQWIGIDVAKAWLDVARSAEEPVQRVANDADGIAALVADLRQRPPRLVVLEATGGYETAVTAALVAVGVAVAVVNPRQVRDFARATGQLAKSDALDARVLALFAQRIQPPARPLPDAVAQDLAALLARRRQLVEMRTAEGNRRAGLAPRLRPALDAHVVWLSQQIADLDRELDRALRDSPVWREKEALLRSIPGIGPVVARTLLGEVPELGRLDRWQVAALAGVAPLTQDSGRHRGKRRVWGGRASVRAALSMAAVTATRCNPIIRALYRRLHEQAGKPAKVALVACMRKLLTMANAILRDGLPWSTAVPLAA

SEQ ID NO: 365336 - protein, 388 aa, unidentified
MKKNSKNETMKSKRETKKVAELEASWMSLNEREANTLVIGIDLGDRTSAYCVRTLGQQMVKEATVATTATAMLEAFQGLRRQRVVIETGTHSRWVAQLLELMGHEVIVANARKLKLISENNQKSDKVDARLLSKLGCIDVDWLHPVYQRSQAAHSDLLLARARQALVDVRTALINHVRGSVKSFGSRVVKCASERFVGVARVTLPEALKPALSGVLATLEEINEQIYGYDCQIEHLCNTKYQEAAKCLLQVNGVGPVTTLTYVLTIENKDRFEQSRDVGPYLGLIPKKRQSGQRDPQLGISKAGDEMLRKLLVNCAHHILGANGEDSDLRRWGLELVRAVERKGKKGARKLAAAAVARKLAVLLHRLWVTGAKYEPLRNRGAQQAPAA

SEQ ID NO: 365337 - protein, 427 aa, unidentified
MSVTQNEKIRQVTDTTMVIGVDIASEFHWARAFDWRGLELGKAVKFENSAEGFNFFLRWVSELTVEQKKDSVMVGLEPTGHYWFTLAAHLQGGDFKLVLVNPYHVKRSKELDDGHPSKSDKKDPKTIAKLVLEGRYVYPYIPQGLYAELRVTMNCRWRIRKELASLQNQIQRWLKIYFPEHSKVFGRFTGAGSMALLHSAPFPSDLISLGVEGISGIWKQMKLRGIGRKRAQRIYEAAQTSVGCTTGMEAARMELQILLEDYDAKLQQYERVMQVVENLCSQIPAVAELLKIQGLGLVTVAGLFAEIGDIRRFESPRQIQKLAGLAITENSSGKHKGPTEISRRGRSRLRAILFRAAIPLLAKNREFQLLHRYYTTRQNNPLQKIQSVIAICCKLLRVFYALATKGCAYSPEKMLADIQRNQPLKAA

SEQ ID NO: 365338 - protein, 343 aa, unidentified
MAIVILGIDLGKNVCSLVGVDEDGAVVLRRRMRRQTVLTFAAKLPSCVVAMEACCGAHHLGRLLTAQGHTVKLMSPEYVRPYVKAQKNDDRDAEGIAEAASRPTMRFVDLKSQEQLDLQSLHRVRSRLVGVRRTLLNQLRAILLERGHIFPQGRRKFEAAIDTLVADPACEISSRIRQLVIDIRSEWQALDSRIEALNGEFVAIARHDETARRLVTIPGVGVLNATALVAAVGNGAAFRRGRDLGAWLGLVPKQHTTGGKPKLLGISKRGNKYLRMLFIHGARAAMPSLSASQSPLGEWLRGLLARTHRNIAIVALANKLARIAWATLQRKTSFDLRHLAVAG

SEQ ID NO: 365339 - protein, 340 aa, unidentified
MTSQVYHLGADISKATIDCHLLPADTASGRAKNATGTSFRVANTPAGYADLDARLRSKIDTGARVLVTAEATGGYERGLHHALTGAGIPVAIVNPKRIRDFGKALGQLAKTDKLDARLIARYGQTFNPRPTPVPSPARQILRDWLAFRTQLAGEIAARAQQRKAYTDPALCALADEELRHLRAKIKDLDRQIAALLEAPAEPEIAATVQILRSFTGVGPIVAALLIAHLPELGTLNAKQIASLAGLAPFARDSGEKRGIRTIFGGRAPIRHALFTVFRVGLRYNPVIRDTFDRLTAAGKPGKVAMVAAMRKTLVILNAMVKTNTTWRKPQPKAMPMPAAA

SEQ ID NO: 365340 - protein, 374 aa, unidentified
MNGSLTSFMLNPITALTEQVIDNKAQGTKKAKRIVLGIDVHLRGYQVASKEDNQAIGAVHNFGNQSEVLLWIEKLKRGAEQIEVVYEAGPLGYSLYRELSAQGISCRVCAPDSSVQKRTRRKTNAIDARELAGRLFNYLNGNQQALQLVRIPSIEQERRRLKSRQHDQLVKERKRLAAQGNSILLSQGWGSMKNWWRPRIFERLSQVVVPEIKELLEVWLELLHKLDEKIQQAKAQQKRSQKGPRPKGLGAGSLEQLESELLDWKRFRNARKIACIAGMVPSEWSTGEGQRLGSITKVGLPAVRRILVEAVWRMQRLQPDYEPFKKWRAALEGKNAASKKKAVVAIARQLIVDLWRLKTGRVSAQELKLVMVGG

SEQ ID NO: 365341 - protein, 381 aa, unidentified
MKKDSIARLQVTKSQIRRMAAKQRLTVGLDLGDRSSRYCILDEAGEKASEDQLPTSKAGLDMLFAKMAPCRIALEVGTHSPWVSRHLAAMGHEVIVANPRKVRLITQSVKKNDRMDAEQLARLARVDPKLLAPIRHRGPEAQADLAVIRARAELVEGRTKLINAARGLTKPMGERLKSCDADTVKESMADGLSEATQKVIRPLLKSVEVITQQIKVYDQQIQEIEKRYPETKLLKQVHGVGPLVSLAFILTLEDAERFEHSRDVGPYLGLTRKQRESGESAPELGISKAGDELVRRLLVQAAHCILREDAPDSDLKAWGLTKVGAGAGKKGSKSRKKKAVVAVARKLAVLLHHLWVTGEVYDPQYNRKAIEASKRTKQAAA

SEQ ID NO: 365342 - protein, 391 aa, unidentified
MYSDGSKHSSFSVPNNRNGAKIIVDRVTSVLLLQDIPQVVIGMEATSVYGDNLMRFLRESGSLGRFERSLHMLNPKQVKKFRDAYSDLPKNDHVDSYVIADRLRFGRINKEVYMDDYKYQALKMYTRARHQLVQELTREKQRFLNTVFISFSGLTQEKIFSNKFGATSMALIEEFSSLDELAYMSTDELVDYIRKKGKNHFENPEEIAEAVQRAAKNSYRPPQVIADAAKQMLAISMNTIRLLQKQIKEYDKAIEKMLEAFSQTLTSVKGIGNIYAAGIIAEIGDINRFPSQASLAKYAGLVWTQHQSSDFEAEDKRMIQGGNHHLKYYLCEAANALRRCDPEFKRFYALKYKEANKHNHKRALALTARKLVRLVYTLLKTNRLYIPPEEY

SEQ ID NO: 365343 - protein, 349 aa, unidentified
MVTIGVDTHKVTLAASAIDAAGRELDARTFRNDRQGHASLLRWARAHGTERRFGIEGSGSYGAALARLVSDAGETVVEVPAVLTQRERRHLRRPGKSDSGDALAIARVTLREQGLGPVQMAGIAEDLKLLVDARDQRISERTRAANRLHAYLVVLAPGPAAQIHNLTAASHLAAARRQIKRRSGTRAELARTEWARVRTLTAEVLELECRIRSLVRASGSNLPTIRGVAAITAAKLIGETGDPRRLRSSPAFAALSGTAPIPASSGQTSRHRLNRGGNRQLNRALHTIAVVQARTDPRAQAYVTRRIAGGKSRLEALRCLKRHLADVVFRTMVADGVGVRGLSSEALTT

SEQ ID NO: 365344 - protein, 334 aa, unidentified
MHYIGLDVHKESVPYYIKTAAGEVVEEGRLEATREALESWAAAQAPWSGLMEATLFSGWIYDTLAPYAEDLAVGHPAAMEAITRAKKKSDRLDCDKMADLSRANLAPRVWMPPRELRELRRLLRFRRRLVEQSTWNKNRIATALMELGEPYLKTKIHTKKYFYPFLDELDVSESDVLLLTASRDRMEDSLAVARMIEQRLLEHPRLAERTARLRTIPGVGAITALTWALEIGDPARFSSIDRAVSYCGLCARLNESAGKSKRGPLSKQRNAHLQHVLIEAAKLAPRWNDELARLHAREIERGHRNRATIQVARKLVALLLAVDRRGTDYEPRQG

SEQ ID NO: 365345 - protein, 342 aa, unidentified
MRIIGCDLHAAQQTIAMLDCDTGEISGRTITHEGEQVRTFYAGLPPPVVVGIEATGSMRWFLGLMSELGITCHVGHPAKIRQAETRRQKHDRRDAALLLELLREGRFPAIWMPTPELRDLRALLLHRHQWVRIRTRVMNGLQGVALAQGLRRGAGLWNRAGQATIAALPLDPHAADRRSALQDLYEHLNIQIDELDHRVRVQARERPQSVRLMTHPGVGPVTALATEVFLGDPARFPDGKAVASYVGMIPSEYSSGARQRLGGITKQGNSLLRLLWCEAAIHAERSDPILRRFYRRKLQQKGVGKARIAVARKLGIRLWILLRDQIDYDEFCRRGCARATER

SEQ ID NO: 365346 - protein, 264 aa, unidentified
MQQPNYLIAGVDIAKETFCAHIQRTDQKAIFKTFKNQRGGFSSFLKQLPDECVVVMEASGPYFLPLAQYLHDHKIQVSVVNPLAIKRFMQAQLKRSKTDKVDAQGIAEYGKRMDLVFWKPKADNIQKIRELNALLERYQRQLTACSNQLASLQSAGIKEELCQELINQEIGYYRRLLRQVTDQMENLVDKQTSNLRQRIETIPGIGKKSSLLLLVVCDCFENFDNYKQVISYLGLSPRVFESGKSIRARASICKMATAARAWVM

SEQ ID NO: 365347 - protein, 400 aa, unidentified
MNAVGIDVSKGKSTVAIMRPFGEVVAEPFEVSHTDAELRKLACFLEKLPGETRIVMEYTGNYWQPIAKVLHDAGLFVSIVNALLIYKYGNNSIRKGKTDKLDAVKIANYCLDRWTGLERYTPVDQIRQALKTCRRQYDQYIRLKVNLKNNLIALLDGTFPGLNILFKSAPRDMDGHEKWVDFAEKFWHRECICGNSEKAFTNQYKKWCAKAGYRFSEEKASSIYAHAVSQVNTLPMTDSIKRLVTLAVSQLNTIIETISVIQHEMLTLAAQLPEYPVVMRMFGVGPVLGPQLMAEIGDVRRFDRKQSLVAFAGVDAPPCQSGTFESKNRHISKRGSPRLRKTLFQVMSTIIQHAPADDPVFQFLDRKRREGKHYYVYMAAAANKFLRIYYGTVIAYLEKL

SEQ ID NO: 365348 - protein, 344 aa, unidentified
MPSIVGGMDIHRKQVTFDYLDVVTGEVKCGQIAPADRANLRAWLKRFAGAGGVRFAVEACTGWRFVTEELQRAGVEAHLAEPADTAAARGRKRRAKTDRADARLMRDLLAGGRLPECWIPPSQVLEYRALLETYHALRREHTAWVQRVHAVLFHQGAPVFRDLSRADAPQELAALARAHLSPAGQQQIALYLRMLEVTGGEIDALRAQLVSAAGQLRGARALAGQLYGVGPVTALALCCWLGGAGRFSSARKAVRFTGLDITVYSSDGKRSPGHLSRQGPPVLRWCVYEAGKAHARASAPDHDYYAAVKDRKGGKRAALSEARKIVRRACHLLAELGDDAFATA

SEQ ID NO: 365349 - protein, 335 aa, unidentified
MNQARMHVGVDVGKDSLDICYPNGDKEHIRNTKRCRATLIKKARTLGAVISFEATGPYDEALESECVASGVPAVRLDAWKTRKYAESQGMLEKTDSIDSEMIRDYAASLRPDQLHFVRERSAGYRKLKRAVSVRRNLLKAKALIASQLEGDLDAEIKSAIARAVASIDRQVERMDAVCVAAIRSDERMGAIAARFGQVVGIGPVLISTALASCPDIGSFTSKGIAKFAGVAPLENRSCTITKKPRPRRGRRDLRCALYMAAVSACRSNHRLRRTYEGLVARGIPKRAALIALARHIIVLMNYIAKYPDFNPEVDPKKAAQMALPKRRPGRPRKNP

SEQ ID NO: 365350 - protein, 415 aa, unidentified
MALKIVYKICCGIDVHKTFVVACIASTNDKGVTSYESHRFSTYTSGLKTLLQWLLDRNCKDVCMESTGKYWIPVYNILEKDCSIVLAHPKYVKAIRGKKTDKKDAKWIADLFKHDLVAGSFMPPADIRQLRDLMRYRFKLTCFKSSEKNRLQNCLTVSNIQLGNVVSDTFGKSAQAILDKILEDPADTSFDLEPLVFKSLKKKLPELRDAIDGYITPEQAGKLKVVKAHYENLESRKAELEELILALATPYQQELAILQTAPGISSDFTAIGIISEIGTNMEAFPSAKHLCSWAGLTPTNNESAGKKKSVRVSKAGCYIKPLLVQCANAVVKSNKHPEIRNRYLRIKKRRGHKKAIIAIARMLLTALYHILKNGENYNAELYRKSDLPPVDREITVEQALMIARNQGYKIKSATA

SEQ ID NO: 365351 - protein, 420 aa, unidentified
MEEISEEPAELVERVAALDIGKAMLVACVRVPHDTKPGRRRQEIRTFATTTRSLLGLADWLDCLGVTRVVMEATSTYWKPPFYLLEESCECWLVNAREVKHVPGRPKTDKQDAVWLAKLAERGMLRPSFVPPPWQRELRDLTRYRRTLIHERTREKQRVEKLLEDTQIKLSAVVSDMFGVSGRQMLEALIAGQRDPKVLAQLAQGRMRSKLGVLEEALTGHFRAHHGYLLRMMLDRIDALGAQADQLTGRIEELLAPFAYQVEQLDEIPGVGRIGAQELIAEIGVEMGRFPSAGHLVSWAKFAPTTKASAGKTKSSSTGKGNPWIGATIGEAAMGASKTKTFLGSRYRRIVKRRGKQRALVAVGNSILTVAYHLLLDPQARFVDLGVDFHDRLHPQRRTRQLIRELEHLSGKKVALHTVA

SEQ ID NO: 365352 - protein, 366 aa, unidentified
MVSVSHLAPIHLGLDVHKDTISVGVLRPDQQVPDVDRIAHDEASVRRLLARFPDRARLRACYEAGPTGFELARLLHRMDVRCEVIAPSLIPRAPGDKVKTDRRDCRRLARLHRAGELVAIRIPTVGEEAVRDLCRTRADMVEDLTRARNRLGKFLLRHGRPWRGGSTRTHAYQVWLRSQRFDQPAMTQTFGHYLAVVEVRNQALDAVEADLVGWCGRPPFDWQVTRLAAYRGITRLGALTLAAEVADWRRFAHASQFMGFCGLVPSEYSSGASVHRGRLTKAGNAHLRAQLVESAWSYQHRPSVGREIARRQQGLDPAVIARAWAAQQRLCVRFRTLAARKHTKSIVAAAIARELAGFLWAEMTAA

SEQ ID NO: 365353 - protein, 381 aa, unidentified
MTTTVTHNGHDTTPARVLFVAFELSEKTWKLGFTTGHGQKPRERSFAAGHQARLLQEMAQAKRRFGLPETAPVVSCYEAGREGFWLHRFLEAQGITNSVVDSSSIEVNRRKRRAKSDGLDVRKLLSMLMRFHQGERDVWRVVHVPSGEAEDQRHLHRDLETLKQERASTTARIKGLLSSQGLRLTTLNKLPEQLDVLRLWDGAPMPSGLRHRLLRVYAHHQFLSEQIAALEAERRALLETAHEASLEKIRQLMQLKGIGINGAWLLVMEFFGWRDFKNRREVGGLAGVTPTPYQSGESAREQGITKAGNRHVRWMTTELAWSWLRYQPESALSGWFRERFGSGGKRLRRIGIVAVARKLLIALWRFLKSGVLPEGAILKEA

SEQ ID NO: 365354 - protein, 350 aa, unidentified
MYATTVGVDLAKTRFELAISDAEYRVVRRERLTRARFVQFFANHSASLIVMEACGSAHYWARTLQAQGHEVRLLPAQYVRAYVRRNKTDAADAAALIEAARCAQIRPVPVKSVDQQQLQQLHRLREQCKQTRNARINLLRGSLREFGIVVPVGIERGVRAVREALEIADNGLPDALRPFLFEMLQELADLKERIAHIERTLADLTREDPIVREMQKIPAIGLLSATALRAAIGDIQRFPSGRHLACWLGITAREHSSGERRRLGSISKQGDVYLRTLLVHGARSALLAAKRAAQAGRPVDRLRSWALQTEQRCGYNKATVALANKVARIIWATWRYQRPFNGDWQSQARH

SEQ ID NO: 365355 - protein, 344 aa, unidentified
MGINEEKEVIMLYLGIDYHKRWSYFTCEDEGGRVKWSKKVRNDREEIEGLLNLEERYKAVLECGRNWGVMYDTLEDIGCIEKLVLANPFKTKAIAYAKIKTDKIDSKVLCDLLRANLIPLVWVPPKDIRWKKYIARNRAFLVSLKTMIKNRIHVIIDRNHLNSPSVSDIFGRYGRQWLYSISLPEEERRLLDNHLKMLEFLEEEIKGVERWLKDLFRGDRYVELLNTIPGIGKIFGVMIALEIGDINRFPDAKHLHSYAGLVPSTYASGNKVYHGRLIKYANKWLRWAFVEATLTAIRVSPFFRSYYERRLENKSTQASIISTARMLASVTYHVLKENREYREW

SEQ ID NO: 365356 - protein, 377 aa, unidentified
MVRRMVADKKRGLVKGSKMNSLVAGIDLGDRESLTTVLSPIGDVTDRFTFPMNEEGYALFASRVPKEARVAFESTIMAYPIMRALKGHGYMDVTVAHPKTLAWIVRSKKKNDRVDSLKIAKLHMAGMLPESHLLDRGQQIVRDLLVQRVKLGVEIGRLKSSMIGYLKREGVYGSLPKSTDNFSVRRRRAIRSLRFNDKRDLVLGIMMDRLEFLEGQCVPLEDSVRENAGLSDDVRILMTITGVDYYLASLLSSYIGDVNRFPSDDHLASFFGVVPTNRDSADVKRRGKMTKDGSSIARWALSVMVDTVKQHNPPIKDYYQSVKKRTGSGKLARVSTMRKLTRILYHMLKTRQHWKWENPQLTERKLARLVMGGGDVS

SEQ ID NO: 365357 - protein, 345 aa, unidentified
MNRTTIAVDLAKSVFQLSVADGDWRVQSRHRLTRAQLVRFFGERQPCEVVMEACGSAHFWGRWLCSLGFTVRLLPPQYVRAYVRRNKTDRADADALLDAARREDMAPVPIKSEQQQAIASLHRLRSAWMATRTARINAIRGILRELGVNLPLGARKVPATVLARLAEPASSVPASLQPALVTACAEIRELEQRIVETERQLARLAAELHVAARLLSIPGIGLLTATALVAAVGEISRFPSARHFASWLGLTPSESSSGTKRRLGGISKQGDRYLRTLLIHGGRAVLAAAHRYKEVDHLRGWALAVERQRGRNRAAVALANRLARIAWAVWRHDRDFESRPLQRAA

SEQ ID NO: 365358 - protein, 392 aa, unidentified
MLLDHPFDEQTAIHTQFGAIFISLELSRSSWLITSLSPGNGEKMSKHSVVAGDIAGLLARFAEFRGKAELRTGKRYPIIVIQEAGLDGFWIHRVLEGEGIESHVVDAASIATPRRRRRAKTDKIDGEALLRALLAYKRGEPRVCAMVVAPSSEEEDRRRVCRERQTLIGERIAHVNRIKGLLFSQGISGYEPLRRDRRTRLEALRTGDGRALPAHLKAQISRELDRLELLLEQITAVEAERDALLAAVSGDVRNQPEGPQPVAMLLALKGIGAEFAAVIWSEGLCRRFSNRRQVAAYAGLAPTPWRSGAIAHEQGVSKAGNPRLRTTMIQLAWLWLRHQRQSALARSFHEQAQHKGRRKSAIVALARKLLVAFWKYVTSGVIIEGAVMKNSA

SEQ ID NO: 365359 - protein, 409 aa, unidentified
MRIIGLDIHRAFAEAVAWDDGKLRRLGRVDMRRDLLTAFAEQLLADDVVVVEATGNASAVVAVLAPHVKKVVIANPMQVRMIAHAKIKTDTIDAGVLAQLYASGFLPEVWVPDEPTQALRRQVTRRNQIVRQRSRLKNIIQSILHSHLIPSCPHADLCGAKGRAWLVEQVVPEDERLAIERHLREFDRLGEDLKVIERDLARSALADEGVKRLMTIPGVDMVVALAMTAAVGEVTRFDEPQKLVSYLGLNPSVRQSGPGPAHHGRITKQGRGHARGMLVEAAWAAARAPGPLRAFFLRVRARRGQHVAAVATARKLAVVIWHLLTKGESYVWGRPSLHAKKLRDLELKAGYKAARGQKGAAHAYNSKSHRDEERRWVEQAETAYARFVTGWNPQGPKKVRTGAATEVRR

SEQ ID NO: 365360 - protein, 385 aa, unidentified
MKEQNFVPYEFDIFGGLDVDKKSIAVTFMNHEGVLQSFSVPYRAEHLLNYVSKHFAGKKVAFAYEAGPTGWGLYDRLTAEGHPCVVAAPSMIPKVPGQRVKTNRLDSQMLSEHLRGGQLKSIHVPTEPYRQLRHLTQLRDTFVKDVVAMKLRIKGLLLFEGLEFPPAPAGSQWSYLVRGKLKQLPCSGSVRFKLDRLMESLESSEKQALETIREIRRFCQQDAELSQAIKHLKSIPGIGEIVASHLLARTGDPDQITNVRQLGGFIGLAPREHSTGDRIARGGIMRTGDGRLRSKLIQAAWSAIRHDPELREFYRSVSQRHPRDRAARKAIVAVARKLTTRIYAVLKQKRPYVVREKVNSAPLTQEETSPQGTTRRLKEPGEIIS

SEQ ID NO: 365361 - protein, 370 aa, unidentified
MKPNFEPGKWFMQCVGIDIAKGTFTACLCMYEFDQGCSTAPVVFNNDKTGFNQFVKWSRREALKGYPLRYVMEPTGVYYEQLASHLNKLSLNVCVVLPNKAREFAKYEGILTKTDDMDAYTLGMLGCLDKRLKPWTPPSPIYRELRQMTRFVADINKVKTELRNHLEALTHSETAEKSIVKHYNKLIDEIDKQLVSNQKAIREKIKQEPGLSERIDRITTINGVGFITVATVVAETNGFALITNRKQLTKYAGLDVPAHQSGPVDPKRHISKQGNVHIRTALYFPAIVSTQCNPQMKDFYGRLCARNTQSKMIGVTATMRKLLLLIYSLWKSGEKYDPTCDKPACNRQKKEAETTGGQPHGIDVGTLAEE

SEQ ID NO: 365362 - protein, 354 aa, unidentified
MSVYVGIDVHRKRSQVAVIDADGEVLANRNVPNGVEPILSVIGGLPAGTPAAFEAAFGWGWLVGLLEDYGFDPHLVHPLQCKAIASARLKNDKVDAAILAQLLRADLLPEAWIAPPPVRQLRALLRHRAQLVRLRTLLRNRIHAVLADHGQRPAGGCWSGPGRAWLASLPLPAVSREVVEDDLALIEALQQPIDRLDWEVHQRAKAEPAVKVLTQLPGVGPFTAMVILAETGDISRFGSARKLAAWAGLTPTVRGSDRTVRHGHISKQGSAWLRWILCEAAQTAKRHPDFAATYQAIARRRGKKIATTAIARKLLARAWHLLTDAQITAPQALTPAVPTDPEGSPRPGRARKTA

SEQ ID NO: 365363 - protein, 347 aa, unidentified
MVADELDYVVGVDTHRDEHVLAVVVAPAGAVVARRAVAANARGYAQALRFADSYASGRRIWAVEGAGHYGAALARYLSGRSETVLEAGRSPRGERRLQGKDDGLDAVRAARAALGHELASPRAGQRREALRLLLLARRSAVDVRREALVQLRSVIATSPDRLREELRRLPVQRLLDRCSRLRRSKTATPDELAVRLVLRTLARRIEAATIEAAELEREILAHVRALAPQLLDEPGVGPIVAAQLLVAWSHHGRVRSEAAFARLAGVAPLPASSGQTTRHRLSRGGDRQLNRALHTVILHRRQHDPATKEYIARRVAEGKSRRDATRLLKRYIARHLYRLLDSQANMA

SEQ ID NO: 365364 - protein, 424 aa, unidentified
MKVTYQTCCGVDVHKSFLVATIIKTTGGIEPSYQKKRFSTFNNSILEFRHWLLDNDCRDVCMESTGKYWIPVFNLLEDEINVVIANPKWVKAVKGNKDDTKDSKWIGDLFRLGLVKGSYIPCKKIRILREYTRYRYKLVSCRSSEKNRYQNALTVCNVALDSVVSDIFGKSSTSIIDYLLEQSGTSINHEEIASKLLRSLKSKEDAVIGSVEGYQMTDAQKYRMRLVRAHMDYITAGINDIDSMIESLISSDPDYENAVQLLCTIPGVKRDSAVTIISEIGIDMSQFGGPKRLCCWAGLTPGSNESAGKKKSVRITRAGVYLKPALVQCAHAAVKSDKSPYYKKKYESLVKRRGKKRAIIAIARMILTAIYQMLSTGEQWNPSDLYKIDMPEALVEKQKAKAIKQAKKLLQREGILPLDEPLAS

SEQ ID NO: 365365 - protein, 389 aa, unidentified
MAEASRAAVAYLGIDVGKRSHSACALDEGGAVVFRADLENRPADIDRLLDRAGARALVVVDQKRNIGALVLARALAHGNPCAYLPGYAEKQARGMFPGVAKTDAIDAEVIARTARGMPGALRSVAEEPEGAASLRILSSQREFAASARTRAKNRLRATLLEADPALERAVDPSRGWQVALLAGFGSAAGCSAAGWRRFSAAARRAGAPAAGARALWEALLASARSGRALPAGEDVAVRMLAREIAALDADVAELEALVADSLAGNEVYECLLTVPGIGPKTAAALVTSVDISMFRGHDELASYCGLAPADSRSGTSVRSASPQRGGNKQLKNLLIFSCNSLIGTDNRFGRYYDGCRARGMRHNKALKAVARKRLKVIYAIMRDAVPYSA

SEQ ID NO: 365366 - protein, 442 aa, unidentified
MGSSYAGVDWASEKHDVLVADETGEKLLAATFAHDEQGLRSLCGQLVRLGVGLVAIERPDGLLVERLLDAGLRVLALHPNQVAAARPRFRASGGKSDRFDAFVLCELARTDHHRFRVLEPDCDETKALRALTRGREDLVGMRTALTNQLRAELERFWPGPLGLFTDLNSRISLAFLERYPSPADARGLGAQRLQGFLRRQGYTGRKQPAQLLAKLRRAAEGRVGETELGAHRQLVLGLVATLTTLGGQIKTLDRQIASAVRAHPDGEIFTSLFRGPDSVICAATLLSEIGDCRARYLTGDALAGDAGQAAIAIESGKRKAARFRWACNKRLRAAFCTLADSTRHWHPWAQDRYAAARARGHDHQRAIRTLGRAWCRVVWRCWQDRVPYDPARHRGLQQHITVTIPTASPHTASARVIDHAATERMAAGTLAINAENQETAAH

SEQ ID NO: 365367 - protein, 402 aa, unidentified
MKASKQYLRFCGIDMAKQKHVACIIDQDGQYLLRPKSIRNDADGFGQILNCLKQTGRAKSILVGMEATGHYWYSLHDFLTRQGYTVAVLNPIQTAQQAKQAIRKCKTDKYDAFHIANLLRTGQYKAAVVPNELAMTCRQITRLRYRIVKQAAMIKQLVNSRLHPVWPEYEGLFSNKFGTTSMKLLQTASTPKELMELDLDDLGELIRKASRGRFGPAQTQKILHCAKNSVGMQRGHYGISTGIKFLLEQIEALEPVRKKMDAEVVKLTAKVPEYLFTLPGATELTVVSLYGEISPIEAFKKPSQLVAFAGLDPKVFQSGQYDAPRRRISKRGSPYLRRSLWQMAYRALCTEGDLRDFWRRKHHQNKHHLVAVTAVANKLCHIVWRIMTDRRDYIRKGYNPKS

SEQ ID NO: 365368 - protein, 400 aa, unidentified
MRVVFGIAVSKVSSEVAILVNGEKVHGYTIPNDAIGFTRLLGDLKTVHKPEIIFEATGVYSRRFQAFLEDNGYAYTRLNPLEAKKQLDSLRVRKTDQIDAEKLAQSQFVLNRKPTYVQEEVYQELRDLSRFYQNLTEDIVRAKNRLHKVLQVTFSELETILSTPTGEQYWNLVIAFPCKDFVLDLSKNELSKSIRQSTSKRISDKRVAYLAEKLTVLANQSYCAVKKTSPILEEVHYYAKELLRLSEQRQAVLDQMVELAQPLPEYDILLSIPGIAETTATSIIGELGDIRRFQSANQINAFIGIDLRHYESGNFLAKEHITKRGNPYARKILFKCIHNIASASHTNPCHIADFYEKRKRQSQTTSTKPHTIASIHRLIRTMYYLIMHNKLYDYASTQNR

SEQ ID NO: 365369 - protein, 456 aa, unidentified
MGHARARKVPAQLVEDEDYQIRYERVAGIDVAKAKADVCTRLPPAREGGRRVSRVEEVPATAREVLALAGRLLADGVQLVVMEATSDYWRIWFYLLEAAGLRVQLVNSRHARQLAGRPKTDQKDAQWIARLAEMGLLRPSFVPPPEIRALRDLTRTRLMLVRDRTREWQRLEKLLEGALVKLSSAVHSMARTKTARNILEAIAAGERDPEKLAALAHGGVKGGHAAVRQALDGMTLGGHHPRLIRVHLDHITLLDRSVAAIEDEIETALDAIPGAWGISADGVPSPAPGPDAAALDAVGRLAEIPGVSPDLARAIIAETGLDMTRFPTPAHLAAWAGLAPVARQSGPRQRKPAKGQGDAYLKGYCTQASLGASNTDTFLGERFRRLSRRIGGIRAQCAVGRSILVIIWHLLSDPGARFRDLGPGWHERKADRDRKIRTHLRQLQALGLDVTVTPAA

SEQ ID NO: 365370 - protein, 353 aa, unidentified
MEYIAFDAHKHYTLASVPRADGHVVREERIPHDRGALHEFLRARERGAPVAVETVGNWYWIVDEIEAAGCRPKLVHARKAKLMMGAINKTDRLDARGLNQLQRNGTLPTVWIPPGELRDQRELPRTRMVLVRQRAQLKNRIHATLAKYALHDIPVADLFGVRGRALLRERLTQLPAHTAYATGRLLAQVEQLTHEVDEFEDRLASVFKPSAAIQQLMTLPGVGLILAVVIALEVGDVSRFPSAEKLAGYSGTTPRVHASGGKTRYGRLRPDVNRYLKWAYIEAANAICLGRRRKPHRHVSRLYERVARRKGHATAIGAVARHLAEATYWMLSKEQPYREPAASAVSSTRDQRG

SEQ ID NO: 365371 - protein, 470 aa, unidentified
MAQCNAGVSRKLGKSRAALTITHPNAAGIDIGSASHFVAVPADRDDTPVREFSSFTVDLNALADWLKGCGVDTVAMESTGVYWIPLFELLESRGFTVLLVNARHVKNVSGRKSDVLDCQWLQQLMSYGLLSGAFRPADQVCVLRSLWRQRAMLLKSQGRHVQHMQKALTQMNVQLANVISDVVGETGQKILRAIVAGERDGHVLGSMKNARIRASIDEIAKSLQGNWRAEHLFALKQALGAFDFIGTQMAECDREIEQQLQCLQAHEGEPAKGKQRGRARNAPKFDLRMQLFRMCGVDLTRIDGIDVTTALAVISETGADMSRFPTVAHFASWLGLCPGTKITGGKLMSSKTKRCGNRAAQALRLAAAALRTSQSALGAYFRRMCSRMDKPKAVHRRGPQARAAGLHDAHQGPGVHRPRSGLLRRALPPTRPASAVSACPEAGHEARRHSTTCLIRHSKTVAWNVFLERV

SEQ ID NO: 365372 - protein, 420 aa, unidentified
MPNIEIGVDSMVKENFIYVGIDLHKETHTAVMIDCYNQKLGEITFPNRPADFPKLVAKVKKCNTDGKTIVFGLENAYGYGRALAVWLIDKGYLVKDVNTAISHRQAKHRGAMYRKSDSDDAKAIALATLNMLDKLPDACPNDAYWSLGQLVHRRDNIMKQRTRLVNQLHEQLCIAYPSYKQFFNDISRPTALYFWEHYPSRKYLKGKSVEDLRAELVPVSHNKCSTKTCEKILDAVASDKVKNNAYQDARDMVTLSIVSDLQHYDSQLTEVDKMLEQMYKMLGCTLTTIPGVNVITAVKILAEIGDIKRFSNANKLAQFAGIAPLHLSSSGKGKDVATKQGNRRLQATIYFLAIQMVQISSKGTPRNPVVRAYYEKRKAEGKTSQQALICISRRLISVIYGMLKNGTEYRMPVVENAGEK

SEQ ID NO: 365373 - protein, 315 aa, unidentified
MTTSSGKFVGIDVAKDKLDIAVLGEKKASQVGNDEAGIAKLIKKLEMQEIELIVVEATGGYQRDVVLGLYEAGLPVAVVNPARVRQYARASGLLAKTDKLDAFNLAEFGKQMGPRRFEAKSEAGRYVSALLVRRRQLEDMLKAEKSRLRTVHTAMRASLERMIAVLKEEIKQLEKELDQFMKENEEWQAQEQILTSAKGVGRVTAATLLAELPELGKLDRKKIAALVGLAPMNFDSGKKRGYRKTKGGRMEVRNVLYMSTLVATRYNPMIQAQYQQLLKRGKVKKVALTACMRKFLTILNAMMRDKVPFRQTVIA

SEQ ID NO: 365374 - protein, 454 aa, unidentified
MQLVYRRCCGMDVHKESVTACLLLIDDDGEFRAEKRVYGTMTRDLQELAGWLKSQGADRIAMEATGVYWKPVWNILEAAGGFELLLVNAQHVKNVPGRKTDQKDSEWLADLLQHGLLRGSFVPPLEIRQLRDLTRMRTRVRQDLAKYANRIQKVLEDANIKLGTVASDVLGVSGRHMLKALIAGQDDPKQLADLARGRLRARIEALELALEGHFTGHHGFQLKTLFELLEFGEAQFNKLGIEIQRLITKLNAHAPMQAVADETPGPEPEPEPEPLPLTPPLPLTPKSRLQTAVELLKTIPGVDELTASMLVAEIGANMDQFPGPHHLASWAGLCPGNNESAGKRRSGKIRKGSPWLRRGLCQAAWAASRTKNTYLAALYRRLIARKGKKRTIVAVAHTMLIIAYHILKRGCPYQELGADYFDRLDAKGLQKRLVKKLTSLGFQVTLTPTAQPSP

SEQ ID NO: 365375 - protein, 355 aa, unidentified
MKQYIAFDVHKNYTLATVETEDGKKLLEGKVSHQHGAFEAFLGRCQPGGSVAIETVGNWYWVADEIERAGFRPLLVNARKAKHRMDNGNKTDRLDNHGMNMLQRCGTLPTVWIPTAELRDQRELPRTRMILVRQRTQVKNRILTTFGKYGWVLNDVSDPFGKKGRAFLEQHLPHLPAHTQAAVRCMFTDLDCINAQITALEARMNEVFASLPEHELLRSLPGIGHLLAVVIWTEVGTMDRFARAANFASYSGVVPRVISSGGKTRFGKLRSDVNRYLKWAFLEAANAVVMNAAKYPDRHVTQLYRRIKHKRGYQKAVGAVARHLAEATFWVLTKKESYREPESPTGKQARYAHES

SEQ ID NO: 365376 - protein, 413 aa, unidentified
MKKHTYRAQKVNSINWQQVKEQTLGEALVLAVDVAKSQQYALLTNQDHSKSWMMQWNHLEQTFYLLEQLKTLETPISVVMESTSTYGDSLRYQCRKAGFAIYQANAKKVHDAREIFDGVPSLHDAKSAWLIAKLHKDSITKLWSEPTNEERRMNALRLEYDLHQDQHLRNQNRLEAYMSRHWPEVLALMPLGSVTLEQLIKHYGSPQKVAAEAKQAALNMRNWGKTGLSAEKIAAVIASAITTLGEPCIEAECQFLIALASELEHSRLQKQEAKQALEALVDNDEGLREMGRVIGKVTTAVLVSLHLDPRRFTTPKSYQKALGVNLTEKSSGQINGRLRLSKRGSSVARRFLYMAALRLLIKDPLIDKWYKAKKDDRAKLKTVIALMRKLPLALWHIARGERFDASKLLKIAV

SEQ ID NO: 365377 - protein, 344 aa, unidentified
MKITTIGIDLAKNIFQIHGVDQYGKALVRKQLKRADMSTYFANLPPCLVGMEACGSAHHWARRLQGYGHTVKLMAPQFVKPYVKTNKNDMADAEAICEAVARPNMRFVSIKNIEQQAILSVHRARQGFVKARTAQANQIRGLLSEFGIVIPQGIHAVFKQIPDILEDAENELPGTFRQLIERLTDNLKDMDRQVNELEKQINLWHLQNEASRKLADIPGVGPITASAIVATVGKAQEFKDGRQLAAWMGLVPRQKSSGGKQNLLGISKRGDTYLRTLLIHGARSVIYHASNKAEPDSWLNKLMGRRNKNIAAVGLANKNARIIWALLAHDRVFRPDYTAAAAAA

SEQ ID NO: 365378 - protein, 310 aa, unidentified
MEILHPRCCGIDVHKASVCACISIKEAGVVEKHKRRFDTTTAQLRELVLWLQQQQVSKVAMEATGVYWKPVWNLLEEEFELLLVNPQHLKSIPGKKTDFKDGERIADLLQHGLLRGSFVPPRPIRELRDLTRMRATLAQERSSIINRIEKTLEDPNLKLGVVASDVVGASGRAMLEAVVRGETDPAVLADLAKGTLRNKIPQLKLALQGKITDHHRFMLRQWLDMLDLVDRKIALLEQQIVEHSRPFEAMIHTWMQVPGLRRINAFSLLAEIGADMSQFPSAAHLASWAAVCPGNRESAGKQSSGKIRCS

SEQ ID NO: 365379 - protein, 338 aa, unidentified
MKYKRIAIDTSKHVFTLHGVDAQERPVLRRNLKRAELEAFFGKLASTEVVMEACGGAHHWGRVLTRLGHRVRLIPAQYVKPFVKRAKNDRADAEAISEAAARPSMPSVAVKSAEQQADSMILRHREMLIASRTAAINALRGHAAEFGIIAAKGTAQVEALLHKLANEDAVPGVAKAMFAQMGTHIANLTQQIEILEKDLLALHKADPVSQRLAAVPGIGPITAITLSLSVAPEHFASGRHFAAWLGLTPKEHSTGGKPRLGKISKAGNERLRTLLVVGATAVIRHAKPGCKSASAWLLELLKRKPRKLAAVALANKMARIVWAMMARGEVYRSQPVAA

SEQ ID NO: 365380 - protein, 512 aa, unidentified
MILRPNLSNPPSRKAREPLPAAKRKQVQKRHAAPQKNPKKSSRRSKASRSLPVDAPSMPAELKQVNLNAAGIDVGATVHFVCVPQGRDSQPVRSFGAFTADLEAIADWLAQCGVTTVAMEATGVYWIPLFELLERRGFEVKLVEPSRLKHVPGRKSDVLDCQWIQQLHTFGLLCGSFRPDDSICVLRSFVRQRQMLVRSVSRCVQHMQKALTQMNLKLQHVLSDIIGVTGMAILNAILAGERDPRQLAKLRDGRCSNDEATIALALQGNWREDHLFALKQAMDTYHFYQEKLTEVDEKIQTHLEKFEDKSQGKPLERPTGTKKHRANEPAFDVRKHLYSMTGVDLTVVDGLEARTVLTVISEIGLDMSCWPTEKHFTSWMSLCPGVNKTGGRRESKSGRTRASSNRAAAALRMAACTLMRADCELGAYARRMRARLGAPKAITATARKLAIIIYNMLKYGKAYVDRGAEYYQEQYRATMVKNLKRRAKQLGFAVVEVTAQPVAPETTPTPPA

SEQ ID NO: 365381 - protein, 310 aa, unidentified
MEKVIEYPQVVETGCGLDVHKDIIVGTISRGNQSFETCEFGADTSSLTSLRDWCKQAGVTHIAMESTGIYWKPVFNILEEDFEILLVNARHVKNVPGHKTDKKDSAWLSKLLLSGLLKGSFIPPQDIRELRDLVRYKKKLIGQVSSEKNRIIKVLEDCNIKLSSVLSNVDGVTGTKIINAIISGERDVEVLMSFYRGKIKASREDFSKALTGRITPHHVRMLQLHKRRITETEFFIDEIEKEIEKAAAAYRVEIDLLQTIDGIGKDSAIAIISEIGVDMSKFPSEHHLASWAGVSPGNNESGGKKKVPKP

SEQ ID NO: 365382 - protein, 430 aa, unidentified
MKSNTQNAKIEAITEKTLVLGIDVGSETHYARAFDYRGIEYSKKPFKFSNTEAGFVTFKEWILDLKERHEKDKVVPGMEPTGHYWFNLGKFLQDNEMKPVLVNPHHVKKSKELDDNNPTKNDRKDPKVIAGLVREGRYMIPYLPDGVYADLRTASNIRFQLQAELTRIQNRISRWFNIYFPEYKTVYGKPDAKSGMLILKQAPLLEDILTLGIDGVNQIWRDAKMRAVGKARAKTLIEAAEHSVGSKEGAISARMEIRMLLEDYESRNIRLQEIMTLIEELVNQIPMAEKLLEIKGVGIKTVSGFLAEVGDTSRFNNPKELQKLAGLALVENSSGKHKGRTTISRRGRKRLRYLLFEVAMSLVAKNPEFRELHTYYTTRRLNPLKKMQSLMAVAAKLIRVFYVMLTKGVDYDPKKMVGDIKRPAVYLQAA

SEQ ID NO: 365383 - protein, 358 aa, unidentified
MVVGIDPHKNTHTAVAVDGATGAEVAAITVKARNPGHERLLVWARSLPTDEVLFAVEDCRHVSGGLQRFLLARGERMVPVPPKLMAGARRGGRRRGKSDPIDAAAVARAALRHPDLPAAHLAGAERDVRLLLDHREDLVGERTRMQNRLRWHLHDLDPGFSVPARALDRYVWLDRTEQHLEAMGRTVQVDIALDEVRRIRELTREVNRLERQIATLVRLLVPELLAIPGCAELTAAKLVGETGGAQRFRSEAAFAMHSGVGPLEVSSGERQRHRLNRSGNRQLNAALHRIAVTQKRIHPPAKVFLERKRTEGQGNREALRCLKRHLARAVYKTLLRNELRRQALLEETLADAALAATA

SEQ ID NO: 365384 - protein, 393 aa, unidentified
MEYGIYAGVDVSKESFTVCIRKPNGKIVFQGSFPQSSEGFQNFLNTINNLSTDSTPTVGMESTSIYYLNLFSFLIENNINTVVINPSAIKSFAEFKSRGSKSDRKDASIISEYLLYTKPEPSSKEKLTELKLLSREKEKLSKELSHLKDEILRCLFNLFPELERNYNVFTKGMLNFLLKFPSARKIKKAKRRTVEYEFNKAFEGRGKKPSFTANDIIELASKSIGIDSKALEEILITKINMLLTIEEEINKFDKLISERIEDIQVDKIDIITSIPGIGKSLATSFICEVPEIEIFKSSRSLVAFAGVDPLVKRSGQYVGRLGISKKGSRHLRRTVYIMAMNVIRFEGTFRRFYLRLRERGKTYMEAVVAVANKLLRTIYAMLIHRTLYSPNYS

SEQ ID NO: 365385 - protein, 406 aa, unidentified
MMTAEDRHVTGGVDTHGEVHVAAVLESGTARRLAVAEFPADTAGYVALREWMSGFGTLDAVGVESTGAWGAGLARSLRDNDVTVIEVDRPDRRARRFDGKSDPLDAEAAARAVISGRAAGVPKTADGPAEAIRAIEIVCYGATRDRTRAINQFKALLVTAPADLREHLGSVSFRRQLELARRFRNDYDDLVETQVRFALKTLAAKIAFLDDQITELEGRMNELVGQAAPALAGTFGVGPHVAAQLLTTVGDNPERLGSEAAFAKLCAACPIPASSGKTTRYRLNPGGDRRANNALHTIVLVRMRYHAPTRAYVARRTTEGKSIPEIMRCLKRFVAREIYNVITNPPTDLPTGHQIRQQRLQARITLTALANALNVAPTRISTLERGLTYSNDLAYQARDWLNETAA

SEQ ID NO: 365386 - protein, 387 aa, unidentified
MGWMPPPDGIEVCQAGDVARPATTEKASMEKVTIIGIDLAKRVFQVHAAAKDGRPVLRKKVSRSQLLGFLAKQPPAVVAMEACATAHDWGRAISGLGHDVRLVPPIYVKPFVRRQKNDAADAEAIVEAASRPTMRFVALKTEEQQARSMIFRTRDLLVRQRTQLVNALRGHLAEHGIVAAHGLAKVKVLATAMRDTGSLHPLVCELGERYLEHIARLDVEIAELDKRLRRWSKDDETAKRLQSMPGMGPITAAAIEAFAPPMATFKRGRDFAAWLGLVPRQHTTGGKPRLGRTSKMGQRDIRRLLIIGAMTVVRWAVRKGAAKGSWLARCWPRSHAWWWPSPWPTRWPVRSGRCSSRAKTIEDQRWRRPDRQAASAGASAMREVEER

SEQ ID NO: 365387 - protein, 428 aa, unidentified
MKDIYEQVKRGCGIDIDSLKLWASTFVTSKKGTIEWETKVFDNTVDGIEELIEWLKEKKTTHVAFESTGCYWQMLYSFLEDSFEVIVANPRQTKPLKGKKRDPDDAKQIARLLQMGSIIPSFIPPRNVRELRDLTRQHVNITEDIVRVKNRITKTLREASITLDAHLSDLFGVSGRAMIQGLIAGMPGDEIAELAKRRLRSKIPQIKDSLRFPLSDHYRRILFRYWKQFTFLEEELESLEKDLDEKMKPFLAVIKRLQTIPGCGMKAARGIISEIGNDMSRFPKDKNLCSWAKVCPGNNSSGGKRKSGRNSKGNRYLRRYLGEVAWAAVRTKGSEFRDQYLKKQSRLGKKKAIVAIMHKILRIIYHMLSKGEDYQTNYEREKRKDPRKALIGFKLKNISNEDLISELLSRGMSDIKWDWDSEENAVSQ

SEQ ID NO: 365388 - protein, 421 aa, unidentified
MNKIKPKRTKVVNGNVLIATIDGGKDKHYGYYRCPDGTEGESLPFWNNGRGFQEFWERISSAATAHGFEEIIVGFESTGPYLEPLVQFLRSKKGVRLVQVNPMHTKRLKELSGNSPLKTDRKDPKVIADIITLGHALTVVIPEGAAAELRRLTQARERTTASRTRLLNQMQSLLVLSFPEFLQVMKDISTASARYLLQHYPTAQDIVGLGESALAAVLRKVSRGKLREDRARALFEAANESVGIQEGRHSMLLEIRMLLDTIASYDRFIDQVETEMERQLELIPYSHIILSIKGIGAVTAAGLIGEVGDFTKFKTISEVMKLAGLDLYEVSSGKHRGKLRISKRGRSHIRKLLYLASLSAVKKGGVMHAWYRRALDRGMQKTKALVAVSRKLLGLIYALVRDHSVYVDNYEQQKPIYQEAA

SEQ ID NO: 365389 - protein, 350 aa, unidentified
MDLYIGLDAHSATSTAVVVDERGDIKLRETFPTSEANLVGFIGRLPQHATLHLTFEECHLAQWLYLTLVEHVDKLIVCNPVYLAKKPGAKTDFRDALHLAQELRTGHLKPVHHDGSRWIELRTLVSGYLALVEEIVRAKNRLKAVFRSHGLATDTEKFYTTPKRAKELPHESARFVAESLFEQIERLEEVKRGYRGFFEKNLKRYRPVKNLDSVPGIDAVRANVIVAAVCQPNRFRNKHQFWGYSMLVRHIQESGGRIYGNKRVHGRVELRDAFIGAAESALRTDTSLRAYYDGLRSKGVGDKDAKVALARKIAALCLCLLKNNNTFQNDYSEQQQRRTKARKELNLAAV

SEQ ID NO: 365390 - protein, 422 aa, unidentified
MSYCPVAGIDVSKRFSDMCILSPDNKIFAQEKIYHDETSINRANTLLQKAERLFFSKPVIVMESTSHYHLILFQFFSEHGYDVIVVNPLQSNSMKDFSIRKRKTDRVDAFKLAMMYRTKTLRPSQIPQTATRALRQLCRHRAELLNDVSSYKNRLTALLDQTFPGYDKVFSDVGGVTSCAVLVRFPTPTILLVEEESELVEVIAATSKSGYSFAKKKAGLLISAAQKAQTLGIHSCADETLIVCTIQMLRTLSESVLQIETAIDNLLAQIKEMRNNVSLLQSIPGVGSHSAALLLGEIGDISLFKKPKQLAAYFGLDPTERQSGSFRGTKNKLSKRGSPYARAALHMGVVNSICKRGKDSAANPVLLSYYEKKCKNKPAKVAQAASMHKLVFIVFAVLRDQKPFELKTPEQHAVEQGFVKAA

SEQ ID NO: 365391 - protein, 350 aa, unidentified
MSKGITVGMDMGDKKHNICVLDAEGEVLTRTTVTNTGKAIRKYFGVLEPCRVAMEAGTHSGWVSRILEELGYEVLVGNPRKLRVIWDSDEKDDDRDAEMLARIARFDPHLLYPIHHRGQKAQTDLAVIKARDMLVKVRSTLIAHARGTVKSTGQRISACSAEAFHGRLLKEMPAELMPALEPVMKSIEELTCRIRHYDKLLEKLCSEKYPETEGLRAIQGVGPVTTLAFVLTIEESSRFDKSRAVGPFLGLTPRRDQSGQIDKQLGITKAGDAYLRRLLVGCAQYILGPFGPDCDLRRFGLKLAARGGKNAKRRAVIAVARKLAVLMHHLWKAGANYDPLYQQNRKQKVA

SEQ ID NO: 365392 - protein, 344 aa, unidentified
MGEVITIGLDIAKSVFQVHGVDGLGVVVIRKRVSRAKMLEFFAGLPRCLIGIEACPAAHHWARELQAIGHTVRLMPPSYVKAYLKRSKNDANDAAAICEAVTRPSMRFVAVKTKEQQAALMLHRARQLLVRQRTMLSNAIRGHLSELGIVSAKGRNGTDELLEIIGKDADSRIPLAARSVLKVLASQYVAIGVEIASISKSILAWHRACEPSRRLEEIPGIGPIVATALVAEISDWMAFSSGRGLAAWIGLVPKQHTTGGKDKLGSITKQGNRYLRWLLVNGAMAVIRYAQKHGTKKHPWLGQLMARRPTKVAAVALANKIARIAWAIMVRGDRYREPALMPAA

SEQ ID NO: 365393 - protein, 437 aa, unidentified
MTKSSNLYVGMDVHKESIDIALADDAGLQEVRHYGRIGGDLPALDQAIRKLQGAGATLHFVYEAGPCGYVIHRHLAGKGLDCVVVAPSMIPNRSGDRVKTDRRDAQMLARLHRAGELSAVYVPHPEDEAVRDLTRAREDAKEAQTRARHQLKAFLLRSGIRYAGKTAWTPAHVRWIAGIKLEQPVQQIVFQEYVDAVTAASERLERVEGSLRDAVAGWRRRPLVEALQALRGVQLVVAATLAAEIGQIDRFDNPRQLMAYLGLVPSEYSSGAARRHGSITKCGNTHARRVLTEAAWAYRLPARITPIIAKRHDKVARSIRNVAWKAQVRLCKRYRSLRARGKEQNKVITAIARELTGFVWAVAREVSAVASQNGLSTGAPLRACGAPALRTCGYACGGARDNRSAVHRQGGAYRRMIPCACRKRGTVAVFGESSQTL

SEQ ID NO: 365394 - protein, 337 aa, unidentified
MEYFAGLNVSMAETHVCVMNRDGTVTYEVKVPSTPDDIAGALEQAPACERIVFETGRMAPMLYHGLGLLGLPIVCIESRQAYQALKSLATHKTDRNDARGLAHLARTGFFKPVHVKSLSAHALRSLIVARKKLVGQRVTLENQIRGLAVVFGVRLPRALTAAFIRQALRASEGIPGLSAAMRGLMAARTAVLAAVAAIDADIRRMVRASEACRRLMTIPGVGQLTALAFTAAVDDPRRFRRSRDIGAYLGLVPRRYQSGEVDYTGSISKCGDRRVRTLLYEAANVMLTRFKGSLKLKDWAFAIAKRSTMRKARIALARRLAIIMHAMLRHGTEFKPA

SEQ ID NO: 365395 - protein, 343 aa, unidentified
MEGYAGQQFVGIDLHRRRSVLVRMTEEGEQLERVRISNDADRLAAVIARAGEDPEVVLEATYGWYWAVDALREQGAHVHLAHPLGVKAFEYRRVKNDERDAADLADLLRMGRLPEAWIAPPATRELRELVRHRAKLVGLRSHCKAEVHAVLAKCGVQVLMSDLFGVEGTELLDRLHLPPAYAARVGSLRRLIESLDFEIDHAAGMVRGRLHRDPGYTAVLTIPGIGSTLAAVLVAEIGDVHRFARPEQLACWAGLTPKHHESDTHVHRGRITKQGSRLVRWAVVESVQILPKTTTIGAVRERVGARRGRNIGVVAAARRQLEFVFYALRDHHVRALGQQARAA

SEQ ID NO: 365396 - protein, 315 aa, unidentified
MDTVLRFAGIDVSKRFLDAHSDELGRARFPNDRDGVAALLEWLGGDAVVGLEATGSYHCLAAETLAGAGVAVHVYNPRQVRDLARGLGFLVKTDRVDAKVVCACLRLVESPFVPRSEAGKELREVSRQIQYLIRLRCDLKKKLAAPGLGAVVAESIARQIRSLNLEVRALEDAWKELLGRSPLHRERFELLLSVPRIGVKTARVIASELPEDLGRFSRRQLAAYFGLAPYDRQSGDSNRRARMLHGNSRLRQPLFTCATLAAFADPECRAFAQRLKAKGKHHLTVVCAVMHKLARRAIAVLLRNTPWEEERPVPA

SEQ ID NO: 365397 - protein, 403 aa, unidentified
MQVAQERCCGLDVHKKSVVACVITPEGQEIRTFETMTRDLLELGDWLGARGVTHVAMESTGVFWKPVYNLLEGRFALLVVNAQHIKAIPGRKTDVKDAAWIADLLRHGLLRGSHIAERPERELQELVRYRTRLVQERAQVVQRIQKVLEGANIKLSAVAADVVGVSGRAMLEALVAGEEDPQALAALARGRLQAKRDALAEALRGGVGPAQRVLLGSQLRHLDFLEAEIEQLGAEVSRRLRPFEDALERLDTIPGMGRRAAERVVAEIGTDMRRFPSAARLASWAGLCPGNHESAGKRHSGRTRPGNVWLKAALVEAAWGAVRARETYLAALYRRLAARRGAKRAIVAVAHAILVIIYHVLRDGTTHRELGGNYFDERDRQATVRRAVKRIERLGYRVTVEVA

SEQ ID NO: 365398 - protein, 391 aa, unidentified
MIYVGIDVAKDKHDCFITNSDGEVLFKSFTIANNREGFETLFQRIQSVSDDLTKVKVGLEATGHYSYNLLGFLLDNSLPTFVINPLHTNLYRKSLSLRKTKTDKVDSHTIASMIMSDVNLKSYSDTSYHNEELKSLTRYRFDKVKERAKLKSSVSRLVCILFPELEKLVPQLHIASVYALLSEFPSAHAVASAHLTRLTHLLSESSKGRYGKDMAIIFREAARNSIGSNMPAKSLELKHTIKLIRELTSEIDEIEIEIKSIMDEINSPILTIPGISYRMGAMIIAEIGDFNRFNSADKILAYAGMSPSTYQSGQLDNCYSHMEKRGSRYLRYALYNATKYVCHWDPTFAEYLAKKRAEGKHYNVAISHAVKKLVRVIYAMEKSGQVYNKAS

SEQ ID NO: 365399 - protein, 378 aa, unidentified
MTADLQVQAYESERILYMALELSNSKWRLALSDGVHRRQKTIAAGELLGLDEELARTQAKWGLEAARVVSCYEAGRDGFWLHRELERRGIANLVIDAGSIEVSRRARRAKTDRLDAEALLGKLLRYWQGERRVWQVVRVPPLEWEDRRELERERGRLLKERTAHRNRLASALVRHGLRVAIDGRFRARLEQLCLSDGSSLPAHVKAALERELERLELVETQLKALSAELKAALRNDKALKPAQRLLALGGLGPIGAWTLVLELFGWRAIANRRELSSLCGLVPSPYNSGSMTREQGISKAGNRRVRALLIQLAWLWLRYQPESKHSRWFQERFGGGSRRQRRIGIVALARRLVIDLWRFVETGVVPEGARLKEAIEAS

SEQ ID NO: 365400 - protein, 290 aa, unidentified
MRRTIVGGVDTHLATHQAAVLTSLGELVGSREFAATGTGYESLLTWMRSLGNLRSVGIEGTGSYGAGLARHLLDRDVEVLEVPRPDRRLRRQLGKSDPVDAEAAARAVLSGSRLAASKVADGPMESIRMLRVARSGALKARIAATNSLRSLVVTAPDSLRMRLRGLTRGQLVTVCRRLRVDGSVVGDPEQVAKIALRSIAERAHALGLETSSLDRELARLAAHAAPNTMALFGLGPDTAGALLVSIGDNPDRLRSESAFARLAGVAPIPASSGQTRRHRLHRGGNLTGPR

SEQ ID NO: 365401 - protein, 428 aa, unidentified
MPYKIAGIDVHKRMLAVVVSDVEVDGEYAFERRQFGSNPAQLRLLADWLLEQQVEEVVMESTAQYWKPVWAALERYWTPTCKKREGAGSMSGTPHLAQAQSNRARQGRKNDFADAERLVKRLVANELTLSFVPVPEQRLWRTVTRTKCQLTRNRVQLQNRLEALLEECHIKLSSLVSDLLGVSARRMVQALADGETDPAALAALANYHLRATQEQLRDALGACQELNPVYRRLLKLALEELQLIEKQISQLDQEIADLLRPYQDQVQRLAEVPGLGVDSAQQIIAEVGPTAATFPSAGNLSSWVGACPGDDESAGVSHSHRSPKGNRQMRRLLNQAANAAVKYKGGIFEILYRRYVPRLGHKQTIGVIAHRLCRLIWKILYQGVRYEERGPDVRKKSQRYRAARMIRELQSLGYRVEQANSQSADIPA

SEQ ID NO: 365402 - protein, 342 aa, unidentified
MSYHVGLDVSLKETKACALVSGGCVAAQGCVESSPAALAAWLGAHAPGAATIVLESGALSSWLCQGLRAHGLPAVIVDARLAHKALSGRANKSDANDAEGLAWLALTGWYRRVAGKSETARLRRSLLVARSQLCGQRRALENLVRALFRGFGLKVGSVGKAAFEARAWELLAERPELGPAVSALVATRRALLEQSSELEKQIKRAAQESATCRRLMTVPGVGPMTALAFVAAIDDPGRFKDSYAVGAYLGLTPRRHQSGEVDYKGRISKWGDALARHMLYEAANAMLVRTKAWSAPKAWAARLARRIGPKKARVALARKLAVILHRIWLSGGEFQWTRHTAA

SEQ ID NO: 365403 - protein, 311 aa, unidentified
MTLICGVDVSSETLDARIGPDGPAERFANTPEGIEALAAFGQAHGVALVAMEATGGYEKLPFMLLWAHGLPCAILNPRQVRHFAQAMGFLEKTDRIDAGLIAAFAAVKRVAPQEPAPETQQQLEALVTRLRQLTELRVAEKNRRRLVANGGVRASIGEVIALVSRQIRSLEAAVAGLINDDPLWRQLDQAFRSIKGVADRTVARLMAEMPEIGTLSNKAIAKLAGLAPLARDSGKSNGRRPVRAGRANIRSILFVAAEIVRRFDPDFTAFHAKLNRAGKPKKLIRTALARKLLVRLNAKARNARAELAFAP

SEQ ID NO: 365404 - protein, 334 aa, unidentified
MTATILGLDISKDKFHAALLKTQKKASVQVFENSWDGFEQLQHWLLKQSAEKVHACLEATSIYGHPVATYLYHQGHTVSIVNPSRIKGFAQSRLSRTKNDRADATTIACFCAALQPQAWTPPTPELAKLQGYSRRLQALEKMKTQEQNRLQISDPELTTDIQEHIEFLEQQMVSIKKRQQALIVESSTLHEQQQLLTSIVGIGEKTAVIILSEIGSIEQFTSARQLAAFVGLTPQEHQSGTSVKGKTRLCKIGNPHVRKALYFPALTAIRYSPQIQALRKRFLEAGKNKMQIVGIVMHKLIRIVYGVLKSGKPFEPQKLEFSPSHAGDTILAAS

SEQ ID NO: 365405 - protein, 413 aa, unidentified
MADETIHWFAGVDWGSAKHQVCLLDGAGNVVGEREFAHGGAGLTALCEWVVSMAGDPGTVAVAIEVPHGPVVDAVLDRGFAVYAINPKQLDRLRDRISVAGAKDDRRDARVAAAGLRTDRPLFRRVLAGDPSVVELREWSRLAEELQQERVRLGHRVRQQLWRYYPQLLALSDDVTAEWVLALWTLAPTPAQAARLREATLARLLRQHRIRKLDAPAVRGILRQPAITVAPGVTEAAVLHLRSLVARLRLANQEFHQAARKLEALCTALSQTQPGAQDSGPRDAAILSSLPGVGPVTLATLLTEAAGPISRRDYTALRTLSGVAPVTKRSGKSCIVIMRYAAQLRLRNAVFHWARVAVLNDPKCRSRYAALRARGHSYGRALRSVADRLLGIACVLLQRQVLFNPNHGAPTQP

SEQ ID NO: 365406 - protein, 339 aa, unidentified
MQDTKFNIYRHYIALDWSKAIVAMATMRDSGGKVEIQMFQPDTRIIKEEIKKYKGSKILTIEETTTSHWLYVELKESVDKILICDPYRNSLLKDGPQTDKIDAKKLCMLLRSDMLKEVYHTIEKEYEIRKLVSAYIDVVKASVRLKNQRSAIFRSEGKNHRKEKVLSDSSIKRFITQKQNELLEHYRETIERYEMEFKKIEKSNKTIQNLKTISGIGTKTAIMIYSTVIDANRFESKYKYWAYCGLAKKYKESGGKVYRSKPKRYSKLLKRCYKSSALAAINGKSDIREYYEYLLQEGLSIEKARHQISRYISKVSYAVMKNKIGYRAYQWRESKEKDS

SEQ ID NO: 365407 - protein, 341 aa, unidentified
MKKNLFFIGLDIAKADFAASIYQTPGQSIVTKEAIPNDRKGFEMLLLWLYDHHIDKKNCRICMEATGVYSQAIAYYLLFQGFPVSVEPPLKVKRAFDPVGHKTDPVDSKQIAEYAYRFQDELTSWKPRDEILEKIRQLLSVREQFTKQKVALDNSIQAYSKQRVQVTLIRKAQKETLNQLKKQIARIDKELANLIKQDPEIFQRANNLDSIPGCGMLLAAHLLVITENFTKIRNSKRLAAFVGIVPYQHQSGTSVFKRAKIRHFGPGPSRKLLRLAAQSVATHNATFRRYYLRKLDQGKPKPLVLNNIANKLLKIACTIIRNNTRYIKDYRSIHPMYLKSA

SEQ ID NO: 365408 - protein, 339 aa, unidentified
MNATTFGLDLAKRVMQVHWVETETGEMCRRQLKRGQLLEFFARRSPAVIAMEACGSAHYWGRKLKALGHQVRLIAAQFVRPFVKTNKTDAADAQAIWEAAQRPGMRWVAVKSEGQQAVLMLHRMRSQLVEMRTMQVNQLRGLLYEFGAELPPGRSAGLARIPEELARLEAALPAMVIDTVREQLARIGGLDQDIAEIERRLAAWKRDDVASRRLLDIPGVGLLTATAAVATIGEARAFKSGRAFAAFVGLVPRQSGTGGRVKLLGISKRGDVYLRTLLIHGARSVITHGKQHDAWLTRLLARRPFNAAVVALANKMARTIWALLAHERTYQRHYAAQAA

SEQ ID NO: 365409 - protein, 374 aa, unidentified
MEKVSTYVGLDVHQRDIVVAVLRAGEGEVLEWKVANEDRGVRRLVRKLVEVASGEVVCAYEAGPCGYALQRQLLGAGIECQVVAPSLVPVKPGERIKTDRRDARKLARLLRAGLLTEVHPPSEDDEAVRDLCRCREDAKEDLMRSRHRLSKMLLRRGLVYRAGKNWTKGHREWLGRLRFERSADQAVFDDYRLAIEQLEERLCGLEERLTEVADSDCYREPVGWLRCFRGIDTVTAMTIVAELHDFARFRSPRQLMAYLGLVPSEHSSGESTHRGAITKSGNRHVRRLLVQAAWHHRHRPAVGALLRRRRRGQPAAIIGLADRAQQRLHRRYSRLLLARRKPPQKAIVAVARELVGFLWAALYLYPRLQETRAL

SEQ ID NO: 365410 - protein, 355 aa, unidentified
MNQEKYIGMEVHQATISVAVMDGKGKLIMECILETKADTILEFVHGLRGTVSVTFEEGTSAAWLHDLMKPHVTHLVVCDPRKNALLKDGSKSDRIDARKLAELLRGHQLHSVYHGEHGVRTLKELGRSYQTLTKDVTRVMSRSKALYRSWAIPCSGTTVYAARHRAEWLAKIPQPGVRLRAERLYQQLDLLQPVRQEARRDLLRESRKHEAVKRLQQIPAIGPIRAALLVALLQTPHRFRTKRQLWAYSGFAIETHDSGEYRYVRGKVQRNRERITVRGLNDNHNHDLKNLFKGAALSASTQPGPLHDFYTALVEKGMRPTMARLTLARKMAAITLTIWKKGVSFDAQQLHRQAA

SEQ ID NO: 365411 - protein, 400 aa, unidentified
MIAAVINADGVIRMPQPNDLSRSRASFEQDATIVAVIEMSQSSWLIAGTVPGIERQPLKKIVPDAVALLRLLQRWRDEATRGGRCVARIAVAFEAGRDGFWLARWLMRHEIETHVIHPTSVAVSREHRRAKTDRLDTAMLMRVFLGWLRGERGHCGMVAVPSLEEEDARRPSRERENLVSERTRIVNRMKAALARLGIRGFKPELRKAAQQLESLHTPEESPIPPNTLDELRRDLARLAILRGQIIAIEQTRLERLEQAPHTGANAMIRLLASVIGVGIETADMLVREALSRGLRDRRAVARYAGLTGSPDESGTRRHEKGLAKSGNARVRRGMIQLAWRFLMFQRDSVLAQWFRARTEGVKGARKTTMIVALARKLLIALWRMVTTGEVPQGVVLRQPT

SEQ ID NO: 365412 - protein, 436 aa, unidentified
MRGCRCSMIMGFTKPIEHFNLQRKKVITMNTLYVGIDVSSKSNVVYLMLPNGDKHSNFSVANSHEGSTQLVKRILSALTSHSLDTVLIGLEATSVYGDNLVYFLREDATLAPFNRKIHVLNPKQVKKFHDSYNDLPKNDYVDSFVIADCLRFGRINKEVYMGEYRYKALQNLTRARFFAVQNLVKEKQRFMNVLFKKYSTMTQEKVFSDAFSTTALAVYDEFESAEALANMDLHELTDFIIEKGKNRFPDPDAVAKAIQKAARSSYRLPKTVNDSVNQVLSISITSMKALESQIKEFDKAIKALMELLPNVLISIPGIGPVYSAGIMAEIGDINRFDNQASLAKYAGLAWKQHQSGGFEAEVTRLIPSGNRFLKYYLCEAAFSLVRCDKEYSDFYHLKYKEVNRCQHKRALALTARKFVRLVFRLLKDNRLYCPAK

SEQ ID NO: 365413 - protein, 349 aa, unidentified
MAVTIVEEARAITGGVDTHADVHVAAALDPIGGLLGAGEFPATAAGYARLLGWLGGFGTVCLVGIEGTGSYGAGLARHVTAAGVRIAGVDRSDRQDRRRQGKSDPLDAVSAARAAQSGRARGASKGRDGSVEAIRALMVAKRSAAGERTRTIGQARALVLTGPDDLRARFAAHTPAALVAGLGSLRPRPGGDVAGHATRVALRELGRRAQFLDSQLERPGELIVPLVTAHAPGLLALYGVGPNTAALLLIAAGDHPGRLRSEAAWAHLCGAAPIPASSGKVTRHRHCPGGDRQANHALWRIVFTRLGSDPATRAYAERRTAEGKSKAEIIRCLKRYVAREVYRYLRPGG

SEQ ID NO: 365414 - protein, 454 aa, unidentified
MKKNTISLQIVNPGAAGIDVGSRTHVVAVDQNVENVCSFGVYTKDHHDMIAYLRNHNISTVAMESTGSYWQTLFSDLQSSGFEVILVSGSQTKNVKGKKTDVIDAIWIQKLHSLGLLSGSFLPNAIMQELRTYYNHRQHLIEQIARYTLKMQKSLRLMNVRLDVALRDITGRSGMNIIEAILAGQRDPLYLSTLVDIRTKKAKEEIANSLHGTWRPELLFELKACLDLFHHFNKALTECDEAIEKLLVRYTPERTVTKEQEKLFRSYNRKKSKNAPAFNIARTAYQFFRTDLFAINGVSHNTVLCLMTNLGDDIYKFPTAKSFASWLRLVPNNKISGGRILSSKVKKGKNTIATALRHVANSIGNQKDHDLLPFFKRIAFRKGRVAAITATARKIATILWNMIVKAEHYSSKRIIADQEKFRKNRLKQVQKNIHNLKLSQEEMNQLMQRCLPKV

SEQ ID NO: 365415 - protein, 376 aa, unidentified
MQAAQIRAYEGNTTLYMAMELSNSKWKLGFGNGTKIRRKSIDARDRQRCLEEVALAKGKLKLPADAPVVCCFEAGRDGHWIYRWLKSEGFEVMEIDSSSIETARGRKHVKTDRIDVEKLLDLLIRFHCFGLRQAFRVVRVPSVAAEASQRLHREDEYLIRQRTRISNRIKGLLVAQGVDEVSLKGDFASYLDRVRLWDGEGLSVELKMELQHMHAQLTLFDGQLKEMVSAYAKELAADTPLAEKRRRLQSLKSLGPKTSRILAAEVFGWRSFANTKQVGAFAGLTPTPSQSGDSDTEQGISKAGNRRVRRIMIELAWLWLRWQPDSALSQWFNRRFAHGSKRMRRIGIVALARKLLIALWRYTEHGVIPEGALLKG

SEQ ID NO: 365416 - protein, 414 aa, unidentified
MEVVHPRCAGIDVSKRDAKVCIRIQGSSGRKTLSTVTTWGSMTNQILALRDHLAAQQVTVVIMESTSDYWRPFYYLLEADFQVLLVNAREVKNVPGRKSDVSDAAWLADLGAHGLLRASFVPPEPIRQLRDLTRTRTHITQERTREVQRLEKLLESAGIKLSSVATDITGVSGRLMLQALIDSQGTAEPAVVADLAKRRMRSKIPVLTEALNGHFTAHHAFMTRLFLDRIDTHTKDIELLSERIDGLMEPFLPARDLLESIPGFSQTVAEVFIAETGGDMTQFPTAAHLASWAGVSPGSNESAGRVKSTKTRPGNRYLKGALGVAALNQARSKSRKTYFSAKFRHLVPTRGPMKAIVAVEHAMLVAAFHMLTNGEFYRDPGPDYFTRRDPARTKARAVRQLEALGYTVTIQQAG

SEQ ID NO: 365417 - protein, 344 aa, unidentified
MNIATIGIDLAKNVFQLHGVNSHGKVILRRQIHRGQMRGFFVNLPPCLIGMEACASAHYWARTLESYGHRVRLIAPHFVKPYVKTHKTDATDAEAICEAVNRPNMRFVPIKSIEQQSALSLHRVRQGFVRARTAQACQIRGLLAEFGLVMPVGIANIKQVPKLLQVAGKELPAPFCRLIERLLAHLKELDRQTRELEEQIVDWHERSEPSRRLAKIPGIGPITASALVASISDVRSFKNGRELAAWLGIVPRQHSSGGKPTLLGISKRGDRYLRTLLVHGARSVIVRARKRDDEKDGWLKGLLERRHVNVATVALAHKTVRTVWAILAHDREYCPDYKSLPLAA

SEQ ID NO: 365418 - protein, 355 aa, unidentified
MTSSKYIGMDVHKESISIAVRNAVGKIVMECVIETKASMILQFFDGLRGDLHVTFEEGTWAAWLYDLLKPHVTKLVVCDPRKNKSMREGNQSDKIDARRLAELLRLDHLTPVYHGEHGLRTLKELVRSYLTITKDLARVMSRVKAIYRSWAIPCTGKQVYASRHRAEWLAKISEPGVRRRAEFYYQQLDALRSLRQEVRRDLLAESKKHKAWKRLCQIPSIGPIRAAVLLGILQTPHRFRTKRQLWGYGGLAIETHSSADHRSVDGQLQRSKKQVLVRGLNRNCNHDLKNLFKGAAIVASSKPGPFQEFYTDLLTKGIRPEMARLTLARKIATIVLMVWKRGACFDAQHLKPQTA

SEQ ID NO: 365419 - protein, 423 aa, unidentified
MKKQGEVGMQVIFQRVCGLDVHKKVVVACVRVLDPNTGQVQSEVRRFATMTQDLLSLLDWLKAQRVTHVAMESTGVFWKPVYNILEGNGIEGWVVNAQHLKKVPGRKTDVSDAQWIAQLLQCGLLRPSFVPDRPQRDLRDLTRQRTRLVQQRATITNRVHKVLEDANIKLAAVASDALGVSGRAMIEAIIEGQEDSTVLAELAQRRLRGKIPELRRALEGKVTDHHRFLLRELLEQIDYVEGKIAALSARIEQIAPPLFKQSVAQLDTIPGIACEAAQAILAETGTNMGQFPSHKHLCSWAAQCPGNHESAGKHKSGKTAKANKWLDAVLTEVAWAASRTKGTYLNAQYHRLAPRRGKKRAIGAVKHSILTALYFMVRDQVAYNDLGPDHFTRINPDQQTRYHVRKLQALGHKVDLTPLAHAA

SEQ ID NO: 365420 - protein, 337 aa, unidentified
MKVTLIGIDLAKSILQVCGVNQAGKPVFNRQVRRARLMELLVQHPDATVAMEACSGSNYWGRELQQRDFKVMLIPPQHVKPFVKGNKNDRNDAFAITEAARRPDLKCVEPRTLIQTDLIQVHRVLDRMIRQRTALINQIRGFLNEYGLVFAKGKEKLLAAMPDLLEDAENGLTPASRVLFQELYEQWRQANEAISRLEKGLKRQANNDEAAQRLMKMRGVAEKISTATIAHAGNGHGYKSGRHFSANLGLAPKEHSSGGKQKLGGITKRGNRYLRRLLIQGAWSVVRNADKNDDRMSRWARQLVERRGKHKAVVAVANKMARIMWSMLYHQTEYRAA

SEQ ID NO: 365421 - protein, 343 aa, unidentified
MQIRSVGIDLGKTTFHLVALGDNGKVLLKKKFTQRQLITFTANLQATLIGLEACSGAHFLGRALRGQGHDVKLIPAQFVKPFVKSNKNDFLDAEAIAEAVGRQNMRFVPIKTDDQLDLQALHRVRDRLITRRTSVINQLRAFLLERGLVFAKSPAKLRERMPEILENAEEDLTPRMRNLLALLWNEWKDLEQQVVDLNHEVELIASSDAACLRLRQIPGIGPLVATAIVASIGNGAAFHKGREFAAWMGLVPKQYSTGGKAKLYGISKRGNRYLRKILIHGARAMVLRCKRDRVPMGAWMTALEARAPRNVLIVAAANKLARIAWAVLSSGQDYRAVQEPVAA

SEQ ID NO: 365422 - protein, 355 aa, unidentified
MNQEKYIGMDVHDATISAAVKNAEGKLLMECVLETKASTILDFIQGLRGTLALTFEEGILAAWLHDLLKPHVSRLVVCDPRKNALMRDGNQNDRADARNLAELLRTNQVKAVYHGKHGTRALKELGRSYLTLTKDSTRVMNRIKSVYRSWAIPCGGTSVYSRRHRAEWLAKLVEPAVRIRAEHLYQQLDSLEPVRQAARRQLLGESRKHAAVKLLRQIPAIGPIRSALLVAILQTPHRFRTKRQLWAYSGFAVRTYDSGEYRMVRGKRQRNRERITVRGLNRNHNHDLKNLLKGAAISAIARPGPLQDFYAALVEKGMRPSLARLTLARKIAAIILIMWKKGVSFDPQQLQRQAA

SEQ ID NO: 365423 - protein, 355 aa, unidentified
MSQQNARVTVVGIDIGKNSFHIVGQDGRGEIVLRQKWSRSQVEARFANMFPCLIGMEACVGAHHLSRRLRALGHDARLMPAKYVRPYSKGQKNDFRDAEAIAEAVQRPTMKFVATKTADQLDLQALHRVRERLVRQRTGIINQIRAFLLERSIAVRQGIRFLRAELPRILAMPPDVLSPRMVRIVEDLACDWRRLDARVEGLSNEIETIARQDAGCERLMSVPGIGPIISSAMVAAIGAGDVFTKGRDFAAWLGLVPKQISTGDRAILGKVSRRGNRYLRVLFVQAAWVVLIKPKIWESHGLKPWLEAARKRLHHNVLAIALANKLARIAWSVLASGRAFEVRKINQAAPQPTGS

SEQ ID NO: 365424 - protein, 337 aa, unidentified
MKITLLAIDIAKNVFHCHGVDQKGKVLLKKKVQRKQLLSYIANLASCTIVMETCSGANYWYREFKKLGHEVKLISPKLVKPYVKTNKNDYNDAEAIAEAASRDSMRFVSAKTIEQQDIQSLHRIRTNLIQSRTALVNQMRGLLAEYGVIVPQGIRHIRNKISDILEDAKNDLTMLTREIIADLYEQLCLLDQSIVGYDKRIENIFNKNEACQRLAKIEGIGILTATALVASIGNPHLFKNGRHCAAWLGLVPKQKSSGGKQCLLGISKRGNTYIRTLLISGARSVLRFVDKKTEDKYNWIKSIKARRGSHKAGVALANRNARIAWALLASGEKYSFA

SEQ ID NO: 365425 - protein, 311 aa, unidentified
MTSAGIFVGIDVAKAQLDIAIRPSGEYFTAPHDDPGVSGVVQRLCALQPTLVVLEATGGFELDVASALGAAGVPTAVVNPRQVRDFARSTGLLAKTDRLDAQVLAHFGEVLRPAARSLPDAQAQELSAVLLRRRQLVEMLVAEKNRLPMATRRIRPPLQRHIEWLQQQVADLDRDRGALIRSSPLWRAKDDLLRSVPGVGPVLATTLLASLPALGTLNRQQIAALVGVAPLNRDSGTWRGRRTVWGGRAHVRAVLYMSTLVAVRHNPRLRSFYVRLRDAGKVPKVALIACMRKLLTILNAILKHQTPWALP

SEQ ID NO: 365426 - protein, 419 aa, unidentified
MKIVYPVCCGVDVHKNVIVATIAITDKSNITQYIVKSFSTINADLYSFRTWLLSYQCFNVCMESTGKYWIPVFNILEEANIKVLLTHPKYVRAIKGKKTDKKDSKWIADLFKFDMVRSSFIPPKDIRALRELARYRYKLVCMRSSEKNRYQNCMTVSNIGLASVLSDPFGKSASDIMKYVLTSNVFDEEHCKKLIQKSAKKKTELILESIRGSRIEPDQRFKMKEAVAHMEYLEQAILRTEAELYTRIQPHYRFVEHISHQLPGVSQLSAALIISEIGVDMSVFESAKHLNSWAGLAPANNESAGKKKSVRISKAGQFLKPLLVQCALAATKSSKESYFATKYQKIKKRRGHKKAIIAIARMMLTCIYHMIQTGEVFNPSDYDSFDKPVERKVTLNDENAIAFLAAQGYDVSSITKIAG

SEQ ID NO: 365427 - protein, 347 aa, unidentified
MNSVGIDLHRNRSQIAVIDSNGELSLSQRIVNNRETFLELLGGLEGESQIALEATYGWEWLAELLEDAGYDIHLTHPLRTRAIAAARVKTDAVDARTLAHLLRADLLPEAYVAPRDLRDLRELLRHRVALTGMRSALKNRVHAILAKHGISREHSDLFGKGGRLFLADLQLREAPRRRLDSLLALIDDFTREIQATTAEIDQRAKADDRVDVLTQIRGVGPYTAMLIIAEVGAIERFPDARHLCAWAGLTPTVRSSDGKARLGHISRQGSPALRWALVEAAQKCTTGGGPLRESYERIAKRRGAKIAKVAVARQILTLSYYGLRDGEIRRLARRSRTSANEKLAAAT

SEQ ID NO: 365428 - protein, 346 aa, unidentified
MDATTIAVDLAKHTFEIVIAPGGGPVTRRRLSRAQFAKFLRTQPPAQVVMEACATAHYWGRVAQACGHQALLMPAQYVTPFVRRQKTDRTDVDGLLEAHRVARVAAVPVKTVAQQEVASLHRLREQWMTTRTARINALRALMAEFGVIVPPGVRRVCPAALALLDPLDCAVPARLRRVLTDVVEEIRALETRVAACERELQSLADADPVLAQLQTIPGVGLVTATALVAAVGHIAGFTRGRRFASWLGLTPREHSSGSRRRLGAITKAGNRYLRSLLTHGARSALFAARRAARAGRPLSALQHWALSVLDRRGANRATIALANKLARIIWAVWTREVPYAARPVAA

SEQ ID NO: 365429 - protein, 387 aa, unidentified
MVQVNDLSRSLAAFDPISTLVVVVEMSKASWLVSSVVPGVERQPLKKLEPDATALLRLIERWRNEAVRVGRPISRIALAYEAGRDGFWLARWLIARGIEAHVIHSASVAVSRERKRAKTDRLDAAMLMRVFLGWLRGERGHCGMVAIPTMEEEDARRPTRERESLVNERSRIINRMKSALARLGIRGFKPHLRKAPERLAGLRTAEGTGLPANIIEEFRRDMARLALVREQISSIEKTRAERLERAPDTGPHAMVRLLARVIGIGIETADMLVREILSRKLRDRRALARYAGLTGSPDESGLKSREKGLAKTGNARVRRGLIQLAWRFLMFQKDSALARWYRTRTEGPSGARKTTMIVALARKLLIALWRLVTTGEVPDGVELRTAT

SEQ ID NO: 365430 - protein, 338 aa, unidentified
MEQQRQYAGIDLHRRRSVIVRMAEDGTVLDTVRIENDPLALAAELAKAGPECEVAMEATLGWYWAADVLAECGARLHLAHPLGIKAFSYQRVKKDETDAKMLADLLRMGRLPESWIAPPEVRELREAVRYRHKLVEARANAKAQVHGVLGKAGVKVPVSDLFGLAGNALLDSVALDDVYLIRVESLRDLVALHGREITMLDRLIARRLEGHAGYEAIQAIPGVGKVLAAIFVAEIGDVTRFERPEQLASWAGMTPRHHESDTTVRRGRITKQGSRLVRWAAVEAAMRPHSYSWLKSDYRRIATRRGKKIAAVAVGRKILTLVFYGLRDGEIRCLAEAG

SEQ ID NO: 365431 - protein, 402 aa, unidentified
MNAVGIDVSKGKSMVAIMRPFGEIVSTPFEIKHTSSDINSLVKLIKSIEGESRIVMEHTGRYYEVLAHQLSEVNLFVSAINPKLIKDFDNDSLRKVKTDKADSVKIARYALDKWQNLKQYSVMDELRNQLKTMNRQFGFYMKHKTAMKNNLIGILDQTYPGVNTYFDSPARSDGSQKWVDFASTYWHVDCIRKMSINAFIDHYENWCKRKKYNFSKSKAEEIYGKAKELVPVLPKDDITKLIIKQAVDQLNSASITVESLRTLMNETASKLPEYPVVMAMKGVGTSLGPQLMAEIGDVSRFTHKGAITAFAGVDPGVNESGSYEQKSVPTSKRGSSDLRKTLFQVMDVLIKTHPQDDPVYQFLDKKRAQKKPYYVYMTAGANKFLRIYYGRVKEYLASLPES

SEQ ID NO: 365432 - protein, 355 aa, unidentified
MSETPNTAIAVIGIDIGKNSFHVVGHDARGAIVLRQKWSRGQVEARLANTPPCLIGMEACVGAHHLSRKLASLGHDARLMPAKYVRPYSKGQKNDFNDAEAIAEAVQRPTMKFVATKTAEQLDLQALHRVRERLVSQRTGIINQIRAFMLERGIAVRQGIGFLRTELPTILATRTDTLSPRMLRIIEELAGDWRRLDQRVDGLSGEIEALARQDQACSRLMTVPGIGPIISSAMVAAIGTGDVFSKGRDFGAWLGLVPKQISTGDRTILGKISRRGNRYLRVLFVQAAWVVLVRIKDWERYGLKSWIEAAKRRLHHNVLAIALANKLARIAWAVLAKGRAFELTRTDDAGVVQPA

SEQ ID NO: 365433 - protein, 452 aa, unidentified
MQEVIPVAKSRPYSSLPVKSVEIESLAKSHAGQVCVLGVDVAKFELIAVLRWPDGSFQRPWRIVNPDELGLLIALLTKLASRCPVTVALESSGTYGDALRQALCDAGIPLRRVSAKAVKDQAETFDGVPSQHDGKDAAIIADLCARGKCSVWSERTSSTPADQEMRYWVRKLDAAQRIKQVWGGKVEGMLARHWPEVTRLVSASGATLSAALVEWGGPAALAADPKALQKLRRFGGHYLTEAKIAALIESAKATAGVRTSEWETRELAELAGHVVAQRREIQACKRRLRQLTKNPDDEGRAAIRAQVPVLGLMTACVLWVCLGDPHRYDSAAAYRKAMGLNLVEISSGQFKGRLRISRRGRRLTRKWMYFGALRWMRDPAVRPWVLRKKARDGGNGMRAMVGVMRRLALAAWNVAVNGEAFDPSRLFPGAGRCRSIAKPKGRERDDAVNAVQ

SEQ ID NO: 365434 - protein, 316 aa, unidentified
MVPSPLFVGIDVAKATLDIAVRPTAETWSVSNDATGIDALVLRLGAWAPTLIVLEATGGYQGPLVAALVAAALPVVVVNPRHIRAFAQAVGILAKTDRIDARVIAHFAEAVKPAPRPLPDAETQALRALLVRRRQLVEMVSAERARLDTVPPSIQDAIQAHIAWLTTQIAGLDDALTRASQTPPVWPAKDDVWQSIPGVGPVLARTMLGQGPELGTLGPKPLAALIGVAPFNRDSGTLRGRRTVYGGRAEVRAVLYMGALVATRHNPVIKTFYERLLAAGKAKKVALTACMHKLLTIMNAMVRDLKPWQPQEVPSA

SEQ ID NO: 365435 - protein, 373 aa, unidentified
MIVIGVDTHKRSHTAGAVDGATARAIADKTVRANRRSFDDLLTWARGLEAGRVWAIEDCRHVSGALERFLLARGERTVRVAPKLMAGARRGARERGKSDAIDAVQVARAALREGLETLPTAQLAGPELDVRLLVDHRERLVAQRTRLINDLRWSLHDLWPEYEIPGRALVHAGWQERIARRLQRAPATVKVRIARDELRRIRELTRAIRELEDELARLVTVIAPRLLAEPGCGVLTAAKLIGEIAGVERFTTDAKLARLAGSAPIPASTGNSQRHRLDRAGNRQLNCALHRLAVNKGRLDPATADYLARKQREGKTRREALRCLKRHLARRVWHLLRPTPAAPTTPRSPRRPTPSRPAITIHCNTPYSRFSLT

SEQ ID NO: 365436 - protein, 315 aa, unidentified
MVDVPCFVGIDVAKAQLDIALRPAGERWAVPNDASGIAPLVDRLQALHPTLIVLEATGGLERAATAALAAAGLPVVVVNPRQARDFARATGQLAKTDALDARALAHFADVIRPTPRPLPDAQTQELRALLGRRQQLIVMRTAEQNRLAGTSERLTKDIAAHITWLNADIATLDDDLETLLRASPLWRENDDLLQSAKGIGPVCAHTLLLELPELGTLTRQQIAALVGVAPLNCDSGTLRGRRTIWGGRAHVRTVLYMGTLVATRFNPQIKVFYERLLAAGKVKKVALTACMHKLLTILNAMLKHRTPWKPQEVQN

SEQ ID NO: 365437 - protein, 536 aa, unidentified
MSKHRRNGHGRGTKCRQRIDNGLRQRVREIGGDKFGVLVVDSSKKNAEVWLTDFYGEPLWKESRTFPITDGHLAEMINVVRGTCRERGLKDLVVGIEQTGRYHRPIQRALARRWEVKAIHPFVTKQLRQPASPGVKIDGADLEAMSRAIISGYGDDQRAVPLLYTKWQLINRAREDAVDRRRRLKQQCQERLHAFMPGYATLFDHLWETPAAVAIAELYGSAKRLMATDADAIIEQLRGKGLRMMRPTINRVLAWAADAPSPDPGGALNRRIWSEDLRLMEQLGRAILRYERALAAYLAQTPFVLLLSIPGINVVSAAGYGSEVGPITQYIKPSHLNGRAGLFPSRYQSDATDCADGPMVGGRNARLRNAVMEIVMNLILHNDHFQGWSDLRAQRGWPKKKIHVAIANRFNRMAYHMVAGRMLFDYPCLTKRHPVLKKVAVFSLVHGIKPVTTMSLVAKAARQLPADAVEGELTALEDGLANLPTSEGVPADTLKEAKLLLPALVSRIHHEYKHQGEDDHQTITETPYCVTVEKLA

SEQ ID NO: 365438 - protein, 359 aa, unidentified
MNIVGCDFHPKWQQVAVFDTETGEIAEHKLMNGDGEAERFYRGLSPGALVGVEACGNSQWFVDLLGRLGHTVWIGDAAEIRASYVRRQKTDRRDAGHILRLLMENRFPRLWTPTAEQRDLRQLLIHRHKLVEIRTRVKNGLQHLAMNQGVEKHSRLWSVRGRAYLEALPLAGWTGRRREDLLQLLAGLDSQIAELDEAVSGAAQEHPQARLLMTQPGVGPITALAFVLTIGDVSRFEHSGQVASYVGLIPREHSSGGKQRLGAISKQGNRFMRQLLVEAAQSVTRYDEGFRKQYQARCHHKPKGVAKVAAARKLAVRLYWMLRQNVGYPEIAHIESSPRVPLAGTNKAEGLVGHSRTPH

SEQ ID NO: 365439 - protein, 400 aa, unidentified
MARVFIGVDPHKLSATVEVVDDRETVLATGRFATDKAGYAAMRRHVAAWPDRVWAVEGSNGAGRPLAQRLLSDGEHVVDVPAKLSARARLFDTGHNRKTDAHDAHAVAVVAVRTVGLRVLADDDELEVLRMLVDRREELARQRVQAVNRLHRLLSELTPGKAKKDLTALQAKAILASVRPRDLAGKTRRRLAAEQLAELVAVEKKIKASTKELKAMVLARGSRLMDLPGVGPVVAARILADVGDVSRFADRNRFASWTGTAPLDASSGEQIRHRLSRAGNRKANHVLHIAAVSQIRLDTEGRAYYRRKLAAGKTRMEAMRCLKRRISDAVYRQLVADAQVAESQGIGTGPGGHCGASLTSSAVDLPPHIDTSDQPLPGPAEPTLQPLRRGRKKTSLSANR

SEQ ID NO: 365440 - protein, 348 aa, unidentified
MRFYTQQHRYSCGIDLHARSLYVCILDHTGQILVHKNIKASPEALLKSIADYRDDLIIGVECMFSWYWIADFCADHDIEFVLGHALYMKAIHGGKAKNDRIDSEKIARLLKGGMFPYAYIYPRGMRAHRDLMRRHIKLTRERGELMAHIKNTLSQYNLPANTQNLRYAKHREPLRSAFPDPSVQRSIDLDLARIAFYDGQLSQLKWYLKRTAKSVNPKTVIRLQSVHGIGDILSLVILYEIHDIERFPRVQDFVSYCRLVKCQRESAGKKHGTGGARIGNPYLRWAFGEAAALFLRGNPPAQRWLEKKTRKHNKAKAMTILAHKLGRAVYYMLKRETLFDQDRFLAQS

SEQ ID NO: 365441 - protein, 355 aa, unidentified
MTSTKYIGLDVHKESISIAVMNSVGKFVMESVIETKASTILQFIDGLRGDVRVTFEEGTWAAWLYDLLKPHVTEVLVCNPRKAALLKDGSKGDRIDARKLAELLYMNKLATVYHGEHGLRTMKELARSYLTITKDLTRVMNRLKALYRSWGIPCAGNEVYDPRHRAEWLGKISEAGVRRRAEHYYQQLDVLRLLRQEVRRDLLVEAKKHKPWKLLRQIPGIGPIRAALLIALLQTPHRFRTKRQLWTYSGLGLETHDSAQYRAVEGQLQRSKKPVTLRGLNKNHNHDLKAIFKGAALRASSAAGPLRDYYEALLAKGRKPTMAHLTLARKIAAITLIVWKKEVRFDANYLKQQAA

SEQ ID NO: 365442 - protein, 415 aa, unidentified
MGMRGLYARCAGLDVHKAIIVACVLLSASSAKTSKQVRTFATTTAGLQELAAWLASQGVSHVAMESTGIYWRPVFNLLEGRFEVILVNAQHMKAVPGHKTDIKDSEWIADLLRHGLLSASFIPPKAIRDLRDLVRARKTLVRQRAQAITRVQKVLETANIKLSSVATDVLGKSGRDMLEAMLSGVSDAESLAELARGRLRKKLPALREALEGRVEATHRVLLRQLLEQIDFLQGQIDALSADIDHLLRPYEPLLARLMQITGIGRLAASAILAEIGTDMSRFPSAKHLASWAGVAPGNKQSGGKRLKAHTNKGNTHLRAVLAEVVWVISHTHDTYLSAQYHRLARRIGKKKAIVAVSHSVLVIIYHLLRDEQDYHDLGPHFFATLDSTRQRDSAVRRLQALGYQVTLEELKEVRG

SEQ ID NO: 365443 - protein, 346 aa, unidentified
MKQISTIGLDLAKNVFQIHGADAEGAPIFNRKLRRAEVLRFFEKLPPCLVGLEACGGSHYWAREIAALGHDVRLIPPIYVKPFVKRGKTDAADAEAISEAVTRKTMRFVPVKSADQQAAAMVLKTRALLVRQETQAINALRAHLSEFGVIAAIGTAKVTALIEIVRDEADVRLPKAARFALAEIANQIEALKRQIEKLEREIVAEAKRDEDMRRLATIPGVGAITAASIKALVPDPDGFKSGRHFAAWLGLTPKPHSSGGKERLGGISKMGNPMLRSLLVLGATSVLRHARGNANAPQWLIALLARRPFKVVAVALANKMARIIWALLTKGGTYRNAGTASGAASA

SEQ ID NO: 365444 - protein, 316 aa, unidentified
MTSYNNLIGIDIGKFNFIVALHGDKKVVEYENNLTGINSFLEDYQQLFPSSLCILEATGGYELELLFTLSQRSVAVHRANTRKVKNFIRSFGNSAKTDALDARALALYGYERSNQLELFVPQSSQALELYALVQRRSDLKQILVAEKNRLKSPKLGTTAMIIKDSHNSVIKVIANQIDSITLKINAMITESPILAAKKKELKTIAGIGDIVANELLALLPELGRLNRRQIANLTGLAPKANDSGKFSGYRPTGHGRSLVKPLLFLAAMAARNSNSSFKIFYQDLINRGKKKMVALTALMRKIIVIANAKLRDLYAQ

SEQ ID NO: 365445 - protein, 490 aa, unidentified
MAPPSLRTVDPGRERLRHLSREDCSETAPLPGPGEGPTPRRVSSREDWSISTTPRLPGPPSTMAAKKGARVLGVGIDWAEDFHDIALGTVAKGVTDQFRIEHSPAGVERLIGRCLAVEPDPAEVRVVLETRHGLLVEALLDAGFSVIPVNPDLVARRRGPARKKDDAEDARICCLLALDRHAGLRTLVAHGELGGELRAIARDDERAARDQRRLLNRLRADLQTTYPAALALAGDDLGAPTMLRLLQRWPTQAELAKASRAELVSFARAGRHGWPERFADRVSTTLSAPSLPTRDYLVRAKAAGIRLAAVQLLALHETRRAWQQRMSELLRGGPRTGRDHSTKDPDPGKAFPGGEIYLSMPGLGDRLAARIAGEIGEHITQFDSPNALQCYAGTAPVTRRSGKHDFIVARRLAHNHYLGAAVHQWAFCSVSRSGWAREFFDGKIAAGKPHHAALRALGNRWLEILWHCLAKGVLYDENVHQANRALGCTA

SEQ ID NO: 365446 - protein, 533 aa, unidentified
MATKRKSRKSRKIGIVALGKPRGMIQSRVQKVGPERFGIVAVDCAKARSKWMLCDFYGKVLIPPSPVEHRRAELGLAVAQLREAIELHGLQDHIVAVEMTGTYHRPVQRAFRKGGSETRLVHPFASRHYRLTSHGDDKTDDNDLEGIFRAAVNGFGLLEPEWDETYRQLQILARHRRDLVNKRAKLQCQIRQLLERCLPGYAALFPADDLWSRPVAMAIARRAVRPENVLAAGVGGVLDWLKEEHVRAQARTVERLVAWAGNAAETDPMCEHLTRVWLTLYEDWQTKTKHIRRLEQDLAGILVTTPYLLLLSHPGINVVSASELAGEMGPIEHYAHAKAISGRAGLFPSRYQSDEVDRADGPLARFRNARLRAAWMRIADCLVKSNAYYRGKAALWKQRGINPRDTRCRVANRATRTVFQMVSGRRLYQHPSRLDRQYVLDKLLTFHREHGTLPVEILRDLRQAAAQIPQGDRAAEARPLQEIYRKSRRSRRAGPQAIGDILLPVLAKLGVDQVQSETEAPRPDAPVSGTGTR

SEQ ID NO: 365447 - protein, 378 aa, unidentified
MPKVRFIGLDVHADTIAVAVAEPNGEVRSLGVISNRLESVRKTIKKLGPVHQLRVCYEAGPTGYVLYWQLTQLGVTCEVVAPTLIPSKPGDRVKTDRRDAEKLARCYRAGDLTPVWVPDAAHEALRDLVRAREDAKQDQQRARQRLGKFLLRHGCKPPQTIKKNWTQKYMEWLKAHVHFDQAALEATLQDYVYEVDRAAERIQRLDKAIDEAIRVAPPEIRTVVESLQALRGIAQLAAVTIVSELGSLSRFNSPRQLMGYSGLVSSEYSSGNRVVRGKITKTGNAHLRRIVVESSWCYQHRPNICGYLLKRQKALQLDPEIKAIAWKAQCRLHKRYKHLAARGKNKPQIVTAIGRELLGFIWAVAVKTEAGLKTQTAK

SEQ ID NO: 365448 - protein, 370 aa, unidentified
MKETITSYIGLDIHKDSIAIAVAEAGRSAPRFIGTTPPDLATLCKALTRCTKRNSTLVVYEAGPCGYGWARHLSAHGWRCEVISPAHITRKAAEKRIKTDRLDAVLLARESRAGNLVKVAMPDERDEAIRDLSRAREDATAARLRARLQLKAMLLRHGRAYHGKTSWTAAHERHLAGMKFDHAAQQIAFDEYRQAVKDAGERVERLTQGLREQYEHWRMKGVVNALMCLRGMDFTAAVTFIAEIGDLSRFAHPKALMKYLGLIPSEFSSGNTRRQGPITKAGNKHARRILVEAAWTYRFNPRVSRPIEVRQEGQPKAIRDIAWKAQLRLAYRFRKLNAGRKMTQNKCCVAVARELAGFIWDIARQVKIPA

SEQ ID NO: 365449 - protein, 321 aa, unidentified
MTAILGIDVAKNKFDVALYKNSKYKTKSFDNKPLGFEALADWLKLHNVAVVHACMEATGSYGDALARVLFETGHMVSVVNPARIKAFGESELLRTKNDKTDAKLIARFCESQKPVAWQPDPPEVEHLRMLGRRRDALIAMRTQEVNRLGSPDASVNESIQKVIAFLNEEIEQISKAIKEHINKHDGLRKKRDLLNSIPGVGDVTIEAILSEANGFEGFDTIEQVVAFMGLSPKEHTSGTSVKGKSGLCKIGSARLRKALYMPALSAIQRNPYVKALYDRLKAKSKNGMIIACACMKKLVHIIYGVIKSGKPFDPAYNIKTA

SEQ ID NO: 365450 - protein, 349 aa, unidentified
MTIVENPTITVTGGVDTHSEFHVAAAVDANGGVLGVETFDTTTHGYRELVAWLAGFGTIRLVGVEGTGSYGAGVCRHLVGKGIAVVEVDRPNRQARHRAGKTDSVDAIAAARAALTGTATGVPKSRTGKIEAIRVIMVARRSAGDEWISIINQMRHLVFCAPDEIRARFLDLSPIKLARTCATLRPRRSDDDIVRFTTLSTLRELGRRALFVREQKDRLSAEMRPLINEFAPALINMNGVGYDTAAKLLIAAGDNPHRIRSEAAWAHLCGVAPIPASSGKTQRHRLNRGGNRQANSAIYRIMLTRMANDERTRNYIARRSSEGKTMGEIARMLKRYIAREVYKTLPTTI

SEQ ID NO: 365451 - protein, 354 aa, unidentified
MSPSSSRVAAIGIDIGKNSFHVVGQDERGAIVLRQKCSRGQVEARLANLPACLVGMEACVGAHHLSRRLQVLGHDARLMPAKYVRPYSKGQKNDFRDAEAITEAVQRPTMKFVATKTAEQLDLQALHRVRERLVGQRTGIINQIRAFLLERGIAVRQGLRFLRAELPTILATRSDALSPRMLRLIEDLAGDWRRLDERIEAISGEIDELARKDQACERLMTVPGIGPIISSAMVAAIGGGDAFSKGRDFGAWLGLVPKQISTGDRTVLGSISKRGNRYLRALFVQAAWVVLVKLGKKWERYGLRSWIEAAKKRLHHNVLAIALANKLARIAWAVLHRGRAFECVKMDEIASRPA

SEQ ID NO: 365452 - protein, 430 aa, unidentified
MTNVQPIPPEAVLVAVDIAKLHHEVLIEVPNARRRRRLTVTNCRAEHDRLVAELQVLARPVTVGFEPTGHYHRCLAWRLVQAGFDVRLVSSVALARTREALHNSWDKNDPKDAQVILHMLRIGATQTYHDPLAHGINDIQELSMTHEVVSKSKTELLHCIQTHYLPLYFPEVERFRNNTRSDWFFALLERFPVSASITTLSKEAFITAAWDVAGRKVAKARLLGNIYEAAQHSMALPIPPDAPAVAMFRLVLAEARHLIRQRETIERLAGELLGGQADFQRLQQVPGIGPINALAILAEAGDLRRFGHHRQFLKFCGLDLATHQSGQFRGKTKLSKRGNARLRRTFWMAAQVAIRQRENSFRAKFERYVAKDQADPDLRRKAFTAITAKMARVVYAIIKSGADYRPFVEGPVPGGRTPLCRSREGASATL

SEQ ID NO: 365453 - protein, 328 aa, unidentified
MVCETVCKEGITKMESIIQIAGIDVSKDKLDVHILASNLDFSVSRDRRGLGELRRRLRKACVSDVALEASGDYERIVMEALEGDGFVVHQLNPAHVRHFGKAMGKLAKTDPIDARLTALYCRHFPEAGLGRRPEQARKLAEFLSVRAMLLSAIGEARNRLEHLREASLRALVEEDLARARAKLKTVDAAIAKVIAEDEALQRKADLVRSMIGAGPVLAATLLARVPELGSVDRQQAARLCGVAPADRRSGKSRRQARIDGGRDQLRPILYMVALTAIRSNPTIAAFAKRLTANGKSKRLVIAACSRKIITILNAMLRDQTPWQNSKLA

SEQ ID NO: 365454 - protein, 420 aa, unidentified
MSKRAQRHEQVKGSKGPIPEGMVVLGLDIGSQTHVGRFWAAPGVREKARSFANTAAGAAALLAWLDARTGGDRSRVVVGFEPTGSYWQGFVGRLVAAGVRVRVIAPAHTKKYKELFDNSPNKSDAKDAGVIAELTKRGHGLLLRLPHGAYADLRALNEGYHRATQRITALQNQAREVALGLFPELGAAIDPFSATGRALWAATPTPAAWLGKRRSTRERLVRQASRGRLGAAFVAQLSEKARDSLGGTEAVAPRVAELTFLMAELERWEGHRAALEAALSTTLDSCPEGAWLTSVPRLGRASAARILGETGPLTDFASGQAVLKHAGLNLYASSSGKRTPERVCYRITKRGRSRLRHVLFFAALRLVQRGGIFHAYYRRLVDDNGVIKVRAVVAVMRKLLRVLTALARDHAAYDPASVPT

SEQ ID NO: 365455 - protein, 345 aa, unidentified
MEFFAGIDLGKRKSQIKILNQDRKVVEELKIENDPKEFFRIFKKYKGKIDVACEASSNAFWVWDTLAPIVRRFAVGHTTKIRWIAEARIKTDKIDAGILAELLRADLFPAIAIPPRRTRELRELIRGIIRMRRQALRYRNQVHGLLGRHGIPYKRSEVQDAKLGELVRSVELAKPARLAADALLRLEAATREEIRQLQVELQKELKGEEEINRQITLLESIPGVGFFSAALLVLELWDVTRFSDAKHLASYIGFVPGTHQTGETLWHGGMTKQGNVLVRWILVQDTWVAIHNHWFFGQLYERYKKRKGNTRAVVPVARALLKTIHRVWTEQKSYEEIYKEKALVG

SEQ ID NO: 365456 - protein, 345 aa, unidentified
MRIVGVTGGVDTHADTHVAAAVDHNGGLLGIESFPVDQTGYEDLLGWLAGFGELVRVGVEGTGSWGVGLTRFLGDQEVVVIEVDRPNRQKRRKEGKSDPTDAVAAARAALSGEATVTPKGSRWALIEQIRVLMVARRSAREQRIQSLNQLRHLVFTAPEKIRLRYKDRYKTGLVTEAANMQPRKGSDPVTFTTYLVIRNLARRIRRLNAEMRDIDRMLAPLITETAPKLFELYGVGVDTAASLLVTAGDNPERLHSERSWAHLCGVAPLPANSGKTTTRFRLNRGGDRQANAALYRIVLTRMSSHQETRKYVARRRDEGLNTAEIIRCLKRYVARQTYKHLPHMI

SEQ ID NO: 365457 - protein, 348 aa, unidentified
MAVYIGVDFHARQQTISYLTTEEGEIKRQQLDHGQPDEVQQFYRQFAGQEVIVGFEASGYAAWFEELLEELGYQIWIGHATAIRSFARRRQKNDRRDADLILDLLIRGDFPRIHRYSAASRAVLQQLRYRQRLVKMRTMIVNSLVFMASSRGVSLRTQLKSRRGLERLQLLALPEPQRQQRDELSQLLRELKPKIETVERWLAEQAEADERVQRLRTHHGIGPLTGLCLAHTLESVERFANPRKVTAYVGFDPMEDSSAERQRIGSISKQGSRLLRFFLVEAGQVAIRKDPDLARVYKRVWLRRGHAKAKVAVGRRLLVRAFIMLRDEIDYAEFLRRGVAARSSRATA

SEQ ID NO: 365458 - protein, 344 aa, unidentified
MRTITTIGLDIAKSVFQVRGVDADGDVVLRRQLKRRYVLSFFQKLPPCLIGIEACASSHYWSRELQALGHTVRLMPPAYVKPYVKRQKNDAADAEAICEAVTRPNMRFVPTKTPEQQSCLMLHRTRHLFIRQQTALINSIRAHLAEFGIVAPVGRNGVEQLLEVVADANDARLPEIARACVAALGSQLQALKAQILAFDRCIMAWHRSNETSKRLDAIPGVGPALATALVASVADPKAFRSGRDFSAWIGLVPKQNSSGGKDKLGSISKQGDRYLRSLFTAGALAVIRYAKLHGTMHRPWLTALLGKRGKSRGGIIIRFPRRRESDSLREWRRLQTSMGFQTLI

SEQ ID NO: 365459 - protein, 408 aa, unidentified
MTVVGIDVSKGKSMVAAMKPGGELVTTPYEVKHSDIELSRFALDVLCMEPDTRVVMEATGRYHEPVAALLHSEGIFVSVLNPLLIKQSGAGSLRKVKSDPKDALKIAKYGLDNWSTLREYTPMEAIRQQLKLCARQCDLYSKNIVMLTNNLISLSDKTFPGVNELFSSPEKENGHLKWVDFYRTFWHCDCINRMSPDAFEERYKKWCKRKGYHFSANAADALYAASCGLYTTLPRDNNAKLLVTVATDQLIALRENQSKLETEMLNLCKQLPEYETVMAMYGVGKSTGPHLMAELGDVRRFPHRSSIVAFAGVDPGVVGSGKMQLSSVATSKRGSPQLRKALFQVVSAYVKRKPENEAVYQFYAKKRDEGKPYYVCTTAAANKFLRIYYARVKACLNAAESATQAEDG

SEQ ID NO: 365460 - protein, 339 aa, unidentified
MELYAAFDLHANNSLLGILDGDGKRVFKKRLHNERELILEVLRPHKEHIAGIAVESTYNWYWMVDALMEEGYRVHLANPSEIQKYEGLKHADDNHDAFWLAQMLRLGILPEGYIYPKEERPVRDLLRKRGHLVKIRTSLILSLQNIITRNYGVRLNVNDVKRLRENRVSPLLEENDDLALAGMVSKETIDFLTHQIRKIERAVEGKIQLKQEYRYLLTLPGVGTVLALTIMLETGPISRFAKVGNYVSYCRKVSTQWTSNGKKKAGGNKKNGNRYLAWAFSEAAELARRYNSQARAYYNRKMQKTNFMLAHSALSHKLARAAYFIIRDQVVFEPEKLFR

SEQ ID NO: 365461 - protein, 355 aa, unidentified
MKNQAIQYLAFDVHQATTVATVRDEHGTIRMRATVPTEASAIVALVRGLGGRVHIAFEEGTQAQWMHDLLQPHAERVIVCNVRGRSETTNKSDRIDADELSEMLRLGSVKSVYHGASGMLTLKELVRCYLNLVDDSTRVMLRIKALFRGRAIPTPGTAIYRISNRGAWLAKIESRGARMRAASLLWQLDGLLELRPKAKAAMIVEARRQPGWKSLRSMPFFGPVRVALLLAIMATPFRFRTKRQLWPYAGLAVVTRTSADEEFVGGKLRRRRRAPLTRGLNRNHNPALKGVFKGAANAAAAKPGPLKDFYDACVARGVREELAKVTLARKISSIALRLWKKGELWNSDKLTMQTT

SEQ ID NO: 365462 - protein, 313 aa, unidentified
MAAEVFVGIDVARASLEIATRPTGERWQVGNDADGISALVARLRALQPVLIVLEATGGLEVPVLAALGAAGLAVVAVNPRQVRDFAKAVGQLAKTDALDAQVLAHFADAVRPAVRPLADAATQALSALVTRRRQLVEMLTAEENRRKTAPSVIRADIQDHIAWLRKRLKGVDGELGQAIRSSSLWREQEDVLRSVPGVGAVLSCTLLADLPELGTVDRKQIGALVGLAPVNRDSGTLRGKRTIWGGRASVRAALYMGALVGSRCNPVLRAVYTRLLAAGKTKKLALTACMHKLLTILNAMLKHRTKWAPVRLA

SEQ ID NO: 365463 - protein, 367 aa, unidentified
MKKLTTTMMQETLNKYDGRLTVGLDLGDRSSFYCVLDGTGDVLLEQKVSTTPKALNEIFGAMPRSRIAVETGTHSPWVSRLLSELGHETIVAHARSVRLIGESRRKDDRLDAMTLARLVRIDPRLLCPVKHRSAEAQADLTVIRARAALVRTRTMLVNAARGLTKSYGERLRGCNARGMKPKAAQDLSPELKYALEPMMQEIESASERICQYDQMLESMARNRYPEAERLKQIKGVGTLIALTYMLTLEDPYRFRKSRDAACYVGLQPGRRNSGQSEPQMHISKEGDPYLRALLVQAAHHVLGPWGVDSDLRGWGMRLAEHGGKRGKKRAVIAVARKLAVLLHRLWVSGDRYVPLRPGGQATLPAVA

SEQ ID NO: 365464 - protein, 416 aa, unidentified
MSLRIVYPICCGIDVHKSFAVACIATTDANGVTTYQKHRFSTFTKDLRRLARWLSENNCRDVCIESTGKYWIPVYNILEASCKVVLAHPKYVKAIRGKKTDVRDARWIADIFKHGLISGSFIPPPGIRQMRDLMRYRVKLTNSATAEKNRAQNCLTICNIKLDDVFSDVFGKSASAIIDQLLLYPNGDFDVTPFIDKRCKAKPEAVQAAVDGFFSLEQVRKFRVIRAHLDNLSLCKCGLEDVIMEIAEPFLPQIELLMTVPGIRLFSAIAIIAEIGVDMSVFPTAKHLCSWAGLVPQNNESAGKKKTTRISRAGAYLKPLLVQCALAVCKSDKHPEIRSRYLALKKRRGHKKAIIAICRMLLTAIYHILRKSEAYDPSLYRKEDVPANRVITVKQALALVKRHGFLVVDSDDKLAS

SEQ ID NO: 365465 - protein, 400 aa, unidentified
MTTRHARIWVGIDVGKGHHWAVAIDGDGETVFSTKVINDEPQILALIETARERADDVRWAVDISGRASTLLLALLFAHSQQVVYVPSRTVNRMSGAYKGEGKTDAKDARVIADQARMRRDFAPLDTPPELVTTLRVLTHHRADLIADRVRLINRLRDLLVGICPALERAFDYSSAKGPVVMLTEYQTPAALRRIGVKRLTTWLERRKVRGAGDVAGKAVEAAQSQQIALPGEKSAAKLVCDLAHQLLTLDERIKDNDREIREVFRADDRAEIIESMPGMGPILGAEFVAIVGDLSGYLDAGRLASHAGLAPVPRDSGRRTGNHHRPKRYNRRLRWLFYMSAQTAMMRPGPSRDYYLKKRGEGLLHTQALLALARRRVDVLWAMLRDKRLFTPVPPVTQTA

SEQ ID NO: 365466 - protein, 357 aa, unidentified
MSKSIKNLSSVTIVGLDIAKNVFQVHGVDAGGALVVARAVRRGQLLSFFSSLPPCVVGIEACSSAHHWARSLIGLGHQVKLIPPAYVKPYVRRSKNDAVDAAAICEAVGRPNMRFVPVRSVENQAQLMRHRARELLVGHRTRMLNALRGHLGEIGVVAAQGAQNAYALKRLLADGCDDNGEVIVPDCVRRALAPLVYQIDAIDAEIEAIDEEIKTLVKADETARRLMTIPGIGPITAQAIVATVRETSAFASGREFAASLGLTPRQNSTGGKERLGRITKMGDRYLRKLLVVGACATLCHRKGHNDALRVWADRLLARKAVKYKFKLTAVALANKVARIVFALMTRGGEYNELPIAV

SEQ ID NO: 365467 - protein, 342 aa, unidentified
MEHFAGLDVSVKETSVCIVDDRGRIVREVKVASEPDALLSVLTNPTYHFKRIGLEAGPLSQWLFSVLAEAGLPAICVETRHMQAVLKAQINKTDRNDARGIAQMMRAGLYRPVHVKTLRSQKLRMLLTHRKLLQSKAIAIENDLRATLRNFGLKVGIAGRVKFEARIKELVENLPDLVVLVEPLLIVRRVLREQIVILHRRLLAIVRDDDVCRRLMTVPGVGPVVSLTYRATVDVPARFRKSKAVGAVFGLTCSKYQSGEVDRNGRISRCGDEMMRVMLYEAAQSMLRSKKWSWLKAWAMQIARRRGMKKAIVALARRLAVIMHRIWVDGTEFRWTRETVAA

SEQ ID NO: 365468 - protein, 355 aa, unidentified
MSSEKYIGLDVHQATISVAVMDSQGKVVMESIVETKASTLLEFFAGLRGSLFVTFEEGTSAAWLYDLLKPHVAEVLVCNPRKIPLLKQGNKSDRIDARKLAERLRLHDLKPVYHGETGIRMLRELARSYLTVVKDLSRVMNRLKALYRSWAIPCAGRDVYYQRHRTEWLEKIPEAGTRRRAEQLYEQLDLLQRLRRQARHELLAESRKHAITAKLRKIPSLGPIRCALAVALIQTPHRFRSKRQLWTYSGLGLETRDSGEYHFIKGHPQRRKKQATIRGLNKDYNHDLKGLFKGAATRASVKPGPFQEFYQRSLAKGIKPTMVRLTLARKIAAITLTLWKKGEDFDINKLNSQAA

SEQ ID NO: 365469 - protein, 353 aa, unidentified
MKTYYVGMDVHRASIVIVVLNGAGKVVMQSVIETGAERVRGYLKQLRGKVYVTFEEGTQANWLHEVVRPLVTEVVVCDPRHNKLMQSGNKSDRVDAQKLAELLRLGSLKAVYHGDNGVRALKELVRSYDCLVSDTTRVMNRLKAIYRGRAIGCAGHDIYRQDRREQWLEKLRERGAKQRASFLYQQLGALKPLRHEAKRLMVKEARRQRAYPWLMSVPQFGSVSVAQLLAIVSTPHRFRSKRQFWTYIGLAVVTRSTADHEVVNGVLRRSQRPVSTRGLNRNHNHLLKRVFKNAAQSACHSGPFKAAYELRVRQGMVPSLARLTIARQLAAITLAMWKRGEQFNPERMNQQAA

SEQ ID NO: 365470 - protein, 331 aa, unidentified
MADAKRFVGIDVAKAQLDVAIGPNGESFSVANDETGISELLRRLEPADLVIIEATGDLEVPVASALATAGIAVAVVNPRQVRDFARATGQLAKTDALDAQVLARFGEAVKPQVRALRDAQAQALEALVNRRRQLVEMLTAEKNRRANSPKVIHKGIYEHIRWLEKRLSGLDDELAGLVRETPIWRERDELLRSVPGVGKVLSTTLLAHLPELGALNRKQIAALVGLAPFNRDSGSLRGSRCIWGGRAQVRRVLYMAVVAAVRSNPVIKNFYAQLRARGKYPKSALTACMRKLLVILNAMLRSKISWQTPALASSTATLSPLLGAVPEHGCC

SEQ ID NO: 365471 - protein, 343 aa, unidentified
MDVHKRESQVCILGEGGAVVVERRIRTERSRLAAVLGERPRARILLEASTESEWVAQTLEALGHEVIVADPNFAAMYASRSRRVKTDRRDARTLAEACRVGAYRPAHRMSAPRREVRAALAARDALVRTRVRYISLIRALLRREGIAVGSGSSGAFLRRLAAITPPAALQAALAPLVTVLEPLNAAIAAADAWITEAMERDPVAGRLCTVPGVGPVTAAAFVATLDEVTRFRGAPQVAAYIGLVPQERSSGDRQHRGGLTKAGNARARWVLVQAAWAIWRDRTPRTATLRAWAERIAARRGKRVAAVALARRLAGILYALWRDGSAYEPQRVGRRPAVPRAAA

SEQ ID NO: 365472 - protein, 350 aa, unidentified
MSIVADHHGFVIGVDCHARNHVYSIAAARGDILATRQFPTTRAGMGRAISWVGKHTGGDMSALFAIEGTRTYGANLSRHVGRAGYKRVEAPWTATSAKGKSDEIDAGKIARATLACQIDQLRDPRADGIRGALAILLASRNQMQKAKTSAKNQLTALMRFHDLGIDVRKAVSMKQVKTIATWQARDTGDIAVFYAIREAIDLAQTVLQLEKNAATNRAEILALVRQCEAGVLLKEKGYGPISVAQIFVSFSHVGRIDSEAKFAALAGVNPVPASSGNTVRHRLNRRGDRQLNRALHTIALTRMRQDEETEAYVARRRLEGKTDREIRRCLKRYLARHAYRTLNQTQPAQT

SEQ ID NO: 365473 - protein, 351 aa, unidentified
MDRYIGLDAHASSCTVAVLGPSGRKLQCQVLETNAKALINFLETIPKNRRLIFEEGTHSNWLYEVLAPHVQETVVVAVRQSRGPKDDQRDALGLAEDLRIGNVKVKVYKKQGDFATLSHLARAHGTLVVDTVRCQNRIKSLLRSRGIAAAGQVLYSIKGRPQWLSQLPTQACGQANFLYEQYDALSEIRKQAEKQMLVEARKHPVFKVIKTCPGMGRIRTAQIMPIVVTPYRFANKRQFWAYCGLGIVMRSSSDWVRAQNGEWIKTPIQKTRGLNRNFNHTLKHVFKGAATTVIGRANKDDPLYQHYQQLLDGGTKPNLAKLTISRQIASIVLSVWRSQEVYDPKKLSPKT

SEQ ID NO: 365474 - protein, 417 aa, unidentified
MNSPPETIPIQRYIGIDIHKYYLMIGGQNRHQEWTLRPRKVQVSRFRDWAEKNFQPGDAVVIETTGSVWDIYDIVAPLVTTTLVAHARKVRQIAEARVKTDKEDIKRLITLLIADIVPEVWVPPMYVRELRSLISFRWRLTKQVTMSKNRLHSVVQRFNLDPPEGGLLTDKNKSWWERQTFTDLTGFEVERDLEIVKTLEGQKEAIDLKLAELSNTEPWSSDMVYLMQIPGLGLIFSMVILSAIGDIKRFSHPKKLVGYAGLGAGVHASGEKYQEKSITKEGRKELRWALVEAAWRAVGSDPYWKAQLKRLEKRMHRNKAIVAIARRMLVSIWHILTKREPYRHFDEETIAYKMLIWSWAMDEKSRDGMTPQQFAKYGMLRLGIGQDLERIVKGGGPRRIAPTEEVLALKPELAPPR

SEQ ID NO: 365475 - protein, 350 aa, unidentified
MTTIARRITGGVDTHLDTHVAAALDERGAQLGVQSFPATGSGYRELLEWLEEFGTDELIGVEGTGSYGAGLTRHLLSHQVTVVEIDRPNRQRRRRTGKSDPHDAVAAARAAQGGDATGSAKTRDGNVEAMRVLRVARRSARGNRTQALNQMRSLISTAPEELRAELRNLSIYKVLQLASAFRHTGKTDVTTVTKLTLRTLARRALSLEEEVKEIDRMLKTLVAETAPELHAVDGVGTDVASAILVAAGDNPERLKSESTFAKLCGVSPLDASSGKQERHRLNRSGDRQANSALWHIVFTRMVNDPRTKYYIERRMKEGRSKKEAIRCLKRYVAREVFAALPRSEFVLDSP

SEQ ID NO: 365476 - protein, 392 aa, unidentified
MIYVGIDIAKDKHDCFIINSDGEILFHTFTISNNHEGFNTLLQRIESVSDDFTKVKVGLEATGHYSYNLLGFLLDKGLPTYVINPLHTNLYRKSLTLRKTKTDKVDSRTIATMIMSDMNLKSYSDISYHNEELKSLTRYRFDKVKERAKLKTSISRLVNILFPELEKLVPSLHLSSVYALLSEFPGAAQIAASHLTKLSNLLSQASKGRYGKETAILFRETARSSIGSVMPAKSLELKHTIKLIQELTAEIDEIEAAIKQIMDEEIHSPILTIPGISYRMGAMILAEIGDFNRFDSADQILAYAGMSPSTYQSGQLNNCYSHMEKRGSRYLRYALYNATKYVCQWDESFSAYLAKKRSEGKHYNVALSHATKKLVRLIFAMEKSGRTYQPAA

SEQ ID NO: 365477 - protein, 368 aa, unidentified
MTEHITTHVGLDVHKNSTAVAVASQDRRSEFVGTLGPELTELCRVLDKQGSPQAMQIVYEAGPCGYGLVRALRTRGYRCDVIAPAKVARRPGDRVKTDRRDALHLAEQSRAGALTAVWVLEEADEAIRDLSRAREDAVRARLKARQRLQAMLLRYGHRYSGKTRWTAAHERYLAQRSFPYAAQDLAYVEYREAVSESQQRVERVTEALREQVQQWRMQPVVSALMTLRGIDFVAATTLVAELGDLRRFAHPRELMSFLGLVPSESSSGDVRRLGAITRTGNGHARRMLVEAAWNYRFPARISRALQARQEGQPQAVRDIAWQAQVRLSRRYRALKARQINHNKICVAVARELTGFVWAIARQVELPAA

SEQ ID NO: 365478 - protein, 352 aa, unidentified
MQHFIGCDVHTRNQVVAWIEAETGEIKTRRLEHAGEEVRKFYAQFPRGTVVGIEATFPAYWFERLLGELGHELWVGDAARIRASEVRYQKTDPRDAEGILDLLRTGRFPRIWVPSLEERDLRQLLVHRMKQVRARTQVKNQLHALAISQGVCRGRKLWSAKGRQELESLALLPWAARRRKELRESLDRWDEQVRELDRAVEEAGREREEVALLRTHPGVGMVVGLAFVLSVGPVERFPHSRKLVSYWGLNPREDSSAGRQRLGSISKQGNTMMRWLLVEAAQTAARLDPQLRRTYQRLKRQRNSGVAKVAVARRLVVRLFWMLRTRHNYTQLVHMSGSPSSAVVPPQGGPKL

SEQ ID NO: 365479 - protein, 460 aa, unidentified
MKNKPSPDRARKRLTNHLDQVNLYAAGVDIGSENHYVAVPEGLDDEPVRCFSCFTGDLERLADWLVQIGIQSVAMESTGIYWIPLFEILEERGLEVLLVNARHVKNVSGRKTDVLDCQWLQQLHTYGLLAGAFRPQEQVTALRAYMRQRGTLVRYAGSHIQHMQKALRQMNLLLDNVVTDVTGKTGMTIIRAIIDGARDPNKLAAYRDPRCKKSAQEIAQSLKGHYREEHLFALRQSVELYDTYQTKILACDEAIEQQLNHFDAQGDPEQLPVSKKKQAANAPAFDVRGELYRMSGVDLTAIDGVSDITALKVISETGTDMSRWNSEKHFASWMGLSPGNKVSGGKILSSKTKPTTNRAAAALRMAAFTLSNSKSALGAYYRRMRSRHGAPKAITATAHKLARLIYSMLKHGTEYVDQGQDYYERQYQDRVMKNLKRRAAEMGFALVPSTGDNGLVSENQ

SEQ ID NO: 365480 - protein, 427 aa, unidentified
MNYTQNRKIEQVTDQTLVIGMDIAKQKHYASMVDARGRVLKKPFPVIQSRSGFEQFYASIQEAMKEFGKTEVIVGIEPTGHYWLNLAYFLEEKGIPLVMVNPMHVKRSKELDDNLPTKHDAKDALVIAKLVKDGRFSYPRILHEVEAELRAGSTFRESLTKELNAVRNQMIRWLDRYFPEFVQVFPSFGKMALVVLEKTPFPMDIANQTVEGLMERYRQSETLKCPQKPKVQKLLEVARHSIGITEGQQMARIEIATLVRRYRQLEQEIAALTEELTALAQTTAEYEWLQTIPGLGDATIIELLSEIGSFAQYQDSRQLIKLAGLTLKENSSGQHKGQKRISKRGRKRLRALLFRVMMPLIRHNEAFRQLHEYYTTRPINPLRKKQSIVVLCGKLLKVLYAVCVKQQAFDGERMIQDIFSQSQAQAA

SEQ ID NO: 365481 - protein, 326 aa, unidentified
MHYVGIDVSKAKLDCTWLRDPATGKIKSKKHDNTSSGHKALVQWLSKNVSTDPNEILVVMEATGIYHEVVAYALFEAGVRVCVANPARTKEFANSLGNTHKTDAKDSVVLAKYGYLIKPDPWQPEPPEARELKALNGHIEALEKDIQRSQNRLEKAEFNRASERVIKSLHILIEQLQTEKKRLESDIDDHIDRHPQLKKDRALMESIPGVGKVVSRTMLSVIHGRSFQQAGQLAAYIGLIPRIQESGTWRGKSRLSKQGSPKIRAKLYMPAVTSIQHNPDIRAQYERLLKNGKSKMQAIGAAMRKLVQICFGVVKHQSEYRPQVAI

SEQ ID NO: 365482 - protein, 316 aa, unidentified
MADKIAGIDVHKKVLMVVVMDKRAPESKPERRRFATMPGELCRLSKWLQELGVEEAVMESTAQYWRSVWLELEPHMCLHLAQAFSNRAPRGRKHDFKDAERLVRRLIAKELILSFVPGGEQRIWRNLTRMKLQLTRDRVRIQSQIECLLEEMRIKLSIVVSDLLGSSGLRILRALAEGETDAKNLASLGDERLKCTEEQLVEALTGRPHPMHRQMLALQLERLRLLDEQIAKLNSLIAQAMKPHQDAVIRLAEVPGLGIDSAQQVIAEVGVTASTFSSAAEFTSWVGTCPGKEESAEENSSSRSAKGNKYMRRVLN

SEQ ID NO: 365483 - protein, 346 aa, unidentified
MKITTIGIDLAKEMFQVHGVDTHEKALLRKQLRRSEMAKFFANMEPCLIGMEACSSAHYWARKLGEYGHTVKLMAPQFVKPYVKTNKNDIADAEAICEAVGRPNMRFVPMKNIEQQAILSVHRARQGFVKARTAQANQMRGLLSEFGIVIPQGIRSIMKRIPEILEDGENGLPGTMRQLLERLNDHLKELSRQVEELEFQIKRWHKESELSRKLEAIPGIGPITASAIVATVGDATEFKNGRQMAAWMGLVPRQHSSGGKQNLLGISKRGDTYLRTLLIHGARAVIRFAEHKAVPESWLCKLMARRNKNVATVALANKNARIIWALLAKGTTFRLDHTSVACAATV

SEQ ID NO: 365484 - protein, 351 aa, unidentified
MVVVGADVHKRKHTFVAVDEVGRKLGEKTVNATTEGHGSAIMWAREQFGVELIWGIEDCRNMSARLERDLLGAGQQVVRVPTKLMAQVRKSARTRGKSDPIDAEAVARAVLRQPGLPIASHDEVSRELKLLTDRRDVLVAQRTSAINRLRWYVHELDPERGPAPRSLKTAKHQQALQAWLETMPGLVAELARAELADIIGLTTEINALENRLSVRVRAIAPTLLDIPGCGDLSAAKLVGEAAGVARFKSEAAFACHAGVAPIPVWSGNTQGQMRLSRSGNRQLNAALHRIAVTQIRMPDSQGHTYYQRLIASGKTKTAARRCIKRRISRRVFQALLTDHQTRNQAQQPAAA

SEQ ID NO: 365485 - protein, 418 aa, unidentified
MGKINEFCAGIDVGKRFLLCCALTGAAQEEPRSQTRRFDATVRDLVHLRDWLISKSITHVVMESTGSYWVPIFNILEGHFTIVLANPEEVKNRKGHKTDRKDAEHLADLLRHDHIRASYIPPKPVRDLRDLTRRRLQLTQDASRERNRIEKLLEHVNVKIGNVLSDVFGVSGKSMLLALLDGDMSAERIAHLALGQAKQKITQLTEALEGHCMRDHERFLIRSSLRHLACLQEETEEMDAEILRRMQTPPFREAFLLLQTIPGIGQLAAASILAETGTDLSTFPTAEKMASWAGLCPGNRESAGTRKGSQTTKGNPYLRSTLVQSAWAATRKRGSTFQLRFRELAPRRGQKRAIVAIAHQMLTVLYFMLKNNIPFRGSDTVPQKHRRLRRAHHHLRCLRRLGITVQVCGSLEDAPSTG

SEQ ID NO: 365486 - protein, 349 aa, unidentified
MGMLADRVDHVIGVDTHRDSHSVAVCTPSGAVTAETTVAADAFGYKRLLRFAGEQAHGRRVWAIEGTGSFGAGLTSFLLERGEWVVEVDRPARPARRNGAKSDELDAARAAGEALSRKHLAQPRRRGDREALRVLLATREGAIGARTKAIGQLKALIVNAPEQLRHHFRKLTTDEQLARCARLRTSPTQSTEHRATIIALRSCARRALALEAEAADLESQLELLVRELAPMLLAEPGVGVISAAQLLNAWSHQGRFRSEAAFASLAGAAPIPASSGRVVRHRLNRGGDRQLNRALHTIVLSRLAHHAETKRYADRRTADGKTPREVKRCLKRHLARRLFRLLETSVEVA

SEQ ID NO: 365487 - protein, 413 aa, unidentified
MQNLLEVCCGLDVHKEVIVACLLKGRLEEEPEPIIREFPTLLSGLDEFKKWIMENGCRNVAMESTGVYWFPIYNVLESILYGEERVNIIVANPHHMKNVPGKKTDVKDAQWIATLLRAGLLAPSYIPPKEIRELRDWTRYRDVLIKEMVGHKNRIEKHLQQCGFKLSTILSDIFGMSGTLLVKRLCEKGALEERDVVECLKGTLRGKVSEVRLAVAGKLSEHDRIFLTDLVKVKENCDREIEDVEQRITEYSEKYEPAMQALETIPAVQRRASAIIISELGVDLSMFQSAGHLCKWAGLCSGDNESAKKKKTMRITKGNPRIKSVMCQCAWAATRCKKFFLRDWFYRLRARRGTKKALIAVARKLLAIVWHVLTTGETYDEARYEQTKKNDEERRKQKLKAEAAKLGFKLMPV

SEQ ID NO: 365488 - protein, 367 aa, unidentified
MKKNSSFGGGARTRFVGLDLADKSSRFIGIDGRGGQTEEGAVAMTPAGLERAFGGRQRCRIALETGTHSPWVSLALTEMGHEVIVANPRQVALIYRNKRKSDRIDARLLARLARSDPELLYPIRHRSKQAQIDLAVLRSRDLVVRTRTRLINHVRSVVKSHGERLPSCGADAFAKKGAAFIPAALKPALSPLVDQIAGLTATIKGYDQEIEAMLERYREAAVLRQVDGVGPLTALVYILTLEDPARFATNRDVPAYLGLVPGRKQTGASDPEMHITKAGDAFVRKTLVQAAQHVMGRFGADCDLRRWGLRLAGISATPGGGLTKGSKQRKKKAVVAVARKLAVLLHALWRTGEVYEPFRQAEKKEAA

SEQ ID NO: 365489 - protein, 342 aa, unidentified
MDRTLYALDLAKQVFQVFWVEGRSRTREKRLKRAQVLEFFARVAPARVAMEACGSAHYWGRELMALGHEVMLIHPRYVRAFVKTNKTDAADARAILAAASQPGMRSVPVKSLAQQTVLALHRVREGRRDMRTALMNQLRGLLAEFGVVLKRGRQAGLAELRGRWPELEAKLPGVMMRLLREQCEAIGRLEREVHELEGRIRAEHAGDERFAALTSIPGIGPLGASALLAQLGTGQQFHSGRGASAFVGIVPRQHGTGGRVRLGAISKRGDPYLRTLLIHGARSVIAKSKQHSPWLKALIARRPKNVAAVALANKNVRIAWALLTRGGRYQPDHPPRARAAAH

SEQ ID NO: 365490 - protein, 347 aa, unidentified
MNYIGVDCHISSLDFAVVNERGTITQKAKVNTGVKEFMAFVKSIPKPRKIFIEEGELAGWMLETSLKFGEHLIITDPKINKWIGKAGQKNDPIDAEKLAQLARGKYIKEIYHPVNNRRRFKDLVFAYHDTVKSQTRIKNKIKANFRRNGIKCSGDTVYSNKYREKWRERLSKNKITHLIIEELWVQLDQVGESKEKLKRNIRIQSKQYPEIKKFSKVPGVGLIHASTISAIIETPHRFANKKKVWMYAGIGLMERSSGETVYSRKLTREYNRPLKNAIKKAAEVAILAKDNQFRRQYLRLTIEKGIASHRAKLTVARSMLAALYGMWKKGEEYDPEIDNKRDKGNKK

SEQ ID NO: 365491 - protein, 369 aa, unidentified
MDKDTTYVALDDSKRKIVAGILRPGAVEPELREIVNDPRQIRRLFERLKREGPVTACYEAGVSGYDLHRQITALGVVCAVIAPALTPRRPGQRVKTDRRDAAKLVRLFRAGELTAIHVLDEGEEAVRDLVRCRDDLRRDVLRWRHRVLKLLTRHGRAYLAGKNWSQAHWRWIREQRFDLPPLQRAFEATVFALEQAWARQAELDKELEAVAGTAPYREPVGWLRCFRGIDTLSAIILLAEVVDFQRFRRPRELMAYLGLVPSEYSSGESQRRGALTKAGNSQARRVLIEAAWHYRHRPTIGRALASRSQGQPDEVLSQAWRAQQRLHRRYRHLVGHGKRPPVAVAAVARELVGFIWAVMTRHESRRQAA

SEQ ID NO: 365492 - protein, 343 aa, unidentified
MKLHAVGIDLGKTVFHLVGLDSTGRVVIRKKCSRKQLLAFSANLEVKLIGMESCSGSHFLGRALRDQGHEVRLMPAQYVKPYVQTNKSDFLDAEAIAEAVQRPRMRFVPIKTEEQLDLQALHRVRERWVMRRTSVVNQIRSLLLERGLTLPKGRRYVDQMLPRILEDATLRLSDSLCVLLAQLKLELGQVTARVDEVDRVIQKTAKENEDCQRLTEIPGVGPVTATALVAGVGNAGEFRKGRNLSAWMGIVPGEYSTGGKQKLLGISKRGNKYLRTLFIQGARSVLQQRHKQAPGLSEWLAQLLARAHQNVVIVALANKLVRMAWAVLCKKERYRAPVLAVTT

SEQ ID NO: 365493 - protein, 431 aa, unidentified
MARYSFLIEYDGSPYKGWQRQNDMPSVQGALETALARLGESGILVQGAGRTDAGVHALGQVAPADGVDGSCTIGVVMRHIAVVTNCLRGATQMHVTTIGLDLAKNVFQIHGICEDGEVAFNRALRRAQVLTFFESLEPCLVGIEACGTSHHWAREISKLGHKVKLIPPVYVKPYVKRGKSDAVDAAAICEAVTRPTMRFVEVKTPEQQAILAVHRTRDLIIRQRTQTINMLRAQLAEFGIVLAKGIYHALQFAKQCLNGEQPDLPEVAGDVIFELCDQLRFLHSKILRCTRQMNKIARCEKRVALLRTIPGVGPITASAIVATVGSGKQFNNGREFAAWLGLTPLNRSSGGKERLGHISKMGDQYIRRLLVLGMTSRIRSIRTEPEKFDPWFADILERKPSRVAAVAMANKTARIMWAVLTRNEPYKVRSI

SEQ ID NO: 365494 - protein, 318 aa, unidentified
MMSTQYNYAGIDIAKRNFVIAVSSLSKTKTETNNPKGIAHTIEYLKKHNVALVVMESTGGLEVPAAKAIHRAGIAVIIANPRQTHQFAQSQSLTKTDAKDAKMLAFFAQMTAQKEGWQTMLYQPPTEAEEVLEALVNRRNQLVDMRTAEKNRLHQVHETQVESVKQLIAHFDRLIDELDKQIDDHTHTHFDGKAQVAEQIKGIGSITTATLMAMLPELGRLSHKRIASLVGIAPHPRESGETKFKSRCFGGRSAVRKALYMATVVATRFEPLIRDFYQRLLSKGKPYKVAVTACMRKLLTVLNARMRDYFAENGIRTA

SEQ ID NO: 365495 - protein, 350 aa, unidentified
MDKELYIGVDVSKQTLDLAYYDGESIDWKKAHIKVSNNNAGFKRIGSWVAKVSKGFDIVLFCMEYTGLYTQNFRLWLEEKHYIYRMVEPRKMHRFEPDLDDGLRSLDRIKTDELDSFRIAIYCEQNHRKILRNPSKLPPPVYFKLKRLLAERKQTVKQSVLYKQQLHDICAYDTDLSVERKNGQLKTLNDALKGIDNEIDMYIKEDADISKNFSLLTSIPGIGRVVALETIVLTENFMAIDNPRKYACYIGVAPFKKESGTSVRKGSSVSKKGFKQAKADLSIACLVCMQHIPNIRDYWERKRKEKCSGIVFNAIKFKMILRMFAVIKRGTPYVETDNYRNGKNKQPGVN

SEQ ID NO: 365496 - protein, 313 aa, unidentified
MMIDRTVLGIDISGAHLDVFAHPEGRARRLTNDADGIAAVTALAARRQAFVVIEATAPFDQPLIRALEAAGLVFHRANPRRARDFARSAGLLAKTDAVDARMLALYGTALALRPTEKVAPARLALQGLVSRRDQLVAMRKAERVRLRTMSEPCIAESLLAVIALLDAQIRTIERRIEATVAADAALARQRRVLRAAPGIGPVAASVLLASLPELGRVSRRAIAALAGLAPIARDSGLLRGRRCVQGGRKRVRDALYMAALAAVRTTPWKALFATMTTAGKPAKLSLIAIARKLLVTLNVAIRTGEYQPRPATP

SEQ ID NO: 365497 - protein, 355 aa, unidentified
MNSEKYIGLDVHQATISVAVLDSIGTLVMESILETKAATILEFFAGLRGTLSVTFEEGTWAAWLYDLLKPHVAKLVVCNPRKNALLKDGNKSDRIDAHKLAELLYLNKLSSVYHGETGVRMLRELARSYLTIVKDLTRVMCRLKAVYRSWAIPCAGRDVYYTRHRDEWLGKIKEAGVRRRAERLYQQLDMLQYLRQQARRELLAESRKHAITVKLRQIPSLGPIRSALAVALIQTPHRFRTKRQLWAYSGLALETRTSAEYCYVKGGLRRSKKQISIRGLNKDHNHDLKGLFKGAATRASVLPGPFQDFYQRSLAKGIKPTMARLTLARKIAAITLTLWKKGENFDADKLKSQAA

SEQ ID NO: 365498 - protein, 406 aa, unidentified
MRGPVITVDVSKGSCHYQPFLENGKPLRKAKVLHDTIEGFSDLKETIEKVKEKGVVKTVPVVFEATGVYHRCLQKYLDDNSIPYFIISPLLSSAYRKTNLHGNKTDPLDCAHIAKAYYCEDDLMPFFKQEDRFIKLQKLNRYYEAELIHLKKRKVCFRSFLDIIYPRLDKCFGSNGSLYDPVAMEVLKKYPHPVLLLKHKEETVIKVIEKKVNHDKKFIEKIVYKMYECAKHCYSGAEATDLEVMKLPEMIDELQSQMDVCDSILKELVDEARKIPYFECVRSIVGIGDNLSARIIAELGDMSRFPNRRAISAFAGLNPKILQSGDVDGTHLKISKKGNRHLRCLLYLGASCNYRLKKHDPLYEFNQKKRQQAQSPLKSKAANIATAHKLLTLIYALSRSGEMYRF

SEQ ID NO: 365499 - protein, 449 aa, unidentified
MSNGSGVSRGDRNRNARLGRLRELVPVMNAIVGIDLADKKQMVVVTDHDSRVLARRTFRCRAWDLGLALDWAGSQAASKGFAGATVSCEPTGHRWRVLGQLAADRGMPFVCVQPMLTSWARRSEDLTFDKTDEKDAVLIARLTAQLRCYVPEPVDEIWGRLRHLGARREQLIVETTSQVQQIRALLECVWPASLDAARQPFRSVTWAAAMSVIVERDGGDLARTRRLGLARLEALTGRLIVARGRHKPCRRIVRQLFTALSDPAGVLAHRPGALERVALLLQDWDHAQRRQADTEARMLTVLDELELTELVTSITGLSAIGAAAILAETGDPHRFATARALVKHAGLAPREKLSGTFTGLTKLTGQGRPGLRLAAWRAVWGAQRSNPVYRARYQHLISREQNKLRPTQAQTVVAAAILRQLYAVITSGQAWDPVIATHGKRHPVLPAAA

SEQ ID NO: 365500 - protein, 453 aa, unidentified
MRKPQVVPDEDHEVVYERVAAVDVAKASGVVCVRTPGTKRPGRFVNRIWDNVPATRARIAELGRELARCQVQMVTLESTSDYWRIWFYVLESVGLAVQLVSASQAKNLKGRPKTDKLDAMWLARLTQWGMLRPSFVPPAAIRAVRDFTRARQDLIRERTRCLQRLEKLLEDAMVKITSVVSDGMKAKSSVAMVQALIAGERDPRKIADLAKGPLRGKRDQLAEALDGMFDSHHGVIAQMLLDQVAFLDQRITAMEDQAIAALAQVQESWGVDATGETGPGCGTGPDSQVLAAAHRLAEIPGISLMLAIVIIAEIGLNMAAFPTPAHLVSWMGLCRSASQSGTRHGKGKQKKGNSYARAAAGQAAIGAAGTATFLGERYARIARRRGKAIAQVAVARSIMIIVWHLLNDPAARYRDLGPDWHASHITRDKKIRTHLRGLQALGLTITITADEAA

SEQ ID NO: 365501 - protein, 484 aa, unidentified
MREYGLGVPNASREDVLVSKASGISRSERRRNARKERLRALVPRDGAVVGIDLGEGKQALAVIDHDVRVLWRKTVRVPAHRLGEAIELAAGAARAAGFASVTVACEPTGPRWMQVQRLCAERGLPLVCIQPLVSHIAREQQDYTTHKRDESDAVLIARLAAELHCYVPEQLDAAWAQLRDLGRRREQLVTAQTASVLRIRSFLSVAWPSAVTAAVHPFGSLTWLAAVQVVTGRCGADPARLGLGEQEFCALVGDAARAWGAVRADKRIARKVLAMADDPDAVGWSRRGLFRRIGDELADLARTRALLRTVEADMAAVLGDELGLARLGDIPGLTLAGAAVILAEAGDPARYETSSSLVKHAGLSPADNASGAFEGPSHISRRGRPGLRTAAWRAVFPLLAHNPVMAAKHQALIAAAEQAAAAVGAGPGSARAARAVKAARARARVACAASLLRWIYFMAVHDAGWDPVAASGGRLSPDEPAAAA

SEQ ID NO: 365502 - protein, 361 aa, unidentified
MRIIGCDLHARQQTLAMLDTTTGEVVTMTLKHEGNNVREFYSKLPRPVRVGIEATGSMQWFVSLMEELGMECLVGHPAQIRAAEPRKQKHDRRDADLILKLLAENRFPRIWLPSKELQDLRALLRHRHQWVRIRTRIQNALQAIALANGLRRGPSLWSQDGQSKIAALPLAPHTAYRRSELQAMYAKFEEEIEKLNQRVEEQACERPGARLLMTHPGVGPITALATEVFLGDAARFADSKALASYVGMIPSEYSSGGRQRLGGVSKQGNPLLRFLWGEAAAHAVRRDPELQRFYRRKLVQKGLGKSRVAVARKLGIRLWIMLRDEIDYNEFCRRGQKQQKSSEACVGMPDTGHGAKQSPAD

SEQ ID NO: 365503 - protein, 401 aa, unidentified
MISVGIDIAKGKSTVCILKPYGEIVSKPFDISHVEKDLGELAAMLLRFDDEVKVVMEATGIYHLPVLTYLQEKGLFVAVINPYLMKVYRSGDLRKAKTDKIDSRMIANYGIEHWFTMAEFKASDDVYGELKMLGQQYRHYMKLHIMSLHELTHLLDYTMPGIKGMLASWNEGNRKDKLSDFVERFWHYDTITCFSETEFIKQYTFWAKEKKYHQSQDKAQAIYALAHEGIPTLSSETPSVKMLATEAVRVPKEVDAALSIILSRMQELAKSLPEYSVVRGMGGVGEVLAPKLIAEIGDVRRFHSGKALIAYAGIDTPPYESGQFVGSNRKITKRGSAALRKVGYETMRCIKTHPRPDDPVYQYIVKKEAEGKAKKAAKIAGLNKFLRIYYARVKEVYTDIK

SEQ ID NO: 365504 - protein, 425 aa, unidentified
MSPPLLPSYERYLAVDLHKHYVVVGGLNAQQEMIVAPRRIDLSDWPAWAKTHLRKTDILVVEATTNAWDFYDQVQPLVGRAVVANAGKIAGLVKTKVKTDRVDVLKLAKLLVAGMIPEVWVPPLDVRDLRALLAHRRQLIKNRTMLKNRLQSILHRHQLLPPEGELFGAKNREWWTALKVSPTERLHTQHDLTTLTTLEPQIAEVEADLYRLSTTSPWMEPVTFLLQLPGFGVIITMTILAAIGDIRRFEEAQKLVGYSGLGASVHISGETHRTGRITKTGRRDIRWALVEAAWIAVDTHPFWKREFERLARRMDKNKAIVTVAHKLLIAVWHVLTERVADKHAEPKMVAFKLMRWSWELTEEQRGGLSSRQFIRLGLMQLKLGENLTRVVYGNLPRRIASVEELLSVRPELRTLVNNPAQPSAN

SEQ ID NO: 365505 - protein, 327 aa, unidentified
MTIIVGIDIAKDTFDVYLLNTVGKVQEASFANSKQGINQLHQWLKKQGAKHAQVCLEATGIYSDLVAETLHSRKYQVSVVNPARIKAYAASQMRRNKTDALDAALIADYCRTQQPDPWTPPPPELKQLRALIRHLDDLKQEKQRASNRLDAQNSAQAVTQHLEAQISLLNEQIKHTLRLIHDHIDHYPHLKQQRDLLDSIPGIGDLTASYLMAELGDVTRFQHVGQLVAFVGLNPRQHQSGKKQTTHGISRMGRAALRAALYMPALVAKRCNPRLRAWANQLSQRGLTGKQVIVALMRKLLHLAYGILKSGQPFDPDYAQQFHPSTT

SEQ ID NO: 365506 - protein, 461 aa, unidentified
MSANKPTGAKKKSVPKKVDWKALEVVHPDAAGIDVGGSEHWVAVSPDRDPEPVRRFGCFTADLREMACWLVEKGVRSVAMQSTGVYWMPVFEILEQQGLEVYLVNAQHTKNVPGRKSDIQECQWLLKLHAFGLLNNSFQPNDEIRIARTLWRHRGNLVAEASSVVQRMQKVLTERNVQLSNVLSDISGVSGMKIIKAILDRVRNPWELAALVEPGVKATPEDIVKSLEGNWREELLFVLRQHVEFYQIYQKKIRACDLQLRKHLQSLGSKLDLQAQPLGPRPKGKKLSRNAPTFDLRTELYRITGIDWSQINGIDVLTAQTVISEAGADLSAFPSEKQFASWLGLCPTNQQSGKKILNRRTRKVVNRATVAFRNAAMTLVRSQSYLGAQYRRLRTRLGAPKAITAMARKLACLFYRLIKHGQQYVDQGTEYYETRYREQQIRALAKRAQKLGLQLVIPKTA

SEQ ID NO: 365507 - protein, 349 aa, unidentified
MTEQRISYAGERVYVGVDVHKETYTVTCVCRKQIVKTATVPAEPASLAASLLQWFPGATLTSAYEAGFSAFVLHRALTQVGITNIVVNPASIAVAANDKVKTDRRDSKRLAIDLADGRLRGIYVPTEAEELARLLPRTRAQIVEHRATLARQIKAKLHQFGLIAPSSRRVISNRYLREIATWPLPPELGVSLTLLAEQWRFAPRQLIEMRRLLRDQAKAQQETEKVYRSVPGIGAVVARTLATELGDMTRFANERALFSYTGLTPSEYSSGSSVRRGHISRQGSSRVRHLLVETAWRALPRDEVLQEIFDRIAATRGKKRAIVAIARRLTGRIRACFRQGTTYAVGTYA

SEQ ID NO: 365508 - protein, 441 aa, unidentified
MAMRKREEDEVFPNAAGIDVGGSSHWVAVPRQADDEPVREFGAMTDGLNAMADWLLACGVDTVALESTGVYWIPVYEVLERRGLVVWLVDARQMKYVPGRKSDVQDCQWLQKLMSLGLLRAAWRPGDEVCVVRAVVRQREVLLTEQASWVMRMQKALVQMNLQLTEVLTDVMGMTGQAIVRAIVAGERDPKVLARHRNGHVKASAADIERALTGNWREEHLFVLGQALAMVDSLAQRVLECDAKTEALLAPLGRHEVELGGPGKRRGKNTPGFDARTALARWAGVDLTRINGLAVTTVMTILSEIGPDLSRFANVKHFCSWLGLCPGTKVSGGKVLSARTRRSTNRVRQALKLAAMSLSRNDSALGAFYRRLCSRMDKPRANTAVAHKLARMVYFMLTRGEAFVDQGQQHYEEQQRQRSIDALRRRAIALGFQITPAVQPA

SEQ ID NO: 365509 - protein, 413 aa, unidentified
MDVLHPRCCGLDVHKSSISACILLREAGRVQKHQRRFGAMTQELQELAEWLRQFGVTQVAMESSGVYWKPVWNILEGQFTVVLANAQHIKNVPGRKTDQKDAEWIAQLLQYGLLRASYIPCEIIRDLRDLTRMRTSLSQEASRISSRIQKVLEDANIKLASVATNVLGKSGRAMLEDIISGEDNPEHLASLALGHLRVKIPQLRLALEGKIRSHHRFLLGRLLDQIQFVEHEIALLDERLEDIGRQRPDLAQAVARWDTIPGIDRVAAWALLAEIGDNMAQFPTAEHLASWAALCPGNHESAGKRLRGTTRQGSPWLCRMACQCAWAAARTKNTYLSSQFRRLAARRGKKRAIIAVAHTIIVIGYHLQKNQSNYEDLGGNYFDRIHSDGLKRYLVKRLQQLGHKVTLEPMEAA

SEQ ID NO: 365510 - protein, 369 aa, unidentified
MKKQTKTNPSVVLTSPAAVVSGFTIGLDLGDRSHYVCVLDAAGEIIHEGPLLNERVALALLLTKYPAATVALEAGTHSPWISRYLTGLGATVIVANPRKLHAITHHERKCDRRDAVMLARLARADVALLHPLQHGSAQAQLDLLGLKLRDSLVRTRVNLINTVRFTLKSLGHVVSNPSSESFHKNILTAVPAECLPVVQPVLAVLTLITEQIKTLERDLVARSKRDYPVTQRLQQIAGVGPLTALCFVLKIGEPTRFGRSRDVGPYLGLCPGRDQSGGTDKQLRISKCGDGLLRRLLVSAAHYILGPFGPACALRAYGQHLIGTSVREKKRAVVAVARKLAVLLLSLWKHGTDYEPRVPAAPALVMIPA

SEQ ID NO: 365511 - protein, 391 aa, unidentified
MSLYFVGIDISKYKHDCCIISAADQQIISKFTITNDKDGFEQLLTALNSLSNPEDIKIGFESTAHYALNLELFLENAHHSFMEVNPVLIKEYKKSTTLRRTKTDSVDCESIARWLMTVEYKPHSKGFYHAYSLKSLTRLRDRLIRQRSFYLVKITNVLDHTFPEFKPFFNERLSKTALYLLENYGSAEKMARMNSVSYEKLRSISRGKFSPQQFIALKELAANTVGVNNSIFDVELNSLLTLYKTLVTEINTLEKEINLLIEEVHPHYLSVPGIGSISAAIIYSEYGDISNFDNPGQMLAFAGIEPGINESGTESHGGRMVKRGSSQLRYALINCCLPLIRFDMTFATYYAKKRAEGKPHRVAITHVAKKLIRVIYALERQNTDFCVQKLR

SEQ ID NO: 365512 - protein, 367 aa, unidentified
MKKVSTAVAKQSRNFFRQTLTIGLDLGDRNSWYCVVDEAGQVKREQRVRTTTKALQEVFGAMPRSRIALEIGTHSPWVSRLLGELGHEVIVANARKVRLIGESRKKDDRLDAQTLARLARIDPELLYPVKHRSAKAQADLAMIRARAGLVRARTGLVNTARGLAKSYGERLRGCNVRNMDPEKAEGLSPELQRALEPLLAAIEELSERIVEYNDRIEALAQTTYPQVELLKQIKGVGTLIALTFLLTLEDPHRFRKSRDVGGYLGLQPGRRNSGQSEPQLHISKEGDPYLRTLLVQGAQHILGPFGIDCDLRRWGLKLAERGGRNGKKRAIVATARKLAVLLHHLWVSGEVYEPLHNSDRMAITAAA

SEQ ID NO: 365513 - protein, 345 aa, unidentified
MIIGCDFHPSWQQVSWLDTETGETGEQRLVHAGGDAERFYRQLAAPALIGMEATGNSHWLVDLLSELDHELWVGDAAQIRACYVRQQKTDKRDAAHILKLLVEGRFPRIWMPSSEVRDLRQLLLHRYKLVIIRARVKNELQHLCLNKGVQRQRKLWSKAGQQVLRELPLKLWAGRRRDDLLGLMAMLDQQIDPLDEAVKAEAQRDKMALLLQTQPGVGPITALAYVLTMGDVGRFPRGKQVASYLGLIPREHSSGGRQHLGAITKQGNRMLRMLLVEAAQTAVRLDPQFRKEYLHRCHQKPKAVAKVAAARKLAVRLYWMLRTQKPYPEVVRIESSPRVPLVGAS

SEQ ID NO: 365514 - protein, 350 aa, unidentified
MVVVGADVHKRTHTFVAVNEAGRKLGEKTVMAITAGHAEAVMWVREHFGADVVWAIEDCRHLSARLERDLFALGQKVVRVPPKLMAQTRASARTRGKSDPIDALAVARGFLRESDLPVASHDEVSRELKLLVDRREDLVAQRTATINRLLWRVHELDPAHAPKARSLDLAKHRGILRDWLDTQSGIVAELARDELADVTRLTETINALAKRIGERVRTVAPVLLALPGCGELTAAKLVGETAGVSRFKSEAAFARHAGVAPVPVWSGNTRGQVRMTRSGNRQLNAALHRIAVTQIRLDGLGRTYYRHRLAQGDSTPEALRCLKRRLARVVFGHLHTDHNNRQEPCQMAAA

SEQ ID NO: 365515 - protein, 349 aa, unidentified
MIVIGIDPHKQTLTAVAVDGGTGQALGELTVPARAPGFERLVEWARSLDAERSFAVEDGRHVSGALERSLIDRGERSVRVPPRMMGESRRTDRISGKSDPVDATAVARAALRHHDLPEATLAGIEREIGLLVAHREMLVNERTDRICKLRWLLHDLDPDLAPPLRTLDRFKTLDALATTLRALEPSVVKELCLELLNRCREITVRANELERRIRAVMKTHAPALLEIPGCAALTAGKIVAETAQVCRFPTEGHFARYAGTAPIPASSGARHRQRFNRRGNRQLNAAMHRIAVTQIRMHEPARVYLATKRAEGKTKTEAIRALKRHLTRVVFKTLTSMDRPTDRLTAAAA

SEQ ID NO: 365516 - protein, 354 aa, unidentified
MSGDFKYMGMDVHKESISIAVMNGAGKFVMESTIETKAATILQVIHGLQGDLYVTFEEGTWAAWLYDLLQQHVTEVVVCNPRKNALLKSGNKSDRIDARKLAELLRNGSLSGVYHGENGIRTLKELARSYLTISKDLTRVMNRIKALYRSWAIPCEGTSVYAPRHRSEWLNKIPHTGVRRRAEYFYGQLDGLNALRREVRRDLLTESQKHRAAKLLRQIPSIGPIRAALLIALIQTPYRFRTKRQLWAYSGLAIETHDSAQYRYVAGQRQRSKKPQQLRGLNENHNHDLKAIFKGAATSSSDGPFHDFYQGLLMKGMRPSMARLTLARKIAAITLIIWKKGEQFDAEQLKPQAA

SEQ ID NO: 365517 - protein, 380 aa, unidentified
MIVIGTDTHKRSHALAAVDEGTGKVRGRREIKASADGHLAAVRWARSLDAERVWAIEDCRHAPRRLEQALLAAGERVIMVAPHRMGASRKGERKPGKSDEIDALAVARAVVKDGVEQFPPAFLDEQAMEIRLLLDHRNDLVAERTRTVNRVRWHLLELCPEIEASLKRKALNQPRTVDRVDRQLRHLPARARTRIAREQLAHLRQLNRRIDALQHELAQLILARRPELLAEQGCGPLTAAILLGHTAGNQRFRSEAAFALQCGSAPIPCSSGQRTQHRLNRGGDRQLNRGLHIIAVTRAQHDPATREYLARKEAEGHTTKGALRCLKRHLARRFHHLLSQPPLTPDDDHTTRETIPPPHAPDNVAAKIVGVAPTPMICVS

SEQ ID NO: 365518 - protein, 460 aa, unidentified
MRKTTKSSKRKPEKLPPLDPKCAGIDIGASELFVCIAKNSSQQEVRTFSTFTADLRSMIEWLKASGVESVAMESTGVYWIVPYEMLEEAGFEVLLVNARFLKTAPARKTDVQDCQWIQQLYSCGFLEGSFRPSADIVELRAYVRQRSRLFELSGVQVQLMHKALIQMNIQLNHVISDITGVTGLNIIRSILQGKRNPRALADLSVGACRKNIDLITKALEGNFRKEHLFALEQAYEAYEFFHQQVHRCEKSIEQILLSIQTEVQRPPSKSENNIDPAHPKKCAKKTASNRSPYYFDAPSAIKKITVADLTTIPGIDANIAMKILSEIGTDMSQWPNVKAFASWLGLSPGNKVSGGKILSSKTKPSDNKAAQALRMAAASLYRSKTAIGAFFRRIRGRLGAPKAITAAAHKLARILYRMLTDGINYWEVGENYYEQQYQERVVANLTKKAKDLGFILVPVQ

SEQ ID NO: 365519 - protein, 378 aa, unidentified
MKSTTIIAFDQHAATTVAAVLWAGHRTPALHPLTSDSGTILKFVARFCRAATVTCCYEAGPCGFELQRALRARDIPCEVIAPALIPRRVGDRIKTDRRDAAQLAVLYRAGALTAIHIPTEQEEAARDLLRCREDIRADLLRARHRLSKFLLRHGRRFTGTQKAWSKRHDVWLRAQTWPLPALDQTHRAYLRAVEEALARLRAVEEDLRELLSLEPLQSRVQRLRCFRGIDDLTALTIAAELGDPRRFATAPRTMAYVGLVPSEHSSGTKRAQGGITKTGNGHLRRVLVESAWHYRHHPFVSATLRARQRGAPADVIARAWTAQQRLHRRYARLAARGKPKQHIVTAVARELTGFVWAALTQPSDRPTVERRTLEASMR

SEQ ID NO: 365520 - protein, 339 aa, unidentified
MKLYSGIDLHSSNSYLAIVDETGKRIFKEKAPNDIRAIVQSFEPFRNDLVGIVVESTYNWYWLVDGLMAEGFALHLANPSAIQKYSGMKYADDKHDAFWLAEMLRLNILPTGYIYPKDTRPIRDLLRKRGHLVSLRSSLLISLQNIITRNCGTKMKTNDIKRLRENRVQPYLADNEDLALAGQVSKDSIDFFTKQIYAIEGFLEKKLELTDAYKKLVTIPGIGKILGLTIMLETGPIERFEKVGNYASYCRAVSTQWISNGKSKGKGNKKNGNKYLSWAFSEAAEFARRYDDKARAFYNRKLRKTNFMIAHASLAHKLARAAYHVMKDGVDFMPEKIFT

SEQ ID NO: 365521 - protein, 340 aa, unidentified
MKHSVYGVDVAKRVFQVHCVDMETGEITSKQIKRAGFLEHFVNRAPCLIGMEACGGAQHWARRLMEMGHQVKLMPGKAVKAFVHGNKNDVADARAIWMAVQQPGVKAVAVKTEAQQAVLALHRMRQQLVKFRTMQSNGLRGLLTEYGEVMAVGRAALDRAMSDVLARLSDRLPAVLIDTLREQWEMLGKLDQQIAAIEQRLLAWLKQDKACKTIAEIPGVGLLTATAAVATMGDAKAFKSGREFAAWLGLAPGQTGTGGRVRLLGISKRGDTYLRTLLIHGARTVLTHAKEPSAWVQEISKRRPPNVVTVALANKMARTIWALLAHDRQYGRSYVSVKPV

SEQ ID NO: 365522 - protein, 518 aa, unidentified
MVKTQKRRRSSHLILKPRGTFNPRVQKVGPEHFGIVSVDCAKARSKWMLADFYGNVLIPPTVVEHNRADCEATVARLRQAMQERALHDVLVAVERTGRYHHVILNALAAAGLDVRVVHPFATQQFRLPADPGYKTDDTDLAAIHRAAVNGFALQEVPQDPSWTQLQLLARHRRNWVRKASTLCCQIRESLHAALPGYAACFESLWASQIAFPLFRRIRTAADVQQAGREGLSAWLKEDQVRFQKATLDKLLAWAATAPAGDSAAEMHHRIALALEDDRERKEREIRVMERDLAARLARTPYVRLLSIPGINVVSAAEYAGEMGPITNYAHPKNITGRAGLCPSRAQSDQVDRPDGRLRRCANRTLRFAILQIADNLIACNAYFGKKAAAWKAAGKDARHIRVCVGSRFVRISYALVAGGQFYHHPLARDRSYLLEKLMTFHVKHETPMDPTLADLQATILHVPRSEYAAEAAPLRRELDAIEQDRRRGPQPLGKILPLVLARLGIAVQSGESGARDLT

SEQ ID NO: 365523 - protein, 344 aa, unidentified
MDHFAGLDVSVKETSICIVDDTGRIVREVKVASEPEALLKVLGNPAYRFKRIGLEAGPLSQWLFSALAEAGLPVVCVETRHMQAVLKAQINKTDRNDARGIAQMMRAGLYRPVHVKTLRSQKLRMLLTHRKLLLSKAIAIENDLRGTLRNFGLKVGMVGKVRFEARIQELVENIPDMAVLVESLLIVRRALREQIVILHRRLLAIVRDDEVCRRLMTIPGVGPVVALTYRATVDVPARFRKSKSVGAVFGLTCARYQSGEIDWSGKISRCGDEMMRAMLYEAAQSMLRSKKWSWLKAWAMQIARRRGMKKAIVALARRLAVIMHRIWIDGTEFRWTREQAAAAA

SEQ ID NO: 365524 - protein, 418 aa, unidentified
MPGDRDDTPVRTFRTFSGDLYRLTDWLEETGIKTVAMESTGVYWIPVFEILEARGFEVLLVNARDVKNVPGRKTDVNDAQWLQQLHQHGLLRGSFRPRDGVVRLRAYLRHRERMVDYAASHIQHMQKALMQMNVQLHHVVADITGVTGMRIIRAIVSGTQTPDALAEFRDVRCAASEETIREALTGNYRPEHVFALRQSLELYDFHQAKIAECDTEIEAVLQTLNEERATPEQPLPAVRHAKGRNEPDSDVRPALYTLLGGDLTQIHGFGPYTVLRLVAECGDDMRKWPTAKHFTSWLCLAPGNKISGGRLLSSKKRRSSNRAAALLRIAAVNVGKTQTALGAFYRRLAARTGKAKAVTATARKLAILFYKALRFGMTYVDSGASYYEERYRQRVIQNLHRRARDLGFTLVAGPATNG

SEQ ID NO: 365525 - protein, 402 aa, unidentified
MNAVGIDVSKGKSMVAIMRPFGEIVSTPFEIKHTTSDIHSLVELINSVEGESRIVMEHTGRYYEVLAHQLSEANLFVSTINPKLIKDFDNDSLRKVKSDKADAVKIARYALDKWQNLKQYSVMDELRNQLKTMNRQFGFYMKHKTAMKNNLISILDQTYPGVNTYFDSPARSDGSQKWVDFASTYWHVDCVRKISLNAFIDHYQNWCKRKKYNFSQSKAEEIYGKAKELVPVLPKDAITKLIIKQAVDQLNSASTTVESLRTLMNETASKLPEYPVVMAMKGVGTSLGPQLMAEIGDVSRFTHKSAITAFAGVDPGVNESGSYEQKSVPTSKRGSSDLRKTLFQVMDVLIKTHPQDDPVYQFLDKKRAQGKPYYVYMTAGANKFLRIYYGRVKEYLSSLPES

SEQ ID NO: 365526 - protein, 343 aa, unidentified
MNEAITIGVDLAKNVFQVHGVDAEGGVVFRRQLRRSQVLGFFKKQAPCLVGMEACATAHHWAREIAALGHEVRLMPPRYVKPYVKRNKNDAADAEAICEAVTRPTMRFVAIKSPEQQSVLMLHRTRELMVRQRTMLVNAIRAHMAEFGIVVRVGLPQVEALLATIDNEADDRLPPLARTCLSGLAAQFMSLQAEIGVAEKRIHAWHRASEVSRRLETVPGIGPIIASALAASITDPSVFKSGRELAAWIGLVPRQNSTGGKDRLGRISKQGDHYLRWLLVAGAMAVIRQARRRDTANPWLARLIANKPTKVVAVALANKIARVAWVLMRDGGTYQRPIAAAAA

SEQ ID NO: 365527 - protein, 342 aa, unidentified
MFYIGDDVSDKSSYLYVTDRGGKKIEGQEIPTDKDGYRQYFKKWVGKQVKVAVEAGGHSRWIHDILKKLGISVYIVNPNKVKLIAKNKKKTDKIDAKFLAKLLRVDELPERVFVAEGESRELRDLLGSRHQLVTSTTCIMNHLRGMLKQEGIKLKKKAFHDESTFSRLLMNKSVPKHLHPIITSYEKTITELRKQRGALDDVIAEYGNKDIELLKSVPGIGEVASKTTYAAISTIKRFKRAKQLTSYCGLVPSVFSSGERAAYGHITREGRSEVRHVAVQSVRAILRSTNSESKPLRKWYERLAKRRGSKTAVVALARKLIEIIFYVLRDRRPYDAQLLHVN

SEQ ID NO: 365528 - protein, 344 aa, unidentified
MPQPHHVGLDISVKETAISVVDELGHVAHRAVVPSDPAVLVEHLVRLGFAYGRIGLEAGPLSAWIYAGLVDAGLPAICVETRHMHAVLSARINKTDRNDALGIAQMMRVGLFKVVHVKTPASQQRRLLLTARKLLQRKVNDIENDLRGQLRNFGLKVGAVRPSAFEQRVRELVADMSFVAAVVIPLLDARSALRAQLAKLHKMLLDMVRSDPVCRRLMTAPGVGAIAALTFRTCVDNPARFSRSKCIGAHYGLTPRLYQSGETARIGRVSKCGDAMMRVALYEAAFVALTRSQGRWNPLKAWGVAIAKRRGIQKAVVAVARKLAIILHRMWRDETDFRWTAAKV

SEQ ID NO: 365529 - protein, 425 aa, unidentified
MSAKTSDVDDLMVLYPCCAGLDVHKKTVVACIITTGERGKVSRQVRTFATTTVHLLELSDWLAEHEVSHVAMESTGVYWRPIFNILEATCEVILVNAQHMKAIPGRKTDILDSQWIATLLRHGLLKASFIPPRPIRDLRDLVRYRKSLVYARNQEVNRRPLLLETANIKLGSVASDILGKSGRDMLASLRQGVTDHSLLAELARGKLRGKLPDLREALEGRVQAHHRLLLGHLLDHIEFLEQRVQTLEGELEPYLNPYQAEIALLVSIPGVAETTAATILGEIGAEMSAFPSAKHLASWAGVAPGNRQSGGKRLKAHTTKGNARLRAALAEVVWAISHTKDNYLSAQYHRLVRRIGQAKAIVAVSHSVLVIIYHLLRDKKEYSDLGSTYFETLDQDRVRTRAVRQLQALGYTVTLQTSAPEEESA

SEQ ID NO: 365530 - protein, 411 aa, unidentified
MFEDQPPPAVFVGIDWASHDHAVCVLDQSGRQLAAFTIEHTADGIAALVRRLAKYTPDPGDAPIAIERPNGRLVDLLLEAGHPVIPVSPNAIKTWREGEVLSGAKSDAADARVIAEYLRLRLHRLAPVAPYSPQTKALRIAVRTRDDVVSLRVRVGNQLRALLDTCWPGAATVFADLSSPIALAFLLAYPTPNSAARVGVKRIEGFLARNGYSGKRPAQEVLARLRSAPPGTTDPIISETLRESVVALVGILQAVNTAEKSLRGDIARQMQVHPDGAIFTSLPRSGQINAAQMLAEWGDARQAYDSPDAVAALAGLSPVTNASGKHRAVHFRWACNKRFRVAMTTFADNSRHSSDWAADVYARARARGHDHPHAVRVLARAWTRVIYRCWQTRTPYDPTLHGAARIMQSAA

SEQ ID NO: 365531 - protein, 385 aa, unidentified
MADKIAGIDVHKKVLMVVVMDARTPESKPERRRFATMPSELRRLSTWLQERGVEEAVMESTAQYWRSVWLELEPHMCLHLAQAFSNRAPRGRKHDFKDAERLVRRLIAKELILSFVPDGEQRIWRNLTRMKLQLTRDRVRIQSQIECLLEEMRIKLSIVVSDLLGSSGLRILHALANGETDAKSLALLGDDRLKCTEEQLVEALTGRSHPMHGQMLGLQLERLRLLDEQIAKLNSLIAQAMKPHQDAVIRLAEVPGLGIDSAQQVIAEVGVTASTFSSAAEFTSWVGTCPGKEESAEENSSSRSAKGNKYMRRVLNQAAHAAARSKGTHFQAVFRRLLPHQGIRYIEQGIESEPKLLIYRAKYLAKQLRKFGYNVQITPANRAPA

SEQ ID NO: 365532 - protein, 301 aa, unidentified
MDNCTKFIGMDLHKATIAVAIAEGNGGDPTLWREIPNTQFSVNSMVKRLSKNGETLKFCYEAGPCGYVVYRQLRKLNQNCVVVAPSLIPKKPGERIKTDKRDARSLSRLLRSGDLTNVWVPGKDHEAIRDLCRARFDINKTVRCTKQQLNAFLLRNGIQYTGKRNWTKSYFRWLETVKFDCQTQQIVFQEYIDTVKHIQEHEVSLKDEIIKAIDNWSLKPVVIDLMAMRGVQLITAITLISELGDLSRFRTPRELMAFIGLVPSEYSTGNKRRQGGITKTGNSNARRILIESAWAYHLPAR

SEQ ID NO: 365533 - protein, 345 aa, unidentified
MLYVGIDLHKKTIVLCVLNQAREVRLRKNFLCQETGRIVEFFKQLGPFQAVLEATASYEWLWDLLEPLAERLVLAHPGKMRVIAESWNKNDQVDAFVLAEFLALGKVPAAYRPTARQRQHRALVRHRAYLRRGTTSAKNKMRRILSDYNADRKDLFTSEGLQYLAEVKVSAADRLVLDQLLATWEHLEKQITALDKALKAFAKKAPAAEKEAREVLASIPQVGDGTVDVVVSELGDVRRFSSAKKVAAYAGLVPGQRESAGHKKELGISKQGSRLLRWSLVEAAWRLVRKSPRWTTVFEGISKRRGRKKAIVAVARRLLSVMVAMLRSGQSYRFAASEVQAGLNT

SEQ ID NO: 365534 - protein, 340 aa, unidentified
MLIIGVDYHPSFQQMAFLDQETGECDERRLNHSDGEAEKYFRDLKQRGVSVRVGLEATGYSRWFERLLAELGFEVWIGDAAEIKKLRVRKQKTDREDARLMRKLLLENRFPRIWVPSPENRDVRQLLWHRHRLVQMRTRIMNQLQAVAMNEGYRWKKKLFSEQGRALLEKLSLAPWANRRRKELLELLDQLNPKIVELTAAVEQEANQRPDVLRLMTHPGVGAITGLAYVLVIGTPDRFPCGKQIGSYIGLIPCEDSSAGKQRLGHLSKQGNALLRYLLGEAAQAAARCNPDWRRRYVHLAMRRHKNIAKAATGCGATVGTIRNWSVSVRTRESSLPDMA

SEQ ID NO: 365535 - protein, 351 aa, unidentified
MIIIGVDYHPSFQQIAFLDQETGECGERPLNHSDGEAEKCYRELKPRGVSVRVGMEATGHSRWFERLLAELGIETWIGDAAKIKRQRIRKQKTDREDARLLLKLLLENRFPRIWVPSPENRDLRQLLWHRHRLVQMRTRIMNQLQAVAMNEGYRWKKKLFSAPGRALLENLWLAPWARRRRKELLELLDQLDPKIAELTAAAEREAKKQPDVVRLMTHPGVGPLTALAFVLIIGTTVRFRCGKQIGSYTGLIPCEDSSARKQRLGHISKQGNTLLRFLLVEAAQAAARCNSDWRRRYVHLAMRRHKNIAKAAMARKLAVRLYWMWRNGWDYSQLVEFGSNAGKLATGHGVN

SEQ ID NO: 365536 - protein, 340 aa, unidentified
MKLYTGFDLHSSNSYVGIIDEHGKRAFNRKLPNDPAVIVDTLRLFRNDITDIAVESTYNWYWLVDLLMAEGYRVHLANPSAIQKYTGLKYSDDRHDAFWLAEMMRLGILPEGYIYPKEDRPIRDLLRKRGHLVKLRTSLIISLQNIVSRNNGIKLKVGDVKALKTDRVAPYLADNDDLALAGKVSKETIDFLTRKIKAIEHVVEGKVKLCEPYDRLLDVPGIGKILALTIMLETGPISRFDKVGNFVSYCRKVSSKWVSNDKAKGKGNKKSGNKYLAWAFSEAAEFARRLHDESRAYYNRKMQRTNFMIAHNALAHKLARAAYYIMRDKVRFMPDKLFTS

SEQ ID NO: 365537 - protein, 356 aa, unidentified
MAIADAGRSGEIRYLGEFDNTEAATRKLVAKLASKHARLTFCYEAGPTGYGLYRLIKSIGHDCIVVAPSLIPSKPGDRVKTNRRDAVNLVKLLRAGELTAVWVPDERHEAMRDLVRARDAAVKDYRIKRQNVSSLLLRLGRHYPGKKTWGRTHINWLTGLKLEHREQRIAFEEMLLAVRQVRERIERLEQAMREAVADWTLAPVIEAVQAMRGIDMVGAIAFLAELGDLSRFENPRQLMAYLGLTPSERSTGESVKRGGITKAGNTRARRLLIEAAWSYRFPPRVSKDMQTRIGAAPRTAREIAWKAQMRLCGRFRTLTRKGKRPTIVVTAIARELSAFIWAINREVIGSHAAANQ

SEQ ID NO: 365538 - protein, 347 aa, unidentified
MDKIIRIGVDTSKQIFQLHGVDEAEQPVLRKKVRRRVLVAFFERLEPTVVAIEACGGSHHWARELSRLGHEVKLIAPQFVKPYVKRSKNDAADAEALCEAMSRPTMRFVPVKSAESQAALMLAGVREQLVRSRARLANAIRGYAAEFGLVAAKGTAKLEPLLAQVQADETLPVLARELFVIQAREHAHLVAEIAAIDAKLMAWHRANELSRRLAAIPSIGPITASLLVMKTPDPHGFRCGRDFAAWLGLTPKDHSTAGKMKLGAITRAGDEGLRSHLVVGATAVIWQVRRGSGRRPSPWLVELLKRKPPKLAAVALANKTARIAWKLMTTGETYDTGRTHSAAPIAA

SEQ ID NO: 365539 - protein, 350 aa, unidentified
MDRYIGLDAHASSCTVATVGPSGRRLHSQVVETNAGALIRVLRGIPGTRHLCLEEGTHASWLHEVLSPHVEELVVAAVRESRGPKSDKLDAFGLAEQLRIGAVKRKVYKQRGEFGALRHHAKAYTLLVGDSVRVQNRIKSLFRSRGVAVAGTGVFRAAERETWLKKLPAPSRSLAELLMQEHDGLLDLRRKAETAMLAEARKHRAWRLVKSCPGLGEIRTAQLLPIVVTPYRFKNKRAFWAYCGLGIVMRSSSDWVRTQSGEWVKVPVQQTRGLNRNSNRMLKGIFKGAATTVIGQAKDEPLYRHYLQLLDGGTKPNLAKLTLARQVASIMLAVWRNEEAYDPARVGQAV

SEQ ID NO: 365540 - protein, 400 aa, unidentified
MEQVVPHGWAGVDVGKGHHWVCLIDEAGATLWSAKVVNDESAILEAIAAVLGRAEQVVWAVDITGTAAGLLLALLAVHGQQVRYVPGRTVNRMSGAYRGEAKTDARDAYVIAETVRHRGDLQEVEVPTALVTGLRLLVAHRTDLVTDRVRMVNRLRDVLSGYFPALERAFDYAHSRGALILLTGYQTPAAIRARGHSRLLAWLAKRKVRSADQIAADALAAAKAQHTSVPGQDVAASIVADLASQILATDARISDLEARIATTFRAHPQAEIIESLPGMGPILGAELIAAAGDLNGYANAGRLASAAGLVPVPRDSGRRTGNMHRPMRYSRKLRRVFYLSAQASMMREGPNRDFYLKKRGEGLKHVQAIIALARRRVDVLWALLRDNRVFQATPPAIRAA

SEQ ID NO: 365541 - protein, 420 aa, unidentified
MRSGDNEKERIHIYNKRNICFVGVDMHKEKHCAVVIDCWMEKIGEVNFENRPSKFPAFVEDIRKICGTKDFVFGLEDTRGFGRNLASYLTGRKFEVKHVNPVYTSAVRLSNPIVYKDDSYDAYCVARVLRDMLDTLQDAKHEDIYWAIRQLVKRRDMIVKNNVMNKNQLHSQLSYSYPSYKKFFALVDGKSALCFWENYPSPEHIWSTTPEKIYETIKPVHQALKIERIHAIIAMIKKDGNTHKGYQEERDSIVRNIVKDIKNNQELLKDIEEQLRKLLPQTGYKLQTMPGIDIITEAKLISEIGDINRFPDSNKLARFMGLAPVHFSSAGKGRDERCRNGNRELNAIFHFMAIQMVVISPSGKARHPVFREYFEQKVKEGKNKPQALICIARRLVRIIYGMMKTKTEYRPYEKQEEKRQ

SEQ ID NO: 365542 - protein, 322 aa, unidentified
MNPKNYGGIDVAKKNFVIGIYGQDKTKTEANTPKGHAKAVEYLQKHNVDLVVLESTGGLEVPLANALHAADIRVVIANPQRTHQYAESFSLGKTDHLDAKMLADYAQALDSRKMADDMCYAPPSEEALALEALVKRRSQLVEMRKMEKNRLEQTHASQKASVVAMIKHLGELIAALDKEIDQSNRGGFNGKGEILSEIKGVGRITCATLLSMLPELGKVPHKRAALLVGVVPPPRQSGEKEKKSGCVGGRMVVRNALYMAVLAATRSEPKIKAFYEKLMSRGKAFKVALNACMHKLLRILNARMRDYLASLKETEESESQSA

SEQ ID NO: 365543 - protein, 344 aa, unidentified
MKYFTGIDVSLRSVSICVVDEAGGVQYEAKVPAEVELIVAALRRFSAEIKQVGLEAGTLTQYLTYGLKKAGYDVVCLEARQTAATLAAMRNKTDRNDARGLAQILRSGWYRTVHVKSLESHQVRALLASRKAILAKCVDLENELRGLLKIFGVRLASHVAHGSFDETVRAAVSAIPELSKSLLPLLDARTVLYKTYLKLDNVVKAVVRHDPVCQRLMTVPGVGPVTSLTFKAGVDDTDRFRSSRNVAAHFGLTPRRYQSGETDNPGRISKAGDVDVRQALYTAAHALLTRSYAWSTLKAWGLRLAKVRGLRRAVIAVARKLAVILHRMWVDGTDFRASRLQGAV

SEQ ID NO: 365544 - protein, 373 aa, unidentified
MPRYSTAFGMDVHLRSTTVCALDAETGEAVTRRFRGNPWGEVAEWMSGFPGPSLAAYESGYLGFAPQRELSGLGVDCVVAAVSRVPRSAADLSSKNDRNDAARMAKAILSHDISPVWVPSPEIEGLRDLAGAHDAATARLAAAKQRLLAFLARRGYAYGGTTPAGNPRRYWTYDFLRWLDKVRPADDGGIRALAALRSEVEAAAETRDDLLAEYRAAVAAGPLSAEVEALQSIKGCGFALAAAFASEVGDFSRFRSGRQVTAYFGLAPKQRSSADSVRLGGISGAGNALVRRLAVEGSWSYVQASHQPKLMPKGSGVPLEVRMHGRKGSERLLRRREEMLARGMPQAKANAATAAELVRWLWALGAMCREATE

SEQ ID NO: 365545 - protein, 393 aa, unidentified
MNTITTTASTSTILAIDLGKYKSVVCSHDPVTGEHRFTTLATTRAELQKLLSKEQPGVIVIEACLLAGWVHDLCAELGVRCLVANTASEAWKFKHLKRKTDKDDALRLLQLYLLGQLPTVTLPPTTVRQWRSLIAVRQVLVGRRVAVQNRIRGLFVAQGLPAPRGPKAWSKTGLAGMALQAKMLSACGPDELWRGLLELALTEYQQVKELVAQAEKRLDELGKKKAEVILLQTAPGVGPRTAETVVAYLHDATRFQTGKQISAYSGLVPRQHQSGELDRRGRISKRGPALLRKMLVECAWCMVRYSAWARGIYQRLTGGGQRRKKQAIVALARKILVRCWAMLRDRKAWCDPQCDPQTGLTSPLPPSKQRRQAEAEQRCQEKPQAAVTLATTQ

SEQ ID NO: 365546 - protein, 273 aa, unidentified
MKRIKFVGLDVHAETITVAVAEQDGGVRSLGVIPNREEPIRKLVKKLGPAEQLRFCYEAGPTGYVVYWQLTALGAKCEVVAPTLVPVKSGERVKTDRRDALKLARNYRAGELTAVWVPDAVHEALRDLVRAREAAKKDQLRAKHRLGKFLLRHGRRPPTGVKPWTLKYLAWVKQEVHFEQPAQEATLLDYLHEVEHAEARIARLDLAIEEAVKSTPPKMKAVIEGLQALRGVAQVAAVTIVAELGEVSRFSRGRQLMGYAGIVASEHSSGESN

SEQ ID NO: 365547 - protein, 342 aa, unidentified
MDYFAGLDVSVKDTSVCIVDDTGKIIREVKVASEPKSLLAALKNPAYRFKRIGLEAGPLSQWLLSALAEAGLPAICVETRHMQAVLKAQINKTDRNDARGIAQMMRAGLYRPVHVKTLRSQKLRMLLTHRQLLQSKAIAVENDLRGTLRNFGLKVGMVGKVKFEARIRELVENQPDLAVLVEPMLIVRRVLREQIVILHRRLLAIVRDDEVCRRLMTTPGVGPVVSLTYRATVDVPARFHKSKSVGAVFGLTCAKYQSGEIDRSGRISRCGDEMMRVMLYEAAQSMLRSKKWSWLKAWAMQIARRRGMKKAIVALARRLAVIMHRIWVDGTEFRWTRQAAAA

SEQ ID NO: 365548 - protein, 366 aa, unidentified
MRKISTVQAVRNELLKEQKLTIGVDLGDRWSFYCVLDEAGKIILEQKVAMTPEAMKRTFEKIPRSLIAMETGTHSPWMSRLLRELGHQVLVAHAQKVQLITKSNRKDDRHDARTLARLARIDPELLGPVRHRSAQAQIHLTVIRARAELVRARTALVNAVRGLVKSYGQRLPKCGTQQVSRELAAGLHAELREVLEPLLKEIESLNERVKEYDGRMEKIAKESYPHVELLKQVKGVGTQIALTYVLTLEDPHRFPKSREVGCFLGLRPGRRDSGESQPQMHISKEGDPYLRTMLVQGAHYILGPFGEDSDLRRWGLKLAARGGKNGKKRAVVAVARKLAVLLHRLWVSGEVYEPLRNSHKAMRAVA

SEQ ID NO: 365549 - protein, 351 aa, unidentified
MKYIGLDCHKQYDHATMIDTDTGEIKSKRLAHIKEGFKDFIGDRAGTRMVIESCRDWSRTYELSQDLVEEIILAHPLKVKAIASAKIKTDAIDSRTLAQLLMADLIPEAHLRKAGNRVKQRVIRHRAFMVVMRTRVKSRIHDLVDSQLLPPEVLKAKPINLFSKKGMKWLACLEWSMEEDKKLVESHLRVMEVINQEISATNDMVKEIYDKDRDAKLLTTIPGIGITLGMLISTEIDGIERFHSPSKLCSYAGLVPSTHSSGGKTYHGKITSEGNRWLRWALVEAVVPASYADAEIKERLDTFRKKKGANVAKTAMARWLLKVVYHVLKEQRPYIAAYSKLAKTGAAFYFA

SEQ ID NO: 365550 - protein, 460 aa, unidentified
MSATNGLCPGEVVRDGHPVGSCATSASTGVIAITARRTAEEAAVENVQWFVGIDWGPRAHDVCIVDATGRVCEQRQVEHTATALAAFVDAVIARAEGQPERVAVALEVPRGALVELMIERGLAVWAINPKQLDRFRDRFTAAGAKDDRRDAWVLADSVRTDRQAFRRVRLDQPLIIALREWSRMDEDLRGEYGQLTNRLRDLVHRIAPELLTLCPAADEAWFWALWRTADTPAAQARLSERRLTQLLAAHRIRRLTAAEVREVLQRPQVYTAPGVVEAVAGHCQLVLRRLELVWTQRRECERQMARLLDTLEAQAPAAGDQREHRDAAIVRSMPGVGTRVAAAVLAEASQPLADRAYHTARAWFGVAPVTRQSGRRRTVVMRYACNQRLRDAAYHWARGAMCWDPRSRAYYRALRARGLTHGRAFRTVVDRMLRVLFTLLEDGQLFNPHYGHDTSLPVGG

SEQ ID NO: 365551 - protein, 392 aa, unidentified
MYIVGIDIGKNHHEASIVSPEGKQIGRSLRFATTHKGADSLMSFIFKNIGNSPCVFGMEATGHYWYPIYSFLKAKGYTICVINPIQSDSLRKMYIRQTKNDSIDSFLIAEVIRFGQFGTTSMADENILAMRQLCRYRDSVISSRTEIKLRIGTIMEQIFPEYEKQFSSLWMSTSMGILEKYLTPENIENAPIDELFEIIKDKSHNRLTKAKAISIKEAAADTFGIKIAQDAFSFQLKQLIDRMNFLDKQIEALDIEIMKYYEQFDCYLHTIPGIGIIGAATILAEIGDISRFKNSSALVAFAGIDPTVRQSGEFNSTHNHMSKRGSPYLRHAIFLAATTCSFHNSPLNAYYKKKRDQGKHHLTATGAVARKLTTIIYAVLRDSKPYEPKKFC

SEQ ID NO: 365552 - protein, 389 aa, unidentified
MHYCGIDIAKRKHVAVVVDEKGEILRPPFSVENTRQGFDHLGAALAQIPGQITIGLEATGHYWLALYEYLTRLPYSVVVFNPLQIHAYRRSGLRKVKNDRSDAVWIADFLRISNRPPTAQATPLLLQLKELTRFRMHLSQQIGDIKRKVLGLLDRVFPEYEKAFSSVFLASSRELLAQAASAQEVAEFDLSELTELLRKSSSGRFGREKAETLQALARESVGVTFLTDAAQVEIKCLLDQLDLLEVQRQRVDQVVKHLMAQIPQFITTITGIGAVTGAAILAEIGDVNRFSTLEKLVGYAGIDATVYQTGEFEGTHRHMSKRGSPYLRLALWQAAFMAIQHDPELRAYYDRKRAEGKAHGTVLGAICRKLLARIYVVLKEQRPYLAVPA

SEQ ID NO: 365553 - protein, 340 aa, unidentified
MRVLYAGCDLHGNSNLIGIIDGEGKRVFKRKLSNDLTLVQDTLKPFQEELVGIAVESTYNWYWLVDGLMETGYQVHLANPSAIQQYSGLKHSDDQHDAFWLAEMLRLGILPEGYIYPKEERPLRDLLRKRGHLVRLRTSLVNSLQNILSRNLGRKVNVNDMKVLKEDRIRPLLEMNEDLALAGRVSKEAIDHLTQQIYRIEWAVQKKITLKEEYRYLLTLPGVGKILSLTIMLETGPINRFETVGDYVSYCRKVPSQWTSNGKRKGSGNTKNGNKYLAWAYSEASEFARRLYPEPRAYYNRKMQKTNAAVAHSALANKLSRAGYYVMRDQVPFRPEKLFG

SEQ ID NO: 365554 - protein, 338 aa, unidentified
MTIETLGIDIAKNVFQLHGVNRNGRVVLKRKVMRDQLLEVAAQIDQCTVVLEACTGAFDWARKFEALGHHVKIISPQYVKPFVRRQKNDGNDAEAICTAARQPHIPFVPKKTVEQQDIQALHRARQRMVNHRTAVISQIRGLLLDRGLAMAKSITCARRIVPEILADLANDLTALAREAIGELYDLFRDLDRRIASFDKKIERIFLESEPCQRIAKIKGIGVKTATAIVAAIGDGSEFKNGRHLAAWVGLVPRQFSSGDRKILMGISKRGNQHLRSLLVHGARAVVRTAPSKTDPNNEWVNQLRERRGFNRATVAVANKNARIIWAVLRTGEPYRAAF

SEQ ID NO: 365555 - protein, 356 aa, unidentified
MTQPTTTSFPRTIGMDLGSRSSSFCIVVPSGEHVREGELKTTKTEVSAFLQEQPTSRIVIEASGPCRWIAEVASAYGHEVVVANPREFRLISSSHRKTDRNDARILADFGQFRPEMLSPIKLRGLKCQIARSTLSARAHAVAQRTLIICLIRTQVSNLGESLRGCTAKNFHKTAPDRIPAILRSALAPTVRILLAVTEAIAEYDKEIERLCVEEFSDTKILRQVKGVGPNTALCFVATIEDPKRFEKSRDVGAYVGLVSKSRSSGSKNPQLRISKRGDKALRKLLVNAATYIVGPRSKDCDLKLYGKRLETRGGQASKAKARIAVARKLSILLHRLWVTGEVYEPLRNQSRAAAAA

SEQ ID NO: 365556 - protein, 455 aa, unidentified
MPKRTTGDRPELKLINLGAAAIDIGSRMHMAAVNPASTDVPVRSFGTFTQDLHDLADWFKACGVTSVAMESTGVYWIPVYEILEQRGFDVILVNARYAKNVPGRKTDVSDVVWLRELHSYGLLRGSFRPDADIATLRAYLRQRERLVEYAAAHIQHMQKALMEMNLQLHHVVSDITGATGMRIIRAIVAGERNPDVLATYRDVRCHSSIETIRAALVGNNRHEHVFALTQSLELYDVYQAKMLDCDRKLEVLIAALNNKGAKPVGKLSKPRIKTKQVNEPTFDVRTALYGVLGVDLTEIHGLGPSLALKLVGECGTDLKAWPSAKHFTSWLCLAPGNKISGGKVLSSRTRRSSSRAAALLRLAATTVGRSDTALRAFYRRLSSRAGKSKAVTATARKIAVLFYNTLRHGMSYRDPGADHYEQQHRNRVLANLRRRAKSLGFVLQAIPAEADPAVS

SEQ ID NO: 365557 - protein, 341 aa, unidentified
MGQVSTVGLDLAKNIFQAHGADVSGEVVFRKKLGRGRLLAFFAGLPACVVAMEACAGAHHWGRELARQGHTVRLIPPIYVKPFVKRQKNDMADAEAICEAAQRPSMRFVPLKQEEQQASSVVFRARDLLVRQRTQTINALRGHLAEYGWIVPKGVPHVDRLIARVEDPAEALPPAARTILLVLVSTLRTLDEQIAVLDAEIASRARHDPVARRLMTIPGIGPITATALIALAPSHEAFKSGRHFAAWLGLTPRQRSTGGQQKLGSISKMGERTLRRLLTIGASAVIKQAAIRGAPAGSWLDQMLTRKPKMLVIVALANKNARIVWALLAKGDVYRAPGVPA

SEQ ID NO: 365558 - protein, 407 aa, unidentified
MIFVGVDWAEAHHDVCVLDAEGSVLGRRRIPDSLVGASELHALLADHLGDDDDAQSVIVGIEKDRGLIVTALVAANYQVFAINPLAASRYRERHHVSGAKSDPGDAKVLADLVRTDRHNHRAVAGDSALSDAIKLLARTHQNTIWNRQRQVNSLRSALKDYYPGALEAFGTDLSGPDAVAILALAPTPALGRTLSRAKITSALRRAGRQRRLDERTERIHEVLHRDQLRQPTTLENAYGVTTEAAISNIAQLNVSLTKLEASLSEHFKQHPSAKVILSLPGMGTVLGARVLGEFGDDPNRYRDAKSRKNYAGTSPVTKASGKSRVVLARHSRNKRLGSALDQWAFSSLLPSPGARHYYDDLKARDKHHRKAIRQLANKWVGILHACLENDCPYDENIAWKTREERAA

SEQ ID NO: 365559 - protein, 433 aa, unidentified
MKVKYEDRQKQKVIAITTDTLVVGVDIAKNYQWARFVDFRGIEHDRALKFKNSKGGFETILARIREICKKENFAKAVVGMEPTGHYWKAFANWLEKQDGIKAVLVNPYATKQAKELDDNSQTKSDKKDALTIAKLVKDGRYFELYLPHDVYAELRGLSTTRTGLNKRKNALKNTITAVMDEYFPEYGEVFKCPLSGKASRHILKTCPFPKFILEPGEDGVTDEIKKAVKKTVGRKKAAQLIETAKESIGVDYGEEAAGLKLRLMLEELELLEKQAEELEVQMEAALQKTGYAGFLLSIKGIGVVTLAACLGEPGNPARFENPRQMSRMAGCNLAEDSSGKNKSGTKISKRGRKNLRSVLYQMALIMVATNDEMKQLYHYLKTREEAPLRKMQALIVVSKKILALVHAPAKKKENYDPGKVFGPVRREQLKAAA

SEQ ID NO: 365560 - protein, 331 aa, unidentified
MNYSHFVGLDVGKKTFDASLMSADEKELSHKSFDNTPTGIQSLLDWIAGYHLSLSKLLFCAENMGSYVTELSVSSVSMGFSLALVCPLTIKKSIGLQRGKNDRIDAKRIANYAVLHYRKLELYKLPDKDLVRLRGWIIIRDNLVKQKVSSIKLLETFSWMAKLADVTESISFLEEQLKSIKERILEVEEDMEQLIAASTSLYTNYLLLRSIKGIGIINAIVLLCVTDNFQRFDNPRKFACYCGVAPFEHTSGISIRGKTQTSSLANKEVKVYLTRAAITTISWDPQMKAYYKRKIAEGKHKASVINAVRAKIIARSFAVIRRQTPFVTLAV

SEQ ID NO: 365561 - protein, 346 aa, unidentified
MEHYAGIDVSLELSSVCVVDGRGKIVKEAKVASEPEALVYFLKELGFPVNRIGFEAGPLSQWLHAGLTQAGFETILLETRHVKAALSAMTVKTDRKDACGLAQLLRMGWFQQVHAKSIGSQEIRALLVARKQLLGRLLDVELSIRGILRGFGLKVGQVTRKTFEARIRELVTGHTTLERIAEAMLPARATLKAQYEKLHKAVLAIVREDVVCRRLMTVPGVGPLVAVTFKSAVDDPSRIAKSKAVGALFGLTPRKYQSGEKDVTGAITRTGDEMVRTALYEAANVLLSRITRFSKLKRWGMDVAKWRGSKRAKVALARKIGVILHRMWIDGTTYRWAEAKPIAAQG

SEQ ID NO: 365562 - protein, 403 aa, unidentified
MNMNAVGIDVSKGKSMVAILRPYGEIVSSPFEIKHTSGNIQSLIEQIKSIEGESRIVMEHTGRYYEPLARELSLADLFVTAVNPKLIKDFGDNSLRKVKSDKADAVKIARYTLDSWTELKQYSLMDEIRNQLKTMNRQFGFYMKHKTAMKNNLIGILDQTYPGANTYFDSPARDNGSQKWVDFATTYWHVDCVRNMSLNVFVDHYKNWCKRKKYNFSKDKAQEIYGTAKELVPVLPKDDLTKLIVKQAVEQLNSASKTVEELRILMNETSAKLPEYPVVMEMKGVGPSLGPQLMAEIGDVTRFTHKGAITAFAGVDPGVNESGTYEQKSVPISKRGSSVLRKTLFQVMDCLVKTKPQDDPVYAFIDKKRAQGKPYYVYMTAGANKFLRIYYGRVKEYLMSLPE

SEQ ID NO: 365563 - protein, 311 aa, unidentified
MAYLGIDVSSTALDVAVAQGAAWQEPNTPEGIAALVPRVVALAPTLVVLEATGAYHLRVAAALGAAGVPVAVVNPRQVRRFAESVGQLAKTDQLDAALLARFGAAVHPVPRPLPDAATQELAALVDRRRQLLEMLTMERNRLAVARRSVQPSVRQTVRALERALAALEDETDRWVQGSPLWRTQEELLTSVPGVGEQTARLLLARLRELGTLSAKEIAALAGLAPFARASGAWRGVQHIRGGRVDVRTGLYMATLTAIRCNPVLRTSYQRLVAAGKPKKVALTACMRRLLVILNAMVKHQTRWQASRPTTA

SEQ ID NO: 365564 - protein, 412 aa, unidentified
MVELLVARCAGLDVAKDEVVACVRVPDGGGGRAQEVRTFLTFTSGLEALAGWLAAEGVTQVVMEATGQYWKPVWYLLEEAGFELLLVNARHVKILPGRKTDVCDAAWLAELLEHGLLRGSFVPPAPIRELRDLTRYRKRLIQAHASEGQRVQKTLEDAGIKLDSVAADVLGVSGRAMLTALVAGERDPQVLAELAKGRLRAKLPQLRQALRGRFGDHHALLVRLALAHLEHLEGAIATLDTEVDRVLAPFARARDQLATITGVGKRAAETIIAEIGVDMTVFPTAGHLASWAGRCPGNNRTGGKRRSGKPTKGNRWLGEVLIECAWAAARSRDTYLSAQYWRLARRIGKKKAAVAVGHSILVIAWHLLANDCDYADLGGDFFVRRDSDRARQRAVAQLQALGYRVTLEPLAA

SEQ ID NO: 365565 - protein, 406 aa, unidentified
MELVTLYKRVVGLDVHQAKITACAISEDEAGKVTVELAEFGGFKRDRQALAEWVSTRDPEVVVMESTGIYWKSPYAALEKLGIVATVVNARHVKTVPGRKTDWADAQWLATLARSGLLRASFVPPAKLRELRQVARQRQQLVGILAGEKNRVHKVLSDGGIRLSVVVSDIHGVAGRTMVKALIEGQSPAEVLMLAGNRLKADRQELLDALDGDLTAEHRFVLRELMAHVQELEQRIDRFDRHLLNELEPYRTTLALMQTIPGIDAIGAALLLVEIGNDMDAFGSVDRLASWVGICPGNNESAGKRKSGRIRKGNPWVRRLLCQFAHAAGRTQCAFKSKFEALRLRRGHKRAIVAIAHKILKTVFLLIRRQTHYRDSVVDFEAMSVTRNAPRWLKMLRKHGFIPAAA

SEQ ID NO: 365566 - protein, 409 aa, unidentified
MQVVHERCAGLDVHKRTVVVCVLVPEGREVRTFGTMTRELMEMVDWLLGKRVTHVAMESSGVYWRPLFNLLEGRGVELLVVNARHVKAVPGRKTDVKDAEWLADLLRHGLLRASFVPDRSQRELRELVRYRKTLVEERARMVTRIQKVLEGANIKLSSVASNVVGKSGKAMLEQLAAGNEDAEAMAELALSNLRSKRGQLREALFGSMGEHQRFMLKSHLHLVEEMDAEIEAVNAQLGERMRPFESQIALLDQIPGIGTTSAQQILAEIGVDMSRFPTADHLASWARVCPGMNESGGKRHPASTGAGNPWLRSTLIEVALAAVKAGRRQPNFFSARYHRLSTRRGAKRAAMAVAHSLLIAIYNMLRNGSYFVDLGPTHYDQRRRNLIVKRSVRRLEDLGYKVSIEEAVA

SEQ ID NO: 365567 - protein, 412 aa, unidentified
METITERVAGLDVHKDTVVACVHVPGAGGRRESNSHEFSTTTAGLLALRDWLVAHQVTLCGMEATGTYWKPVYYCLEDEIECWLLNARHLRNVPGRKTDTQDAAWICQLVEHGLVRPSFVPPPEIRDLRNLTRYRKAQIEERTREAQRLDKVLQDAGIKLSSVASDLRGVSAQAMLRALAGGERDPEILAELAKGTLRRKLPELAEALVGRFRAHHALLVGEILAKLDYLDEAIGRLSVEIERVIAPFGPQVELLRTIPGVDRRMAEALIAEIGVDMGRFGTSARLASWAGLCPGQHQSAGRQRRGTTRKGSKWLRMYLTQAAKAASRTKGTYLSSQYARLRGRRGGARATIAVAHSILVAAFHILERGTPYEDLGADWFIRRRSPEHHARTLVHQLEALGFDVSIQEHAAA

SEQ ID NO: 365568 - protein, 372 aa, unidentified
MPQRSRVFVGLDTSKLKISVALAEEGRQGEVRFLGEIDNTPEAVRRLVGKLASRYSEVLFCYEAGPTGYGLQRQIAALGHECDVIAPSLIPKRPGERVKTNRRDALTLARLHRAGELTAIWVPDPGHEAVRELVRARDAAMADLRAKRQHLQSFLLRHGRLFPGRKPWTRAHARWLSELAFEHPAQYLVLREYRQGIEDAQARLERLTQQIAEVLTTWSMAPVVEAYQALRGVALLTAVTFVAEIGDVRRFESPRQLMAYLGLVPCESSTGERVRRGSITKAGNTRVRRVLIEGAWTYRFPARMSRLLQERQANLPQLVRTIAWKAQVRLCARYRRLMAAGKRQTVVTTAIAREMAAFLWAFGHAIEPRSAA

SEQ ID NO: 365569 - protein, 376 aa, unidentified
MREKLRFLGLDVHAETIAVAVAEPDGEIRSLGTIANREDSIRKFIKKLGPAEQLRACYEAGPTGFVLYWQLAQLGIECAVVAPTLVPKKPGDRVKTDRRDALKLAHCHRNGDLTPVWVPDEGSEALRDLVRQREAAKQDQLRARHRLTKFLLRTGRRVPLGAKAWTERFWEWIQQVHYTQPAQEATFLDCLNEVHHMAERVKRLEQVILEVVKVAPASVQEVIRGLQALRGVAHISAVTIAVELGNITSRFDSARKLMGYCGVFPSEDSSGKRIRKGGITKTGNAHLRRIVVESAWSYRHRPFLGAKLRRRQEGVSAEITEIAWKAQNRLHKRYMKLMAAGKDQRKTMTAIGRELVGFIWAIGIKAESACTQQLAA

SEQ ID NO: 365570 - protein, 350 aa, unidentified
MEHYAGLDVSLKETSVCIVDGAGKIIRETRVASEPEALVGYFSSLEIKVVRIGLEAGPLSQWLHAALTQAGFEVVLLETRHVKAALSAMTVKTDRRDARGIAQLLRMGWYRPVHCKTLPAQEVRAIITARKTLLGKLIDIELSMRGILRGFGLKVGPVTRKSFEIRVRELMAGQATLTTIMEGMLNARATLVAEVAKLHRALLAIARADEVCRRLMTVPGVGALTALTFKTAIDDPTRIAKSRDVGPLFGLTPGRYQSGETDIIGKITKVGDVMVRTALFEAATVMLTRTTKTSRLKAWALDLAKRRGTKRAIVALARKLGVVLHRIWVDGSTFRCAKEGAAMPALITAK

SEQ ID NO: 365571 - protein, 418 aa, unidentified
MTRSTDNKLIQIVHPVCCGLDVHKDKISACLITLDENGNEQHEIKEFSTFTRELLKMRSWLINSGCPIIAMESTGVYWHPVLNVMENFIEIILVNARHIKNVPGRKTDICDSKWLAGLLRHGLIRGSFIPPEDIREWRDLTRLRRIYTESFADYKRRVHKLFITANIKIDSVVSDLFGMTGRNLINLLCKTSKPTLEDIEQCTKGSLKKKTVELYESLQGFFNDHHRFQLIGMMETIVSFENRIAEVNAKLKELTSGHQDLLDRLDEIPGINEKSAQAILSEIGVTLDEFACMAALASWAGLCPGNNESAGKRKNGKNAVRNHPFKTILIQIAWAAIKTNGSYYKAKYYKLKAKRGAKRAIVAIAHKIAKAIYKVIKYGERFQDLGEDYLTASNKKKALKHLEKKAKTMGYKLVACEV

SEQ ID NO: 365572 - protein, 364 aa, unidentified
MNSVCNNTELSSHEGTRCQFNGSTGVIKLGIDVHQQFYVVVLQEGGTNPKPPQRLSKEGFLHWAARLKQHGGEVHAVYEACGFGFGLQRQLSALEITCHVVCPQKLDEHNKRVKTDRLDAKALCLKLDRFVQGNRDALALVRIPSEKEEQLRAIHRQREQLVKARKQLEAQGRSLMVNQGIEPVRSWWKRRTFVTLPVPTWLKELLANSQPILLALEQRIRALTVQLQSGADPDQPRGLGLLSSVVIDREMGNWHRFNNRRQVGSYTGLCPSEHSSGNTRLQSCVTKHGNPRLREALVELAWRLVRFQPNYRPIVKWNEVLRKGALATGAARKKAIVAVARQLAVDLWRIRTGRVSAETLGLIN

SEQ ID NO: 365573 - protein, 411 aa, unidentified
MEVVHVRCAGLDISKKDAKVCVRVAGAGRRKTVETVTTWSSMTSQILALREHLIAERITCAVMEATSDYWKPFYYLLEDAGFDVLLVNSRHVKNLPGRKTDVADATWLAQLGAHGLVRASFVPPEPIRQLRDLTRTRTAITRERSREVQRLEKLLEDAGIKLSAVASDIVGVSGRAMLESLIAGNSDPAALADLAKRRLRSKIPALTEALSGRFTDHHAFLARVHLDLIDQHTAAIDEITIRIEELIAPFHGFRDLICTIPGVSTLTADVIIAETGADMTRFPTAAQLASWAGTTPGNNASAGKVKSSRTRPGNPYLQGALGAAAMSCAQNPRTYLGARYRRIASRRGPQKANVAIQHSILIAIWHMGTNGCLYDDPGADYFNRLHPDRAKKRAINQLEAMGYQVTLSHAS

SEQ ID NO: 365574 - protein, 387 aa, unidentified
MQKPHDNSKVCPAAFVQDSTVIAVIEMGLSSWLVAGMIPRVSREPLKKINPNAEMLLQLLYRWRDEAIAAGKEINRIAVAYETGRDSFWLARWLRARGIDAHVIHATSVAISREHRRAKTDRIDTAMLRRGFLGWLRGEPGHCSMAIVPTVAEEDAKRPHRERDSLVHERTSTVNRMKSILIQFGVRNFKPVLRKASEKLDAVRTPEGIALPPNAVAALRRHMERLRIINEQIKAIERARLQRLERDPADKMNAMVFLLVRIIGMGVETAEQLVHEILFRDLRDRKAVARYSGLTGSPDESGSKRREKGLSRSGNRRVRNILIQLSWRMLMFQPESALVLWYKKRTESARGSRKPMIVALARKLIIALWRYVNTGVVPEGFALRPAA

SEQ ID NO: 365575 - protein, 393 aa, unidentified
MKLVGIDIEKKHFFCIMDKDSGEVLLQPSSFSNTKDGFDSLIQKLSSYSKDSILIGMEDTGHYHFALLKYLLEKNFTVALINPKTTDYTRKIQNGITKNDKLDTLTICDVLDTPVRKKQYRITKVNSFDLYEQKQLTRHHHNLKEELNVYTNRLQKCIDIVFPEFNSLFSSKYGIIYMNVLKTFGSAENIASTDIRTIRKCFEIKGRGNRISLTAQQLKDSAKSSIGISSAAEVIKIKHLISQIELINEQLAETDKKIEEFSIQNNSPILSIPGISHFFGTSILAELGEISNYSKPSKIIKAAGVAPYHYESSQYNAQHTAITKKGSPYLRKTLYQIILPVINNNPVFKQYYDLKISQGKGHRCACGHCVRKLLRIIYHLSSTNQQFDDALLR

SEQ ID NO: 365576 - protein, 357 aa, unidentified
MEHVAIDLGGGESQVCIRSEKGEVLLERKVSTSSLASLLKRRPSSRVVVETCAEAFHVADAARQLGHEVRVVPATLVRTLGVGARGVKTDERDARALSEVSTRIDLPSVHVPSQEARERKSLCGMRDGLVASRTMLINTVRGWMRGRMIKVRTGKTETFSARVVQSADKIELPAYVRRQLQSIEQLTGHILEADKELEALAKKDLTCPRLMTVPGVGPVTAIRFVAALDQITRFATVAQVQSYLGLTPGENSSSERKRRTGITKAGPPALRASLVQAAWAARRARGKHPMVLWSLEVEKRRGKHVAIVALARKLTAILFAIWRDGTLYSPNNQQPAHCTGTEYRPKNAPPAEAVMRA

SEQ ID NO: 365577 - protein, 421 aa, unidentified
MEETGELAELVERVAALDIGKAALTACIRVPHEDKPGRRCQEVREYATTTRALLALADRLRCQGVTLVVMEATSDHWKPPYYLLEAEGFECWLLNARHVKNAPGRPKTDKLDAVWLAKVAERGMCAPSLVHPKPVRQLRALTRYRRTLIRERAREKQRLEKILEDAQIKLSAVVSDLFGVSGRAMIEALVAGERSPWALARLARGTLRNKTKILEDALTGHFDDHHGFLCQMMLDRIDGLSAQIGQLDARVEEAIAPFARQVTQLDEIAGVGTTSAQELIAEIGADMSRFPTAGHLVSWAKFAPIENSSAGKKKGGSTGKGNPWIGGTLGEIVLGASRTHTFLAERYRRIARRRGKKRAIVATGNTVLTIAYHLLSDPDARYTDLGPGFYDSKAGRDRQARNLIRQLEHLTGKKVALNEAA

SEQ ID NO: 365578 - protein, 416 aa, unidentified
MKLFVGLDVSSEKLDACFMTDDSTCSVLKEASYGNSQLGASQIKEYILEFSQKFEIESLVIGMEATSLYSFHPAMFFKEDLELNQLNLMVSVEQPNKIKKYRDIFEENKNDQIDAFYIADYFRIQRQVNSIIKEEEYLALQHLTRTRYQLIKQLVRTKQHFIENIYYKCNTLSKELKAEGGSVLSATLVTLMTEDYTMDQLAELSLEEFANLIQKLGKYRFKNPEGIAKAISKAIRSSYRLGKVHQDSVDIVLGVLAKEIRSLEKLIKDLDKAIDDLVVVLPEYQCLTSIPEIGPVYAAGILAEIGPINRFSDESKLAKYAGLYWRQNQSGNSEYENTPMAKRGNRYLRYYLVEATNSVRRYEPEYHAYYKKKYAETPKHKHKRAIVLTARKFTRLVDTLLRNHQLYMPPRSVIDK

SEQ ID NO: 365579 - protein, 354 aa, unidentified
MQSQIIATPKLFIGMDIHKKSWSVHLRTDLFDHKGFSMPPQPEKLSDYVASHFADHEVSLTYEAGCCGFSAARFFLNMGWTVKVVNPNDVPRSDKQLYQKTDKLDCRNLCKQLQQEQLHSIYIPTEPEEQLKSLLRQRNQVVKQLRKAKSHIKAMLLFHGIAIPDQFDNPNWSRNFLTWLNTIQWSHSTGTACMNSKLRILAMLKNEYLQTSNELRAYCRRHHKKDYYLLKSIPGVGGLLAAAILAELGDIRRFNNEREFRSCIGLVPGIHQSSETAIKMSLTPRCKALLRSYLIESSWVAIRTDPEIQAYYRKHAGKNSKNIIVKVAHKICCRILSVIKNETPYQINYKSTKK

SEQ ID NO: 365580 - protein, 464 aa, unidentified
MALTLGIDVAVRAAHQGTLARDGIAVWRGRKFSTRPAELERLWDDLNLADPGDLTVVVEPTRNAWIVVAEWFRRRGARVVMVPTTQSADLRKYYSKHTKNDRIDSELLARLPLLHPEGLREYSGQGPADPLRRLVKQRSTMVKRRVAVYARLDALVELLGPAWYAVLGSNYGIAALEFLARYADPNAVIRLGHGRLSRFLIARSRGAWRSDHAAGLIAAAKETLALWGSDGMNFAELAEDIAHEAEQALFLTRQIKQIDERVANLYADADPDGIVASAPGVGPVISAVIAGRIGDPHRFTSLAAVRAYTGLVPKVSQSGVGKIESSITKAGDPLLREMLCTAADQARKVDPQIAAKYQRLMAGDRHHDSAICHLATLLVTRIATCMRAGQPYALRDVDGTPITEAQGRVLVKERYQIEPRRRDNIRHHRMRDRRKQRAGQESQESPNAPTSRPATNHPTSQHIA

SEQ ID NO: 365581 - protein, 454 aa, unidentified
MSRSKKKRSQQLSVVHPDAAGIDIGAEFHVVAIPPDRGPETVRSFSSFTQDLLALAEWLREHRIRTVALESTGVYWIPVFEILEVRGFDVILTNARDARNVPGRKSDVNDAQWLQKLHQFGLLRASFQPSAEIAVLRTYLRQRERLLDYCSAHIQHMQKALMQMNVQLHHVVTDITGVTGMRIIRAIIAGEHDPLVLASHRDPRCKASVERITQALTGHYRPEHLLSLTQAVELYDFYQRQVQQCDQRIEAALTALEVPEQVPQAPLPKARHKTKSPNAPAFDVRTALYRALGLDLTQIHGLGPYVSLKLIAECGTDMTRWPTAKHFTSWLCLSPGTKISGGRVLSSRTRRSSSRAAAILRLAATTLSRTDTALGAFYRRLAARVGKAKAVTATARKIATLFYNALRHGMDYVDPGADYYEQHYRERVVHNLRRRAQALGLEIREPAPAAEGVS

SEQ ID NO: 365582 - protein, 411 aa, unidentified
MRIIRKRCLGLDLHKKQITGHLRVHRSSNEEAERIDIRFGTMPDELLRLRDWVVEHEVSDVVMESTGVYWMPVYELLEPVTTPAVVNAAHVKKVPGRKTDVTDAQWLSELHAHGLLRLSFVPPKEIRELRLITRYRTKLVAMRTSARNRTIKMIELAGVKLSSVVCDSFGKTGRALLDALAEGPVNSATVKELAKGSLRKKTVELEAALRTPLSDYQRELLAMHLRAYDAIDAQIAQSESKMMERAKPYAAAIDKLDAVPGINPLAAITVLAETGLDMSVYRDAHHLTSLAGLAPGNNVSADKRRRIGMPKGNHYLKRISVQIAWAASRKNDSFLRARFNRLSFRIGRNKAIVATARHILIIVYHLLAGEQQYKDLGPLFYDKRNKERSVKRQVQRLEQLGYTVALKPKTK

SEQ ID NO: 365583 - protein, 285 aa, unidentified
MTLYIGVDFHPHQQTVSYCNNEEGEVHQTSLIHNVEQVRRFYWQLPKAVVGIEASCTAAWFEQMLFDLGHELRVGNPTAIRARARSRHKSDKRDADLILDLLLKDEFPTLWRRSVQGQSVLEQLRFRHQLVKHRTQICNRLQALAHAAGLPKKGMQTKRARVALMEARLSETQSFQRDQLFELLDDLTERIKQVEQWLEEKAAGDTKVQLLLTHKGIGLLSALATVHTLGDVSRFPSSKEAVAYTGLDPLEQSSAGKVRYGSRRTSWQLSAAASARTGDARGESL

SEQ ID NO: 365584 - protein, 269 aa, unidentified
MELHTIGIDLGKTVFHLVGLNLRGEVAVRKKFSRTQLLRFTANIHVGLIGMEACGGSHFLGRALRGQRHEVRLIPAQYVKPYVKTNKSDYIDAEAIAEAVARPTMRFVPIKTDDQLDMQSLHRVRERWVMRRTAVINQIRGLLLERGITLRKGRHHVDAALPLILEDADANLSGAVRLLLAQLKLDLDQLSVRIDEADAVIQKTAHENEACRRLVAIPGIGPVTATALIAAIGNGGAFHKGREFAAWMGVVPREHSTGGHGRTRRSSNP

SEQ ID NO: 365585 - protein, 318 aa, unidentified
MSHGYDKFVGIDVSKDGLDVHGLPDGSPSRFDNTAAGRAKLLSLLPPAGACLSVVEATGGYERDLVAEAVTAGHHIAVVNPRQVRDFAKALGLLAKTDRIDASVIARFAETTRPVPKGYDERQEQLRELIVRRRQLLDHRTAEKNRSEMAHSSLVRKSVLKLIETLNKDIQRIEKAILQLVESNDDWRERFEKLKGVPGVGGQTAATLMAELPELGQLNRQQVAALVGVAPFNRDSGQFRGRRAIWGGRQSVRNALYMAALSAKKHNPVIREFAARLMAKGKPPKLVLTACMRKLLIILNAMLHSGDSWSPRVATLTP

SEQ ID NO: 365586 - protein, 356 aa, unidentified
MSQKLNSAIAAIGIDIGKNSFHLVGQDRRGALVLRQKWSRGQVEARLANLPPCLIGMEACVGAHHLSRKLQALGHDARLMPAKYVRPYSKGEKNDYRDAEAIAEAVQRPTMKFVATKTADQLDLQALHRVRERLVGQRTGVINQIRAFLLERGIAVRQGLHFLRAELPSILAKRTDVLSPRMLRVIEDLAGDWRRLDERIENLSDEIAALARQDKGCERLMTVPGIGPIISSAIVAAIGGGDAFSKGRDFGAWLGLVPKQMSTGDRTILGSISRRGNRYLRWLFVQAAWVVLVKITPEGWERYGLRSWIEAAKQRLHRNVLAIALANKLARIAWAVLHKGRAFECVKTNATASQSA

SEQ ID NO: 365587 - protein, 368 aa, unidentified
MDAETSSQSAHRTPPIPFDLGKVHVMTIGIDPHKSSHTAVAVDAAGHQLAQRRFVVNAGTVRQLMRWCEKGPERRFAVEGAKGLGRSLAQQLASAGEHVVDVPSTLSARARLLATGGDRKTDAADALHVAQVALFRHDLRKVEPEDQATILRLLTERHGDLVNERTRIINRLQAVLRDLLPGGAPTRLSAEKAAALMKGIRPATATDCCRRDLARDLLADLRRVDRQVRDNEAQMRDALAAARTTLTALPGLGTVLAAKLLGHVCDVTRFPTEHHFASYTGTAPLDASSGKNTRHRLNTGGNRALNSVLHIIAVCQIRDGGRGQDYYLRKIAEGKTPAEARRALKRRLSNVVYRTFKRDRHTTLPAAA

SEQ ID NO: 365588 - protein, 353 aa, unidentified
MRLTFNPLEFDMFIGLDVDSKSYAITFLDQEAKGHSLKIPAQPQVLHGYFQKRFPQKRLLFAYEAGPTGYQLYDYLGKQNQKCMILHPAGIPKSTQGRVKNNRLDSQKIAEQLKTGQLQGIRVPSPAYRQLRHLTDLRAQYSQRQIQIKQKIKSLLLFENISLPALQGTAWNRPFRQALTRVSVNETVRFKLDLLLRDLEDTRIRVSTVLRQMRQFVGQEKQIQQSIDYLQSIPGFGFIVSTYLLARVGDPSQLKDVRELAAFCGLVPSENSTGENISRGSITRTGDAISRSLLVQAAWIAIRKDTELYQFYSRIRAKRGKQHGSQIAIVAVARKLTQRAYRVLKDQRPYVIH

SEQ ID NO: 365589 - protein, 334 aa, unidentified
MSITMIGLDSAKSVFQVHRIDDTGQTQLKCKLGRSELIPFFEKQAACTVVIEACGAGHHWARLLGELGHEVKLIPPEAARPFVKRGKKNDVADVKFVPDKTREQQDVLTLHTARSLLIKQQTMVANAMRGLATEFEFVVPKGIGKLEELAAAVEADGSLPAEAQQAIGELHRHCNALGARIATFEVQIIGHARTDAVARLLATIPGVGLITASLIAATVGDHIRDFKSARHFAAWLGLVPRQHSTGGKTRLGRITRMGNADIRRLLVLGATSMVYRAEQWNSATGNWIVGVLRRRPARLATVALANKMARIAWAVMTRKEVSCPNGRAAAKATA

SEQ ID NO: 365590 - protein, 389 aa, unidentified
MEARTVNNLPPAGTHDDAVRCLLAIELSKKSWIVAVNTSLSDKISRHTLKPCDGKELLDLCERIRTRVARETKKRVEVVSCYEAGYDGFWLHRLLEAHGIRNYVIDPASLQVDRRARRAKTDHVDAERLLRSLMAYLRGEPKVWSVVCVPSVAEEDDRRLHRERSRLINERVQHVNRIKGLLAIHGIYDYQPLRCDRMQRLERLRAAEGRTLPPRLKAEILRELQRLELAIRMIKTIEAERDAIASPKTEMEHTSAKKIQHLAKIKCVGPEFAATLVGEVFYRSFDNRKQLASYVGLTPAHFQSGAMCRDQGISKAGNAKARTVMIELAWLWLRYQPDSPLSVWFRERVGQVKGRIRRITIVAVARKLLIALWRYLETGLVPEGAALKV

SEQ ID NO: 365591 - protein, 400 aa, unidentified
MISIDGVGVFLGLDVGKQTHHGHGLTLAGKKVFDKQLPNSEPKLRAVFDKLTAKFGTVLVVVDQPASIGALPLTVARDAGCQVAYLPGLAMRRIADLYPGEAKTDAKDAAVIADAARTMPHTLRTLGLTDEATAELTMLVGFDQDLAGEANRTSNRIRGLLTQFHPSLERVLGSRLDHPAVTWLLERHGSPQALRKAGRRKLVEVVRPRAPRMAERLVDDIFTALDEQTVVVPGTGTLDVIVPSLAKSLAAVHEQRRSLETRIEALLEVHPLSQVLTSMPGIGVRTAAVLLATVGDGSSFPTAAHLASYAGLAPATRQSGTSIHGEHAPRGGNRQLKRAMFLSAFAALHDPASRTYYDRCRARGKTHTQALLRLARHRISVLFAMLRDGTFYEPKSPRLA

SEQ ID NO: 365592 - protein, 356 aa, unidentified
MQTQVTKKIDFTGQSLFIGLDVHKKSWSVTVVVDGIEHRTFTQPPDPKALNNYLQRMFPGGAYNSAYEAGFCGYGIHRELNSLGIRNIVINAADIPTSQKDKLQKRDPVDSRKIARSLEKGSLHGIHIFDRELEELRSLNRTRFYLMRDLRRSKTRIKSFLQYYGEPIPPEFDNNQWTLKFVSWLKQVKMQTLSGQDAFSNLISSYEYHRSQLLTLSRQIRKRIREYDRELYTLLKSISGIGPLTASALITELGDINRFSNIDQLGSYVGLIPRIRESGETTHTGGITFRCNSFLRTLLIESSWQAIRMDPALMQYYHSHLINNKGHKVVIKVARKLLNRIRYVMKNRQPYVTGVV

SEQ ID NO: 365593 - protein, 430 aa, unidentified
MEVIYPKVCGVDVHKSFIVAVICDSTSVKPQYLRKRFSTFNNSLSEFRNWLLANDCQNVCMESTGKYYVPVYNALEGHISNVVVANPKWVRCIKGEKDDNKDAKWIADLFKLGIVRGSFIPNKDIRILRELTRYLYKLTNMRTSEKNRFTNALTVGNCKLDMVFSDIFGKTSSAIIDTILSQNEYNDEDILKNIDWRCKSSNEDILNSISGISWEEAQKQRMNVIQEHIDYLDKSIKSVREIIDSIVTPYESAINLLCSIPGIKRNSAITIISEIGTDMSQFSSHYRLTSWAGLAPGCNESAGKKKSVKISRAGVYLKPALVEVAHCAVKDKDNPYYANKFNILSKRRGKKRAYIAIARKILVAIYHMLSTGELFNPTDLSKVETSDKDKIKFTKNNFMQSTKQLISLGLTIEDLQTLIQSKISESTPVI

SEQ ID NO: 365594 - protein, 374 aa, unidentified
MTSPANTVHAAIELSNTLWLVGTRLPGAAKTRMHRLTVGDVTGLLELFADLRSRAAASLGQPAAVVCCFEAGRDGFWLHRILLAHDIDSHVIEPTSILVNRRARRAKTDRLDAEGMIRVLAAYLGGDRQACSMVRVPSPEEEDAKRPHREREHLVQERTRYENRILALLATQGIRQRPSLRTWQRDLAALRTGDGRPLPRLLSREIDRLRRRLVLTMELIRELDAERSAALEGAPEDTASRKIASLCRIRGVGENFAAVLVREVLYRSFVNRKQIASYVGLTPMPYQSGSTDRDRRIGRSGNPRARTTLVQLAWLWLRYQPGSALAMWFRERVGTLAGRTRRIAIVAMARKLLIALWRYAETGQLPDGVAVKAA

SEQ ID NO: 365595 - protein, 343 aa, unidentified
MNIASIGIDLGKTTFHLVALDDHGNIIIRKKFSRKQLLAYTANLPSSLVGIEACSGAHFIGARLRDQDHQVRLIPAQFVKPFVKSNKNDFIDAEAIAEAVSRQNMRFVPIKTDDQLDLQALHRVRDRLVHRRTAVINQIRGFLLERGITFAKGPANLRNRMPDIVEDADANLTPRMRTLLDRLWQEWKQLESGIETASDEIEQIASEDEACQRLRQIPGVGPLVSTATVAAIGNGAAFRKGREFAAWLGLVPRQYSTGGKTRLYGISKRGNTYLRRMFIHGARAVLMRVKYDTAGLGQWVHQLEARTTRNKVIVALANKLARIAWAVLFKGEAYRHAAVCAQA

SEQ ID NO: 365596 - protein, 414 aa, unidentified
MDVVIQRCAGIDIGKKTMAVTIRTPGQGKRRRTETRTFATMTDQVLALRDWLLGEGVEVAGMEATGDYWKPVFYLLEDALECCLLNAGHLKAVPGRKTDVKDSEWIAQLVEHGLVRPSFVPPPPIRELRDLTRYRKTVIEERTREVQRLEKILEDAGIKLSSVASSTVSVSGRAMLAALIDGERDPAALANLAKGRMRRKTPILQQALRGRFDAHHAVLVREMLARIDAADATVARLCHEIAERLRPFQEQLDLLMSIPGIARRNAEVLIAETGGDMTAFGSPHRLAAWAGLAPGNNESAGKHRPGHTRKGNKWLGSALVESAHAAARTKNTYLAAQYWRLSGRRGKNRAAVAVAHSILVIAYHLLDRHQPYRDLGGDYFTSRLPDHAHVRRLVAQLERLGQHVTLTPNNPEAA

SEQ ID NO: 365597 - protein, 370 aa, unidentified
MLDTTTFVGLDVHARSIKAVSLDVMTGEVRCATFGYDAGAVAEWVRSVDPRARCVYESGVTGFDLQKRLSGLGVDCVVGAVSKMIKPSADRRRKNDRNDAEFLARMLSVGNVVEVWVPDDECEAARDLTRALEDARDDLSRSKQRLSKFLLRHGLVFDERTPTGRRKGNWTRAHWSWIESIRFAEGADNDVLAYYVDAVRRAAEEKARLEGLVEAEAHKPRWRRRVDSLRCLKGVDTATAADLVFEAGEFSRFGNARSFAAWVGLTPSEHSSGESDRRGAITKAGNKHLRKALVEAAWHYLTCSGRPKDLARGQAPDRVARRHAAKGVRRLVERREALLARGVHNNKANVATARELACWVWAVGLMAEEA

SEQ ID NO: 365598 - protein, 358 aa, unidentified
MEQITRGERGRVVVRVGVDLAKRVIQVHAVDAAGQLVLGRALARDRFIAWCAQLPGGCVVAMEASSSAHHWARKLCSLGLDARIIAAHLVKPYRKQGSSGKNDANDAAAICEAASRPSMHFVPIKSVEQQSMLCVHRLREGIKEERTACINRIRGLLAEFGLVFAQSPKVLRLALADTIEDASNEMGTLARLTLQRAYAQWCELDEHMAWCDERIAEHACTNEQVKTATALLGVGPVTASAVVATVGDFRQFRNGAQFGAWVGLTPKQHSSGGKARLGRITKRGDTYLRTLLIQAAKSAVLTAHRRSDRISNWLCMLRERSGWQIAAVALANKNARILWALMTKGAAFNANHLSAKPA

SEQ ID NO: 365599 - protein, 407 aa, unidentified
MPYTVGLDWAQDDHAVCVIDEQAQVHLRCTVAHSASGLADLIHQLRGVADPAALPIAVERPSGLLIDTLVEAGFPVVPIHPNALKASRPRYSAAQGKSDPGDAFILADLLRTDGHRFRPLHPLSDDTRALRALARSRDDLVVQRVALANQLRALLESFWPGAAAIFADVDSPIALAFLARYPTPASAAHLGEKRLAAFLARHAYCGRRPAAELLDRLRAAPAGLAGPAECEAKGELVRTLAAVLEPLVTQLQQLTASLEHAVAQHPHGPIIMSFPRAGRVNAAQILAELGDDRARFTHPDQLAAEAGVAPVTYESGKHRGVGYRWACNKRLRRAVTCFADNSRHASPWSAQVYRRARDRGCDHPHAVRILGRAWLRVLWRCWQDRKPYDPAAHRRARPLLLAAHPAA

SEQ ID NO: 365600 - protein, 373 aa, unidentified
MSKIRFIGLDVHADTIAVAVAEPGGEVRSVGTIRNRAEDLRKAMGRLGSPGQIRVCYEAGPTGYAVYWRLAALGIHCDVIAPSLIPVKAGDRVKTDRRDAEKLARCYRAGDLTPIWVPTPEHEALRDLVRTREDAKQDQLRARHRLSKFLCRHGMRPPETIKKAWTAKYMDWIKREVNFDQPALTATLTDYVHEVEHAAERIVRLEKSITDAIAQSPAEMRAVIESLQALRGVAQMTAVTIVSELGNLSRFSSPRQLMSYSGLVPSEHSSGGKTQRGSITKTGNAHLRRVIVEAAWAYQHKPWVGGYLAKRQQGLDQEITDIAWKAQWQLCTRYKKLAGRGKNKTQIVAAIGRELLGFIWAIAVKAEDRTCTA

SEQ ID NO: 365601 - protein, 423 aa, unidentified
MDILYARVAGLDVHKDTVVACVRIVVDGKATRECRTFATTTEQLAELRAWLEECWCTHVAMEATGVYWMPVFRILGEGKFELTVANAAHIKNVPGRKTDMNDAMWIADLLACGLIKASFVPPEEMQELRALTRTRKQLVREQTRHVQRIEKTLAEANIKLDSVLSDIMGASGRRIIEAMIAGVRQPRKLADLASKQIKATPKELYDALHGRLTDHHRFLLELHLRQWDGLDETIRKIDQEIDQRIGRMDVKAGASQVPFRSLIELLYTHPGISTVAAPAILSEIGCDMSRFPTAGHLVAWSGLCPGQNESAGKRKSSRLRKGAPWLKTMLVQCAWAAKRKKDSYYRAQFFRLQARRGPQKAICAVAASILTAIYHILKNGTEHHDLGADYFDRRPTEVKASRLVTRLKKLGFTVQLQPIAEVA

SEQ ID NO: 365602 - protein, 395 aa, unidentified
MFIVGIDVAKRSHEVCMITSDGQTVQRPFSIRNNCTGYNLMLEKIRKHTNIKSQIVFAMESTAHYWLALFTRLRKDGYHVILLNPIQTSAMRDMFIRKIKTDAKDSFIIAELIRFGRYAESNVAQDRLLALKELCRNRFYLVDMAGDLKRKLVALIDRVFPEYEAQFDTIFCKSSVALLKKYPTPQKLSNAHLDKLTELLWNSSNGHFGEWKARELRELARNSFGVEDCDGAYSTLILLMLDQIQSLSGKADALEKEISRLFQSFDTTVTTIPGVGPIIGAVILSEVGDISRFSSADKLAAYIGVDPSVNQSGEFQAAHAHMSKRGSPYLRRCIWMASQVAVQRDPMFRAYYEKKAAEGLKYMTIIGHVMRKMTAVVFAILRDHKVYEPVLPTAA

SEQ ID NO: 365603 - protein, 318 aa, unidentified
MGSMDRNKSSTTIAGIDVGKRQLDAAVLGRAEQHRVANDAAGWEGLIAWLAERGVRRVGLEATAGYERGVRARLEAAGLEVVVHQPLEVKLFARLKRRRAKTDRLDAALIAAATAQVDTVRAAQDPRLAHLAERLTAYEQISDQAAQLKTFMEHVTLPDLAASLGEQIQSLARLKARLAREILAALKAWPDLLARWTLLRSLPGVGPLVAASLVIRMPELGALKRGQPASLLGVAPFDLQSGQWKGQSFIGGGRSRPRRMLYLAAIVAKRFDAAFKIFADRLLAAGKPPKVAIVAVMRKLVEAANLVLKRQQPWVRHA

SEQ ID NO: 365604 - protein, 410 aa, unidentified
MPKIVYPICCGIDVHKSFVVACVATTDEKLVTTYKSKRFSTFTGDLRRLANWLAQNNCRDVCMESTGKYWIPVYNILEPTCHVVLAHPKYVKAIKGKKTDKRDAKWIADIFKHDLINGSFIPPADIRQLRDLVRYHFKLTNYTTGEKNRAQNCLTVSNIKLDDVFSDVFGKAASAITERLLESSEPFDVKPYLTKNIKASPEEIQVAVDGVMCANQAEKLRIIRSHMESLELCKANLESEILTVAEKFIPQINLVLTVPGIQTFAAVAIIGEIGVDMSVFETSRHLCSWAGLAPQNDQSADKKKTTRISRAGVYIKPLLVQCANCAIRSKKNPEIANRYNAIKKRRGHKKAIIAIARMLLTAIYNILKKNEPYNAELYRKADKPPLQREVSVEQAIFILQRQGYLVTAST

SEQ ID NO: 365605 - protein, 330 aa, unidentified
MTQYVGLDVSLKETKLHVLDEAGNRIWRGRCATEAAAIAAAVRRYAPTAVRIGLETGPLTTWLWTALTAEGLPMICLDARHAKKALDMKVNKTDANDAEGLAHLVRAGWYREVRVKSRRAMLAKALLGARSQLLSMSLALENQIRGILKTFGRIVPKGAGGLFEKNVRALITDDAEITAVIMPLLQARQMARGKCAALDRRIIRSVQGDATCRMLMTMPGIGPITAVAYVAALEKPDTFKRSRAVGAWLGLTPRRFQSGEVDYDGHISRRGDRQLRALLYEAAAVLLTRVRRESALRRWGLMLWKRLGFKRAATALARKMAVVLHSMWKS

SEQ ID NO: 365606 - protein, 421 aa, unidentified
MKFKAQDKQNQLIENITVHHLVIGIDIAQELHMARAVSFRGIALGAPLKFSNHREGFKLFKCWIEDLLKTYKLSSVIVGMEPTGHYWFSLARWLVDQGFETVLVNPHLVKKNKENRDNTPSKSDHKDALVIADMVKNGYYSPVRFHSEAYEELRILMANRETVTKRLNSAVNQIHRWVDIVFPELRHVFKILTCTSAIATLRLFPLPKEISQLNTDQVINGWKQYVKRHAGVNRAELLISLAKSSVGTTQALQAYKLHLGQLLEEYDLAQRQLEQIEHELHLILKRVPFAQKLLEIRGVNATSLAGVLGEAGDLSGYTHGNALLRHAGLNLAEASSGKWRGKMVLSKRGRSRLRHFLYLMTMSMVMTNPEIQASHRYNVEEKKLKKMKSIMKLCGKVARMLVALAKNSTTYDPVKVFPQAA

SEQ ID NO: 365607 - protein, 327 aa, unidentified
MAKRTMICAGIDTGKRKLDIALDGGSEQLQVDNTPEGYKVLSDWLRRHRVKRVGIEASGGYEQAVVAELRRKRFVVVVFQPAQVRAYAKFHLQRAKNDKIDAALIAACTAAVRKIHAAPDARLLPFAEQLTMIDQIGEDIARLKNRLETCRTPRFRQLWKEDIARLTKRKKIELEALVAAIREHRDLAERLDLIHSVSGAGLPTAVAILVRMPEIGQITREQVAALAGLAPYDDDSGDHAGVRHIEGGRERLRRALYTAALPASFRWNPQLIALYNRLIAAGKGHKRALIACARKLLIFVNTVVARGIPWSHQRPPIASMTAAPLAG

SEQ ID NO: 365608 - protein, 324 aa, unidentified
MNKIKEFFGIDISKDVFDVVDSSENHHQFKNESSGFKAFSKLLNGNSHCVMEATGCYYQGLATWLYSRSIHVSVVNPLSVKRFIQMRLKTSKTDKLDAQMIRMYGESEKPVLWNPPAKLIIEATELHKLIELFVRQRAALKNRLHALNAKGITGSPVVTSVRRQIRNLSNEISDLELKLEEVIKEYQPDLLTRVCSIPGIGKRTAIVLIVLTHGFEKFESSRQLISYFGMNPIIRESGSSIRGKSRISKTGNHYIRNLLFMCAFTACEHNKACREIYQRIIAKGKSKKLALIAVANKLLKQSLAIAKSGLYYDENYRSVYVNLG

SEQ ID NO: 365609 - protein, 289 aa, unidentified
MPIVGGLDIHRKQITFDYLDTVTGEVKRGQVAPADREHVRAWLTRFAGWDDAAFAMEGCAGWRYVAEELAAAGIAAHLGEPADTAALRGRKRHAKTDKTDARHLRALLAEGRLPECWIPPPHILEYRALLETYHDLRRAHTAWVQRIHAVFVHQGAPRLGEGAVRTEPGLEALRAAAAAHLSAAGQLQVATALDMLAATEAQLGPLRKQLTQTARHLTGARVLAARLYGVGPVTGLALTCWLGGAGRFSSSRKAVRFTGLDITVWSSDRKGPPGRLSRAGAAGAALGGL

SEQ ID NO: 365610 - protein, 308 aa, unidentified
MITAVGAVAASRSFPTTMAGYHQLLAWARSFGTLRRAGVECTGSYGAALSRHLQTAGITVIEVNQPDKATHRRRGKTDTIDAQAAARAVLSGRATATAKTGDGPVEMLRMFKLAKSSAIKSRTQAINQLKAVLVATDPTLREALSGLSTQILIRQCAQLPTGAPSDATSAATWTLRLLACRILELTNEIDDLNQQLARAVDRHTPKLLARPGVGPDCAAALLITAGDNPERLGSEASYAALCGASPVEVSSGKTVRRRLNRGGDRHANAALYHIALSRLRWDPPTQAYLARRIAQGKTRREALRCLIG

SEQ ID NO: 365611 - protein, 445 aa, unidentified
MSVGHEEIPDADHESVIGRVCAIDVAKATGKVCVRVPHPTLEGRRVSRVWDVPATLAAVTELATELVAEGVQRVTVESTSDYWRIWFYVLEAAGLRLQLVNARDVKNVPGRPKTDKLDAVWLAKLTEKGMLRPSFVPPAPVRQLRDYTRLRIDLTRERTRHWQRLEKLLEDALIKVSSVASTMTAMSVRDMLEALIAGERDPRRLADLARGKMRSKHAALVQALTGRFDAHHGVIARVLLNQIDALNTEVAGLDERINEQLTAITVTQTECGSDDTVPVVSTGVQAVQRLSEVTGIGVLTAQVIVAEIGIDMSRFPTAAHLVSWAKLSPRTVQSGPVLQGGRTGKGNPYLKGALGEAAAVAARTDSFLGERYRRLVKRRGKLKALVAVARSLLVIVWNLLADPASRYHDLGAEHYLGRIDTQRRVRNHLSQLAALGYRVTVAPAA

SEQ ID NO: 365612 - protein, 347 aa, unidentified
MTIVENHIQITGGVDTHLEFHVAAAVDANGGVLGVETFSTRGAGYAQLVAWLQRFGPIDRVGVEGTGSYGTGLTRHLRSEGIAVVEVDRPNRQARRRHGKSDTVDAIAAARAALSRTATGQAKHRDGNVEAIRVLMVARRSAVDERIKVLNQIRHLVLCAPEPIRARFHGLTPTSLLNQTSTLRPRDHGDVVDYTTLITLRELGRRAKNLHDENVRLNKLLRPLIRRTSPGLLDVYGVGYDTAAKLLVAAGDNPERLHSEAAWAHMCGVAPIEASSGKTKRHRLNRGGNRQANSAIYHIMLTRLSYDQRTRDYFARRSAEGKTNGEICRILRRYIAREVYKQLPHPD

SEQ ID NO: 365613 - protein, 418 aa, unidentified
MKIVFPTCCGVDVHKSFLVATIIKTPQNSLQQSYQKKRFSTFNSDLNRFADWLRENDCLDVCMESTGKYWVPVFNILEKQGVRVVIANPKWVKAVKGNKDDTKDSKWIGDLFRIGLVKSSFIPNKEIRILRELTRYRYKLISMKSSEKNRFQNAFTVCNVALDSVVSDMFGKSATAITDYLTSDVEFDAQHCISLLQRSLKKKAPAVLAAVEGHEIAPEQKTRIGIVRDHLHYIDKLLERVDDCVEGMVQKYEGAITLLRTIPGVDRSSAITILSEIGIDMAQFGSSKRLCCWAGLTPGNNESAGKKKSVRISRAGVYLKPALVQAAHAAVKDKSSTYYAVKYERISKRRGKKRAIIAIARMILTAVFCMLSTGEVWNPVDLYKVYMPEHLKEKQLAKAVKQAVHFLETQGLTVLDSA

SEQ ID NO: 365614 - protein, 379 aa, unidentified
MGQDITWVGIDAHKDSLSVAVSLPEEEGIRQWRTRADRLAIARLSKKLKKLAPGKIVCCYEAGPCGYELQRELDSEEGIRCMVVAPSLVPRKPGQRVKTDQRDARHLLGQLRAGELTEVHPPSREDESARDLCRYRDQVRRDRMRCRHRLLKMLLRRGVVYRAGRNWTQRFHLWLAAVRLEEEAAQAVLDHMIVELTQLEERMRSLDARIEELASSDRYREAVGWVRCFRGFDTVSAMIVVAELYAFFRFRSPRHLMSYLGIVPSEHSSGESHCRGGITKAGNSYLRRILVQAAWNYRHLPKVTPPLAARRQGQPTWAIEIAEKAQHRLHRRYRHLALARRKGKNKVTVALARELTGFLWAVLHRGLVENAKTPQSRAA

SEQ ID NO: 365615 - protein, 311 aa, unidentified
MDSEEKFIGIDVSKDTLEIAVAPTGERMTFAQTEDGLALMVDFIQSFSPRLVVLEATGGLERAAIGILGAKGLPAVVVNPRQVRDFAKAKGILAKTDRIDAGVIAAFADAIRPEIRPLKTEETQELEALLTRRRQIVEMLTAEKERLYTAPQWTKKDIRAHIQWLQKCRDKLGKDLDGRIQKSPLWRAKDEILQSAKGVGPVLSQTLLTKVPELGSLNRKEVAKLVGVAPLNRDSGKFRGRRSVWGGRAEVRSVLYMATVSAIRSNPVIRAFHDRLIKAGKLPKVAITACMRKHLTILNAMVKNQTPWQVA

SEQ ID NO: 365616 - protein, 346 aa, unidentified
MQNDTLVAVDIAKEVFEVAVSDRPGRVALRKRLLRDRFAAFFAQMPPATVVMEACSTAHYWGRRIEELGHLVVLLPPQYVRPYVVRNKTDRTDVDALLEAFRNEQIRPVPIKNVTQQVIATLHRLRSGWLADRVRSINTLRGLLRELGFFIPEGRKHVLPEAWEIIQDRHRGLPEALKSSLAALCEEIASLSTRIEDVEAQLEALAQQIPIVARLRSVPGIGLLSATALYTFIGNPSRFPSGRHMASFLGLTPREYSSGLRRRLGRISKRGDAYLRLLLIHGARSILYHAKRMKHRDRLGAWAVRLERKVGHNKAAAALANKLARITWAVWKNDRSFEPAPQPQAA

SEQ ID NO: 365617 - protein, 337 aa, unidentified
MRYCGIDLHSNNSVVVIIDEADRVLFDRRLPNDRSGIVAALEPYRAELYGVVVESTYNWYWLVDGLEAAGFPVTLANTVALKQYEGLKHGDDTTDARHLAHLLRLGILPRAYIYPKRERAVRDLARKRMQLVRSRTQHILSVQNILARERAQTISAPVIERLDSAAIEALGLAPEVALALSSNVAVIQTLCEQIEVVEKRLSSCVRSRPEYVLLTSVPGIGAILATVIVLETGSIERFASAGDFASYARCVKSQRLSNGRKKGSGNARNGNPYLAWAFIEAAHFARRYCKEAGRFHDRKRARTNPVVASKALAHKIARACYHMLSSRMPFDVKRCFG

SEQ ID NO: 365618 - protein, 464 aa, unidentified
MSLKRKHKVIPKIVNLDVLDQINLNAAGLDIGAAEIWVSVPEDRSEQPVQVFPTFTVDLHRLADWLQACRIDTVAMESTGVYWIPVYDILEARGFQVYLVNARHVKNVSGRKTDVLDCQWLRQLHTYGLLNASFRPDSDMLALRSYLRHRDNLVRYRTAHIQQMHKALQLMNLQLPNVLSDITGQTGMQIIRAMVAGEHDPVKLAQYRDPRCRSSEDEIAKALTGHYRPEHLFMLKQALELYDVYTEQMRACDVEIERQYSAIKPKFDEPLPPLPPASKKHRRQGNAPDYDLRAHLYQLTGVDLTLIDGLEVLSIQTILAEIGLDMSKWPSVKHFTSWLRLAPNNDISGGRVLRRGTPKTQNRASQAFRMAAQSLSHSQSALGGYYRRMRAKHGAPKAITATAHKLARIFYYMLKDRKTYHDPGQDYYEQKYRERVINNLKRRAKELGLELVPSPMPNIQVDVS

SEQ ID NO: 365619 - protein, 365 aa, unidentified
MIVIGADPHKLSHTAAAVERATGELRSSETVAARDSGHAQLLDWARALDDERVWAIEDCRHVSGGLERFLVDRGEHVVRVPPKQMAGARKSARKRGKSDTIDAVAVARAAIREGIETLPAAFLDEEALAIKLLLDHREDLVGESTRAQNRLRWHLHDIDPELAPPERSLRHLHVLRSLGARLSRREQTVRVRLARELVRRCAALRRELEALERELQTRVREQAPELLELPGCGPLTAAKLIAEIAGAARFPTDAKLARHAGIAPLPASSGARHRHRFDRRGNRQLNCAFHRIAITQGRIHPEARAFLERKRSEGKSNREALRSLKRHLVRRVHRLLAPPSVSPPLPMSSSPIRASSAPAVMPCLT

SEQ ID NO: 365620 - protein, 411 aa, unidentified
MNPVVGLDISKGESQVQAFVDKGKPFRKSFKVSHTLEGLGLLVEFLDQVQKETGQKPPVILEATGHYQTPVVQYLDERGYLLIIINPLISYKAKSSSLRKVKTDAVDAYLLCELYYKEELEPYKKRGIQLLNLRNLTRQHENITGVMIQTKLQFQAVLDQVFPEYRGVFGDLYSVVSLLILQEFPSSEDILKASDETISNKIKELCKSRSIRWANEKALELKKAAARNPFEKTVYQSHILSLGMYINIILQYKEHLSRLESEIDALAKEIEEYNIIKSIPGIGEKIAATIISEIGEIDRFNHPKKLVAFAGVDPSVFESGKFRATQNRITKRGSSRLRHALYMAVRCAIRDCRKKKTTDEILPRNKKMREYYDKKREEGKPFKVAVIACVNKLLHWIFALLKNRTTFQDIA

SEQ ID NO: 365621 - protein, 368 aa, unidentified
MTERTTTSPTAVTSTTIGIDIGDRTSHICVLDGAGNVIETGTVATTPGAFAKRFERVDATRIAIEVGGQSAWIDETLSALGHDVIVANARRLRMIYENESKSDEVDAEQLARVARVDVMLLHPIQHRQRSTRTDLAKARSRDMLIATRTSLINHVRGMLKSFGTKLGSRGAAYFHGWVRDQIPDEFHCALDPIVDTLEEIAVQIAALDKELERLANEVYPETMLLRQVNRVGVHTALRFVLTVEDPDRIKCSRNTGAYFGLRPRRHQSGARDPEMRITKAGDRDVRRLLVQCAQQMLGPFGTDSDLRRWGLDLAGRGGKSAKKKAVIAVARKLAVLLHVLWKTGQVYVPLKNANAKDTAQAAKTQVPA

SEQ ID NO: 365622 - protein, 339 aa, unidentified
MSIIGCDLHSRYQVIAMVETDTGEMVTRRLEHESGEARAFYTTLPKPSLIGMEATGYTQWFERLVAELGHELWVGDPAEIRARAVRRQKTDTRDAEHLLDLLLTKRFPRVWVPTPEERDVRQLLKHRNKLVRMQTSVRNQLHFLAMSQGVCRKQKLWSARGRAELEGLSLGPWASQRRKELLELLDGLGPRIAELDQAVKTEAERRPEAVELMKHKGVGPVTALAFVLTVGPVERFANSRKLVSYLGLNPGEDSSGGHQRLGHISKQGNEMLRWLLVEAGHGAAQFDPELRRKYQRLVFRRGRNVAKVALARHLTVRLYWTLRQASSATPPVRTPGSPR

SEQ ID NO: 365623 - protein, 334 aa, unidentified
MENIALIGIDLGKNSFHIHCQDRRGKAVYRKKFTRPKLIEFLATCPATTIAMEACGGSHFMARKLEELGHSPKLISPQFVRPFVKSNKNDFVDAEAICEAASRPSMRFVQPRTESQQAMRALHRVRESLVQDKVKTTNQMHAFLLEFGISVPRGAAVISRLSTLLEDNSLPLYLSQLLLKLQQHYHYLVEQIKDLESQLKRKLDEDEVGQRLLSIPCVETLTASTISTEIGDGKQYASSRDFAAATGLVPRQYSTGGRTTLLGISKRGNKKIRTLLVQCARVFIQKLEHQSGKLADWVRDLLCRKSNFVVTCALANKLARIAWALTARQQTYVA

SEQ ID NO: 365624 - protein, 337 aa, unidentified
MRFIGVDLHSNSITVCFLTKRGQESLETFALSSVADFQKSLRRTDRVAVEATGNTRWFVGQIKELVAQVVVVNPNQFEVIRKSVKKTDRHDARALAQFLSKDMLPEARLKSDLASQINSLAETRDKLVKLRTTFVNKLHALHRGRGISSRKSQFLSEKGLNAVLEREWEITTRVEIEVIIAQIRSIKEGIARLDTQLVASGKQLNGHRNLISIKGIGPRAAAILLSVIGEVGDFESDDKLFSYFGIVPRVSNSNQTVQHGRITKRGSKLGRTTLVQCTLVAKKYSVYLNKFYQRIKEKKGGGKAIIATARKFLGIIYRTLKHNWVFADFPNFVLAED

SEQ ID NO: 365625 - protein, 356 aa, unidentified
MPTMPDQALEVILGVDTHEEEHVAALVDDLGRLLATRSFKATTRGYRGLLAWARTYGPLVRAGVEATGSFGVGLARFLAAEGVDVIEVTRPNRRGRRHLGKTDTVDAEAAARMVLSGEATATAKRRDGAVEAIRVLQIARRSAIKARTQAGQQIRSLIITAPAELNGALAGLTLKRQVTRCARLRRGAGDDASGSTRRALRSLGRRWQQLDDEARELERELATLIKTAAPPLLAEPGVGPDTAGKLLVIASDNADRLRSDAAFAALCGVSPIEASSGKTKRHRLNKGGDRQGNNALWTIANNRLIHHPETRAYAIRRSAEALSRREILRCLKRHLARRLHRLIVADLTAAAALDLT

SEQ ID NO: 365626 - protein, 346 aa, unidentified
MEQYVGLDVSLKMTAICIVDRTGKMDREGMVASDPAAIAAFVRLHAPHVARIGLETGATSTWLWTELNKMRLPVICIDARHAKAALKMQINKSDRNDAVGIARIMQCGWYKEVRVKGLDSHAIKAVLVSRALLVKIKRDLENQIRGLLKNLGLVIGRAKMNMFVVRAAELIEDRPELAAAVEPLLKAREAVEKQIADLDRKVMRLARNDVQVRRFMTAPGIGPITALCYLATIDDPTRFKRSRSVGAYVGLRSRRYASGEVDWTGRISKCGDPMLRSYLYEAAGVLLTRVAKWSVLKAWGMRVAKRSGLRKAKVAVARKLAVILHRMWVDGTEFKWSSKEVATQPA

SEQ ID NO: 365627 - protein, 339 aa, unidentified
MKHTVVGVDIAKRVFQLHWVDMETGEIVSLQLKREKFLEHFANRAPCLIGMEACGGSQHWARKLQGIGHRVKLLPGKAVKPFVGGNKNDARDARGIWTAVQPPGIKADAVKSEEQQAVLALHRMRQQLVKFRTAQINGLRGLLTEYGEVMAQGRSGVRKGIAEALQRLSDRLPAMVIDTLREQYDRIGKIDEQVAEIERRLKVWHKEDQASRRIADIPGVGLLSATAAVATMGDARAFTSGREFAAWLGLVPRQSGTGGRIRLMGISKRGDTYLRTLLIHGARSVLTHAKEPEPWITELRRRRPLNVAVVALANKMARTIWALLAHERVYQKGFVSQPV

SEQ ID NO: 365628 - protein, 334 aa, unidentified
MALELLAIDLGKRSFHLYGIDTDGVVLSRKVSRAKLAEVVNEIAPATIAMEACASAHHWARCWLAAGREVRLINPRFVKAFVKGSKNDAVDAEAIFEAAARPTMRFVPVKSTDQQHVQSLHRARDRLICHRTALINHTRGLLAEYGIVLPQGPWRFMAQAPTVITDAELSDLARSIFSELLDQLDDLDRRIKKLDAMIVKLCRANETCRRLAQLPGVGPIIATAIVAAVNDGRQFRSGREMAAWIGLVPRQYTTGGKPRLGGIGHRANHYLRRQLIHGARAVVSRLSKHDDQRSTWLRALVARRGFNRAIVALANKTARIAWVLLTKKAAYAAP

SEQ ID NO: 365629 - protein, 389 aa, unidentified
MYLIGIDISKYKHDCFIATEAGEIIKDSFSFDNDAKGFGQLLDVLQTLDPSQTKRIGLEATGHYGYNLKVFLDRNGFDYMEFNPILVKKLSTGLSLRKTKTDKADARLLSMILLSVDYRTYPVKSYHIQELKSLTRYYKSLVKKRSRELVELTNALDLIFPEFKPFFKNRFSQTAYFILEHYRTPEKIAKMSYQNFEKLHSISKGHLSYAMFLRLKDLAKNTVGSSSDLLVFEMESCIRLLQSVNREIKELEILFKDWTLKIDSPVFSIKGIGFISALSLIAEYGNFTSFDSPAKMLSFAGLEPSIIQSGTSNKQGHMVKRGSGYLRDTLMNVAVPFMMHNPVIYDYYLKKKNEGKPHRVALSHVAKKLLRIIFFLVKSNVQFNETKLA

SEQ ID NO: 365630 - protein, 372 aa, unidentified
MSGYKELGYIEKSTVDSTSAQIQYKEADIMIYVGIDVASQKHDFFIMNDLGEAYTTHSITIPNSNEGYKKLHNSIQEFCGATNDFKVRIGLESTGFYHKNIVSYLLSLDYEIMVINPILTNMYKKSKKVHIQKNDNIDSIYICKYLMDTETVFKPYTTISYHTDALKALSRERFSLVDELRLAKISIYKLLTQLFPEYLKLFTNVYQGSALDILEKYYSPSKLSKAHIKTISSMIHGKCKTSAETLIEAAKTSIGIQNDYLSFQLSQAIKRLKSIESEIDEYNNQISKYVDMINPNILTISGVGYITAGLILGEIGDINNFKNSEHLISYAGLDVKIYESGKYKAINTFYFKERLSISTICLISSSQSLLDT

SEQ ID NO: 365631 - protein, 324 aa, unidentified
MKKTNTVRVNGKTLFKGHKLTIGMDLGDHWSCYCVLDEAGEILLEQKVATTPEAMKQIFEKIPRSLIAMETGTHSPWVSRLLTELGHKVIVAHAQKVQLITKSNRKDDRHDARTLARLARIDPELLGPVRHRSAQAQIHLTVIRARAELVSARTALVNAARGLVKSYGQRLPKCGTQQVSRELAAGLKAELREVLEPLLKEIESLNEGIQEYEVRMEKIAKESYPHVERLKQVKGVGTQIALTYVLTLEDPHRFPKSREVGCFLGLRPTRHSGFFRLTGQDDFRVAVEPRLPTRYHSEQNAPTDGVWIVALTSKLNASVGAFEE

SEQ ID NO: 365632 - protein, 335 aa, unidentified
MHPVLQLHPPLPPGAICVGIDVAKAKLDVRLDGAQKPFGLPNTSSGRQRPIDRLRGLPLARVVVESSGGYERPLLFELLEAKMPVAHVNPRLVRDYARGFNQQAKNDPIDTQVLLCFGRERQPRLFTAEDKLRHMLQDLSRCRRQLLQQITALKNQAQIALHPAAQKVLAESAAALEQQLEVIDQQVQAEIEKLPELRRRQERLMEVQGIGPLTSRTLVIELPELGRLDRRKLAALVGVAPFDDDSGPQHHRRIIKGGRPHVRSALYMAAVSGIRCNPVLQPYYQRLTAAGKPPKVALVACMRKLLIHLNAILAEHPASPPHPPASEPREGGEKE

SEQ ID NO: 365633 - protein, 351 aa, unidentified
MLIIGCDFHTRYQQIAMAEDSTGELLVERRLDHESGEAQVFYRSLPKPVRVGIEATGPIHWFERLLAELGHDLWIGDAARIRASEVRKQKTDERDAALILDLLLAKRFPRIWVPTPAERDLRQLLWHRHKLVSLRTMLGNQLHFLAMSQGLCRKKKLFTKRGRRELVALPLGPWARRRREELLKLLDPLEPPIAELDRAVLEEAKRREDAVLLMSHPGIGPVTALAFVLAIGPVARFQRSKKIASYLGLNPSEESSGGRRRLGAISKQGNTMVRWLLIETVHHAVSQDPELRQDYQRLKFRRGHAVAKVAIARKLAVRMYWMLRSGADYAQLVRKQGSPGGTLMNANSSLA

SEQ ID NO: 365634 - protein, 315 aa, unidentified
MYYLGIDVSKKTIDCCLISDSIFYERRFDNTEDGFRRLDDWIQGYTAKAVHCCCEATGIYHEAIAAHLRQKHIVSIVNPSKIKGFREAEQTRTKTDRQDARLIAEYCRRMQPQAWQPPTEEQEYLQAITDYIARLKQQRAAEQTKHQTAPDTIRHHIQTTIDHLNRLIATVQNELKDFYRQNPAYNEKKNRLKTIDGIGESAASVLLTKLTRYDFANQNQFTAYLGLDPKIKDSGTSVKGKPRISKQGQKNARKALYMPALVAYRMNAFPAFTARLKARGKPPKLIIVAIMRKLAVIAYQLYKTGKDYDRSRYRN

SEQ ID NO: 365635 - protein, 384 aa, unidentified
MNNDSTIFIGLDTHKSFTQVALLKDKRGEAPSSYSRIQSTKSAFIKLSQTLQSQFPKATLNFIYEAGPCGYWIYRLLTSIGHQCYIVAPSLIPKAPGDKIKTDKRDAAKLARLFRADELNAIYVPEAEDEAIRDLSRARETAMKDLKDAKFQLKGFLLRNNITATVKDNWSKKHLRWLTELVLPHHSQQIVLQEMIQIISERMQRLQRLDNELLYQVKNWRYYPVVKAIQAMRGVRLLVALGTIAELGDLRRFDHPRKLMSYLGLVPSEHSSGQKRRQGSITKCGNKRARRLLVESAHTYKHKPNISAELQIRQEDLSKEIIDIAWQAQLRLCRRYQRLMFLGKHRSVVVTAIAREMVAFIWAIAREVVIIPIDPRQRISRLPV

SEQ ID NO: 365636 - protein, 430 aa, unidentified
MNYTQNQKIEQVTESTLVLGVDIGSSEHYVRAFDYRGRELTRKVFRFSTDINGFNSFYDWVTQICIKHGKNEAMIGCEPTGHYWYTFYQFVKDHGMKLAFVNPASVKKAKELDDNSPKKTDLKDPKTIAMLVIDGRYSFPYVPEGIYAEIREVTSSRDRIMKELNAASNRIQRWLKIYFPEYLTVYKKFDTTTGMMILEEVPLPTMVTALGVDNIIKIWREHKVRGKGASFNRAKTLVDAAHDSVGKSGGQGVVMEIQMLLEDYKVKKQQLEMVTSVMEELIMQIPNAEKMLSVDGVGLVTVAGFISEVGDISRFKNPKQIQKYAGFELVENSSGKHKGRTTISKRDRKKLRKIIYQVVLPLIQNNKEFRSIYDYYRKRIKNPLKGRQAMIAVGCKLIRVFFAIMTKGVVYNGSKMIEDIHRPIQLPQTA

SEQ ID NO: 365637 - protein, 320 aa, unidentified
MTYIGIDVSKDSFVAAYPKKSGYSTKTFLNTTSGVRQFISSLQEDCHCVMEATGNYSMLLLYLLQQANITVSMENPQKIKHFARAMLSTTKTDEIDAKLIAMYGEKMNPAPYKIPSESIILLKQKRTVLRQLKKQLTAILNLQHALSALPKQDPTSKVTVEKTISFLRKQISKMEEEITNLSNNEFNRQMTLLTSIKGISNTIASALITATGGFSYFSSAKQISRFLGLCPTYQQSGTSINVKGHINRNGDTYLRSQLYIAACASLRCNTACRETYERLRAKGKSGKGAIIAIANKLIRQAFAIVTNNRPYIDGYVSTFA

SEQ ID NO: 365638 - protein, 393 aa, unidentified
METIYIGVDFHARQQTICYLKIETGELVTRELKHPDKEGVRAFYAEFKEHVIVGLEASGYSPWFEQMLEELGCEVWVGHATEIRRRARWRQKNDRRDAELILDLMLHDEFPRLHRPTPQSREVLRMLRYRQKLIKMRTMGKNSLQALALQSGLSQRSQLFTKTGQQQLRALRMSPVMEWQREQWLQLLEPINDRLLETMHWLKQQSLDDERIRRLRTHPGIGLLTSLCLVHTLWPVGRFRNQRKVVAYAGLEPMERSSAERKQFLGISKAGSRVLRYLLVEAAHTAVKKDDDLKRFYQHLAQRRGRPKAKTAAARKLLIRSYIMLRDEIDYAEFRQRAVAARLARLRHGPPVSAALIGQPASTEGQEQTPSAISSRRSEDCGKRAPRIVPDLK

SEQ ID NO: 365639 - protein, 346 aa, unidentified
MTIVEDTRAVTGGVDTHADMHVAAALDPVGGLLGVEEFPATAAGYARLLGWLGGFGTVCLAGIEGTGSYGAGLARHVTAAGIRVVEVDRSDRQDRRRQGKSDPLDAVSAARAAQSGRARGEPKGRDGAVEAIRALMVAKRSARSERTQTINQARALIVTGPDDLRARFARHTAAGLVSELAALRPRPGATVGYATRIALRELGRRAEFLDGQLGRLDELIVPLVTARAPALLALHGVGPDTAALLLIAAGDHPHRLRSEAAWAHLCAVAPIPASSGKRTRHRLNPGGNREANHALWRIVITRMSSHAPTRAYVERRTKEGLSKKEIIRCLKRYAARQVYRHLRPAG

SEQ ID NO: 365640 - protein, 407 aa, unidentified
MDWIQQPGAFAGIDWGGHEHQLCVVDGAGSKELELRVTHDVSGLDELVRALALHGEHVPVAIERAEGLLVEHLQAHGHPVFPVSPRISARARERYRVAPVKDDRFDAFVLADTLRHEHAHWRALAVPSSLLAELRALTRDRGRLLETQQATEAQLRAILECYHPAPARLFSSLDRQIALAFVADYPTPAVASRVRTTRMAGFLRRNAYTGRVPAQVLAERMRANLLSGSSGTVAGKAHSAKTFAHLLGAMNESLAEFDDAIASVVAEHPDAHIFASFPGVGPILTAVLLAEIGEDRSRYPTVQALLAESGLAPVTRSSGRSHSVRFRYAANTRLREATMWWAFNSLKTSPWAAAAFRHARDERGQRYHRALRGLAARWMRVAWRCWQDGAAYEPARHMAAVIAEATA

SEQ ID NO: 365641 - protein, 445 aa, unidentified
MFIQSQDDSHCCYSFFIKVVILLMKLKYSICCGLDVHKNVIVATIVTTNKDGISEYKQKSFSTINSDIQRFHNWLIENNCYHVCMESTGKYWIPIFNYLEHDIDVCLTHPKYVKAIKGKKTDKKDSKWIADLYKFDLVRCSFIPPKDFRQLRELSRYRFKLVCMKSSEKNRIQNCMTVSNVGIASVLSDPFGKTATEIMSYLLEHTADSIDEKAVRKLIKKGAKAKSDEIIEAIKGYTIETDQAKKLELARGHLEYLDDMITQTEVELYVRIKPYYEFVEFVSTMPGMTELSSTIVLAETGVDMSIFDDAKHLCSWCGLSPANNESAGKKKSVRIAKAGDYLKPMMVQCALAAIKSKKQPYFAIKYGRIKKRRGHKKAIIAIARMMIVCIYHMISEKKPFSPTDYEELMDPQNHVERVVLTENNVFAYLESLGYDSSKLVKRNDN

SEQ ID NO: 365642 - protein, 405 aa, unidentified
MRIVHERCCGLDVHKRTVVACVLTPDGQQTRTFATMTRDLVALSEWLQSLGVSQVAMESTGVFWQPIYNVLEDTGMNVLVANARYIKAVPGRKTDVKDAEWIADLLRHGLIRGSAIPSRARRELRELVRYRLSLSRQRAQVAHRIHKVLEGANIKLSSVVTDIMGVSGRAMLEALITGTDSAETIADLARGPLRRKRNDLIAALEGLVGPNQRLLLASHLRNLEFLTHEIERLTTEIEEQLRPSQELIERLDTIPGVGPRVAQAMLAEIGNDVSRFPTGSHLASWARVCPSNDESAGKRRSSHIGPGNPWLRATLVEAAWAATHAKHTYLAAQYRRLAARRGAKRALVAVAHTILIIAYRIIRDGTTYEDLGSNYFDERDRRATLRRSVQRLERLGYKVTVEEAA

SEQ ID NO: 365643 - protein, 387 aa, unidentified
MQASTVDTPTADHCGTIFVAIELSQKTWLVTLHSPDKGKMSRHRLDGGDHAELLALVGRERDRSARALGAVPAVVSCYEAGYDGFWLHRLLMAAGITNYVFDPASIAVDQRARRVKTDRIDGEKMLRTLMAYLRGEPQVVRIVRAPAPEQEDARRASRERGRLVKEQTAHTTRIKALLRLLGMAVGNPRRRDWLSWLSAQRDWQGQAVPPRMLAEIKYEHARLMLVREQLEGLAQASAQADPAPAAAQMAERSELLLRLKCLGPMFATTLASEVFYKDFRNRREVASYFGLAPSPWQSGGIDRDQGISKAGNPRARCAAIELSWLWLRHQPESALTRWFRSRTHNNASKRNKRIAVVALARKLMVALWRYLTTGLVPEGAMLKAAKA

SEQ ID NO: 365644 - protein, 402 aa, unidentified
MNAVGIDVSKGKSMVAIMRPFGEIVSAPFEIKHTASDINSLVELINSVEGESRIVMEHTGRYYEVLAHQLSEANLFVSAINPKLIKDFDNDSLRKVKSDKADAVKIARYALDKWQNLKQYSVMDELRNQLKTMNRQFGFYMKHKTAMKNNLIGILDQTYPGVNTYFDSPARSDGSQKWVDFASTYWHVDCVRKMSLNAFIDHYQNWCKRKKYNFSQSKAEEIYGKAKELVPVLPKDAITKLIIKQAVDQLNSASTTVESLRTLMNETASKLPEYPVVMAMKGVGTSLGPQLMAEIGDVSRFTHKSAITAFAGVDPGVNESGTYEQKSVPTSKRGSADLRKTLFQVMDVLIKTHPQDDPVYQFLDKKRAQGKPYYVYMTAGANKFLRIYYGRVKEYLSSLPES

SEQ ID NO: 365645 - protein, 366 aa, unidentified
MHSINNTELSSHEETRCQFNGDKADIKLGIDVHQDFYVVVMQEDGGNLKPPQRFHKEAFVHWAAKLKSRATEVYAVYEACGFGFSLQRQLSALGITCHVVCPQKLDERNKRVKTDGLDAKALCLKLDRFVQGNRDALAIVRVPTEEEERSRAIHRQREQLVGARKRLEAQGRSLMVNHGIEPVQNWWKPRTFAALPVPQWIRELLLNSQPILLALQQKIAALTLQPQSAAASNQPLGLGKMTSVILDREIGDWYRFNNRRQIASYTGLCPGEYSSGNTRLQSCVTKHGNPRLRAALVELAWRLVRFQPNYKPVVKWRQILAPQPRGALATGAARKKAIVAVARQLAVDLWRIKTGRLSAEELGLIN

SEQ ID NO: 365646 - protein, 410 aa, unidentified
MELLHPHCAGLDLHKETVVACIRHMVNGTVTTEVKSFQTTTQQLMELSDWLCSHGVTHIAMEATGVYWKPVWHILSDGEFVLVLANAAHVKNVPGRKTDVNDSMWLADLMAHGLIRASFVPDEPTQQMRDLLRTRKQFVRERSSHTQRIQKTLEDANIKLDSVITDIVGLSGRRMIEALIDGQTDPQALAALAHGRIRATAAKLEAALHGRMTAHHRFMLRIHLNHLDALNTTIAAIDKEVDGNVEPFRVAIQMLTTIPGVSSLAAEVIVSEIGIDMSRFKTGGHLISWAGLCPKNDESAGKRRSNRMKKGAPWLKTTLIQCAWAASRTKGSYLQAQYLRIRSRRGAKKAIGAVAASMLTAAYTMLKDGTLYQDLGANHFDNRDKGKQALRLVNRLQSLGFAVQITSMAA

SEQ ID NO: 365647 - protein, 331 aa, unidentified
METDQYIGVDLHKVFFQACAMTRHGERQWEGRFPRTPEGIGALVARCTATSAIAVEATTPTWHFVDQIASRVATVCVVDTRKTKLKAGYAAKTDRLDARRLADALRRDSVVSIYVPPPAIRELRELSRHRLMLTQLRTRVLQRMRALLLRQGLGDPPASRLRSAAGQAWLDQVSLPPQAQAALTTMRRVEHDLTAQLAVVEADVAREALADPIVERLQRLHGVGPVLGLMLRAEIGEIARFPSPRHLASYAGLVPYVDSSASHTRYGRITKAGSPWLRWALVEVGLHTLRRKDPLGRWGRKLAVRKGKLTAQVALAREMCQEIMTMWQHVA

SEQ ID NO: 365648 - protein, 405 aa, unidentified
MAIIGMDIHRSFAQAAFLQDGRVKREQRVDLVHDRLVRFGKSLSVEDEVVIEATGNSAAVERILRPFVKRVVVANPRMVRAIAYARVKTDKIDAVILARLHAGGFLPEVWVADDNTQRQRRQTVERMGVLEQVVRTKGRIHAILHANLIPKYSGHLFGKAGKKWLAGLPLPEEEKAIVGRLVDELERNSDQLAKLDITIIGEALANPRVVRLMTIPGIGPIVASTVLASIGDISRFETPEKLSCYFGLTPKVRQSGDRPARHGRISKQGNTHARKMLVEAAWSAKTAPGPLKAFFQRVQRNRGAPAAAVATARKLAVMIWHVLTDGTEYAYARPAFTAMKLRKAALKAGAPREYGKAGPGRDYWIKEIREREADYVRRAEQAYERMVAAWKEKPPTAPAMTATPG

SEQ ID NO: 365649 - protein, 344 aa, unidentified
MKIKLLGIDLAKNVFQLCALNQANKVLFNRTIRRAQLRSTIAKLEPTTIAMEACSSAHYWGRSFEAIGHKVLLVPAQHVTPFVRGGKSDARDALAICEAAQRPNIHLVPIKTVEQQDIQLLHRLRQRQVQHSTALANQIRSLGREYGVIFPAGIKPLISHLPEVLEDGSNELSPVARHALADQYQCLLDTRQAMGAFLLQIEQLAAQYPAYDDLQILPGIGPMTASAYIAAIGNGRQFKRGRQVGAWLGLAPRQYGTGGELKLGGITKSGDRHLRTLMIHGARAVITRGLKTRPELAQWVQPIIERQGFNKGVVALANKLARISWVIVTTGEPFDMKQAFKPAS

SEQ ID NO: 365650 - protein, 347 aa, unidentified
MGKSITDLSSVTTVGLDLAKHVFQVHAIGAFGRVIVAKALRRKDVLFFFAQLPKCLVGMEACGSAHHWARELIKLGHDARMMPPAYVKPYVRRQKNDAADAAGICEAVTRPSMRFVGVRTLENQAALMHHKAREMLVAQRTQLITALRGHLAEIGVIAAQGPKNARELAGVVMAEGNETIPACVRAALAPLVRQLHVLDQEIACSDRTIAAMARGDERARRLMTIPGLGPVTASAMATSVQDVSAFSGPRAFAAFLGLTPKQNSSGGKERLGRISKMGNRYLRTLLVVGAHAVLYHRKPHDDALRSFAKKLMQSKPFKLVAVALANKMARIAFAIMRGRTSYCAVSA

SEQ ID NO: 365651 - protein, 401 aa, unidentified
MVSDFRKGRYNLMKIYVGIDIAKLNHFAAAISSDGEIIIEPFKFTNDADGFQLLVSKLESFDKNSLIIGLESTAHYGDNLVRYLVTELYQVCVLNPIKTCQMRKNNVRKTKTDKVDTYVIAKTLMMQDNLRFVSFFDLDMMDLKALGRFRQKTIKQRTRLKIQLTTYVDQVFPEIQYFFKSGLHQHAVYALLKEAPSPKEIASMHMTHLANLLKVNSHGHFTKEQAKELRVLAQKSVGANDSAISIQITQTIQQIELLDSQLEKIEAEMTDIMKFNDSVIMTIPGIGYINGGMILGEIGDIHRFSNPNKLLAFAGLDPSVYQSGNFQAKTTRMSKRGSRVLRYALVNAAWNVVRNNATFKAYYDAKRAEGRSHYNALGHCAGKLVRVIWKMLTDEVEFNLE

SEQ ID NO: 365652 - protein, 425 aa, unidentified
MNYKQNEKINQVKESTLVVGIDIGSTTQYARAFDWRGIELGKVFPFSNSREGFENFKAWMQRLQDKYKKSDVIVGIEPTGHYWFDLGAYLEDEGILLVMVNPYAVKQTKELDDNNQSKNDRKDPKVIAKLVTEGRYSAPYTPDGVYADLRIMVANRKRLIREMTQIKNRFARWFAIYFPEYTEVFGDYEAQSSMLLLKKVCTPEAIVELGAEKINQIWRDAKLRAVGMKRATTLWETAKRSIGLKKGSSAAKYEMKLLLEDYEYKKAQLDSIMEEIESLCKKIPESEQMLAIKGIGVITVAGFLAEVGDVRRFESPRQIQKLAGLSLRENSSGKHKGQTTISKRGRSKLRAVLFNAAIPLIAKNPEFRSLHEYYTTRANNPLKKKQSVIAISCKLIRVFYAILAKGVTYDPQKMISDIHRQPQAA

SEQ ID NO: 365653 - protein, 323 aa, unidentified
MQGKVSFQEDAMPVVYAGVDVSKEWLDVHLHPLGESRRFSNDKTGIGQLKRLLARHRPKSIVMEATGKFHRPAHRSLWLDGFAVAVIDPLRARMFARACGYLAKTDRLDARFLALLAESLRPPAGAPPSPHIEALQELVNARSVAKCDMTALQNRSKTATTAFLRGELNRLIRRLEQYVERLDKEIERCVGEDPQLCRKAEILTSIPGIGRVTALALMAGIDELGTCSGKQAARLAGLAPIANDSGARTGRRSIRAGRPAPRRALYMAALSARRYNPALARFADTLKAAGKPAKVILVAIMRKLLVLANCLLSNNRIWTPNPP

SEQ ID NO: 365654 - protein, 346 aa, unidentified
MEQISRIGMDTSKHFFQLHGVNAAEKVVLRKKLRRKEMVAFFKALAPTVIGIEACGAAHYLARLLLGSFGHEVKLIAPQLVKPYVKRGKNDGADAEALCEAMSRPSMRFVPVKTAEQQAALMMVGLRDRLIRNCTQLSNAIRGYAAEFGFSAAKGKAHLVPLLERIQADERVPVLARELFTAQAEEYARLQAQIDAVDAKLLDWHKADESSRRLVKIPGVGPIGAVLLMLKTPAPELFRSGRQFAAWIGLTPKDHSTAGKVRLGGITRAGDEALRSVLVVGATSVIQHVRRGGRGSPWIVNLLKRKPPKLAAVALANKMARVAWKLMVTGERYAAKSVPAALANAT

SEQ ID NO: 365655 - protein, 361 aa, unidentified
MNRNANSQSAGQMIGLINGQQVVGLDIAKSVFQLHSVDMGTGEIVNMQLKRAKVLEYFANHQPCLIGIEACGGAHHWARELQALGHSVRLIHAKAVRPFVSGNKTDATDARAIWLAVQQPGTKFVGIKSEEQQATLVLHRQRELLMKMRVMQTNALRGLLYEFGATFGRGKNALFSEIEAALETLLAKNSFPQYVADSLREQVGRIKALDQDIKSIEQRPQERLKSNAQMKRIAHIPGVGLLTATAAIATMGEASAFKSGREFCAWLGLVPRQSGTGGKVKLLGISKRGDTYLRTLLIHVARSVLSHSKEPVPWLEQLQQRRPTNVVIVAQAAKMARTIWAVTAKEQNYQRGYQSTRPQTA

SEQ ID NO: 365656 - protein, 322 aa, unidentified
MAMLSFCGIDVSKDRLDVMLLPEAQSFSVSNDAAGWAKLVEQLRGSSIAAIGIEASGGYERGAVRSLQAAGMPVRQVNPFKLRQFARASGILAKNDPLDARMIASFVAVMPTRPAQRATPAAEQLVEMLAVRRQLSAEKIAAENASRLLEDPMLQRLSRRRIARLAADIELLDKRLVEIVATDATLAHRYRLLTSMPGVGPVLACTLIALLPELGGMSRKQVAALVGVAPYAFESGTLKGRRCIWGGRANVRQVLYMAAMSASNWNPALKLFHDRLKGAGKLPKVVIVAVMRKMITTLNAMVRDDIAWADRLSGRHSVTTAR

SEQ ID NO: 365657 - protein, 412 aa, unidentified
MDRYCGIDWADDHHDIAVIDDTGTVLAKERVRNDADGFARQLEILADAGDSPEDPIPIAIAIETDRGLWVAALRATDRVVYAINPLSASRYRSQRTVSGAKSDAADAVMLANILRLDADSHRQIPDDTDLARAIKVFARAQQDAVWARTALGNQIRSLLKDYFPTALTAFDGLSGGGITRADARAVLIAAPTPDAAAKLTLVRLRALLRKAGRQRNVDAAAARLREVFRAEQLRQPELVEHAMGIHLQSLVQRLDAACNAVATLTAATTEHFERHPDAKIITSFPGLAAVSGARLLAEIGDDRTRFADARGLKAYAGASPVTRASGKRTVVMHRQIKNNRLASVGSFWTLVAIQSSPGAREHFDRRRTSGDWSRQAQRHLFGKLLGQLHTCLRTRQNYDELRAFPLAPVIAA

SEQ ID NO: 365658 - protein, 362 aa, unidentified
MSKASWLVSGAVPGVERQPLKKLEPDAEALLRLIERWRNESVRAGRPISRIALAYEAGRDGFWLARWLIARGIEAYVIHSASVAVSRERKRAKTDRLDAAMLMRVFLGWLRGERGHCGMVAIPTMEEEDARRPSRERECLVNERSRITNRMKSALARLGVRGFKPHLRKAPERLAGLRTAEGTGLPANIIEEFRRDMARLALVREQISSIEKTRAERLERAPDTGPHAMVRLLARVIGIGIETADMLVREILSRRLRDRRAVARYAGLTGSPDESGLKRREKGLAKAGNARVRRGLIQLAWRFLVFQKDSALARWYRMRTEGPSGARKTTMIVALARKLLIALWRLVTTGEVPDGVELRPAA

SEQ ID NO: 365659 - protein, 311 aa, unidentified
MERLFVGLDVGKQRVDLHVRPTDETLSVASDEAGLAPLVARLQVLRPALVVLEATGGYEMPVAVALTTAGIPVAVVNPRQIRDFARAMGQLAKTDALDARAIALFAEAVRPPARPLPSAQAQVLGEMVTRRRQLVEMLGAESNRRQQVRARQVQRRLDDHIKWLRKALEKLEQDLADAIRSSPVWRERENLLTSVPGIGPVTASTLIAELPELGQLDRRRIAALAGLAPMNRDSGTLRGRRMITGGRPSVRRVLYMATVSALRCNPTIHAFYGRLTERGRPTKVALIAAMRKLLTMLNAIVRDGTVWQLSA

SEQ ID NO: 365660 - protein, 340 aa, unidentified
MTITTVGIDLAKNVFAVHGVDQNGRTVLVKPKVSRAALPELIASLPPCVIGMEACSGAHYWARLFRQYGHEPRLMAAKFVSPYRMAGKSGKNDAADAQAICEAVRRPHMRFVPVKDESQQAMQCLHRTRQGFIEEKTATYNCLRGLISEFGVIAPQSADALRHMVSVQKSSLPLQVQQCVDDLMEHVDRIEANITEYDRILSHIAKTDHRSQRLMELKGVGPTTACALVASIGNAHDFKNGRQLAAWLGLTPSQYSSGGKSKLGRITKAGDSYLRTLLVQGARSVLIGAGKRTDSFSRWVCMLVERRGYWRAVVAIAAKNARLCWASLHYGDDFRLYSVN

SEQ ID NO: 365661 - protein, 364 aa, unidentified
MLGGVYVIYDDGRPLVEAYDGPQIVGMDLHRRRSVLVRMAEDGQKLGTARIANSPARLAAEIRRAGLHPKVVLEACYGWYWAADTLTAAGAEVHLAHPLGVKAFSHRRVKNDELDARDLADLLRMGRLAEAWIAPAEIRELREITRYRGKLVQLRTSCKDQVHGVLAKLGIEVTCSDIFGAWGTRWLDELPLPQPYCWKVASLRQLTGWLTSEITVLEQVTAELLAGHDAYRAVQQLPGIGPVLGAVIVAEIGDITRFRHPARLCSWAGLTPRHRESDTKVVRGRITKQGSRPLRWALIEAVQRTPAGTPVRQARDAIIDRRGPQARNIAKVAAARKLLTYVFYAMRDGHVRALDTPAAEHEAR

SEQ ID NO: 365662 - protein, 449 aa, unidentified
MSKVGKTLGLPIVNSRAAGIDIGARIQVAAVAPELSDDPVRTFGSFTADIEAMANWLVSVGITTVAMESTGVYWVPVYEILEEHGLTVVLANARDCKAVPGRKSDVNDAQWLQRLHACGLLRPSFHPARDIAALRAYMRIRDRHLEYAAAHMQHMQKALTLMNLQLHHVLSDISGVTGLKIIRAIVAGERDPDVLASMRDVRCRESLLTIRSALVGNYQPEHVFALSQALALFDSYQDRIADCDRQIESSLRQLNVGRPEPETKLAAPRTKTKQANAPKFDVRAMLYQLTGTDLTAIHGLGPSISLSLIAECGTDLSKWPTEKHFTSWLCLSPGCKISGGKVLSARTRKSSSRLASQLRLVAVNVGRTETALGAFYRRLAARIGKAKAVTATARKLAILFYRAMRFGMQYQDPGADQYEQRYRERVVKQLERRAARFGFALQPVEEGVS

SEQ ID NO: 365663 - protein, 361 aa, unidentified
MNTTIVAVDLAKSVFQLAVADGGWRVTEHHRLTRSQFERWFINRNVSLVIMEACGSAHHWARQLSALGIEVKLLPTPYVRAYVRRNKTDAADACALLEAARCADITPVRIKSVEQQALQGLHRVRSLWMATRTARINALRGFCREFGISVATGSRNGLEQISRVLADPNSAVPALIRNSMKLLVEEVRLLEARIAQLERELTALAKQSPACTTLLSIPGIGLLTATAMVAATSGSVTHFKDARHFASWFGLTPKEHSSGSTRHLGRLSKQGDRYLRMLLIHGARSVLRAATVATAAGRQIDSLRQWALNVQARANHNKAACALANKLARICYATLRDGEGYCGSVTRLGKKLNDPTYPMPA

SEQ ID NO: 365664 - protein, 390 aa, unidentified
MFYLGIDIGKFHHAAALMDQRGKVITTLPSFLNTRSGFQKLLTLITAHLPPAEELRIGMEATGPYWIPLAEWLKTNGWPPVVMNPIKTASLRNYGVRGSKTDNIDSVLIANALRFEGGQPQKTLPKLSEELRRFTRLRADMVKDRTRIALRVTSLLDRLFPELLSSFSKTLSPSCLALLAAAPTPARVLALGEERLTSLLRKASGGKLKATRAKEIMDKAAVSVGVTTQASEEVLALLLEQITLIDSQLRTLDHRITKLYKQAGLYFTSIAGVGTLIAGTILGEFGSVTRFTQAKQMVAFAGIDPRLRNSGQHQGQVHISKRGSRYLRRALYLACQGAVRNDDYFHSIYQRHRDNGKSYKEAIIAVMNRFIHVLYVIWRDNRPYYPLTSA

SEQ ID NO: 365665 - protein, 363 aa, unidentified
MFASCDRKTTLFVGVDVHRDTHTAVGLSPFGEKLFEMTVGNYEEDFRTLTAKVDEVSKMSVLSPFYGLEDCHSYGERLAGYLVSEGLRVVSVPPILVDERRVRETHPEKSDSLDALGVARVMIQRIDMLPLFTVTEESRKAKQIKELSHDRDFLVSERTRLKNQLHTLLHRLWNSAYRLKFKDPFSKKALRYWSHAAPGGSDPFVVRSMRRKVKRLSAIRAEVDEIDDELLRLIEESGHTLTTANGIGTTIAAEIIGEVGDVNRFHSPAALAKYAGCAPRECSSGKTTRHRKTRSGNRRLNRAFHRMALSQISISGNKKAREYFQRKVSEGKSKAQALVCLRRQLVNIVWMMMKHRTEFQLPA

SEQ ID NO: 365666 - protein, 348 aa, unidentified
MRFYTEAHQHYCGIDLHARSMYLCILDGNGAILLHRNLACAPETFLAAIGPYRDGLVVGVECMFAWYWLADLCAREGIAFVLGHALYMRAIHGGKAKNDRIDAYKIAALLKGGMFPTAYVYPAAMRATRDLMRRRNHLMRKRAELLAHIQNTNSQYNLPEFGGRISRSRKQREGISERFTDAEVAKSIELDCALIDHYDALLADLEKHILACAKDHDRQSLLLLDSVPGVGSVLALILLYEIHDIARFPRVQDFLSYCRLVKCKSESAGKTYGSQGAKIGNAHLKWAFSEAAATFLRNNPPAQKLHQRLVKQHGKGKALSIIAARLGRAVYFMLKRNKVFDKEKFFNH

SEQ ID NO: 365667 - protein, 398 aa, unidentified
MTRKNTLKSLPTDTDFRVVGLDLAKSDVSVAAIPVDDNTPSLVDRMTYADLLDWAGKISPTLFAMEPCNGYSLLCLQLENLGHEIKVISGWTVSMWINTHLSGQKTDLNDAIALARLAVSDAELTPIRHKSITEIRIQTVQAVRQQLMSQRSKSIVSFKALAQQWGIPCAAGHRNLKKLRESIEAKVDLITRPVANAMLFLLDAVKSLDRQIGQLNQTLQELVMSDERGRLLQSVLGVSTQISARVITVVGNVERFNSPRSLVAYVGVAPRNFITGHKNLTKKKHGNCPDLSHKGQGKISRRGDKLLRSLFIQGAACLYMQFCKDQLPECQLKRWILKQLASQKPYGKLIVSLAAKLIRIVWAVLTYGEKFNIQKAGMTRSMWSEMALETPLNKEVPA

SEQ ID NO: 365668 - protein, 311 aa, unidentified
MNNTIGIDISKDTLDAHRLADGQHKQFLNGKTGHAQLVKWIGKQSDPLIIFEATGAYHRQLERVLCTHIIPFVKVNPKQARRFAQASGKLAKTDRVDCEMLAKMGAALQLMPKPFTAENLYDLKELLSARRALIKDRTAAKARKATVINALIKQQLEKRLRQIKNDVAKIDALMLDVAREDQYMSERLDILFSIPGIGVITALMILVDMPEIGALNNKQVASLAGLAPMSQSSGKWMGKARIQGGRPNLRNAIFMPALVAIRHNADLKTKYDRLVTAGKEKKVAITAVMRKLLVLANALLRDNRKWAEKAA

SEQ ID NO: 365669 - protein, 331 aa, unidentified
MHFSQFIGVDISQDTLDAAIYPAKDKKMDFLHFDNTTRGLNEMLKWLKSRGIKPSEMVICAEHTGVYTNPLIDFTEKKGLSLSLNSPLDIKHSMGITRGKNDAIDAGRIAEYAHDHKDKLRLYQKPSEAIVKLKYLLTERRQYVRQRTAMLSFNKIMGKYETPEARSRNGSDIHHCETLILKVERQMLDIIKENPELKRNYDLVSSVKGVGLINAINIVVFTNNFKSFETPRQYACYIGVAPFGYTSGTSVKGKTQVSKICRTQQKAELSMAARSAIIYDPGLKRYYQRKMKEKGEGKDAHGVVLNAVKFKLILRMFAVVKSGQPYKILNY

SEQ ID NO: 365670 - protein, 335 aa, unidentified
MKLTAVGVDVAKRVFQLHWVEAETGEIISKQIKRAAFLEHFVNRAPCLIGMEACGGAQHWARRLIEMGHQVRLMPGKAVKAFVSGNKNDVADARAIWTAVQQSSVKSVAVKSEAQQAVLALHRMRQQLIKFRTMQSNGLRGLLTEYGGRAALNKAMTDVLARLSERLPAALVDTLREQWSRLGDLDEQIAEIERRLSAWMKQDRSCRKIAEIPGVGLLTATAAVATMGDAKAFKSGREFAAWLGLVPGQVGTGGKVRFLGISKRGDTYLRTLLIHGARAVLTHAKEPGPWVEQISKRRPPNVVTVALANKMARTIWALLAHDRSYERSYASVKPA

SEQ ID NO: 365671 - protein, 343 aa, unidentified
MSEITVVGLDLAKRVFQVHGADREGRPVLRKRLQRGQVLNFFANLSPCLIGLEACAGSHYWGRELQALGHEVRLIPPQYVKPYVKTNKNDATDAEAICEALTRPTMRFTALKSVEQQSVLLLHRTRELLVRQRTMLINALRGHCGEFGIIAAQGLSRAGELIKLVDDPADNRLPDLARQVLQCLTSQIRSIQGEIASIEKKLLAWHTSCAASRRLAEIPGVGLITATAVVASVGIANQFRSARQFAAWLGLVPQQRSSGGKERLGRISKRGDGYIRRLLVHGARAHLSWSRRKKQIRSAWLTGLLVRRPTNVVLLAMANKTARIAWAMLSRGERYQERVAAAA

SEQ ID NO: 365672 - protein, 341 aa, unidentified
MQDVILIGIDLGKHSFHLHGQDARGKAVFRKKCTRKQLITFLATFHPCTVVMEACAGAHHMARHLMTFGHQVKLISPQFVRPFVKGNKNDFIDAEAICEAASRPNMRFVTPKTEVQQILGALHRVRESLVRDRIKASNQIHGFLLEFGISLPIGSAAIRRLPSVLAEHPLPARLIAVLNRLHAHYKYLDEQIAEVEKELQLQLQEDDLGQRLMAVPGVGPITASLLSAELGDGKQYSCGRDFAASVGLVPRQYSTGGRATLFGISKRGDKNLRRLLVLCARSYMQRLDKQKGMLADWVRAMLSRRHSNVVACALANKLARTVWALAARHTEYRSAQASKAA

SEQ ID NO: 365673 - protein, 315 aa, unidentified
MEQPPSSPIFVGIDVSKDRLDVHVRPSGEAFAVARDGEGLERLVADLSGRQVGLVVLEATGGFEATVAAALAGAGLPLAVVNPRQIRDFARALGRLAKTDALDAEVIAFFAERIRPEPRPVSGPDAQVLAELVARRRQLVEMIGMEKNRARQARGKRVQKSLAATLKLLESQLAALDRDIGDAVRGSPAWRAAEDLLTSVPGVGDVTARTLIAELPELGRLDRRRIAALVGVAPINRDSGQWRGHRAIAGGRVAVRNTLFMATLTAIRWNPAIRAHYARLVAAGRPRKLAVVACIRHLLTILNAILRTKTPWQNA

SEQ ID NO: 365674 - protein, 349 aa, unidentified
MGEVITIGVDIAKLVFQIHGVDADGTVVIRRRVGRARVLEFFADLPPCRVGMEACATAHQWARELAKLGHDTRLMPPSYVKAYVKRGKNDAADAAAICEAVTRPSMRFVPIKSVEQQSVLMLHRARDLLIRQRTQLTNALRAHLAELGLVAAKGREGLHQLATVVTECGNERLPSDARFACQAIVTQLHAIQIEISGLDKRITQTHRANADSKRLATIPGFGVILSTAVVATMTDPKAFRTGREFAAWIGLVPRQSSTGGKERLGSITKQGDRYLRRLLVVGATSVINSARARPYKYPWVIELLGRRPTKVVAVALANKMARIAWAVLAKGERYRAPTRTSNPVVPAAA

SEQ ID NO: 365675 - protein, 402 aa, unidentified
MNCVGIDVSKGKSMVAVMRPFGEVVISPFEVQHTASELSELAKLLKSLDGETRVVMESTGNYHTPVAWLLHDAGLYVSVVNAMLVHDYGNNSLRRAKTDKKDAVKLANYGLDHWLTLPRYVPEEDTRLLLKNCYRQYQQYSKVQTMLKNNLISLLDAVFPEVNRLFNSSPRADGSEKWVDFVSTFWHCQCVSTLPLKSFSARYLKWCRKHGYYFSQEKAFEIHSKAKNCIGVMPRNETTKLLVQQAIAQLKATSAALAALKQEMQSLAASLPEYPVVMEMFGVGSTLGPQLMAEIGDVRRFHSKKALVAFAGIDAPPCQSGQMDIHSRSISKRGSAALRRTLFLVMGIYLQSAPLDEPVYQFMDKKRSEGKPYKVYMMASANKFLRIYYASVTAYLNTLARI

SEQ ID NO: 365676 - protein, 399 aa, unidentified
MRQYYVGIDVSKGRHIAAVVDGDGELRTKDFEFTDDAAGYESLLTTLAKLPDGLDLHVCLEATGNYGHRLAAFLRTRPGFTVSVVNARSSHHFAKVLMARTKTDRVDAVILARYCRALRPRATVAAEQAALARLTRSRHTLLTSLVAQVNLLRSLLERVNPSVERGFYRLDCYGALAVLDRYPLGGMLAQVRPDRVAQLKANTRRVGKLRADRLVASARSIPGEQGTATDAVVVRQLVAAIRQLQRSLAALETTIAEQVQGNLLFTIEGLGAATVPVILAELPVEQLDTDTQAIAFAGLNPRFRQSGRFAGKVKLSKCGPAALRHALYLAALSVRNHNPVLRHYYLRKLAEGKRPKAAIIACMSKLLRIIFAVLKTGRPFDPDYETNRLMTRSSVPQAA

SEQ ID NO: 365677 - protein, 330 aa, unidentified
MTTNPPRSAFTHIVAFEVSKDELVVHTLPVDEQCTIDNRPVSVRRLIRAEIKRNKKDRLGQMLVICEATGGYECHVLDVALEMGVAVHRAHGARVRHFGRYRGLLAKTDPIDARLLAQYGLKTENIRLYTPPPPETVALRALHARRTEIQQMIIAETGRLDHARHKSVLKSLKAHIASLEAAFATIEAEIAQLVEENETLGKKVALMRTVIGIGPVSAMILLAHLPDIGRLTKGQVARLAGLAPINDDSGKKRGARHVEAGRTAIRRALYMAAGVAMRTNPVLKAFADRLRGKGYPFKYVVTAVMRKLVVILNAILRDGQPWKGAQTACG

SEQ ID NO: 365678 - protein, 468 aa, unidentified
MNENLMTKKAKKRRKKKLNKFITINENAAGIDLGSTEHYAAVPPGRDAEDEDVRHFPGHTPGLRAMAAWLVNCGIKTVAMETTGVYWIPAFEILEEAGLHVVLVHSGHIKYVPGRKSDVMDSEWIQQVHAYGLLNACFRPEHEIILLRTLVRHRSGLVEEASHYILLMQKPLDQMNVLVHRAVTDITGKTGMKIIRAIVDGDHNPLTLASYRDRRCMKTPKEIVDALSGNFRKDYLFTLKQALESYDHIQKQINDCDQEIEECLESFMPKIDSEKNPIPERTGRSRPQGNEPRFDLRNYLYQMAGVDLTQIEGIQATSGLKVLSEIGTDMTPWETVGHFSSWLGLCPGSRVTGGHSKSGKTRKVANKVATVLRMAASTLRNSQGPLGRYYRRMQRNLDKAQVVTAVAHKLARIIYTMLKNGTEYNPELHEIDPEKAKKKALKNLMRKAKALGFTVVDMESGEVMDTAC

SEQ ID NO: 365679 - protein, 351 aa, unidentified
MSHKSTPSTISTIGIDIGKNSFHLVGLDQRGAIVLQQKVSRAQLERRLVNVPNCLIGMEACSGAHHIGRQLAALGHDVRLIPAQYVKPFLKGHKNDYRDAEAIAEAVQRPTMRFVAIKTPEQMDLLALHRVRSRLVSQRTGVINQIRGFLIERGITVRQGVVPLRKALPDILSSQTGPLSPRMIGLLTDLAQDWRRLDERIASVSAEIEALAEQDNSCQRLMTVPGVGPIISSAVVAAIGNGVGFKQGRDFAAWLGLVPKQESTGDRTILGKISKRGNKYLRTLFVQAAHVVLVRRPSAAMRGLWPWIEQASKRLHRNMLAIALANKLARIAWAVLARGHDYQPRIAPHAV

SEQ ID NO: 365680 - protein, 326 aa, unidentified
MLFLGIDVSKAKLDCSLLLDVASGKRRAKTVANSQAGVSELLTWCAKHHAPSHELHAILEGTGVYHEKAALALADAGVTVSIVNPAQIKDFGRSLGVRTKTDGVDSWVLARYGALLQPRPWTPPAQEARVLQALLSRREAIAQDLQRERNRLEKAEATETPSIIRHSLLDSIAFLEQQRAKLQQDINDHINKHPDLKADRDLLTSIPAVGPQVGNQVLAVMHNHHFQSAEQLAAYLGLVPVERQSGTSILGRPRLSKAGPARIRAVLYMAAIVGTQHNPHVKALYLRLQARGKTKMSALGAAMRKLVHLCFGVLKTRQPYQPNYAI

SEQ ID NO: 365681 - protein, 410 aa, unidentified
MERMLERCAGLEVHKKTVTACVRVPGTHGDRTQHVRTFDTTTAGLLVLRDWLAAHAVTHVAMESTGVYWRPVYYVLEDAFACILANAAQIAQVPGRKTDVKDCVWIAQLLEHGLIRASFVPPAPIRELRDLTRYRKVLIQERTRHAHRLHKVLEDAGIKLTSVASRLLGVSGRAMLDALVAGTTDPEVLADLARGRLRQKLPALRQALVGRFRSHHAFLVSQLLAHVDDLDEAIQTVGGHIDEVMVPFTDELARRDTIRGINKRTAEVIIAEIGVDMTVFPTAKHLASWAGLCPGNHESAGKHRSGKTRPANRWLRAALIEAAVAASTRAAPGAFAARYRRIMPHRGHKKAIVAVAHAMLVTIYHQLTRQTTYHDPGTDYDDRRHAERLRRRALQTLERQGYRVTLEPAA

SEQ ID NO: 365682 - protein, 343 aa, unidentified
MTCFVGLDVSQKMTAICVIDNTGRRLWRGQCPTVPEQISVLICRHAGENARIGIETGAMTPWLVHELRNRGLDVICLDARHARAALEMQINKTDQNDAEGLAQIVRTGWYRSVHVKSFDSHRARALLGARTQLIGMTTRLSNHIRGILKTFGLLPGAMRGLPFDRKVEALLLDRADVALIVRPMLVAWRQLREQIAVFDKAIRTVARSHSACRLLMSVPGIGVLSSLAYVSTVEDPGRFSRSRSVGAHLGLTPRHYQSGEVDRSGRISRCGDTLARTLLYEAAVVILARIKRASGLKDWARGIAKRSGNGKARVALARKLSVILHSVWRSGQPFQWPEHASAA

SEQ ID NO: 365683 - protein, 395 aa, unidentified
MVSFCVGVDVSKDFFSAAGLDEQGKELFSGSYEMDSNGFSEFLKVLSSHDKSLDQVLVGMESTGCYHINLFSFLHDEGIHVVVINPLLIANFAKLSLRKTKTDKKDALTIARFLLDHHEEISQLSISQDHQDLRDLSRERESLCHQITATKVEIKRVLRATFPELESIGDLYTGVMIRFLQEYPSARLVRVAKPKVIARALKGPYVGNKLTFSAEDILRAANTSIGTVSSAKEIILQGKIATLLHLQGRLDEMTKLLTDLCKATRIDDLKILRSIKGVGPKTAAPFLAEMGEVQNYSSHKKLIAFTGIDPSLHESGNYVGMSKLSKRGNRHLRRAVYLMTAAVVSKNPFFKAYFLRRKREGLPPQKALFATAHKLLRVIFAMLTQRTYFNPKEVI

SEQ ID NO: 365684 - protein, 402 aa, unidentified
MNKFNPTTAKVSTTSALGTIQTAQSALDKYAAYIGLDTHKDSIVVAIALPGRAHAYIDSELANNEKNISKLIHRLSKQFAGQLLLFCYEAGPCGYGIQRQIMASGHDCEVIAPSKIPKKPGEKVKTDRIDACKLAQYLRSGDLTAIWIPDHEQEAMRDLTRARSDMKSQELKARQQLNAFVLRHSHSWPSNKTRWTKSHYNWLESLTFNHDWLQVVLQEYIDAVKAATGRVSDITEQMERVLPQWSMAPVVDSLIALRGIDKLAAMVLLAELGDISRFDSPKQLMAYLGLVPSEHTTGSKRRQGSITRTGNSHARRMLVESAWSYRFPARQTMHLKRKAIKASDKAKAIAWRAQKRLCGRYTTLIQAGKNTKQTTVAIARELIGFIWDIVCHEMPKVKIVAQ

SEQ ID NO: 365685 - protein, 403 aa, unidentified
MNMNAVGIDVSKGKSMVAILRPYGEIVSTPFEVKHTVSGIRSLIEHIQAIDGESRIVMEHTGRYYEPLVRELSQADLFVSAVNPKLIKDFGDNSLRKVKSDKADAVKIARYTLDNWAELRQYSLMDEIRNQLKTMNRQFDFYMKHKTAMKNNLIGILDQTYPGANTYFDSPAREDGSQKWVDFATTYWHVDCVRKLSLNAFIDHYQKWCKRRKYNFSQSKAVEIYEASKEIVSVLPKDDLTKLIIKQAVEQLNTASQTVEQLRTMMNEVASKLPEYPVVMAMKGVGQSLGPQLMAEIGDVSRFTHKGAITAFAGVDPGVNESGSYEQKSVPASKRGSGTLRKTLFQVMDALIKTKPHDDPVYLFMDKKRSQGKPYYVYMTAGANKFLRIYYGRVKEYLSSLPK

SEQ ID NO: 365686 - protein, 382 aa, unidentified
MGLVEGNTYIGLLVEESITLLDWGNMVERETEAKSSGSGVTNPYHRTEHCDKIHAYRCDKEVGVIGIDISKDHLITSRGRVRRYENKKEGYEEILKMKPCTIVLEPTGVYAIKPSQYFKERGVRVLQVSPNVLSREKEFRGKKTDFYDAEKLENMVDKAKEYDYNPLKEMTTLYLFLKDIETKYKNRLKRALFLVSDNDKVSKDRLEKLAKGDFTQEELYQLEYTPLVLEEIKILAKNLLETQERFKEVRRMIEGQVPQDHVLLTIPGVGRLAAGIIIGIVGDVKRFPKPESFVAYCGLDPVVERSGKAVVSRGISKRGNKYLRSLFYFLAMRSYSRNPTLLKFYETHKDRLKGKKLYVALARKLARVVWSVWYNNKPYEPK

SEQ ID NO: 365687 - protein, 348 aa, unidentified
MQYTLGIDLHKKSSVWILIDDSANELWKEDVTCHPDHITTAIKKLPVPPKDIKVAIEPVAGWRWVSEQLENSGMDVRIAHPRKVQLIAQSTKKTDTEDARTLANLLRSGYFPEAHRTPEEIYQLRVVLRERTFLVRARTSAKNQLHGIATTQGLQNIKGGNPLHKKGKEGIMASDNFVLKQLHLHVEDLDKRIAFFDEELQRRKKEHPLADILMTMPGVGIVTALTVIAEVDGFERFASPKQLASFAGIVPRQRSSGEKVRYGSITHQGSEPLRTAVVETAMRIREGNAPELYQIVKDLSPRCGAKKARVALGRKILTILWKMATTQTPYDAAIFASARSAKVSNLDI

SEQ ID NO: 365688 - protein, 352 aa, unidentified
MEKYIGIDVHSESCTIAVMNSAGRQLRQQVVDTQAKVLIEFLKGLAGDRHVCIEEGQLAEWLVETLEPYAKEMAVVQPKAHQGHKSDAADAWALAEQLRVRAKGVYVFKPTWQYRPLREAVRTYGVAVKDMTRAKNRFRSLLRARGVANFDSSIYEPEQRSAWIRKLPAAYRRRAEWFGRQIDSMSEAHEIAQSWLEEEAEKCPEVERLQTLPGFGPIRAAQVVALVVTPHRFRTTRQFWNYCGLAVVTRASSEWKRDASRDGWQHVRGNVQTRGLNRNCCSQLKAVFKGAATTVIAKPNPLREHFEQLVANGTKVHLARLTIARRIAAATLAIWKKKEDYDPTKHQSIKPA

SEQ ID NO: 365689 - protein, 349 aa, unidentified
MSISMIGLDTAKSVFQLHGVDESGKTVLRRKLQRSEVVSYFEKLPPCTVVLEACGAAHFWARTLIGLGHDAKLIAPEAVRPFVKKHKKNDPADAEGLVTARNHKGTKFVPVKDTEQQGILSIHTARALLVKQQTMLSNSVRGLAAEFGHTAAKGTEKLAELASEVAADEMMPARARQAIVGLYDQFRALDEGIQTLEAEIVAHAKSNEKARILDAIPGVGPITASLVVATVSDWSVFKTARDFAAWIGLVPRQNGTGGKVRLGKITKAGNKLIRKLLVSGATSMVRRAERWDSAMGRWTASLLKNGRPVRLVTVALANKVARVMWALMTHNDVYRPQGAVKPAAAVAAA

SEQ ID NO: 365690 - protein, 455 aa, unidentified
MPKTTTADRPELKPVNVGAAAIDIGSKMHMAAVNPACTDEPVRTFGTFTRDLHSLADWFKTCGVTSVAMESTGVYWIPAYEILEQRGFEVILVNARYAKNVPGRKTDVSDAAWLRQLHSYGLLRGSFRPDAEVATLRAYLRQRERLVEYAAAHIQHMQKALMEMNLQLHHVVSDITGATGMRIIRAIVAGERNPDVLATYRDVRCHSSTETIRAALMGNDREEHVFALTQSLELYDIYQAKMLDCDRKLEVLIAALSDREAKPVGKLSKPRVKTKQVNTPTFDVRTALYGVLGVDLTEIHGLGPSLALKLVGECGKDLRAWPSAKHFTSWLCLAPGNKISGGKVLSSRTRRSSSRAAALLRLAATTVGRSDTALGAFYRRLSSRAGKSKAVTATARKIAVLFYNTLRHGMSYRDPGADQYEQQYRSRVLANLRRRAKSLGFVLQAIPGDANQAVS

SEQ ID NO: 365691 - protein, 346 aa, unidentified
MLYAGLDLSRKRLDFHLLDSDGATIEVGAAPPDADGLRGLSERLARHGEAIRAAIESMNGARFVHDRLELAGWKVEIADAQKVKGLAPLACKTDRIDAWVLAELCRRDLVPAIWLPDPLVRAERERARWRLHLVRHRSSLKQRVHAVLLTHGKPCPVSDLFGVRGRQLLARLGLPEPWQGTIEASLRLIDELDREIGDCERELRRLGADHRYVPLLCTVPGISWVLAYTIAAELGDISRFPTPRKLAGYTGLCPRVYQSGERDLRGPLAKQGPRFLRWALVEAATHACTAPVYRDRYQQTKARIGKQRGAKVAQVDLARRLAEAIWHMLTRNQPFAPAGATDPLAA

SEQ ID NO: 365692 - protein, 386 aa, unidentified
MDGQHEQRQVFCGIDWAERHHDVAVVDTNGTLLVKQRISDDAQGFAQLLSLLAEHGAAPGADGTPVAIETAAGLLPAAIVAAGYRLFPINPLAVSRYRDRYGAAKTKSDAGDAFVLANIARTDLPAHRPLPADSELVQAVRVLARAHADAVGDRQQAQNKLCSLLREYHPAALTTLTDLSTVTARTALRLAPTPQAARSLEPGQLRAALVQAGRHTHLDTEVPRIVAGLSDEQLRQLAQVEHAMGEQALALLGLLDAASAAVTRLEKALTAAFLDHDDAPILLSQPGLGTVLAAQLLAELGDDRSRFASAGGLRAFASTAPITRTSGTMRGVFARRVRNRRLGAGVLPVGGCACSPPPPAPAPTTTNAGNGATGTAPPAAAWPAGT

SEQ ID NO: 365693 - protein, 417 aa, unidentified
MQYAPVTLSDQPVNGLTCGIDWARDDHAIAIVDSGGRAVYRGVIEHSAQGLAELIVVLNRAGATEVAIERPNGPVVDALLEAGLTVVVINPNQVKNLRSRYGSAGNKDDRFDAFVLADTLRTDRARLCPLTPDSPQTAALRALVRTRRDLVIHRVAVANQLREHLNRVYPGPIGLFEDLDSPISLRFLTRFDCQDRADWLTPKRFGAWLATVAYRGRTDPAVLHARLTAGPRGATGAEGRAYLGITRALVATLSTLGEQIQLLASQIGEQLAAHADAHIFTSLPRSGTVRAARLLAEIGDCRAKFPTPDALTCLAGVTPSTRQSGKMRSVSFRWACDKQLRDAVCDFANDSRRANPWAADLYTRARARGHDHPHATRVLARAWLHIIWHCWQTNAPYDPTRHRALQTLLTQQPHTTT

SEQ ID NO: 365694 - protein, 351 aa, unidentified
MKILAIDLGKFNCVSCLFDTETNTTEFETIKTYRIEFEGLLNRMQPQLVIMETCSITGWVHDLCVEQGYEVLVADPSQEAWRWKNVKRKTDKDDALKLAKLAALGQINPVYVPTPESRQYRQLVKYRKTVVHRVNRIQNNVRALFDQQGVKIPSGHRTWTVAGIEELSQHRKPLSECDLSNLWRGELDLELTMLDHLWEHLASIERQLEELAKSEERVQLLQTIPGVGRKTAEVIVVCLDDPKRFENARQVSAYAGLIPQQHQSGQTNRLGKITKRGSRLLRTALVEAAWAMLRYNEWAAATYARICGGQKTRKKTAITALARKLLVRCWAMLRHNQPWNPELAQPTASTC

SEQ ID NO: 365695 - protein, 363 aa, unidentified
MKKLKRRPVRFKGLTVGLDIHKRFTAYSIFDRRGDEVAYGKVESTREGLSELLGKVGRRKAQYVLEASGSSLWVFDLLSDHAGRDQVHVAQPHRIRPIANSLEKNDANDAWWLAYLQFEGRLPEAFVPEGELRELRIMTRELRSATDLRADLVRRFRSHLALEGVKMSGSCFHTKTVRRQAAEVAHSLSGARGDALHRLLRRIEHLDEEVAYWDSKVAELCRGLPVVQTIRKEIPGIGPALSAILYAELGDPSRYRSAKAFACATGLVPSFRESGGRKMPAKMSRAGSRYSRWALTRAVIGCMRCRRGPGVTVTRWVNKRLRHRPKKHVLVAAARKLAEGIWRLFHLGEEFDLRKAFPIGKTA

SEQ ID NO: 365696 - protein, 349 aa, unidentified
MSKITRVGVDLAKRVLQVHAVDCSGQRVTSRALSRDKFLPWCAQLPAGCMLAMEASSSAHHWARRLRAMGLDARIIAAHLVAPYRLQGKTGKNDANDAAAICEAAGRPHMHFVPIKTVDQQSLLCVHRLREGFKAERTACINRIRGLLGEFGLVFPQKPEALRQALPDVLEDASNELGGIARLALQRAQAQWVELDAHLAWCDERIAAHLKADPQAAMAQQLMGVGPVGASAAVATVGDFKQFRNGPQFGAWLGLTPRQNSSGGKNNLGGITRRGDMYLRTLLIQGAKSVVWTAHKRDDPISRWVHGLRERHGWQKAAVALANKNARILWAVMTKEQAFDVRHVSVKPA

SEQ ID NO: 365697 - protein, 342 aa, unidentified
MKKQEEVQKCFIGIDVSKLTIDVSIITNDGEHVYEAFGNNPKDFKQMEIWLKKRKSFNYRSALFCMEHTGLYTRELVSFLMQKQANVWMESALHMKKSMGLTRGKTDKVDSFRIARYAMTNSDMAILVKLSNVTLQKLKDLVSNRERLSRCIIKLKIAQDEFARVDKKLGRELKKINAPAMKGLKKSKAQVEKRMLELINADAELKRLFDLVTSIKCVGNVLATELLVYTDGFTRMQNNRQLACYCGVAPFEHSSGTSVRGRTRTSNFANMRLKSTLHMAAISACHYVPDLKKYFERKVAEGKNKMTVINAIRNKLLHRVVAVVNRGTPYVENYNNLNLERS

SEQ ID NO: 365698 - protein, 372 aa, unidentified
MREYNELFIGLDTSKAKISVAVAEKERNGEVRFFGDISAEPTSVASMVAKLAKRGATLHFCYEAGPTGYDLYRQIMGLGHQCQVVAPSLIPKRPGDRVKTNRRDAVSLARLHRAGELTAVWVPDEAHEAVRDLVRARECAHDALKKARQQLQSFLLRHGRIYPGRSPWTRAHFRWLAAQSFTHPAHHIVLAEYIQAIEDAAIREDRLTKQVAEVVASWSMAPVVEAYQAMRGIAFIAAVTFVVEIGDVRRFETAPQLMAYLGLVPSESSTGERVKRGGITKAGNRRARRVLIEGAWTYRYPARVSQTIQARLDGLPRSVREIAWKAQIRLCARYRRMITTGKLKTVAVAAIAREMAAFLWAIGQEVSPTVRA

SEQ ID NO: 365699 - protein, 419 aa, unidentified
MQVLIERCAGIDIGKDEVVACVRTPGPGGRNRRKQTRSFRSFTGALEAMADWFAAEGVTDIAMEATGSYWKPVWYVLEERAFELKLVNAQHVKILPGRKSDVLDAEWLAELLEHGLLRGSFVPPPVIRELRDLTRYRKRLIQASTAETQRIQKTLEDAGIKLGSVASEVLGVSGRAMLAALVAGERDPDVLAQLAKGLLRKKLPELRQALRGRFGDHHALLIRLCLDHLTHLEGAIAQLDERIDDLFAEHTSQAGVPFAQARDRLDTITGVGRRAAECILAEIGTDMTRFPTAAHLASWAGVCPGNNITGGKRGSGKTTHGDVWLLDILTQCAWAAARTRDTYLAAQFWRLARRIGKKKAAVAVGHSILVICWHLLTNDCDYDDLGGDYFTRRNPDRQRDRLIQQLTSLGYRVTLEAVA

SEQ ID NO: 365700 - protein, 350 aa, unidentified
MDKELYIGVDVSKQTLDLAYYDGESIDWKKAHIKVSNNNAGFKKIGSWVAKVSKGFDIVLFCMEYTGLYTQNFRLWLEEKHYIYRMVEPRKMHRFEPDLDDGLRSLDRIKTDELDSFRIAIYCEQNHRKILRNPSKLPPPVYFKLKRLLAERKQTVKQSVLYKQQLHDICAYDTDLSVERKNGQLKTLNDALKGIDNEIDMYIKEDADISKNFSLLTSIPGIGRVVALETIVLTENFMAIDNPRKYACYIGVAPFKKESGTSVRKGASVSKKGFKQAKADLSIACLVCMQHIPNIRDYWERKRKEKCSGIVFNAIKFKMILRMFAVIKRGTPYVETDNYRNGKNKQPGVN

SEQ ID NO: 365701 - protein, 408 aa, unidentified
MQLLIGIDWSQDHHHVCFMNPDGARQVEFQIEHKMDGFVKLDDKRAKFGVTATECLVALETAHNLVVDYLWSRQYIVYVIAPGVVKSCRGRFGSSGAYTDASSAYLLADLLRTDRQRFIPWLPDSALTRQMRAQLSLIEALRRDINRWSNRLHSVLLRYHPQIIGLFGKLTTPISLQCIVTYPTPQAIAALDLQAWNAFCRQHDYRRPDWIAKTYAHLQVPAPQPDPAVVQAYQDEAVFEARLLLSLVRQRKQVLQKVRTCFEQHPDAFIFDSLPGAGELLGPSLLVKYGDRRERFPKAAGVQALAGTCPVTLWSGKKRKIVFRKACDRDFRRIAQQFAIASVKQSLWAATYWQEVRPRCDSDSHAYRCVANRWLAVIWKMWQSRQPYDEEYHLRQRLLRRKPRSRQS

SEQ ID NO: 365702 - protein, 367 aa, unidentified
MKKISTAEARQTRNVRDQHLTIGLDLGDRSSWYCGLEEAGEVVLEQKVATTPKAMSEVFGAMPRSRIALETGTHSPWVSRMLSELGHEVIVAHARNVRLIGESRKKDDRFDARTLARLARIDPQLLAPVQHRSAQAQAHLMVIRARAGLVRARTSLINTARGLTKSYGERLRRCSPRNLNAEKARQLSPELQAALEPLLAAIESLSERIHEYNQKIAKIAKESYPQVARLEQVKGVGTLIALTYLLTLEDPQRFRKSRDVGCYVGLQPGRRNSGQSEPQLHISKEGDPYLRTLLVQGAHHILGPFGADSDLRRWGLKLAERGGKNGKKRAVIATARKLAVLLHRLWVSGEAYEPLRHSRPLRLPAAA

SEQ ID NO: 365703 - protein, 345 aa, unidentified
MHYVGMDCHITTLDFAVVDDAGRLVKSCKVYTSAKNFMEFVKSVAAPRIVYMEESALAAWALETCIRFGEKLVITDPKQNHWIGSSTQKDDPLDAFKLAQLGRGGFIKEIRHPVGDRRRFRELMDCYHDTVKSTTRIKNKIKSKFRQNGIHCTGMTVYSETYREEWRQKLPQDQTLLLIVEGLWNQLKESEQTEKNLLKAARNFAKHYPEIKLFEDIPGIGFISAATISAILETPHRFANKRKVWMYAGLGITIRSSGGKTYSEKLSKDYNRLLKYTLKQVAETAVQAKDNPFCQKYLAMTILRGIAPHRAKLTISRDLLATMWAMWKNGEKYNPEIRRSLVLNK

SEQ ID NO: 365704 - protein, 366 aa, unidentified
MTSVPSAAGLIHLGMDTSVNEIVVAVLRPGEEVPVVDRIPGDEESVRRLIGRFPDRRLLSACYEAGPGGYELHRLLTSMGVACDVVAPSLIPKGSSDRVKTDKRDSVRLALTHRAGLLTPVRVPSPAEEAVRDLVRARGDLLDDRKRMQQRLNAMLLRHGRVWRGGKKWSYAHRAWVDRQVFDEPALAEAFALYRGGLEAREAELAAAGARLAAWAGREPLAGPVTRLGGYRGIARLTGLTLAAEVVDWRRFASARAFMGFAGLIPTEYSSGSRTRRGHITKAGPEGVRTALIEAAWAYRYRPAIGATLRRRQAGLPPETLARSWKAQQRLHAKYAKMTARGKPPGVAVVAVARELAGFVWAEMTS

SEQ ID NO: 365705 - protein, 418 aa, unidentified
MEPNRFRHYIGIDWATEAHRICLLDHNGQLVAKTSIPHSGAGLGQLLEWLAGYGVEPAFAAVAIETPRGALVETLVERHYAVFAINPKQLAHFRDRYTSAGAKDDDRDAWVAASALRTDEKAFQRVVIDPAELIQLRELYRTADELREEVQRLTSRLREQLIRYYPQMLALYPSPDQPVIWDLLELAPLPATAQQLTVPQLEAVLRKRRIRRLTAGQVLEQLRATPLTLANGAAAAASEHALVLVAQLRVIYELRQKTLKRLASIVKKMRQTTTASGAPSDAAIIASLPGAGILTTAALLSESSRAVAERDGPALRAYAGVAPVTQQSGKSLKVSMRYACNNRLRNALYHFAMGSLRDPVARLHYDRLRAQGHSHARALRGVADRWVTVLMAMLRSGTRYDATRRKAWPAAAAAGVAA

SEQ ID NO: 365706 - protein, 429 aa, unidentified
MEEIDDTDLVVERVAALDLGKAGLDACVRVPHTHHPGRRMQELRSYGTTTAQLLELAAWLRHWHVQRVVMESTSTYWKGVYYLLEAEGFDCWLVNAREVKNVPGRAKTDRADAVWLAKVAERGMCRPSLVHPPDIRRLRDLTRYRRALVQDRTRERQRVEKLLEDAQIKISSVLSDLHGVTGRAMMDALINGQRDPHTLARLAKGSARKKTARLEEALRGFFTDHHAMILQMMLANSDRLSAQIAELDGRIEEALSPFCAQSARLADIPGVDVMAAAELIAEVGVDMTRFPSAAHLVSWAKFCPQTHQSAGKSKSQGRGKGNPWLAGTLGRVVFANSRSETFLGARYRRLARRRGKQKAIVATGNSLLTVVYHLLLNSDARFCDLGPGYYESRINKHRRARDLATQLQALTGQHIVIRDGKAVITDTAA

SEQ ID NO: 365707 - protein, 429 aa, unidentified
MNYNTQNAKIASITEKTLIIGIDVGSETHYARAFSWRNYEYSKKPFAFSNDETGFAAFKKWMNDIAEKHGMEVIIPGMEPTGHYWLNLGAYLQEQGMKPVHVNPHHVKKSKELDDNNPSKNDRKDPKTIAGLVNEGRFSYPYIPTGIYAEIRNLSNLRIQTQEEITRIKNRMARWFSIYFPEIKDVYRNPDAVSGLMVIKQAPLPCDIRELGVEGVNKIWRDARLKGAGIKRATTLVTAAEHSIGNTEAPRSARKEIRNLLEDYEGYKKRMDELMEEIEKTLSEIPYIDKLMEINGIGIKTVSCFIAEVGDIGRFDNPKQVQKLAGYAIVADSSGKHNGESRISHKGRKRLRYALYEAAISVIGKNKEFKEIHSYYRTREKNPLKKMQSVITVACKLIRIFYTILTKGVDYDGQKMLNDIVRPEIQPAA

SEQ ID NO: 365708 - protein, 372 aa, unidentified
MGQRPRRKESKINATTAAIHLAKNVLQVALADSNGRVVEHHRLIRAQFERFFDNRSVSRMIMEACGSAHHWARVFGARGIEVSLLPAMYVRAYVRRSKTDAADALALLEAARCADIVAVKVKSVEQQSLQALHRTRSLWMATRTSRINALRGFCRELGLHVPVGARTGLEAIGRAVADEQSPITPLLRPIMQQLLEEIRVLEVRIAQLERQLAQLARESSACRLLMSIPGVGLLTATAILAATSGSVAHFKSARHFASWFGLTPKESSSGGTRRLGRISKMGDKYLRMLLTHGARSVLRAAKVAQMKGIELIGVRHWALALQARSNHNKSACALANKMARICYAVLRDQTPFGQPAARLAKKMQRQSFELAY

SEQ ID NO: 365709 - protein, 469 aa, unidentified
MVVMIGIDPHKASHTAVAIDPAEEPLGQLRVRACAAQAERLLGWAQAWPQRAWAVEGAGGVGHLLAQQLAAAGERVLDVPPRLAARVRLLATGNINKNDPNDARSVAVAALRSAGVREVRRDDHAAVLKVWSKRYRDLGRARTQVACRLHQVLCELVPGGVPGEITAGQAERILASITPAEAVQAARWELAAELTEDLHGIDARIRQTRNKLAAAVRAAGTSLTGLFGVGPVIAAAVIGDVRHVARFPDRDHFASYNGTAPIEVSSGGRKIWRLSRRGNRRLNHAIHMAAVTQIRHRHSQGHAYYQKKLAEGKTGKEALRALKRQVSDAIYACLQADARRDAARLKSPGGQPGNGSDSSAAGSHPGHRLFGQATPGPGHHTTTAVSDPAPGPASARGRAGHSSIAATLPLAKPQVQVQRPQRSEDERPGGAARQRPYSAARKARGQGSQAKPHRPKAATRARENDRRNP

SEQ ID NO: 365710 - protein, 362 aa, unidentified
MNKISKPARRMEARNDKPEMTMGIDVGDRYSHLCLLDEAGEVVERGRVRSTEAALRRHFEGVARLRIAMECGTHSPWMGRLLKQLGHQVIVANARKIPTITESESKNDGRDAEQLARLAAFDPKLLSPLEHRSLVRQQDLNLIQARAILIKARTMIVNALRGLVKSAGGRLPACSTESLPDRAAGAVPPALADVAGPLIEQIARLNMQIDAMDEQIEKLAIKYPEIGTLRSVPGVGALVAAAYVLTLDRPHVVPSSRSAGAFLGLRPGQSQSGSSDPQRRITRTGNTYLRCLLVQSAQYILGRFGPDSALRRWGLKLAASGGKRGKKRAIVAVARKLAVILHSMWRSGQRFQPFPQPAQTQA

SEQ ID NO: 365711 - protein, 397 aa, unidentified
MYIVGIDIAKRKHEAAVIDGEGTVIIKPFSFTNNCSGYNRLLAMLTKAKLPLDEVSFAMEATGHYWLALFTRLQKEGFRVQVINPVQTNSIRSFYIRQAKTDPRDALLIAEVIRFGHFSESTLHPENIYELRELCRGRHAIVSMQADVKRKVVALLDQVFPEYETAFTNLFGDTSMAILQTCPTPKELSEMPFEELCHLIEVSSHKRFRMAKAQELQALARNSFGFAMAGDVFSTMIRLYAKHLVFLKQQVREMDRKIAEIMETLDTPITTITGIGPTLGAYILSEIGDISRFSSAAKLAAYAGIDPTMRQSGEYNGVRNRMSKRGSPYLRHAIWLATSSAVLHDPALKLYFQKKRDEGKPYMASVGHACRKMVSIIYAVMRDNKAYTPYIPNEISA

SEQ ID NO: 365712 - protein, 321 aa, unidentified
MTEETICVGVDVAKSTLDVAASNSKEARQFKNDHKGITSAVSYIASLKPAKIILEATGKYEIPLAAELQANRLPVVIVNPRQVRDFARATGVLAKTDRIDARILALFGLQIKPEVRLLPDQKAREMSSLLARRRQLIEMLTAENNWLLQADISIRPGIKIHIKWLEEAISAINDDLDRQIQNSSSWLEKNNILKSVPGVGKVVSTTLLIELPELGTLNRRKIAALVGVAPLNRDSGTLRGKRTVWGGRAKLRAVLYMAALVGVRHNPVMAAFYKRLLKAGKAKKVALVACMRKLITILNAMMRTMTIWKPGNILRSVSMEV

SEQ ID NO: 365713 - protein, 401 aa, unidentified
MQVTRIGMDIAKQIFDLHGVDRRGKVTLRKTLRRERVLEFFAQLKPCEAGMEACAGAHYWHRELSRLGHTVRLLSAHKVKPYVDGNKNNRHDAAAICEAMSRPSLRFVQPKTTAQQDLQTLHRARALLVRDLTALSNQVRGLLHEYGIVMRKGAAALRRVVAELLTGDDERITAVLKAVVAEQFERFTYLALRLDRYDRQIGELCKQDQRCQRLLKVPGIGPLSATALVAALGNGHEFKNGRHFSAYLGLVPGHSNTGDHTVMLPITKRGNRYLRTLLIHGGRAAVYAARRRSDPRSSWLNRLRAISCHNVAAVALANKNARVAWAMLRYGEDYRASRAHRQSADLAAARSARPANSALAFAPHRARPASQRTEHFSAPPSVQTKGGAKNAKAESKKPRQD

SEQ ID NO: 365714 - protein, 320 aa, unidentified
MKAVLGVDVAKEKFDVELVDEQGEKERNELINKTSGFKRLDKWLKRHTTGTVHICMESTSIYWEELAEYMHEAGYEVSVVNPARIKGYAMSQMRRSKTDPIDAAVIADFCRTQEPKLWVPPSPEQRKLRALVRHLEALKKSRTQQLNRLETCRDPEVEASLKTVLKAIESEMEQIQKRLETFFDEHPDLKEKRALLESIKGIGEKTATHLLAEMYDLEHYENAKAVAADAGITASEFSSGKSVRRRPKMSRMGKAAIRGAMYFPALTAIRHNPLVRQLAQRLEAKGKPKKVIQVAAMRKLIHIAYGVLKNQQPFDPAYAA

SEQ ID NO: 365715 - protein, 411 aa, unidentified
MERIYDNCCGIDVHKKLIVACFKHGNKQEVREFGATTREILEMTEWLKNASCQITAMESTGSYWKPLYNILESCGLESIVVNAHHIKAVPGRKTDVKDAEWIADLLQHGLLTPSYIPDKDQRELRELVRYRKSLVGERNRELNRLQKMLEGANIKISGTIKDINGKSARNILEYIITGKQITSSEYDILYENRVIAHNLKATKEQIIDDLNGVTSSLQRKMLSIILNHLDELNKHIKNLDDDIDNFMKPEEKKSAKAIQDIPGIGNTSAQAIISVIGTDMKRFPTDSHISSWAGLCPGSNESAHKRKSGKTTKGNSLLRDTLVVCAHSAVKNKNSYFSAQFLRISAHRGKKRAYVAVAHSMLVAIYHILKDGVVFKDLGADYYNQFNKERKINAYLKKLKALGWEASIVAG

SEQ ID NO: 365716 - protein, 338 aa, unidentified
MKITTIGLDIAKQVFQVHAADAEGRVVFRKRLRRNQLAAFFANFPPCVVGLEACCGSHYWVRVLTRCGHSVRLIAPQFVKPYVKSNKNDANDAEAICEAVSRPQMRFVAAKSVEQQDIQSLHRVRSRLVSSRTQLGNQIRGLLMEYGIVLPQHLGQLRRGLPLVLEDASNELTALSRRFFASLQDELLSLEEKIAALDEQIVVVHRASEPCQRIAAVEGIGPLTATALVAAISDGKAFKNGRQFAAWLGLVPKQHSSGGKARLLGISKRGDTYLRTLLIHGARSVVYRASRKTDQRSLWIAEKQRKLGTSKACVAVANKNARIVWSLIAHEVPYRRAA

SEQ ID NO: 365717 - protein, 341 aa, unidentified
MNTMIGVDLAKSVFQVHGASMVGELKFRKKLTRPQFEKFMTEHDPAVVVMEACGGAHYWARKMSELGHEVKLIAPQYVRPFVKRQKNDAADAEAIVIAAQRPEMRFVVPKTEDQQARAALFRSRERLVRHRTEMVNALRGTLYEQGQSFPTGIRHLSRIQALLDDPENGLHQLVQRECLDLIEQIAQTTERIDAKTKQATTLSAQSDVTRRLQTIPGVGPLTALAVETFAPQMESFNSGRDFAAWLGIVPRQHSSGGKQRLGKISKAGQGDIRRLLIMGAMTRLTPMGRRGIAAGSWLARMLERKPKMLVAIALANKMARQIWALLTKQEDYRDPAQMAAA

SEQ ID NO: 365718 - protein, 361 aa, unidentified
MRIIGCDLHARQQALAMLDTTTGEVVTMTLKHEGNNVREFYSKLPRPVRVGIEATGSMQWFVNLMEELGIECQVGHPANIRAAEPRKQKHDRRDADLILKLLVENRYPKIWLPSKEQQDLRALLRHRHQWVRIRTRIQNALQAMALANGLRRGPALWSQDGQRTIASLPLAPHAAYRRSELQAMYAKFGKEVEKLNQRVEEQACERPGARLLMTHPGVGPITALATEVFLGDAARFADSKALASYVGMIPSEYSSGGRQRLGGVSKQGNPLLRFLWGEAAIHAVRRDPELQRFYRRKLVQKGLGKTRVAVARKLGIRLWIMLRDEIDYNEFCRRGQMQQKSSEACAGMPETGHGAKQSPAD

SEQ ID NO: 365719 - protein, 385 aa, unidentified
MQKLNDFSQSRIVLKQDNTLIAVVEMSLSSWLVAGIVPGVERQPLKKLAVDESALLKLLHRWREEAEKKGRRIERIAVAFETGRDGFWLARWLRARGIEAHVIHASSVAVSREHRRAKTDRLDTELLKRVFLGWLRGERDHCKMVAIPTIKDEDSKRPNRERESLVGEQTRIVNRMKAALIRLGIRGFNPKLKKAAERLEDLRTPEGEPIPPNTLAELRRDMERRHLIRDQIRQIEDTRLQRIERAPSDRPHAMVRLLARVIGIGIETADMLVQEVLSRTMRDRRAVARYAGLTGAPDESGAKRREKGLARSGNHRVRRGMIQLAWRFLMFQKDSALAQWFRARTENTRGTRKTMIVALARKLLIALWRLVTTGEVPAGVVLRAA

SEQ ID NO: 365720 - protein, 346 aa, unidentified
MNITTIGIDLAKSCIQVHCVDVHGKRILNKKLKREQMVPFFSNRPACLIGMEACGSAHFWANKLQALGHTVKLMAPQFVKPYVKTNKNDAADAEAICEAVSRPNMRFVPIKNSEQLAVLAMHRARQGFVKARTAQANQLRGLLAEHGIIIPKGIRHINQHLPDILEAGDNGLPGRFRQLLDRLSAHFKELDKQVRELDVQLQSWHQDSPASQKLAKIPGIGPLTASALVATIGDAKQFQNGRQLAAWLGLVPRQHSSGGKPTLLGISKRGDTYLRTLLIHGARAVLRVVKSKAQHAGSWLEGVMARRNHNVAAVAQANKTARIVWALLANDREFDARYGTGTILAA

SEQ ID NO: 365721 - protein, 395 aa, unidentified
MNKVIHYIGLDVHKESIAVSIAPAHSTEVRRYGIIGGTLAAVDKLIKKLSLEGVELRLVYEAGPCGFVLCRHLRAKGLHCEVVAPSLIPKKASDRIKTDRRDADQLARLHRAGELTCIHVPDQEDEAVRDLIRARFSAMTDQRQARNRLKGFLLRLGFRYTGKSSWNDAHQRYLSGLVMPQAPQQIAFQEYIHAINDATDRLARLTRAVEDALAGWKWEPVVRALMSLRGVQVLTAMTLVAEVGDFSRFDDPRSLMHFFGLTPSEHSSSDKRVQGGITRCGNAHCRRVLTEAAWQYRLAPKVSAAIQIRQQAQSKEVRLIAWEAQQRLHKRFKQLSAKKKSVIAATAVARELAGFVWAIACQVKPAQQAPVPEIIRTCRGKVYRLDPNTKLQKNK

SEQ ID NO: 365722 - protein, 364 aa, unidentified
MTAVQAERQADSSAVEVVGGVDTHKDTHTAAAVDTAGRVLGSAQFPTDAAGYRALLRWLRGFGTLLLVGVEGTGVYGAGLARLLAAQGVAMVEVDRPDRKARRWQGKSDPVDAEAAARAALARVRTGLPKHRDGRVEALRALRVARRSAVGQRADVQRQIKALIVTAPESLRAQLRALPDRELIKVCADQRPDRAGAGDPGTATKIALRSLARRHRALSVEIADLDELLGPLVAQINPGLLALKGIGPDVAGQMLVTAGENADRLTNEAAFAMLCGVAPLPASSGRTTRHRLNRGGDRAANSALWRIVITRMGTDDRTKNYIARRTAQGLTKPEIIRCLKRYVAREVFLALTSASAEKRPAKAA

SEQ ID NO: 365723 - protein, 358 aa, unidentified
MKYVGIDVHKKMCQAAVLNEEGALLDEIRFPNDPEGIEEFAWKLTTFRDDVKAVVESTGNLWIPIHDRLEEHGFDVALSNPSKTRLIAEAKVKTDKVDARTLAGLLRADMLFTCYVPGEELRSRRELLRHRLNLVKTRTEVKNRVHGLLDKHGLRMPGTTAFSKGNIAWLRGLSLGFMDDAILRSDLAVLEAVDGQVTLIEEKIAALAAEDRRVRLLMTMTGVGYFTAMLVVSEVGDVGRFRGDKEFASWMGLVPSVHQSGERTRIGGVSGPGNKRLRWAMVGSAQTAVRHDPRLGGMFERLSRRRGAGCAVVAVAHEMARIMYFMLVRGEPYRGENRGLTERKLKNMGKRALDGLRN

SEQ ID NO: 365724 - protein, 303 aa, unidentified
MAEALRIAFVGIDIGKNSFHVVGLDGRGAIVLRQKWSRGQVEARFANIPPCLIGMEACVGAHHLSRRLQRLGHDARLMPARYVRPYSKGQKNDFRDAEAIAEAVQRPTMKFVATKTADQLDLQGLHRVRERLVSQRTGIINQIRAFLLERGVAVRQGLRFLRAELPNILAAPSDALSPRMVRIIEDLAGDWRRLDGRVERLSKEIEAIARRDAGCERLISEPGIGPIISSAVVAAIGAGDVFSKGRDFAAWLGLVPRQISTGDRTILGKISKRGNRYLRVRAGRVGGADQAEELGASRAQVLD

SEQ ID NO: 365725 - protein, 342 aa, unidentified
MAIVAGFDVHRAQITFDALDTASGEVMRGRIAATPAAVARWAARFAGRRIEVAVEACTGWLFVCDALAAAGAVPHLAEPVETRALRGRKRRAKTDREDARWLRELLADGRLPEAWIPPEHVRQWRSRARLRHTLLGERTQWFQRIRATLYHHGVDGTPEKLRTGDGRAFLQRLELPADARERIQIALAMVDAIDAQIAPLERELRQLARRQTGCRALMGLYGMGELTSLVTLCELGDVGRLSASRKAVRMAGIDIGVHRSDRRSRVGKLNRQGSPHLRWALYEAALAACRPSSPDHADYLALKARGLSHTRASLTIARKLARRSFHVLRELGPAALEPVRTR

SEQ ID NO: 365726 - protein, 343 aa, unidentified
MTNNIAILGIDLGKNWFHLTGLDKHNKPIYRTRLNRKKLAELVLTLPSCVVAMESCPGSQYWGRRFAEAGHQLMIIPAQFVKPFLKSNKNDFNDSLAIAETAGRPGIRCVPLKNTEQLELQAIHRIRNRLITERTAIVNQMRALLLENGIVVPPGRNLFARELPSILEDAENGLTVRLRALIDRLRNRWRLLDTEIDEVTELLKDYAKQSDLCQRASSVPGIGPIVSTAMVAAVGDARAFQRGRDMAAWLGLVPKQFTTGNKPKLGGISKRGNRQLRALLIQGANALFIHMKRDQSTMGEWLRGLEARSHRHVVIVALANKIVRICWKVLTSGNNYRPYPASA

SEQ ID NO: 365727 - protein, 319 aa, unidentified
MAQNDLVVAGIDVAKDKVDVCVRSLSLRRTFASTAEGRRELASWLRRQKVGKAVMEASGGYEREWAKALRDAKIEVRIVDPKRVRSFAQSAGRLAKNDTIDAEMIAWFAETFDEARGQAYDATREQIHQMVNARQALKNMQARLESQGEHALPAAVQRMHARILKTIAVELVKIDAAISAMIQATPRFTELAEIIESVPGIGRTTSAALIAAMPELGQANNKIVAALLGTAPYDDDSGRRRGERHIKGGRRRTRNVFYMACLGAATQHNPVLKAFYDRLVAKGKEKKVALIACMRKLICILNVMIERRQKWDASRYAVS

SEQ ID NO: 365728 - protein, 392 aa, unidentified
MSDITFTQVVSRGCGMDIHKEVVVATVRGEGIKQETRSFKTFTSSLTQLREWLLSLGITHVAMESTGVYWKPIYNVFDGFIPHIWIVNARHIKNVPGHKTDKNDSVWISQLLLAGLLKPSFVPPRQQRELRDLSRYRRKVIQMVSANKNRIIRVLEDGNVKLSTVLSDTGGSTAVKLIDMLCDGKMLTLEDVDAVRHKRCHHTSEEMLEACTGYMSEHKIYMLQQIRECNKKLEKLCEIPGIQDRVCEDLIAEIGLDMGNFPTSAHLCSWAGMCPGNNESAGKKKSGRTSHGDKHVRTVLVEAAWAASRTKGTFFMERFKRLALRRGTKKALIAVGHSLLTCVYRVLRGESYNELGELYMASKTEKRRRDYLKAELAKLGYNVTLTKKDKKD

SEQ ID NO: 365729 - protein, 456 aa, unidentified
MPKRKSKTIVEAAPVDVLSQINPHAAGLDIGSTEIYACVPADRDEHPVRAFGTLTRDLNELADWFTSCDIKTVAMESTGVYWIPVYEILESRGFEVYLVNARHLKNVPGKKTDVLDCQWIQQLHTYGLLQASFRPPEEMCALRALIRHRATLIRYRAAHIQHMQKALQQMNVQLTQVVSDITGVTGMSIIRAIVAGERDPKVLARMRNQHCAKSEDEIAAALQGNYRFEHLFVLQQSLEQYDFYDRQIQQCDAEIETMYASLPPADQGDGDVPPPPKPNDQKPRKNQAHFDLATSLYRVVGVNLAEIDGIDALTAQVIIAEVGLDMSKWPTAKHFASWLGLAPYNKKTGGKVISSRTKRTQNRANTALRIAAQSLHHSHSALGGFYRRMKAKHGAAKATVATAHKLARIIYYMLKYQRPYIDPGEARYEKEYRDRAIRNLKRKAAQLGFELAPVPS

SEQ ID NO: 365730 - protein, 393 aa, unidentified
MLLDHPSDGLTAIRTYIGAIFVSLELSRSTWLVTSLSPGKGEKMSKHSVAAGNMAELLTLFAELKRKTEVRTGQSYPIITIQEAGLDGFWLHRVLQQEGIESHVVDPASIATPRRRRRAKTDRLDGETLLRALLAYKRGEPRVCAMVVAPSPEEEDRRRLCRECQALIAERITHVNRIKGLLFSQGISDYAPLRRDRRSRLETLRTGDGRELPSHLRAQIGRELDRIELLLEQIKAVEAERDGLLAAARKPAEKPADEKAALDPVAMLLALKGLGANFAAVLWSEAFYRQFSNRRQVAAYAGLAATPWQSGGIRHKQGVSKAGNPRLRTTMIQLAWLWVRHQPQSALTRWFKERSQQGRKRAIVALPRKLLVALWKYVTQGVVIEGAVMKPAA

SEQ ID NO: 365731 - protein, 414 aa, unidentified
MQDLLEVCCGLDVHKETVVACLLVGVPEIKPSCEIRTFSTMAAGLAELKHWIEDTGCSHVAMESTGIYWIPVYERLEDSTEPINLMVVNARHMKNVPGRKTDMRDAEWIATLLRAGLLRSSFIPEKSIRELRHLTRYRKSIVHDVTAQKNRMEKFLQSAGFRLSVFLSDTFGVSGRNVMRHLIAHGSIDRRGMDGCLKKQARHKLNDILTSVNGTMSAHQQQFLSMMLGHLDQLETHQRQIEAEIERAASQFHGAMSVMTSIPGISHTAASSILAEIGPNMDCFTTSEHLCSWAGMSPGNNESAGKRKSTTINHGNPYVKSMLCEVAWVIAGKRNTYLSNWYWRLKQRKGAKKAIVALGRKLLVIIFAMLTNGTLFDESCFEQRRAHCERRRVARMLSELGRLGYGVTPPAASL

SEQ ID NO: 365732 - protein, 339 aa, unidentified
MNKRSNAVEAIVFCGIDVSAATLAVAVQAHDRAIEQREFANSASGRKALIAWLCKPKSPVRVALEATGIYSLDLAVALDAAEGIEVAVLNPKAVNRFAQTLRRSKTDKADAQTLAEYSRRMPFVAWRAPDREGLRLRTISRPIDGLTVQHTREKNRLHAAEGSAATPRCVVQDLKRSLTALQKRIVRLRGNAVALVKADDGMRQRFELLISMPGIAEISALQLLGELAPLSEEMSVRQWVAHSGLDPAHEVSGSSVHRPSRISRTGNRHLRRALYMPALVAVQRDPHMKAFYELLQSRHKAKLQALIAVARKLIHAIYGIFKSNNPYDGRKLFPNLLTS

SEQ ID NO: 365733 - protein, 402 aa, unidentified
MNAVGIDVSKGKSMVAIMRPFGEVVATPFEIKHTASDINSLVKFINSVEGESRIVMEHTGRYYEVLAHQLSQANIFVSAINPKLIKDFDNDSLRKVKSDRVDAIKIARYALDKWQNLKQYSVMDKLRNQLKTINRQFGFYMKHKTAMKNNLIGILDQTYPGVNTYFDSPARSDGSQKWVDFASTYWHVDCVRKMSLNAFIDHYQNWCKRKKYNFSQSKAEEIYGKAKELVPVLPKDDITKLIIKQAVNQLNSASTTVESLRTLMNETASKLPEYPIVMAMKGVGASLGPQLMAEIGDVSRFTHKGAITAFAGVDPGVNESGSYEQKSVPTSKRGSSDLRKTLFQVMDVLIKTHPQDDPVYQFIDKKRAQGKPYYVYMTAGANKFLRIYYGRVKEYLSSLPES

SEQ ID NO: 365734 - protein, 323 aa, unidentified
MDNFPAVVLGLDVSKAKVDCALLSAGKLRSKVIANAPAGFATLDAWLAKHGVVRLHACCEATGPYTEALATHLADAGHVVSVVNPASLAAFARTQLVRAKTDRSDARLIAQFCERHRPAPWQPLPPAQRRLLALVRDLHDLQNMRVMEANRLPEAYPDIQPRIQRHLDFLDAEIERVKTTITEHIDHHDDLRGRRDLLDSVPGLGETTIAWLLAYLGDGQRFACAKQAAAFAGLAPHVHESGSSVRAHASIDKRGHADLRRALYMPAVSAYARCAAYAPFVQRLLANGKAPKLIITALMRKLITIAHAILKSGKPFDPTLHIG

SEQ ID NO: 365735 - protein, 393 aa, unidentified
MNQTSVTDRVVIAIDPHKASWTAAAVDAALQPPEVIRVAVSAEGYRRLRRFAQRWHDHSWAIEGAAGLGAPLTQRLHTDGIEVTDVPAKLAARVRVLSTGHGRKTDEADAISVGVAALTATRLNTASVDAAITALRAVVEHRDDLVKTRTQTVNRLHVLLTHLTPAGAARGLTADHAANILRQIRPRDPAAKTLRSLAVDLVAEIRALDRRITKAAIDITAAVESSGTTLTELSGIGTLNAAKILARVGKIQRFRSADAFASYTGTAPIAASSGDVTRHRLSRAGDRQLNCCLHTMAISQISRDTPGRAYYRRKRAAGKSHREALRCLKRRLSNVVYRQLVRDADTLTGAGPAGHTGATPTSSAAGSHPITSTSDKSLTGPAKLYLTNGDRTA

SEQ ID NO: 365736 - protein, 392 aa, unidentified
MLFVGIDVASKKHDIAITSSEGDIIVRPFTISSDLEGFKKLRMVITSHTESVEDVRIGIEETGIYSKNISEFLALHGFIVHMINPVLTNYSRKSQSLRPAKTDKIDALAICRYIQSNFKRLNSYTPSLYIHMELKSLTRARFDILKNQIKAKTEWTRLLDLVFPEFRQHFKQHSKWVYNLFSRYPTVEQISRMHLCTLQRIIKVQGDRVLAAQTIKLLAMNTIGHPSDTNGVLLTNTLCDIIHYASQLKRIEKQIKSVVNENFAFLLTVPGIGDITGATIIGEIGDINRFHSSSALVAFAGMDPAIHESGDFRANTMHISKRGSRYLRAAVFLSTRAAIINPNIQENKFREKYLKKIAQGKHHNSAICSASKNMINVIYSLMKSHESFNYFV

SEQ ID NO: 365737 - protein, 379 aa, unidentified
MRALQHPGVSGKAERSAGQARKEGTAAMEKYIGCDSHQRYSVFVTMDEKGEAGVPVRVEHSGGELRKFLGTLPPGAPVAVEASGGWYWFVDALEQAGLEPHLANPLEAKKQMPGRKKTDKLDARGLATLLRVGTLPEVWIPPAKLRDLRGLMRTRLSMRQQGTFLKNRIHAAIRRYGLRQDAFAGLFSGKARITLSGYIDSLPDHTRFATTQEWEMLNQLERHIDRLEVRIREGICKLGWVRLLKTLPGVGDILGATIHLEIGDVNRFPAPPHLAAYAGLVPSVHSSGGKTHYGPTSAQANHYLKWAFVEAANAIVMHRDKYSEQHVGQLYQRLKERKCHGKAATAVARHLAESSWWILKKKQEYRAPHAAAMSSSRNG

SEQ ID NO: 365738 - protein, 354 aa, unidentified
MIIIGADYHPAFQQIAFVDTETGELQERRLEHPEGAEKFYRELAAQGKRVRVGMEASGHARWFERLLAELNVEMWIGDAAEIHRKRERKQKTDRQDAQHILRLLLKDDFPRIWVPSWENRDLRQLMWHRHRMVQARTRMMNQLQAVALNEGLRCKKKLFREAGRKQLQAFRLAPWASRRRQDLLELLDRLNPTIAELTQAIEQEVEKCPEAQRLLTHPGVGPLTALAFVLIIERADRFQCGKQIASYLGLVPLEDSSGNRRRLGHITKQGNSLLRFLLVEAGQVTVRSLPEWRSKYVHLTMRRGRKIAKVAMARKLAVRLYWMMRKGWDYEQLKKFGSHAGQPGHRHGVKSNTE

SEQ ID NO: 365739 - protein, 390 aa, unidentified
MYYCGIDVAKRKHAIVILDEHGQPVQRAFTIENTRAGFDQLLRALAALTGPVLIGLEATGHYWWALYEDLTQHDHPVVVLNALQVHAFRKSGVRKVKSDRTDAGWIAEFVRFSQPAPAQPTTAVFLQLKDLSRFRYHLSDQIGDCKRKLLSVLDRIFPEYETVFSSVFLTSSRQLLAQAASAQELAAFDLSELTELLQTASRGRFDRTKAEALQTLAQHSVGVRFLADAAQLEVRCLLAQIDLLETQRQQVDDALAQLMAQVPQHLTSLPGVGPTTGAALLAEIGDIQRFDAPEKLVAYAGIDATVYQTGQFEARQMHMSKRGSPYLRHALWQAASMAIMHDDELRAYYDRKRKEGKPHGTALGAVCRKLITRVYIVLKENRPYEVRMKF

SEQ ID NO: 365740 - protein, 401 aa, unidentified
MEGPIVSIDVSNGNSHYMCFIKNNKRFGKVKKIDHDIEGFKRLLEDIQKLEAETNEKVCAVFEATGVYTKPLERFLSKNSIKTYIINPLESARKRKEEIHNKKTDKLDPISISKVYYDKEEMMELKKKDETYNWLRKKNRLYEDQLNHLRKYKVAFQNQLSICFPGYLDLFKDGYSDIPMTILKKYPHPDLLKNKKAETVARYLEKNTCHTHKISLEYALKIIGFAKKTYPGCEKDDVEVEIFKILLDKVIETQRECEKTLNEMITVASTLEEYRYILSIDGIGPNLAARIIAEIGDIEEFKSREALVAYAGLDPHIYQSGDQDGKHLKISKKGNKYLRCLLFLAVGCSIRGAKDNPVNRFYQKKKQQSNPLNSKAAKTACTAKLLKIIYGICKNKTTYER

SEQ ID NO: 365741 - protein, 308 aa, unidentified
MTAGQDKVYVGVDVSKPTLDVFILPTGKHFTFTNDNAGYKELIHNLPNMVNLLVFEATGGYEREAAKALTTAGLSVAIVNPRQVRDFAKALGKLAKTAKIDSKIIALFAEKIVPRETVLVDSKQQKLSDLLSRRKQVVDMITMEKNRLGKASKSIDKTINKSITFLEKQLQKLEEKLQKHIDADERLAQKDKVLLSVKGVGPVLSTTLIAELPELGQLNRKQIAALVGVAPFNRDSGTYKGSRAVWGGRASVRSILYMSALVASRNNSVIKAFYDKLCSAGKAKKVAIVACMRKLLLILKAMIKNNTM

SEQ ID NO: 365742 - protein, 344 aa, unidentified
MGEVITIGLDIAKSVFQVHGVDGLGAVVIRKRVSRARMLEFFAGLPRCLIGIEACPAAHHWARELQAIGHTVKLMPPSYVKAYLKRSKNDANDAAAICEAVTRPSMRFVEVKTKEQQAALMLHRARQLLVRQRTMLSNAIRGHLSELGIVSAKGRNGTDELLEIIGKDADNRIPLAARSVLKVLAAQYSAIGAEIASISKSILAWHCSCEPSRRLEEIPGIGPIVATALVAEISDWKAFSSGRGLAAWIGLVPKQHTTGGRDKLGSITKQGNRYLRWLLVNGAMAVIRYAQKHGTKKHPWLGRLMARRPTKVAAVALANKIARMAWAIMARGERYREPTLLLAA

SEQ ID NO: 365743 - protein, 408 aa, unidentified
MCYLDDSRLEQFRQLKKEIRGSEEYLIIGIDVTKEKHRAFFGTAQGKTLLRNVVFDNTIEGFEKLDAYVERIKIQYSLPKVVFGIEPTADYHKPLAEHLLKCGLMVVFVGGTAVKNNRQLLNGRWDKNDDKDSANVADLISQGRCMFYEYPLMTLQNVRVLNAVKRRLKKREHGISAYIRNHILGQYFPELDKYYGSAETLAVVRECLDPSAIAGMEYDDFCRTVAPGKMTLARERRVGAIRRTAVNSVGCTMGEAAFHEAQIAVDSLKQVRQEIKAVDDKLENACLEFPEYTYLLSIPGFGPDVSAKVLGAIGDPHRFTSGKQVLRLAGLDLCAKRSGKTSNRATPIISKQGKADMRCALYQAAFIASIKSKDFIPYFTNKLVGRAKEKGIGTKMRVKLAAKLLIIA

SEQ ID NO: 365744 - protein, 366 aa, unidentified
MSSLTSPAGAIHLGMDTSKNTIVVAVLMPGEEVPVIDRMWNEEGSVRHLVGRFADRAALRACYEAGPCGFELHRLLASMGVACDVVAPSLIPRRPGDRVKTDKRDAGRLARLHRAGELTAIRVPTEAEEAVRDLVRARAALLADRKRAQQRITAMLLRHGRVWRSGSYWTQAHEQWIAAQRFSEPALGAALAHYRAALDTRQAELDAVEAELAPWARREPLAAAVARLGCYRGIAELTGLVLAAEVVDWRRFPSARAFMCFTGLVPAEYSSGERTRRGSITKAGSEPARTALIEAAWSYRFRPAIGVTLRRRQHGAAPQTLARSWRAQRRLHARYKAMTARGKPAGVAVTAMARELAGFVWAEMTS

SEQ ID NO: 365745 - protein, 502 aa, unidentified
MNPRVTIGLDLARKTSHQAAILDTGSPGGPVLRKVNSSAASLDAALQAAGGPDGCVAVLEPTGMAWLAVAAWLVFRGCTVVRTDTRRAHDFRKVMRRDVKSDAVDAVALARLPLLGGEAARGLVMPERLRFALDQLLRLRAQLVKEATRQFQFLLSVLEAYVPELPGVLGEGEKLSSAKVLLLRRFLHPGRVVEAGVDGLTLALEQAGVRLDDASVVTRWHTVAERAWSIWGPLEGAGCCPVDFDVAQIQVDTWLGRIEESENHIRKVEDKVRAIYKEVDPDGILETVPGLGPVIAPFVLAVVGDIRRFPSAKTFVSWCGLAPRKNQTGGTDRGGQRISKAGNRLLRKYLYLAAESARRSDLDLASFYARKEAQGTHHTAIVTALAAKLARRVYAVLKRAAAGDTTGYRFTDQIGAIVDRRESRRLTGAAYPSKAARRRAEQERRRDRGATPPSTGQSSDSPRGLSNAPVPPPRNPPHPGGARPAQVTASGHSSQADSPRAG

SEQ ID NO: 365746 - protein, 381 aa, unidentified
MATETVQSTLPKPITEVLYLAFELSQKQWKLGFTIGIGQPPRTRNITARDLNALHWEIRQARQRFHLPENTSVVSCYEAGRDGFWMHRYLQQQGIANLIVDSASIEVNRRMKRAKTDCLDVTKLLTMLMRYHLGERKVWRTVTVPDEECEDRRHFHRELADLKVERTRHINRIKGLLTGQGVCALIQPDFLDFLSTVRLWNGNSISKELRSRLEREYQRIQLVNQQIDELEAYRRETLRTSQQPHIQQVRQLMRLQGVGINSAWLFVMEFFSWRAFHNRRGIGALAGLTSTPYQSGGTNQEQGISKAGNRHIRAMIIEIAWGWLRFQPDSQLSRWYQQRFGQGSSRLRRIGIVALARKLLIELWRYLETGIPPDGAVLQPQ

SEQ ID NO: 365747 - protein, 357 aa, unidentified
MLSSNVKYIGLDVHKEATSIAVLNGAGKLVMESIVETKASTLLDFLHGLRGELHVTLEEGTWAGWLYDVLKPHVADIVVCNPRRNALLKEGSKSDKIDARRLAELLRSGMLRAVYHGENGLGTLRELARGYLTISKDQARVMSRLKALYRSWGIPCSGRQVYTPRHREQWLSKILQPGVRRRAELLYQQMDGLLLVRHTVRGELLAESRKHPAVKILRQIPLIGPLRATLLLALMQTPYRFRSKRQLWTYSGLGVETHDSAQHRYVDGQLQRSKKPQQIRGLNQNHNHEMKKLFKSTAMSASRCAGPLQDFYAGLLAKGMKPDMARLTLARKIAAITLTLWKKGERFDAEHLKSQAA

SEQ ID NO: 365748 - protein, 363 aa, unidentified
MKQRLSNKHKWLKNIHLTTDDDLHIGIDAHKKSFHVALWLNDAPAINFVTGTDTDKLIETLDKLRPAIRRIVYEAGPTGYSLARALQKAHLPVSVVAPSKTPRKPAPDSKTDSLDAKKLAEYAAKGLLRNIAIPTKQQEAQRQLTRLREQLVRKQSRIKLQIKSFLLQHGIQQPPALRYWSAAAVDQLRNIRLSAHLRYCLDTLLEELIFIKAQLKDVKSKINEAFTKTPLAKKVEILATHPGVGQVVATQFATEMFNPKRFKHKTEVAKYVGLAPSVHQSGQSLRAGPITKTGRPQLRSNLIQAAWVWITCDPYAKKTFNRLIRNTGHQNKAITAIARKLAVHLWKMACLNEPYDPVIDKSA

SEQ ID NO: 365749 - protein, 368 aa, unidentified
MKMNAIKTAPAASAIALKNEKSAKAKRILIGTDVHLRGYQAARKIDNGVIGVVENFRSEEALLLHVEKQCERAEQVVVVYEAGPLGYTLYRKLTARGVLCYVCAPDSSEQKRKRRKNNKIDARNLTSKLFNYLNGDEGALQLARVPTEAQEQLRLASREHDQMVEERKRLGAKGNALLLSQGFGSWSNWWRPKAWAQLSSLVPQWLLERLKIWVDVLKMLDEKICLAKVALARACSGPRPKGVGALSQIQLQSEVLDWSLYPNRRKIACLAGMVPSEWSTGDTERRGSITKVGVPAIRRIIVEMVWRMVLFQPQYKPVQKWQKVLQGTNPALKKKAVVAIGRQLIVDLWRLQTGRVTAQELNLVMIGA

SEQ ID NO: 365750 - protein, 370 aa, unidentified
MKKSIMYVGLDVHKNSIEVAFADAGRQGEVRSYGRIDGTLAALDKVIRKLEAKANSLSFAYEAGPCGYEIYRHLHNKGYDCLVVAPSMIPRQSGNRIKNDRRDAQMLARLHRAGELTSVYVPTLDDEAMRDLTRAREDAKSVERKAKQRILAFLLRHGYRYSGKTPWSRAHFRWIATLKMPHPAQQIVLQESLDALSECTERVDRLTEQIRQLLPEWRMSPVVEALQTLRGVSLIVATTTIAELGDLTRFASPVELMSYLGLVPSEHSSGEKAKRGSITKTGNGHVRRVLVEAAWAYRLPARISAKLQRRQEGMPHNICAISWQAQLRLCGRYKRLLAKGKASPLITTAIARELCGFIWAIANEVDTQTA

SEQ ID NO: 365751 - protein, 366 aa, unidentified
MKKISTVQVFGNEILKEQKLTIGLDLGDRWSFYCVLDEAGKIILEQKVATTPEAMKQTFGKIPRSLIALETGTHSPWVSRLLTELGHEVIVAHAQKVELITKSNRKDDRHDARTLARLARIDPELLGPVRHRSAKAQIHLTVIRARAELVSARTALVNAARGLVKSFGERLPKCGTYQVNEKLAEGVSAELRDVLVPLLREVESLNERIKEYDERMEKIAKEVYPEVALLKQVKGVGTQIALTYVLTIEDPYRFPKSREVGCFLGLRPGRRNSGESEPQKKISKEGDRYLRTMMVQGAHYILGPFGEDSDLRRWGLKIAERGGKNAKKRAVVAVARKLAVLLHRLWVSGEVYEPLRNSQKAMRAVA

SEQ ID NO: 365752 - protein, 341 aa, unidentified
MDKITTTGLDTAKNVFHAVCCDARGKVVRRRMLKRKEVLEFFARLEPGLIGLEACASAHHWARQLTTLGHEVRLVPPQYVKAYLRGNKNDYNDALAISEAVTRPQMRFVAIKTAEQQDLQALHRLRERSVKMRTGLCNQIRALVGEYGLVCAKGISTLRRQIPQWLEDGENGLSDVFRRLLSRSYQQLQTLDEDIDFYTRELKRHSQQDDACQRLQTIPGFGPIVASAFHSHVGNGENYRRGRDVSASIGLVPRQHSSGGKDTLLGISKRGNRQLRSLLVHGARAVVSRAEKKDDPLSCWVSKIRAERGVNKATVALANKLARIGWAVLAHNTVYRPVPQA

SEQ ID NO: 365753 - protein, 358 aa, unidentified
MAKARTLVGLDVHATKIVAAILDPETGELRSRKLGNEAAAAGLCSALPGPVKATYEAGPTGYALARALKEAGVECLVAAPGKIPRGSTERVKTDRRDAENLVRLLLAGRLAAVRVPDPAEEALRDLVRAREDARGDLMRARHRLSKLLLRHGHRYEGRAWRGGHGRWLGGVELACEPAQLALLDYAGCVELAEARRDRLDSEIARLVPESPWAETVERLRCLRGVDTLTAVGLCSEVGDFRRFARPTQLMSYLGLVPSEASTGDRRRLGSITRSGSRHARRLLVEAAWNYRWHPALSRKLKERQAGQPPEAIAISWAAQRRLARLWGRMRRRGKRSTVIAVAAARELAGFCWAVARVD

SEQ ID NO: 365754 - protein, 356 aa, unidentified
MSEQYAGHQVYTGHQIVGMDLHRRRSVLVRMTETGERLETVRISNDPEYLRAVMARAGEAPDVVLEACYGWYWAADTLAELGATVHLAHPLGVKMFSLRRVKNDERDAADLADLWRMGRLPEAWIAPPATRELRGWVRHRAKLVGLRSQLKCQIHAVLAGAGVQVVMSDLFGVAGQDLLAAIQLSPESRARVDSALRLISGLDFEIELFGKLLAGRLRTDPGYQAIQALPGVGPVLAAVFVAEIGDIGRFRRAEQLASWAGLTPKHHESDTTVHRGPITKQGSRLVRWAAVEAVQRVPAHTRLGQVRDQVGQRRGRNIGIVAAARELVELVFYGLRDHHIRALPRSRSATSTTPAA

SEQ ID NO: 365755 - protein, 344 aa, unidentified
MKNTTIAIDLAKSVFEVGVSDRPGHVAANHRLSRAEIAPFMANQPATTVVMEACSSAHYWGRTFQSFGHDVKLLPPLYVRPYVQRGKTDRADVKGMLEAWRNSAIRLVPVKSESQQQLTALHRVRAGWMTTRTMRINSARGLLREFGMIFPLGAATLADRVREVIADDHTQLTMPTRELLHQLVLEIGELEKRVTGVEKQLEALAAQTPVVALLRTIPGVGLLTGTALVGFVGDVQRFRSGRHFASYLGLTPREYSSGLRHRLGRISKLGDVYLRTLLIHGARAVLVGAQAKSNPDRLRAWALQIQGRCGNNKAAIALANRLARIVWAVWKSGKPFESRLQVSD

SEQ ID NO: 365756 - protein, 368 aa, unidentified
MNILAIDLGKFNSMCCFFDTDTQEYRFQAVATNRRYLTAVLTNHKIDLVVMEACGPSGWISDLCQEHKIKTLVCSTNEEAWRWKNTKRKTDKDDALKLARLAMMRQLKPVHVPTHQGREHRTLVKYRKTLDGRINRIKNSIRSLFANRGIEIERGRRAWSVAGRERIDSYRKPLADCSMDELWQGQLDLELTQLDSLNEQQTEVERRLEAIAEEDKRIQRLQTIPGVGRKTAEVLVTALDDPHRFDNARQVSAYIGLVPRQYQSGETDRHGRITKRGSRLLRAMLLECAWVSLQYNPWTRATYDRIHGGQKTRKKKAAIAVARKIAVVAWSMLKHGTDWDPRRMGIEDEEPEHTAAGSRHMTDAVAIT

SEQ ID NO: 365757 - protein, 371 aa, unidentified
MGKNHHIKFVGMDVHQKSISIALADDGPEGEVRLYGKIDNTPEAIDKVIRKLVSTGAELHFVYEAGPCGFTLYRHLTGNGFSCIVAAPSMVPKKSGVRIKNDTRDAIALARLLRAGELTSIYVPDTEDEAIRDVTRARNDARIAAQKAKQRLHSFLLRNEFIYHGKKKWTKAHYNWLAQLKMNHPAQQVAFQEYIDAVNECTERITRLDEQILHAAEEWRWAPTVKALQALRGVSLLTAVNMVAEIGDFSRFHNPKELMAYLGLVPSEHSSGARIRRGGITKTGNSHARRICVESAWSYRYQARVTQYLSKRHEGLPKDIVQIAWKAQLRLCTRYRRLRARGKATQVVVVAIARELVAFMWDIARRIPAVA

SEQ ID NO: 365758 - protein, 346 aa, unidentified
MRFYDQQHEFYCGVDLHTRKMYLCVLDRDGNKRLHRNMRAKPDEFLRAVKPFRDGLVVGVECMFTWYWLADLCLDESLDFILGHALYMKAIHGGKNKDDRIDSEKIARLMRGGTFPLSYVYPREMRATRDLLRRRTFLMRRRSELLTHVQLVNHQYNLDPFEKRLQYATNRDVLDRFTEESARHNVEADLEMIGHYDTLLQRLELEVLRKAKVHDPQARFLLRTIPGVGEILSHVLLYEIHTIDRFASVGHFLSYARLVTPQHTSAGKRTGGGGAKIGNAHLKWAFSEVVPLMMRECQEAKQFVQRKEKKHGKSRAMTMLARKIGRAVYQMLKRKEAFDAVKFFAN

SEQ ID NO: 365759 - protein, 316 aa, unidentified
MTTLCVAGIDVSKARLDVFVLPQRIALAFDNAAQGIGALSKQLTRRGVERVVLEATGGLEYPVARALSDAGMVVARVQPGRVRGFRSFLGRRAKTDALDAELIARFAQAMPQDDIRSVPGEQAEAIRCLSARRRQLVDLLVQEKTRLKMTRDQFVLESLRAVIASLKAERSRIETALAKAINEDEAIRHKSELLHSIPGIGTVVATVLITDLPELGFLNRHQAGSIVGLAPHPQRSGISVHGDHIGGGRACVRTALYMAAVSAIRCNPPFKAFYKKLIDAGKPRKVAIVAVARKLIVLANTIVKNDTPWKPHLALD

SEQ ID NO: 365760 - protein, 308 aa, unidentified
MSCKSESGPIGQCASDHSRATLYVSLELSPSKWLVTSLVSGTDKLSKHLVPGGDCGALLQLLAALKAKAEKQSGMAVVVATIQEAGLDGFSLHRLLEANGAESWIVDPSSVAAPRRARRAKSDAIDGETLLRTLLAYRRGEPRVCSMVHPTSPHDEDRRRLTRERRTLMRERIEHTNRIKGLLMSQGISGYDPLRKNCLVRLDELTTRDGHRLPPRLRAEIGREIDRLELLARQLKQVEAERDALISQVADVADSPAAQLMRLKGIGVETATLLWLEGLFRTFANRRQLAAYAGLAPTPWLSGRIRRE

SEQ ID NO: 365761 - protein, 388 aa, unidentified
MQIITDRPQALTAIRTDLGAIFISLELSRSTWLITSLSPGGGEKMSKHAVRSGDVAGLWARFSQLKDKVQVRTGQVVPIIVIQEAGLDGFWIHRLLQDEGVESHVVDPASIATSRRRRRAKTDKIDGEALVRALLAYKRGEPRVCAMVRAPTPQEEDRRRICRERKTLTAERVEHVNRIKGLLFAQGISDYEPLRRKRRERLEALRTGDGRLLPEHLKAQIGRELDRLELTLQQIKSVETERDAMLSPSDEGTPAPGAMLKNLKGIGSEFAGVLWAEGLFRSFSNRRQVAAYAGLAPTPWRSGSVAHEQGVSKAGNPRLRTTMIQLAWLWVRHQPRSILTLWFHQRVQLNGGRVRKVLIVALARKLLIAFWKYVNAGVVLEGAETTAA

SEQ ID NO: 365762 - protein, 400 aa, unidentified
MNPVIGLDVSKGESQIQAFLDKGKPYGKSFSVPHTTEGLNTLLHFLKVVENEADMKPSVILESTGHYHTPVIQFLEEQNYLYIMVNPLLSYQAKKSSLRKVKTDEIDAFRLCELYYKEELEPYKKRGIQLLNLRNLTRQHETLTGLYVQAKLQFHSILDQVFPEYKGVFGDLYSKVSLNTLLEFSTSESVIQAGESKVTDKIASLCMSRSERWAQERAKKLYEAAQRNPFKSTFYQSHLISLEMYIQLLLQYQEHLAKLDDQIDALAGEIEEYKIIQSIPGIGEKIAATIISEIGEIERFNHPKKLVAFSGIDPSVHSSGKFTATINRITKRGSSRLRHALYMAVLCGIRSSRNKKLKEFYDRKREEGKPFKVAMIACVNKLIHWIYALLKRREDFLDLV

SEQ ID NO: 365763 - protein, 402 aa, unidentified
MNCVGIDVSKGKSMIAVMRPFGEVVISPFEVLHTDSELSKLAGLLKSLDGETRVVIESTGNYHAPVAWLLHDAGLYVSVVNAMLVHDYGNNSLRRAKTDKKDAVKLANYGLDHWLTLPRYVPEEDTRLMLKTCYRQYQQYSKVQTMLKNNLISLLDTAFPDANRLFTSPPRADGSEKWVDFVAAFWHCECVCGLSEKAFTAKYQKWCKKHGYNFSKDKALDIYASSCGHFGVMPKTDTAKLLVEQAVSQLRATSAALAALKQEMQSLAASLPEYPVVMEMFGVGPTLGPQLMAEIGDVRRFHSKKALVAFAGIDAPPYQSGQMDVRSRSISKRGSASLRRTLFLVMGVILQHAPMNEPVYQFMNKKRSEGKPYRVYMIASANKFLRIYYASVKAYLDSLEHD

SEQ ID NO: 365764 - protein, 317 aa, unidentified
MNKTITIVAGIDVAKAKLDVAIHGCKLRWQVTNDSAGFHKLASLLRSRKVTRVGLEATGGYERDVVEYLRKAGFNVVVLQPRQVRAFAEFILCRAKSDRIDAGLIAACVAHHQIERETPDPRMAAFADQLTFIEQTEEDIVRIKVRLEHTRDPKLCRVMLADIERLKTRRAKMIAKLVAALRTHQDLARRLDLVGSIDGIGPRTALAFIIRMPELGRLSREQAAALAGLAPFVHDSGDRKGERHIAGGRERLRKSVYSAALPAAFRWNTQLIALYKRLTEAGKPHKLALVACARKLVIFANTVLARGTEWTPHPATS

SEQ ID NO: 365765 - protein, 314 aa, unidentified
MAMHATRPVIGIDTAKEELVIQHDDEKRHLAVDNTPAAIRQWLAGLPKGCDIAIEATSTYHMEITERAHAKGHHVYVVDGYRLKNYREGVGGRAKTDLTDAQLLARYLRKEKDELRRWTPPPKAYRTLQSLLRRRAALVKARTALRQSLSAEPLLKTALATLLKQIDRIDHLIQKRLREAVHAAGLRDQVQRCQAVDGIGELTATALVMAFLRGDFQNSDAFVAFLGLDVRVRDSGKLRGKRRLTKQGDTEVRRLLHCSAMSGARHPTWKAFYQRYRDRGLKTTQALVILARKLARVAFALMKHQETYCPARLS

SEQ ID NO: 365766 - protein, 325 aa, unidentified
MIKTMQSNNAVIYAGVDVAKATIQLHLQGQQSEFHNTPKGLHQLCAQLQKVARVHVVCEATGGYERALVKALQQRQIPVSVTNPARVRAAAQAQGQRAKTDQIDAQGLTDYGQRYQPEPTPPTSATQDQLVALTQWLQQLIHGRALAKTQAEHHQDPFVRRQHAKLMTHLQSQIEAVEKQIKALLQQDAALQQRVNCLDEIQGVGPRTAWMVLAHMPELGRLNRQEVAALAGLAPWTRESGSMKGLRCIGGGRPEVRLALYMAALSAARCNPVLRALYKRLRAKGKLPKVALTAVMRRLMTYMNHCIKALPSETATANAEELKAA

SEQ ID NO: 365767 - protein, 340 aa, unidentified
MHTTIIGLDIAKSVFQLHAEDASGKVLWKKRLRREELEPFLRKLPPGLIGMEACGSAHHWGRVISADGHEVRLMHAKYVKAYVKRGKSDVRDAEAICEAVQRPNMRFVPIKSVEQQIDRSLERARDLLVKQRTQLMNATRGLLAEFGVIARVGLRGFKMLSDKVDAGDAAIPKPLLTAVKPLLEQWRGLHASIDELEERLVKRARSDERMRRLMKIPGVGPFTAHALVTAIGDPRRFSTGRDFAAWAGLTPLTDSSAEKTRIGHISRQGDHSLRRLLVLGAANMARHAKAKPSEARAWLLGIIGRRPVKVAMVAQAAKTARIAWALLRSGENYRGSMVAA

SEQ ID NO: 365768 - protein, 402 aa, unidentified
MQEPSVDRGYAVFLGLDVGKGEHHATAIDPDGHRLHDRPLPQDEHALRALFEQLSGHGPVLVVVDQPASIGALPVAVARDVGVDVAYLPGLAMRRIADLHPGNAKTDARDAYVIAEAARTLPHALRRVDTGDEALADLDVIVGFDDDLAAEVTRVTNRIHGLLTQIHPALERAIGGKLHHKAILELLHRYGGPTGLRTAGKKRIANVVRPRAPRSHHAIVEAVMAALDEQSVTVPGTRAAELVLPQLADQLTSLLAQREQAATQVEEMLDAHPLAAVLTSMPGIGVRTGARILLEVGDGTTFPTPGHLAAYAGLAPVTRRSGSSIRGEHPSRGGNKNLKRAMFLSAFAALSDPTSRAYYDRKRTQGKKHNAALICLARRRCDVIYAMLRDGTPYQPRPTSAA

SEQ ID NO: 365769 - protein, 341 aa, unidentified
MNEVTTIGLDLAKNVFQIHGVDASGRIVVRRQLRRSQVLPFFEKQAPCLVGIEACATSHHWARQIAKFGHEVRLMPARYVKPYVKRNKNDAAEAEAICEAVTRPTMRFVEVKTEEQQSVLMLHRTRQLFVRQRTTLINAIRAHMAEFGIVAGIGRNGVERLLRLIDEGSDGRVPAVARECLQALRAQLVLVKRQILEADRRILAWHRSNELSRRLETIPGVGPLIALVASIPDPHAFGSARDVPAWIGLVPKQNSTGGKARLGSISKAGNRYLRSMLVVGALSVIRRAKQVGYTRRAWLAELMARRPTKIAAIALANKIARIAWALMVSGTRYREPAPQAI

SEQ ID NO: 365770 - protein, 345 aa, unidentified
MDLGDRYSYYCVLDGDGQVVEEGRVGTTREGLRRQLGKWPGVRIALEVGTHSPWASRLLGELGHEVLVADPRRLRMIYQSRSKQDRLDARSLARVLRMDAALLSGVEHRPERMAQDLSVLRARDLLVRTRTKLVNHVRGGVKATGSRLRRCSTRRFVEEAPEQMPAVIQEALKPVLSAIEAVSEQIHRLDLRVEELCQKSYPETTVLRQVPGVGPKVALSYVLVLQNPGRFGKGRAVGAYLGMVPARRQSGESDPQLRITKEGDGYVRRMLVQAAQYQLGPFGPDCDLKRFGKRLAERGGKNARKRAVVAVARKLAVLLHRLWRTGEVYEPFRQPVRSPGIAPAA

SEQ ID NO: 365771 - protein, 419 aa, unidentified
MSRKYKKKGNKINPKTLLVTVDIGKKRNQGYFYCQARPEEKTFSFPNTGKGYGYLWGKMLGFKHKNGLEDIVLGIESTSNYGHPLLHYMNNRGVLLVQVNPKHGKRVKELVDNTPNKTDKKDPRVIATLVLLGTGLTVVVPQGVCAHLRHLSHARERVYTRLHSLYSQLHELVFIIFPELLTVMRSVERKSTQYLLRNYPLPEDIVRCGLADLTTMLRKQSRGQLGRERAEELYEAAQYSGGIKEGSASILYEIGIILGYIHSVQEDIRELENKLSDYLHQMPYSKFLLSVKGIGEVTAAILLGEYADLKAFRSASEAEKFAGLNLYEVSSGRHKGTKRISKVGRSLLRKGLYFAALNTVRSGGVMHTTYQGYLSRHMKKNKALIAVARKLVRLVFALVRDEREYHPEYERFYRNREAA

SEQ ID NO: 365772 - protein, 421 aa, unidentified
MKKAETGKIKFIKEDTLIVAVDIGMEMNHGYCTTPDGRDIKPFKFENTREGMDKFWDMVAASKNRFKCNEVIVGYESTGPYGEPFLHYLVKKDVKMVQVNPMHTKRVKEISDNSPLKTDDKDPRVIADIIKLGRALSIVIPEGDAAYLRRLNNSRERHVRERTALLNQLQQLVFLLFPEFKKVFKNIKCMTPLYILKTYPTPEAISVLDKDDLGEEMRKQSRGKFREQHAEMLISFAKNTVGIKEGVLGLSMDIRHILTQLEMLNTLIAEIENEMEIALERIPYSSKLLSIKGLGVVSVAGIIGEVGDFKKFQTRGEIMKLAGLDLYEISSGKWKGQRRISKRGRSLLRKILYYVSIQTIRKNGIMHDYYTRLTDGGMKRMKALVAVSRKLLGIIYAIVRDDSEYLVNFESIKRQVIKKAA

SEQ ID NO: 365773 - protein, 421 aa, unidentified
MRTHRDDDFTVFVGLDWADAKHDVCLQSADSDAYEFGTFAHQPDAIDAWARALHQRFGGRIAIALELTKGPVVYALQKYDFIVLFPIDASLLATYRKAFKPSRAKDDPTDAQLALELMRRYPRRFTPLKPQSVTMRTLSFLVEQRRLLVDDKKRLVNRLGHTLKQYYPQLLDWFEQHDTVVFLDFLRRWPTLKQAQRARKTTLEAFFRAHNVRFATVIADRVQAIHAAMPLTEDPAVIITHQLLAEALVEQLQVTLRAIDRFDQAIAVLAPTLPDYALFDALPGSGPILTPRLLTAFGDQRERFATAEQLQQYSGVAPVTERSGKKSWVHWRWQCPTFVRQTFVEWAAQTINKSFWAGAFYRQQRAKGSPHQVAVRALAFKWIRILHRCWLSHTPYDESRYLKALQRRGSPLLAGLASSDS

SEQ ID NO: 365774 - protein, 340 aa, unidentified
MTYYAGIDVSLEASCVCVVDATGKVVREGKVASEPDALIAWFRLLGVELARIGLEAGPLSQWLYAAMQQAGLAVELLETRHVRTAFKIMPVKTDRKDAHGIAELMRLGWFRPVHCKSMEAQETRAMLTARKLVQKELLETESSLRGILRGFGLKVGKTKPMQLEGRIKELVAGHPSLEIVASALLSVRAALRRELDGFEKRLRAVARTDTRTRLLMTTPGVGVIVALTYVCAIDDPSRFKSSKTVGAHFGMTPKRYQSGETDRSGRISKNGDSSVRAMLYEAAHVILTKPVKGCAALKSWAMRILKRAGKKKATVALARKLAVIMHRMLADGTPFTTQPA

SEQ ID NO: 365775 - protein, 340 aa, unidentified
MKKVSTIGLDLAKNVFQAHGADASGAVIFRKKLRRAQVLEFFATQPACAVAMEACGGSHFWGREIGNYGHRVRLIPPAYVKPFVKRQKNDAADAEAICEAAQRPTMRFVAVKSEAAQGAAVVFRTRDMLVRQRTRIINALRGHLAEFGLIVAQGPAHVAKLIMAVQDPKQPLPEAARPILCVLVDMLGLLDQRIKLLDIAIARRAKEDEVARRLMSIPGVGPVIATAVAALAPPAETFKRGRDFAAWLGLTPLQHSTGGKQRLGATSKMGERTLRRLLIIGASSVVRWAARKGAPAGSWLASMIARKPAMLVRVALANKMARVIWALMAKGGTYRAPVVA

SEQ ID NO: 365776 - protein, 402 aa, unidentified
MAVMIGVDPHKGSHTAVAIGADEEPLGKLRVRAGAAQAEKLVAWAAAWPERTWAVEGAGGLGHLLAQQLVAAGERVLDVQPKLAARVRLLEAGDTNKNDPNDALSVAIAALRSRAQRPVVAEDHAAVLKVWSKRHRDLARARNQVACRLHAVLCELVPGGFRKEISAGQASRMLEQVTPSGAVAQARCELAGQFLDDLRNLDAQLRETKKKLAAAVRASGTTLTEIFGVGPVIAGTVIGDAGDVSRFASRDHFAACNGTAPIEVSSGGRKTYRLSLRGNRRVNHAIHMAAITQIRNRHSDGRAYYDRKIAGGKTHKEALRSLKRRVSNAIYARLRADARQAAAASTMGPGGQPGNDSDSSAAGLHPGHRLFGPATPGPATSLRPAIQRKGALPSKPRSKNTR

SEQ ID NO: 365777 - protein, 445 aa, unidentified
MGQRTVGIDLAIRGDHVARILDDGRPQAKPIRFRLTSDSLSQLVVRLRDGLPAGSTTTAVMEPTGMSWFPVARWLEQAGIKVIRVKGQRVRALRRYLSEHAKTDATDAHVLGAIPLFGGVPADPVYVPDADRHALQRLTRQRERLEDEVCAIKRRLIDLVRWACPAIEAALPDFRTNLSLAILHDLLDPAVVVKAKRTTLCRFVAKHASGNHPHSGPFVDSLVTRLKAAAQETRRLHGTAVSFEHLQLEVALEIDRMRLLERQLGELVRQIEALYSQLHPSDALRTIPGIGDALAPLVLGVLHEARRFAGLHQLRGFCGLFPHTSSSGGADRPGQAITQSGNNRIKRALYLAADAARRVDPGLAEVYWRLMVRKGHHHKQALCAVATRLVNRIGKVLRTGEAYELRDSDGKPISAAEGRAIVAERFSIPAEIRNARRRHRAESLA

SEQ ID NO: 365778 - protein, 339 aa, unidentified
MREFIRIGVDVSKGFFQVHAIEGEGSSAVRRKLSRAKFLSFFAGIAPTRIGIEACGSAHHWARELRALGHEVVLMAPAYVKPYLKRGKTDANDAAAICEAMSRPDMRFVPVKSADQQAVLMLHKTRALMIKQRTMAVNALRGHLSEFGLIAARGIHRIKDLLALAETDERLPEAAREATAMLAAEIQGLDGRIDGLEAKIAAASSPMIRHLDEIPAFGPLIASAMAAFNPDPRAFRSGSDFSASLGLTPSQHSSGGKEKLGHITKAGNRYLRTMLVVGCTSVLRVAHKYKGALAEWIVAMRARKPERVVAVALANKLARIAWAMMATGEAFRKELYFKA

SEQ ID NO: 365779 - protein, 393 aa, unidentified
MVVSVGIDVSKNKHDCFIVSSEGEVLADVFTIPNNMDGFYALLEKIRACTTPQDKIKVGLEATGHYSYNILGFLLDNGLATYVLNPLRTNLYRKSLSLRKTKTDRVDARTIAAMLLSDVGLKPYTNTAYHNEELKSLTRYRFDKVKERAKLKSSISRLVCILFPELEKLVSSLHLATVYALLEEFPGSKQIAKAHLTRLKTLLGNASKGRYGRDMAVTIRSAAQNSVGSCMPAKSLELQHTIRLIRELDAEITEIEAEIETMMDKIQSPITTIPGMGFRMAAMILAEIGDFSRFESPDKLLAYAGMSPSTYQSGQLKNCYPHMEKRGSRYLRYALYNAAKYVCHWDPTFAAYLAKKRDEGKHYNVALSHATKKLVRLLFALERSRQPYCSLAA

SEQ ID NO: 365780 - protein, 313 aa, unidentified
MSDEGLVVGIDVAKGWLDVAVLETGESFRVDNDAEGWASLIKRLSGRQVRAVGIEPSGGYERGAKKALRKAGLSVRNVNPHKLRHYARALGRWAKNDRIDACMIARFTSQLPTRAMSCDPLIEQLAELVNARRQLSDDKVGLVNQLEQVREPAVRRIFARRLRAIEADILLIGKRLADVVASHGRLAGLDRLIQSFHSAGPVLSHTLLALAPEIGQASRREITALVGLAPYDHDTGVFKGRRRIWGGRAEVRRVLYMAALTASRCNPVLKIFYQRLRAAGKAPKVALIAVARKILTTLSAMLRNNQEWNPQHP

SEQ ID NO: 365781 - protein, 357 aa, unidentified
MKKSTTQTQRIVVGLDLGDRYSHFCILDPEGQVIEEGRIATKKEALRRKFEGTEPMLVVFEVGTHSPWVDRLLQSLRHETIVANAGKVALIYRNERKHDRKDAHSLAELGQFKPRLLHPIRHRSEETQAVRALVRSRDVLVKSRTAFINHCRGVVKASGNRLPRCSAESFARKVATGIPEELRGGLGPVLEFIEKLNLQIRAYDRKIERICEEQFPITEVLRQVSGVGPLTALWYVLTIEDPTRFEQSRNVGPFLGLVPRLDQSGEQDPQRRITKAGDELMRRLLVGSANYILGPFGPDCDLRQWGQRIAARGGKNAKKRAAVAVARKLSVLLHHLWITGEVYEPFMRGTEKLEAAA

SEQ ID NO: 365782 - protein, 350 aa, unidentified
MNILAMDLGKNNTVICNYDSETGKHKFTKVKTLPQEIHDMLVENAPERVVFEIGALTGWVYDIASALKFEVQVANTSHQAWRWKNIKKKNDRTDALKLAQLSAMNQLSMVHIPRPEIRQKRALIQYRQSLIKRRTQIKNNIRSILERQGCHKILPSGKNGWSKNSVEMLNKMSIDFSLCDMDQLWKGELNLELRQLEAIEKCVDETERRLDTLAECDENIKILRTVKGVGARLAEAIAAFVDEPERFETGKQVGSYIGLTPRQYQSGQMDHQGRISGAGNKVLRSLLVEVCWLGLRHNKWMNETYHRILRGSKSRKKIAITAVARKLLVRCWAMMRDRKNWCDVEVKKVA

SEQ ID NO: 365783 - protein, 359 aa, unidentified
MLNNSTTFLGLDLGDKYSHLAILDPHGDLIEETRIPTSKASFQRKFSGLPPARVAMEVGTHSRWASHLLEELGHEVLVANARKLRAIYSNPRKGDRADAEILARLARIDPALLSPIHHRSPKAQADLAVIRSRDALVRSRTLLINHVRGIVKSFGDRLPSCSANYFANKVASDIPEPLQPALMPVLESIASLTQQIRAYDRQIKSLCENKYPETKLLRNVSGVGPLTALAFVLTLEDPSRFAKSREVGPALGLVPRRDQSGDRDPQLPITKTGNIFLRRLLVGSAHYVLGPFGPDCDLRRWGLKLAERGGKNAKNRAVVGVARKLAVLLHYLWKTGEIYDPSYLAKKYDQAPQAIPAAA

SEQ ID NO: 365784 - protein, 411 aa, unidentified
MDVLIERCAGLDVHRDTVVATVRRPGPGGTRRSETRTFATTTGRLEQLSDWLAAEKVTLVGMESTGVYWKPVYYVLEDHFPVWVINAEHLRNVPGRKTDVADSMWIAQLLEHGLVSPSFVPPRNVRLLRDLTRHGRRLTEERTRTIQRLEKVLQDAGIKLTSVSSTILNKTGRAILAALLAGEEDPAVLAELAKGKLRPKIPALREALTHRFRLEHHGLLVAQMLAHVDFLESSIGDTYGQVEVLLRPVVDVVELVMTIPGVGRRVAEVLIAEVGLDMTAFPTAAHLASWAGICPGNNASGGKRRAGRTRHGSMWLRIALTEAAQAAARTRGTYLAAHHAQIRGRRGTQKAIGATRHDILIAYYHIVRDKVPYQDLGPEWNTRRHTTEQQTRRLVRQLERLGLNVTIEPTA

SEQ ID NO: 365785 - protein, 341 aa, unidentified
MSEVSIIGIDLAKRVFQLHGTCANGAVIFRKKLTRVQLLAFMSKQPECTVAMEACATAHCWGREIEKLGHTVRLIAPNYVKPFVKRQKNDVADAEAIVEAVSRPTMRFVELKSEAQQARAMLFRTRQMFIGQRTQTINALRGHLAEHGVVAPKGAIHVKRLADAVEDETIGLLEDVRELAQVYLAQIEGLNVQVAALDQRMKGAAKEAEAARRAQTMPGVGPITALAIETFAPGLNCFRRGRDFAAWLGLVPKQNSTGGKPRLGKTSKMGQRDIRRLLISGAMAVLQAVERFGTPHNTWLIAMLERKPRMLVAVALANKMARSLWAMVTKQEDYRTPAAMA

SEQ ID NO: 365786 - protein, 333 aa, unidentified
MLAELIDAVVGVDTHRDTHQVEIAYPTGAPIATTAISNDSTGYAELLAWIFDHTPGPRLAVSIEGTRSYGVGLARAVAAAGLLVIECEQPNRKARRGRGKSDPIDAHLAVLTALRCDTERLPTPRADGDREALRILLAARHDLTNANTAQTNRLRALLLGGDDTDRQTARGALTDTVLATLIRRRSPRDGNRAQAVRHGEVRRLAIAVRDNGRELQANRAQLQATVDDLAPGLTDRRGIGPVSAAQAIVSFSHPGRCRSDAAFAALAGTSPLEASSGQTVRHRLNRGGDRNLNHAVHTIALTRMRCCERTRTYVARRTAEGKTTREIRRCLKR

SEQ ID NO: 365787 - protein, 341 aa, unidentified
MSIVGAFDVHRRQLTFEYLDTVTGELKRGRVMPADRPHLRAWLSRFAGLEDVQFALEGCTGWRYVVEELHAAGITPHLAEPADTAALRGKKRHAKTDKTDTRHLRVHLMAGDLPECWIPPEQVLEARATARLYKDLVDERGGWHHRVAATLFHQGVPAAVSVARPEGRAAAEQAFLSPAGRQAIQTGLRQIDRLTAELEPLRRQLDMLSRRQPGCAALRTAHFGIGAVTSVAIWAELGDVRRFGNSDDVVRHTGLDITVYSSDGKRSAGHLSRQGPPLLRWALYEAAKCAARPAAPDYGYYTAARDDRGGGRATLPVARKLARRCYHTLRELGEDALAPAA

SEQ ID NO: 365788 - protein, 424 aa, unidentified
MKVTYQTCCGVDVHKSFLVATIVKTTGGIEPSYQKKRFSTFNNSILEFKQWLLDNDCHDVCMESTGKYWIPVFNLLEDEINVVIANPKWVKAVKGNKDDAKDSKWIGDLFRLGLVKGSYIPCKKVRILREYTRYRYKLVSCRSSEKNRYQNALTVCNVALDSVVSDIFGKSSTSIIDYLLEQSGTSINHEEIASKLLRSLKSKEDAVIESVEGYQMTDAQKYRMRLVRAHMDYITAEINDVDKMIENMISSNPDFENAVRFLCTIPGVKHDSAITIISEIGTDMSQFSSSKRLCCWAGLTPDSNESAGKKKSVRITRAGVYLKPALVQCAHAAVKSDKSPYYKKKYDSLVKRRGKKRAIIAIARMILTAIYQMLSTGEQWNPSDLYKIDMPAPLLEKQKAKAIKQAKKLLQREGLLPPDEPLAS

SEQ ID NO: 365789 - protein, 343 aa, unidentified
MKDVSTIGLDIAKSVFQVHGVDEAGAVVIAKRLRRSQVIPFFRRLAPCLIGMEACASSHHWARELGALGHEVRIMPAGYVKPYVKRSKNDAADAAAICEAVTRPTMRFVAVKSREQQSLLMLHRSRSLLIRQRTMLVNAIRAHLAELGIVAPVGLRGLRALLVVISDPEDERLPPLARCCLESLAAALMSVEQEIASAERQILVWHRSNEASRRLASIPGIGPIIATALIASVADPSIFRSGREMAAWIGLVPRQNSTGGKERLGRISKQGDKYLRWLLVAGAMAVIRHGRKTSFAARPWLADLAQRKPAKVAAVALANRIARTAWVLLARGGTYRQPRITAA

SEQ ID NO: 365790 - protein, 364 aa, unidentified
MNKCLHTELSSHEGTHSEFNPGKTVIKLGIDVHQEHYVVVVQEGGGNPKPAQRFKKEAFLCWVAQLKQKSGAEIHAVYEACGFGFGLQRQLTGLGIACYVVCPQKLDERNKRVKTDGLDAKALCLKLDRFVEGNREALALVRVPSEEEEQLRAIHRQREQLVKTRKRLEAQGRSLMVNHGMEPVQGWWKRRTFTALCAPEWMRGLLSNSQPILLEVEEKIRALTVKLQAAAAPGQPRGLGLMTSVVIDREVGDWKRFHNRRQVGSYTGLCSGEYSSGQTRLQTCVTKHGNPRLRAALVELAWRLVRFQPQYKPVVKWRRVLAKGAPATGAVRKKAIVAVARQLAVDLWRIRTGRLTAEQLGLNI

SEQ ID NO: 365791 - protein, 340 aa, unidentified
MTLVGVDLHTREQSVAVLDTETGEIQELRLRHEGDATERFYAALPPPVTVAIESTGYALWFHALMQRLGHTVVVGDAAKIRATVVRKTKTDRRDARHILRLLSEDRFPTIWVPDPRVRDLRALVAHRMRLVRVRTMLRNGVHAIALNYRLTLGRSLFTRYGLAQRHQLSLPAHTAHRRDESLELLAWLDARITALETTMAEVATADPEARRLMTHPGVGPVTALTTLLVLGPVDRFPTSKHVVSDIGLAPAIASSAGKHRLGGITKHGNRMLRHVLGQAGQTALRMDPDLKRLDGRIQHRRGTARAKVAVARTLLVRLHIMRRDQVDYAEFRRRGQITAA

SEQ ID NO: 365792 - protein, 427 aa, unidentified
MKEQSRTIVGIDWSADSHTCYDLQTDKSFKIKDSVEGYEKLLKNYPEAVFVIEEANNRIGDYLLINNREVYVLPPCRSKEARKYHFSSGTKSDGLDAKAIALTFKEHPSYCLKARYSKVGVKITKLVTAYNIVSKTHSQQCNRLYSLLLRYFPEYLHIMDKQYRSDTSLRILSVCPTITELKKVSNEKLKKILNKENYRMTSSLRNKLDRIRSEGISWEDTSCEGKLILLLVNTLLSLRKGLEVLKKEMEKTLKNSPYRIILSIPGVKAVIGSYIVKAYLTHDFKSYQEIQKYAGTAPLLFQSGRKSIMLMRKKCDNDLKGMIHMAAFASLKTCGWARNYYRRKRKEGKTYGHALRALGNILLKIAFSMLSKMKEYDETLFLNAKGIKTTQLNDTSFSETFPYPEYSQDAQLSLAATKDVVDNLIVT

SEQ ID NO: 365793 - protein, 326 aa, unidentified
MTLSHLTDNIFVGIDVGGAGLDVAWHRGDSAHYANRPDAIATLVERLRTGPEVMRIVLEPTGGYEKPLVKALRQARLPVEIIHTTRFNAYRALVGVKAKSDTSDARLLASYAAAPDEVRGRKAGHVELPEDAIREALSELASRRDQLKHMIHAETCRLCTVRMAELRQAITLHLEALHAEDKQVHRMMLDLVRQRIDLRRDQQLLKTIKGIGVKSALSLLASVPELGRIDNKAAAALIGVAPFVRKSGTMIAPARIHGGRAAVRSILYMAAVTASRHNPVLRPFYDRLIASGKPPKVALIAVLRRLVVFANAVLRSGQPWRGTCAT

SEQ ID NO: 365794 - protein, 316 aa, unidentified
MYLGIDVSKLTIDCCLISDGQNHQKKFSNNPKGFQQLTDWLNFHHAPSTLHCCCEATGTYYEALAQYLHHLYTVTVENPRKIKGYAIAELQRSKTDKQDAKLIAQYCQDRHHKLNPWQPPTVEQKQLQELARYLDHLKQQRATEKNKHHEAPDYIKPHIQTTIDNLNSQIKTVKKQLNQFYKSNPNYNTQRKRLKTITGIGEQAAAVLLAVYQRHNFKTSKQFTAYLGLDPKDHQSGTSVKGKSRISKIGNADIRKSLYMPALVAYRCNAFPDFVGRLKAKGKPIKLILVALMRKLAVIAFTLLANGQDFDKARYI

SEQ ID NO: 365795 - protein, 387 aa, unidentified
MPASGPRPGQVAIQISLAAIFVSLELSRSTWLITSLVPGGGDKMSKHSVSSGDIAGLLDHFTKLREKAHARAGASFPIIAIQEAGLDGFWVHRVLERAGIESHVVDAASILTSRRRRRAKTDRIDGEALLRTLLAYKRGEPRVCTVVRAPSPEEEDRRRLCRERKTLVAERVAHVNRIKGVLFAQGISGYEPLRNDRRSRLEALRTGDGRPLPPHLKAQIGRELDRLELLLEQLKAVEAERNALLEPANDAAPVAVQALAGLRGIGPEFTAMLWSECLFRSFRNRRQVAAYAGLAPTPWQSGSVQHEQGVSKSGNPRLRSTMVQLAWLWLRHQPTSGLSLWFRERVKRDSGRSKKTTIVALARKLLVALWKFSSSCVVIEGAMMKTA

SEQ ID NO: 365796 - protein, 360 aa, unidentified
MNYLGLDYHKKYSFATIITEDGEIKKKQRLLNRKESFKEYLNQYAEIVAVVEACWNWTVAVELLDGLVDEVKLANPLKVKAIAEARIKTDSIDSETLAYLLRADLIPEAYLRDKSNLQRQKVLRMRSFYIKLRTQVKNRVHVLIDGQGEEIRETAKGYSDLFGKGGLQWLGELRLKDPDEKMLRGLLETYELLCKQVKATDRHVKDIMDSDEDCALLKSIPGIGTFFAVLIKTEIGNIERFPSSSKLCSYAGIVPSTYASGGKVWHGKLTKQGNRWLRWAIVEAVIPAISSNGELRSYYERIRYKKGPKAAKVATARRLLAIVYRVLKEKDSFKLYKIELKRKAELPSGSPSAALAGTLN

SEQ ID NO: 365797 - protein, 326 aa, unidentified
MKTIESSQTFQHFVGVDVGKETLVAQHFATRQLIEFPNTSDGIANFLQGHAAWLKNGYFVVDTTGGWERPLIGDLIAAGVTGHRADGRRVKSFARSLGKMAKTDAIDASVLARYGHDRHAELFQCQLANESLFLLKNLVTRRGQLARYAKEERQRLSGPLPNKVRFLVEQNLDALCEQMTIIEQEISLCLENDTTLKRKAEILQSVPGVGPQTAAFLLAEMPELGQLNRKQIASIAGLAPHAYDSGKMSGRRTTYGGRRHVKAALFFAALNAARSKNNPLGDFYTRLVNAGKPKRCALIAVARKIITIINARLQNHHCIQPEFMSR

SEQ ID NO: 365798 - protein, 338 aa, unidentified
MKLYAGIDLHANNSVVVVIDEDDRIRYQKRVHNELGALLQALAPYQATLQGIVVESTYNWYWLVDGLMAAGYRVHLANTTAIEQYKGLKHTDDESDARWLAHLLRLGILPEGYIYPKEERAVRDLLRKRSQLVRQRTSNLLSIQNLLTRNTGSALSGNRIKQLTLEEVEQLLPQTELVLAVKSNLAVLQCLEEQIEQIEAVVLAQLKLRDGFQPLLTVSGIGQILGMTIMLETGEIGRFATVGDFASYCRCVSSQKLSNGKRKGQGNVKNGNKYLAWAFVEAANFAVRYNAQIKRFYQRKQAKTNGVVAIKTVAHKLARACYYILRDQVPFEVDKAFA

SEQ ID NO: 365799 - protein, 356 aa, unidentified
MSEGTWVGLDVHARKVVAGVLDAGSGELRSLRAPTVPVETVAWLRQFRAPVRVAYEAGPTGYGLARACAEAGIACTVAAPSKIPRASGDKVKTDRRDAERLARLLRLGELVSVRVPEPHEEAARDLVRAREDARGELMRARHRLSKLLLRHGLVYDSSAWTGAHDAWLRRQRFDSRPLALAFEESYAAVAQAKTRRDALDEAIAEPAGEPPFAEIVGRLCCLRGVGTLTAFALTVELGDWTRFRPQSLGAFLGLTPSEDSTGERRWLGAITKTGNTHARRLLVEAAWQQRRPLRESATLAKRRQGQPAAVRSRADQSARRLHQRWHALERRGKRRTIVAVAVARELAGHCWALATM

SEQ ID NO: 365800 - protein, 444 aa, unidentified
MVCSGMILIREVADAPVIMGISKPAGLKSPCGEVKIVNPLFVGIDVSSRSNVAYLMKPDGSKHSSFSVQNNLGGAKMLSERIVSALSSMRLSDVVIGLEATSIYGNNLVYALREDGSLSRFQRKIHVLNPKQVKKFKEAYPDLPKNDFVDAFVIADHLRFGRIAKEVYMDDYRYQALRTLTRARFDVIQNLTREKQRFANYLFLKCSGIAQEKDIQNTSATTIALMEHFETVDDLANTDLDELTDFIAQAGRGRFVDPDATARAVRAAAKGSYRLPKTVNDTVNQAMSVSIASMRALKEQVKVLDKAIEQQLEIIPNTLTSIPGIGKVYSAGIIAEIGDIHRFDSQASVAKFAGLVWTQYQSGEFEAEHSRMIKSGNRYLRYYLLEAANSVRRCDSEFRRYYDLKFKEVNKYQHKRALALTARKLVRLVFRLLKDNRLYIPPEG

SEQ ID NO: 365801 - protein, 389 aa, unidentified
MYYCGIDVAKKKHDAVILDSEGNIHGKPLTIANSASGFEELISRLQSLDHNVYVGLEATGHYWLALFEMLSNQGYKIVVLNPLQIAAYRRSGIRKVKNDRKDAWWIADYLRIANLPPTDRQLPVLLQLRELTRFRYAQMDQVGDLKRKVLSILDRVFPEYETIFTDIFIKSSRALLKEAVSAQEFANFDLSELTAILKSSSRGRFGLEKANHIQDLARQSIGIGFLTDAIYLEMQCLLEQLDLVLNHIQELENAIDEIMDQIPQFITSIPGVGKVTGSAILAEIGDVNRFESSEKLVAFAGIDPTVYETGQFIAKQTRMSKRGSPHLRYALWQAASMAIKYDPELKAYYQAKRAEGKHHGTALGAVCNKLVSRIFIILKEQRPYIIREV

SEQ ID NO: 365802 - protein, 363 aa, unidentified
MIIIGADYHPGFQQIAFVDTETGDCGEQRLQHREEAEKFYRDLAAQGMKVRVGMEASGHARWFERLLAELNIELWIGDAAEIRTKRVRKRKTDREDARLLLRLMLEDRFPQIWVASWENRDLRQLLWHRHRMVQARTRLMNQLQAVALNEGLRCKKKLWREHGREQLESFRLAPWASRRREDLLKLLDQLNPTIAELTQAIEQEAEKCPEARRLMTHPGVGALTALAFVLIIGRAERFQSGKQIACYLGLVPLEDSSGERRRLGHITKQGNALLRFLLVEAAQVTVRTIPQWRSKYFHLAMRRGRKIAKVAMARKLAVRLFWMMRQEWNYEQVQKFGSHVGQPENRHGVQENTELLTGASRSS

SEQ ID NO: 365803 - protein, 423 aa, unidentified
MMKLKYSICCGLDVHKNVIVATIVTTNKDGISEYIQKSFSTINSDIQRFHDWLIENNCYHVCMESTGKYWIPIFNYLENDIDVCLTHPKYVKAIKGKKTDKKDSKWIADLYKFDLVRCSFIPPKNFRQLREIARYRFKLVCMKSSEKNRIQNCMTVSNVGIASVLSDPFGKTATEIISYLLEHTADSMDEKAVRKLIKKGAKSKSDEIIEAIKGYTIETDQAKKLELARGHLEYLNDMITQTEVELYVRIKPYYEFVEFVSTMPGMTELSSTIVLAETGVDMNIFDDAKHLCSWCGLAPANNESAGKKKSVRIAKAGDYLKPMMVQCALAAIKSKKQPYFAIKYGRIKKRRGHKKAIIAIARMMMVCIYHMVSEKKPFTPTDYEELMNPQNHIERVVLNENNVFAYLESLGYDSSKLVKRNDN

SEQ ID NO: 365804 - protein, 320 aa, unidentified
MQSVCGIDVSKDRLDIMVLPERQYFSVGNDAVGWAELVERLRGLSISAIGLEACGGYERGAMRALLAAGMPARQVNPFKLRQFARASGVLAKNDPLDARMIASFVAIMPTQPAQPRAPAIERLAEMLAVRRQLSAEKVAAENASRLLEDTMLQRLSRRRIRRLAADIEMLDRHLAEIVGTDAALAHRYRLLTSMPGVGLVLACTLIALLPELGRMSRKQVAALVGVAPYAFESGKFKGRRCIWGGRAPVRNVLYMGAMSASNWNPVLKAFHDRLKAAGKLPKVVIVAIMRKMITALNAMVRDDVVWADHLSGRHSVPTAR

SEQ ID NO: 365805 - protein, 416 aa, unidentified
MRSTMITAVGIDISKSKSTVAVRRPGGEIIMRPFEIQHTNSDLKRLTAILKQLGGDIRVVMEHTGNYWRPVALTLKKAGFFVSVVNAMLIHDFSDNSIRKLKTDRADALKIANYALTFWDELPPFNDEEEIRLLLKTQSRMCERITTTATALRNGLIDLTDQTFAGINQAFDRAAKSAEGHEKWVDFFQHYWHRDCVCKFSLEAFTESYRRWCRQKNYKFRTDTAHKVYALAKECVATLPKCESTKVLITQACKSLNAVCEAKLASQHEMQRLASLLPEYDIVMGMEGAGPITGPALMAEIGDVRRFKNKKALVAFAGVDAPPFQSGTFESKSRHVSKRGSPHLRRTLFIISSVILQLSHEDNPVFCFMDKKRSEGKHFYVYMVAGAAKFLRIYYATVTGHFKASKYINSLPAIAG

SEQ ID NO: 365806 - protein, 350 aa, unidentified
MFVIGIDPHKSTHTATAVDSTTNKDLGSIRINASFDDYAQLMTWSKQWPDRIWAVENTSGLGHHFTQWLVGKGEAVVDIPSTATARVRELSRGGRRKNDRIDAAAAACVAFSQGDFRPVAPEGQTDVLRLLDERRIDLVKHNGRLVNQLHALLRELLPGGVERKFDTEDAATQLRRFQAANPADVMRKNIGLELVGDLRRVRFQIEELTTRIKSELAACGTRLPTIPGVGPITACRILARTSTPTRFASEAAFAAYIGTAPIEVAIADKQRHRLSRAGDRSLNSAIHVVAVTQARTPSSPGHEYYRRKIDDGKTPREAMRCLKRQVTKRIWRVMRDDHLDKLSALAAEPG

SEQ ID NO: 365807 - protein, 366 aa, unidentified
MENHTIVWVGMDTDARNNQVALYRGWEQSFKEWQAGMDAAGIRKLIERLKREPGEIRCVYEAGPCGYELYRKLRKAGIHCDVIAPSLTPRKPGDHVKTNRRDACKLARLYRAGELTVIDVPDEKQENLRDLTRAREDVREDLTRRQHRLKRFLARQGYHYQEGDSWTLKHWAWIRKIRFEDSNAQTVLEESIRAVEQSQEQLKTYDARIQENAQKPEYARKVQRYETLRGVGTITAMTVVAETWDMRRYGKAPQFMASTGLVSSEHSTGDHERRGKITKAGNAHLRRVLVEAAWHYRHRSNAGAKLKKRRKGQPEAVVSIAERADQRLNRKFRKMVDVHNKKPVIAAVAVARELAGFLWAIGQIQD

SEQ ID NO: 365808 - protein, 344 aa, unidentified
MGQYVGLDVSLEVTTVHVLDEQGKRVWHGTCVSHPTAIEATIRKHAPDAVRIGLETGPLTTWLWQALTDAGLPMVCLDARQAKAALNLRINKTDDTDAEGLAQLVRSGWYREVRVKSREAMLVRSLIGARTQLLDIVTELSNQIRGLMKTFGLVVPKGAGKVFEANVRRLLEDEAAVAAIVVPLLDSWRAVRTQTADLDRQLLSVVRENADCRRLMTIPGVGAIVAASFVTAVEAPENFTTSRAVGAWIGLTPRRYQSGEIDYDGHISRRGDARLRALLYEAATTMLTRVQGESELRRWGLALKKRLGFKRAAVAVARKLAVVMHAMWKKGTDFNPRAATSAGT

SEQ ID NO: 365809 - protein, 457 aa, unidentified
MEELFEECNDLEVVCQRCCGLDIHKKMVVACLIILTADGKRLKQIRTFRTVTQELLELLDWLKAAGCTHVGMEATGVYWKPIYNLLEGHFELVVANARHIKAVPGHKTDVNDAQWIASLLQHGLLKASFVPSTEQRELRELTRYRTTLVEERARIVNRLQKTLEDTNLKLGDVVSDITGKSAQAILRGLLAGETDPKVLANLARGRLKAKRAELEAALVGTIKPHHHFMLTEQLDHIDRLEKAIGRVGAEIEARMGPSLPPEPEQGPSDKPAEPEQGPSDKPAEQANKEPLSLAQAVVLLCSIPGISRRAAEGILAEIGTNMDRFQSAKHLASWAGMCPGNHESAGKRLSGKTNKGSPWLRKLLVEAALAAGRTKNTYLSAQYRRLAARRGKKRAAIAVGHTILVIIFHVLQDQKPYEELGGNFFDERERQALEMRLVQRLEKLGYDVSLEPVAPAA

SEQ ID NO: 365810 - protein, 321 aa, unidentified
MTTPATYIGIDVAKSSLDVGQRPEGTTFQASNDEAGIADLVERLRRVRPTLVVLEATGGIETPLVGALLAAELPTVVVNPRQVREFARATGRLAKTDAIDASVLAQFGEAVRPEPRPLPGEAGRELHALVMRRRQLVEMLTAEKQRLRTATRLVRRKLEKHISWLQQAIDELDRELDDFIKGSPAWRERDDLFRSTPGVGPVLSAVLVSDLPELGRLNRRQIAALVGVAPLNRDSGQFRGRRHVWGGRSRVRTALYMGTLVATRHNPTIHSFYERLVAAGKPKKVALTACMRKLLTMLNAMARTSNHWQIMPSNPARQDSC

SEQ ID NO: 365811 - protein, 314 aa, unidentified
MSHYQNFIGIDIGKFTFVVAMHSNKLSKEYENNAKGIRTFLKDSKSHLQSSLVVLETTGGYEMELLLALCDKNFRVHRANTRKVKSFIRSFGNTAKTDSLDAKALALYGFERHDRLKLFTPVSKQQSTLYALVQRRKDLKQFLVAEKNRVKAPEASVVKNSCEFMIETLTDQITQITKQIEALINSDPTFLARAQVLKTIPGIGEITAQDLLALIPELGTLTRKQVASLAGVAPRANDSGKFHGYRHTGRGRDSIKPTLFLAAMAARNSHSHLKTFYDNLISRGKQKMVALTALMRKIIVIANAKLKPLATQTT

SEQ ID NO: 365812 - protein, 367 aa, unidentified
MSETIKYIGLDVHKNSIAIAVADYKRNSEVRYYGQVENNMDQLNKVLRKLVSDGSELSCVYEAGPCGYYLYRYLTNNGIDCSVIAPSKIPRKSGDRIKTDRRDAMTLARLHRARELTPVYVPSLEDEALRDLVRGREDAQKALRKSKQQLGAFLLRHYIIYSGKTLWSSAHFNWLADISMEHRAQQVTLQEYIDTVKDNAKRVDRLTTQIRDLSEQSQLSPLIKALQAMRGISLIVAATVVAELGDLRRFANPAQMMAYLGLVPSEHSSGEKTKRGAITKTGNGHVRKALIEAAQAYRLPARKSRVILKRQENLSKDVCRIAWKAQLRLCGRYWQLTAKGKKTNVVKTAIAREIAGFAWAIAQEVTL

SEQ ID NO: 365813 - protein, 382 aa, unidentified
MTQTASHRKFTAVPQQLCVALELGWSTWRLAFGSGVGERSWQVTIPARDVAALRQAIAKAKLRLGLPESCRVFSCYEAGRDGFWIHRLLEQLSVHNLVVDSSSIEVDRRARRAKTDRLDAAKLLSMLMRYHGGEEGLWSVVHVPTPRQEDARHLQRQIRTLKKEQTRLINRAKGLLASQGVALKSSRGGVLTSLEDIRIWDGSPLPQGLRLRLESEVRRHSFLHRQLLDLESRRDARIREAGDRAAEITRRLMRLRGIAEVGAEVFAREFSWRRFRNRRQVGSLAGLTPSPYQSGDSCREAGISRAGNRHVRGIAIDLAWIWLRQQPRSQLTRWYNRRFASGSPRLRKIGIIALARKLLIALWRYADFGEIPNGALLKSHNA

SEQ ID NO: 365814 - protein, 408 aa, unidentified
MNAVGIDVSKGKSMVAALRPMGEVALLPQEFLHTEVGLEQMAYAIIALGEDTRVIMEATGRYHEPVAAALHEYGIYVCVLNPLFIKQSGGGSIRKVKTDKADAMKIAKYGLDNWVDLREYTPMDTVRQQLKLCSRQYNLYMKTVVSLQNNLISLTDKTFPGVNELFSSPERADGHQKWVDFVMTFWHCDCVCRVSEKAFTERYQKWCKRKGYHFSAEKALDVYAGSCGHFTTLPKNDNTKLLITTAAQQLLAGKMTLAALRTEMTRLAKQLPEYDIVRAMYGVGETTAAQLMAEIGDVRRFPRRSSIVGFAGVDPAVDQSGKHSAKSVPTTKRGSPHLRKTLYQIVCTYLKRSPVDEPVYQFLDKKRSEGKPYFVYMTAAQNKFLRIYYARVKECLEAFDARQSLAQS

SEQ ID NO: 365815 - protein, 388 aa, unidentified
MSFTIDPGVRTETTIRPDHATVFVSLELSRSKWLITALLPCSDKMSKYCVDSGDGTALLDRLARLRARAEPRIGTAVHMVVIQEAGLDGFWIHRLLESNGMESHVVEPASIAVPRRCRRAKTDVIDGEMLVRTLIAFKRGERRVCSMVVAPSPAEEDRRRVSRERRTLIRERIEHANRIKGLLATQGIVGLEPMRKDFRDRVEGLQTGEGQPLRPHLKAEIIRELDRIDLVVRQVGVVEAERDALVKSDNIDTTAPAALLMKLRGIGPEFAAVLWLEGLFRNFANRRQLAAYAGLAPSPWKSGSIDREQGISKSGNPRLRTTMVELAWLWLRYQPGSALSAWFRERAGSERGRSRRIMIVALARKLLVALWRYTTLGELPKGAALKLA

SEQ ID NO: 365816 - protein, 368 aa, unidentified
MAKRSTFVGLDVHKESIAVAIAESGRFGEVRAYGTVGGELEALEKVLRVLRAPGRTLHFVYEAGPCGFTIFRHLRQLGEDCAVVSPSMTPKRAGDRVKTDRRDAMTLARLHRAGELRAIYVPNENDEALRDLVRAREDAVEVTREAKQRLKAFVLRHGLRYRGRAGWTIPYRRWLAGLTMSEPAPQMALQEYLATVDEAEQRVTRLTEQLRQLVPAWRWAPVVTALQALRGVSFITATGLVAEIGDIRRFAHAPELMAYLGLVPSERSSGPLTRRGRITKAGNPHARRLLAEAAWAYRSIPRIGRVMQQRQDQVSAPVRALAWKAQLRLCGRFRRLSMRGKPRVVIATAIARELTGFVWAVAREVPAP

SEQ ID NO: 365817 - protein, 402 aa, unidentified
MNAVGIDVSKSKSMVAIMRPFGEIVSTPFEIKHTASDIRSLVELINSVEGESRIVMEHTGRYYEVLAHQLSEANLFVSAINPKLIKDFDNDSLRKVKSDKADAVKIARYALDKWQNLKQYNVMDELRNQLKTMNRQFGFYMKHKTAMKNNLIGILDQTYPGVNTYFDSPARSDGSQKWVDFASTYWHVDCVRKMSLNAFIDHYQNWCKRKKYTFSQSKAEEIYGKAKELVPVLPKDAITKLIIKQAVDQLNSASTTVESLRTLMNETASKLPEYPVVMAMKGVGTSLGSQLMAEIGDVSRFTHKSAITAFAGVDPGVNESGSYEQKSVPTSKRGSSDLRKTLFQVMDVLIKTHPQDDPVYQFLDKKRAQGKPYYVYMTAGANKFLRIYYGRVKEYLSSLPES

SEQ ID NO: 365818 - protein, 326 aa, unidentified
MDDPLYYIGIDVAKHKFDVAVKLPNGKYKHKVFCNHHQGFDEFICWLNAFDGRFCAVMEATNIYHEALADCLVAQNIMVSIINPKCSASFAKSDNLRSKTDKIDAKLLADYACEKGHKLVCYQPMLPAQRQLLRKSRQLDHLKDKLAQEKVRLSMLIDEDCIAYTKAMIDFIKGQIKALQQSIRQCVASDDTLKQNVSLLLSIPAIGFDSAVKLICYLGDGSRFKNAKAAAFAGLTPMIKSSGSSLHQVMGISKIGQADIRKALYCPAMNFAFGRYKDGAYRLFVDRLNSQGKAKKVVITALMRKLVSIAQAVLQTQTPFKLELHR

SEQ ID NO: 365819 - protein, 345 aa, unidentified
MTEAYDGRQVVGMDLHRRRSVLVRMTMDGRKLETARIANSPGALRAVIARAGQNPQVVVEATYGWYWAADVLEQAGAEVHLAHPLGVKAFSYRRVKNDERDCADLADLLRMGRLPEAWIAPPPVRALREVTRYRHKLVGQRTSCKDQVHAVLAKCGIPVACSDIFGRGGGIWLDGLPLPAPYAGKIASLRALIGVLDSEIARLEDQAAAMLAGERGYAAIRALPGIGPVLGAVIVAEIGDITRFRTPGQLACWAGLTPRHHESDTKVIRGHVSKQGSRMLRWAVTEAIQHQPAGTRPQRVKEAIIARRGEQARSIAKTAAARQLLTLVYYAMRDGHVRRATTAAA

SEQ ID NO: 365820 - protein, 349 aa, unidentified
MRFYTKTHTHYCGIDLHAKTMYLCILDKDGQVLLHQNLQSRPENFLAATQPYREDLVVAAECMFTWYWLADLCRKEGIEFVLGHALYMKAIHGGKAKNDKIDAFKIAMLLRGGNLPKAYVYPPEMRATRDLLRRRLHLVRRRGNLLAHIQNTHHQYNLPAPTAKIAYKANREGVAEAFPDPDARKSMEVDFMLIEHYDHVIRDLELHLERRAKQHDPQAYHRLRTVPGIGKILALTILYEIHDIGRFDRVQDFLSYTRLVKCDHSSAEKKLGTGGAKIGNVHLKWAFSEAAALFLRNNPRGQKHLRRVAGRHGKAKALSILAAKLGRAVYLILSQERAFDMERFLARKN

SEQ ID NO: 365821 - protein, 344 aa, unidentified
MAAEPLIKLGIDVHQDFYVVVMQEGGTNPKPAQRFQKEAFLHWVAKLKSQGGEVHAVYEACGFGFGLQRALTALGIQCHVVCPQKLDERNKRVKTDGLDAKALCLKLDRFVQGNRDALALVRVPTEEEEQKRAIHRQREQLVKTRKRLEAQGRSLMVNHGIEPLSNWWKARTFAQLQVPEWMKELLSNMQPILLGLEEKIRALTVQLQAAAIAKQPRGLGLLSSVVIDREIGSWTRFKNRRQVGSYTGLCPGEYSSGNTRVQSCVTKHGNPRLRTALVETAWRLVRFQPNYKPVRKWRRVLAKGALATKAARKKAIVAVARQLAVDLWRVRTGRVSTEELGLIN

SEQ ID NO: 365822 - protein, 313 aa, unidentified
MNAQAVVVGIDVSKDWLDVAMGVESSRVANDAEGIGALLERLRHGVELVVMEATGGDETQAASAIAGAGLRLAVVNPRQVRDFAKATGRLAKSDRIDAQVIAAFGEAIEPQVVRLPDEQTRELQDLVMRRQQLVAMKVQESNRLAMMTGAAKKQIKAHIAWLEKAIDEVNTDITARLRTSPVWREKDELLRSMKGIGPITSSMLLMNLPELGQLDRRSIAALVGVAPFNRDSGSFRGRRTIWGGRAEVRHVLYMAATTAIHHNCVIKPFYEHLIARGKPHKVAMVACMRKMLTILNAMTRSNTRWMPAPGIAS

SEQ ID NO: 365823 - protein, 421 aa, unidentified
MNTSKDNTSVQSTPAAWIGLDWGGKEHAFAIQDAAGTSETGTLPHSAENLHAWLKTLGERYGARPVALAIEASRGAVIHALLEYPWLRIYPINPITSARYRSAFTPSGAKDDLPDAKVLLELVRDHAAKLRVLEAQDPVTIKLAGLVEARRKLVDRRTQLILQVQSLLKSYYPQALEVAGDLKSEVALAFLNRWPDLISLKAARPTTIKRLYYLHQVRSQDLIKQRLALIAQAKALTTDAARVEVAVLHLRALLDQLKVFHQHIPRLDEAIHQTFANHADRDLFRNLPGAGRQLAPRLCVAFGTLRSLYPNPASLQKYAGVAPVREKSGGQIWTHWRWHTATFLRQTFVEWAGQTVHYSEWAKVYYQRMLKKGKKHAVVLRALAFKWIRVIYRCWLDGVPYDPARHRALQTLLHQDQQAPA

SEQ ID NO: 365824 - protein, 341 aa, unidentified
MSVMIGIDPHKASHMAVAIDDAEQSLGVLEVAADRGQTPRLLAWAELLGAERTWAIESAGGLGKLLSQELVAAGEHVVDVPPTLSARVRLLGSSRTTKNDRHDALSTAVAGLRHCGLRAVARDGHTTIMRLLVGRYDDLVATRTQAACRLHASLRELVAGGAPRGLSADRAAKLLRTIRPADPVGIERKRIALELLADLRRLDRDLVTIKARIADAVRESNTTLLDLHGVGPIVAGLILAHVGDPTRFATRARFAAYNGTAPIEASSGPRVRHRLNPRGNRKLNHAMHLIAVTQIAHNTPGRSYYDRKIAEGKTSKEALRALKRRISDAVWRQLQLDTDAH

SEQ ID NO: 365825 - protein, 316 aa, unidentified
MTIYIGADIGKDFFDVATTEQLKAKRFKSTPEGYQDFLKWLPTEQSIHIAMEATGKYSLGLALKLYEQGIPVSVVNPARIKRYGQSQLQRVKTDSEDAKLIAHFCMTQTPKLWQPERPVVAQLQEWYKFQELLIQQHVQIENQLQSSLSDEVQLFQRQQLAHLSKQLTEVENKIKKCLSCDAQLTQQVKLLSSIKGFGETTAIRLVTLIKDINRFEKAKQLACFAGVTPRIRQSGTSVNSSVISKTGNADLRKVLYMPSLAAIRFNPVIRAFSERLKANGVRGKKMIVAVMRKLIHMVFAILKSGKPFDPEYRNCV

SEQ ID NO: 365826 - protein, 481 aa, unidentified
MTAGKSAKKDGAAAGSPAVAGPGGGDGAEVAEERVEVVTYAAAIDVAKGSGMVCTRVPGSRPDRRRQTVWQVEATYAAVVSLMDHLRCEGIQRLVLESTSDYWRVWYYLAEAAGLQVWLVNAKDTKHLPGRTKSDREDCVWLCKLNERGMLRRSLVPPEAVRDLRSLTRTRSRLAQDQVRHQNRVEKILEDALLKISVVISDLFGLSGRRFLDALVAGERSPAALAALGDRRLKASPAQLEAALTGRFREVHAFEIATHLRLIDTINDEIARLDARIEQQLASIPGVAPACTACGLIGGGHAPGCASTGAAVLGLVERLDEITGVGRCNAQVIIAELGTDMSVFPTAGHAAAWARLTPRTIQSGNSAKPGRTGKGDPYLRGALGQCVMAASRTDTRLGEQYRRTARRRGKQKGIVAVSRVICEIAWLLIGDRAARFTDLGAGYYSTQNPRRQTRSRIREIERLNPGMKVTLTPIDPAAPAA

SEQ ID NO: 365827 - protein, 407 aa, unidentified
MLEVKVEQCAGIDVGKKIIEVCVLIGPANRKPAGEVRRFGSKVGDLEALRAWLKERACTEVVMERTGSYWKPVFNILEGHLQVILANPEQVKALRGKKTDRTDCRWLAGLLRQGLVQASFIPPRDIRELRDRTRRRRRLLQNGTPERHRVQKVLQDANVKIGNVLSDVFGMSGQAMLEALLEDKLNAEPVADLARGSLRRKIPQIVEALEGHRMSDHHRLLIRQSLKHMQFIEEMIEELDQQIHEKLAAYQKQVELACSVPGIRSDAAAGILAEIGMDMGENGPFSSCHHLASWAGVCPGNNSSAGKRKSGKIRKGNRWLKATLRQTAWAGANTKNSAFQFRYQRLKTRRGVKRATIAVAHAQLIALYWVLRSGVPYQQQRQDLEQQQRESLIRHHLHRLAQLGYTA

SEQ ID NO: 365828 - protein, 329 aa, unidentified
MSNLLKKVIGVDVGSKFLTLSFLDDEKGEQVLNLPNNERSILSFLSKISPSDYCFVIEATGNYSSRLLHLSIGKGFESSLINCMSVKHFARMKNIITKTDAEDAKLIRNYGEMFRPEFYIPKTQDIEYLDQEIKLLNDLEEEKRRYAVKLKALRFHSVVNPSTEKHYEKRLKQLEKEIKEVEARLPQLQDEEFTETKNLLQSVSGIGEKTSLQLMTATSGFKNFHSSKSLVKYFGLAPRIYQSGKKSYSPGKCRTSKTYIRSILYVCSWTAIKHNQKCKELYLRLLEKGKAKKLALIAVCNKLLRICFSVVKNKTPFQQDFQNKLKIST

SEQ ID NO: 365829 - protein, 610 aa, unidentified
MNSPPLTCTADLTIGVGIDTARYGHYVTFIRGHDLQPAAPPLEMRESTQGYQQLQQRLEQLRDQHPDAQLHVRLDAAGQYAANLEAFLRQLPWPITLSIGDPARNANYRKAHFPKRKSDDVDSFCTARFAVVERPQASAATPPQIQMLCEIAGRLEAQVKQVTRLINQWHNLLSRVFPELAVYTKDLGVGWVVTLLNKYPSPESIARARTTTLQTIPYINQARAQELQTLSRASVASLRGPIAEQLVREHVGQLRDAQAREKRLLKMLISAYHALPQTNGIDSIPGIGDATAAVLTAKMVCIERFATPKNLVGFFGIFPEASQSGFYRDGRRHLPGTLRMSAKGNDLVRKYLWNAAMSAITCNPAARALNRRLRQRGVRGDVALGHVARKLLHLVYAVWRTGKPFDREHHACQDTTRSDSTKPAPSIEKATGRTQDVPAKRSAVTVAKPNVNESKRRAKADAAAQPAAQPSTFEPAPGSVDISRVRQLVSIEQVLVHLGLLSQLRGPGRQRRGPCPLHDQADARERTFCVHLDKNVFQCFAVGCKASGNTLDLWAALHRCSVARAAQQIASALALDLTPLHDSGPALLGEPVFPTIPSPCHPKISTAPTP

SEQ ID NO: 365830 - protein, 345 aa, unidentified
MEQISRIGMDTSKHIFQLHGVNTAEEPVLRKKLRRKEMFAFLEKLGPTVIAIEACGASHHCARLLQSFGHSVKLIAPQLVKPYVKRGKNDAADAEALCEAMSRPTMRFVPVKTAEQQAALMLVGVRDRLIRNRTQLTNAIRGYAGEFGHTAAKGRAHLDPLLERIQADESLPALARELFAAQAAEYAQLQAQIDKIDARLIAWHRADECSRRLTKIPGVGPIGAVLLTMKTPEPELFRSGRQFAAWIGLTPKDHSTAGKVRLGGITRAGDEGLRSVLVVGATTVIRHARRGGRPSPWLTELLKRKSPKLAAVALANKMARIAWKLMVTGENYTAKAAPAALAGAA

SEQ ID NO: 365831 - protein, 352 aa, unidentified
MDRYIGLDGHAQSCTLRVLTATGKDVGRQVVETNGSTLVQAIRSIPGTKHVCLEEGTQSAWLYELLRNEVEEIVVTVPPRREGNKDDATDALELAEGLRTGVIKRRVYKSCGPYSELRAAVRSYTTLKTDVGRAKSRLKAVYRSRGIPTPGDEVYQAGAHEKWERKLPPPQRESARMLYEEVEALTKLWVIAEERLEEASKEHKIIRMLSTAPAIGPIRSAEIVATVVTPQRFRTSRQFWAYCGLAVVTRSSSDWVAGPHGWARSKTYQTRGLNRNRQPTLKAVFKGAAHQLCTQMTSSPLHVAYKRLVDGGLKPNLAEVTIARRIAAAVLAMWKHEEVYDQAKQRSNLMQT

SEQ ID NO: 365832 - protein, 309 aa, unidentified
MLTAEADKRKTKVVVTTAAGVQALLAWCAKHGAQQAQLHAILEPTGLYHEQAATALPQVRVSLVNPAQARDFAKALALRSKNDALDSYVLARYGQTLSPALWHPAPLHARQLRALLTRREALSKDLLRELNRKEKSQFSPSAPLVDGSIDKAIAFLREQIKQIERAIDQHIDNHPDLKQDCELLNSIPAIGPQAGNAILAVMHNRHIDSAQSLAAYLGVVPVQRQSGSSLNSCARLSKAGPSQVRATLYMAALVGTRHNPHIRALYQRLLKAGKSKKAALGAAMRKQVHLCFGVLKNRIPYQPNYAMNG

SEQ ID NO: 365833 - protein, 371 aa, unidentified
MESIIYVGMDVHKDSYSICCYKSNEDKYYYEKKIIAESKRVIRYLESVKKELGEEVLFLCGYEAGPTGFGLYRDLQKAGYSCVIMAPTSLKHSVNHKVKNDKVDARFLAKTLFTKDYSSVHVTTEHEEAINEYCRMRLSIKKELTKAKQVLQSFLLRHDKKFTEGETWTLKHRAWLKTVLFEEQYLNEAFNEYMISVNTLEQRLKTIENRLKEISQDPDVKEKVDRLVCFCGIETVSAVTIVSRVGDFNRFAKAYHFSNYLGLTCGENSSGQKEKHLGTKKTGDKEIRRLLAECAKSIKKTNLKGKKSKRLLDRQKDKDPMVIAYADKCRYRLRSKIAHLELKGKSPNVAATAAARELACFIWGMMTNHIA

SEQ ID NO: 365834 - protein, 402 aa, unidentified
MNAVGIDVSKGKSMVAIMRPFGEIVSAPFEIKHTASDINSLVELINSVKGESRIVMEHTGRYYEVLAHQLSEANLFVSAINPKLIKDFDNDSLRKVKSDKADAVKIARYALDKWQNLKQYSVMDKLRNQLKTINRQFGFYMKHKTAMKNNLIGILDQTYPGVNTYFDSPARSDGSQKWVDFASTYWHVDCVRKMSLNAFIDHYQNWCKRKKYNFSQSKAEEIYGKAKELVPVLPKDAITKLIIKQTVDQLNSASTTVESLRTLMNETASKLPEYPVVMAMKGVGTSLGPQLMAEIGDVSRFTHKSAITAFAGVDPGVNESGTYEQKSVPTSKRGSADLRKTLFQVMDVLIKTHPQDDPVYQFLDKKRAQGKPYYVYMTAGANKFLRIYYGRVKEYLSSLPES

SEQ ID NO: 365835 - protein, 583 aa, unidentified
MKMETTTEIGVGIDTARYGHHVTFLGPERQPAAVPLTVIESSEGYHEFQQQLHKLVAKHQNVHFHVHIDAAGQYATNLERFLRKLDLPMTLSVGEPRRNQDYHKAISPKRKSDATESFAMARFGIVEQPGETPDIPDEIYVLREVVSRLQGQVKDSTRTTNRLHNVLARVFPELATIVANMSAAWVLELLKKYPTPQRIAHARITSLLKIPFIREEQARKVHATAAKSIGSLRGELAETLVRQYVEQVRRSLAEEKKLQKLLLQAFEAMPSSGHVQLESIPGIGRVTAAVLTSKIVSIERFDTSEKLVGYFGIFPEERSSGVDRLGNPLPSGKMRMSRKGDDLVRRYLWNAAQCAIRFNPAVRALYARQRARGKRGDVALGHCMRKLLHLVFAVWASDKPFDKGHYPWGYDAKEEEASSPLPQQTEEAAGHKRDVLPNGKVVTATDINLEPAVTPVKQGMDPGANSNHLMDYAYLREQITMQQVLSHLGHWNCLRGRGAERRGPCPLHSAEREHSRNFAVNVSKNVYRCFHPECSQAGNVLDFWAAGHNLSLYKAALNLAETFQLETNRNREEGARNTKPKPR

SEQ ID NO: 365836 - protein, 340 aa, unidentified
MNRIGLDAHSASFTVAVVNDLGKVTRCVSRPTSAENLIRVVGEVPGPKELVVEESAVAQWVKDALEPYVDKLVVCDPRRNRWIARDDFNDDRTSAIKLAQLLRGGYLKEVRHLDDRQAQLRRVFCHYADLNEQVVRFKNKLKATYRQALVRASGVGIYSEHRREEWLARLKDAPALHRQAGQLFVLIDTIEAMKEDCRKAMVAQARKDPGYTLLLTIPGVGPVLACGYIALIATPHRFSRKNKLWRYAGLGNALHISDDTVYQDRPSKSGNRLLKWVATQHFMGAVERAQADNLFKRRHERLLREGHSKNVARRQVCRSLLSVVRAVWMKGEAYRETPLS

SEQ ID NO: 365837 - protein, 437 aa, unidentified
MIQAEIERCAGIDVGKKWLAVGVLVGPLDREPRAETRRYGTNVADLEQLRDWLQQQGITHVVMESTGSYWKPVFNILEETLTVYLANPQQVKPRKGHKTDNRDGHWLAHLLRHAMIQPSCIPPRPIRELRDLTRRRKKLIAAGSSEKNRIQKVLEDANVKLGNVLSDVFGVSGQRMREALLEGHAGPEEIARLAQRRARQKIPALVAALQKHRLSEHHRRMIRFRVEHMELLERQILRLDEEIATQIRQIGLARQWELLQSIPGVREDSAATILAETGADMQAFGDAAHISSWAGVCSGNNRSAGKNKSSPTNKGNPWLRGTLTECAQGAAKTKNCFLKEKFWRITAKHGGKRAAAVMAVAHNLLRLVFQVLSTGQPYQERSAGPLEPRQRERMIRHHIRRLGRLGIAVRGPEPAPRRPRRCTTITTKGIARLPASS

SEQ ID NO: 365838 - protein, 354 aa, unidentified
MKKGYQRGKEFTRGSKVYVGIDVHKDSWHVTAVTEGEEVFNGRLPSQYPVLRKLLDRFAGREVKVAYEAGPCGFWLHDRLTGDGIETIVVPPSLIPLESGNRVKTDKRDSRKLAHLLEKGMLKRVFVLSEEERMHRELVRTRRQLMEHRADVMKQIKSKLLFHGIEYAYRSWNSQFIRWLRELIDSHRVFAISLGFMIDIYEHLTDQLKKITKQVFLLTKNEKYARNISLLRTIPGIGRLIAIEILVELQDMKRFKSAERLASYIGLTPSEYSTGQYTRQGRITRCGNTRVRTCLVEGSWVLIYRDPVIKNKYEKLKIRKGAKRAIIAIARNLIIRIRSMVLNNEPYHIGSVAR

SEQ ID NO: 365839 - protein, 387 aa, unidentified
MPQPNDLSRSLVAVDQNSTIIAVVELSQSSWLVGGVVPGIERQPRKKLEPSPERLLAVLHRWRDEAVRAGRTITRIALAFEAGRDGFWLARWLERRGVEAHVIHPSSVSVSREHRRAKTDRLDTELLKRGFLGWLRGERGHCSMARVPTIAEEDAKRPNRERESLVGERTRIVNRIKSTLARLGIRNFKPTLRKAAERLASVHTPEGMPLPPNALAELQRDMARLGFVVSQIREIEDARQKRLEQQPETGAHAMVRLLARIVGVGVETADMLVHEVLSRPMRDRRAVARYAGLTGAPDESGGQRREQGLARAGNARVRRGMIQLAWRFLLFQKESALAHWYRARTADSRIGTRKTMIVALARKLIIALWRFVTTGEPIEGVVLRPAS

SEQ ID NO: 365840 - protein, 483 aa, unidentified
MAKRKKSPDKKPKKKIDLKQINPYVAGIDIGSGTHFVAAPVPADTSDGLEICIREFSSFTPDLEALADWLKDCKVTSVAMESTGVYWIPVYELLESRGFEVYLVDARHVKNVTGRKTDVEDCQWIQKLHSCGLLSPAFRPNDKILPLRSYTRQRDMLVASNATCIQHMQKALAQMNLHLSIVLSNIAGLTGMKIIRSIVAGERDPKKLAQFRDARCQQPLDVIEKSLTGNYRAEHLFSLRQALESYDFYQQQIFTCDQQIEQALIDLNPSPINPCDSAGDKDKEGKSFKPRTYKPSNGNALYFNPLDHLQSILGVDLTKIPGIEGNLAVKILSEVGTDMKKWKSEKHFTSWLGLSPENKVSGGKRISSKTKSSANRAAVFFRLAAFALFNDRTTALGGFLKRMKTKLGAPKAITATARKIAVIFYSMLTKGTDYVEAGLNYYDKQYKERVIKGLEKRASDFGYILIPLITSKATCEKTEIVHA

SEQ ID NO: 365841 - protein, 320 aa, unidentified
MQTPSAVLNIGADVAKDAIVVACSEGSFPVREVANQRTAVLAFLKGLPAGSRIGVEATGTYHEVFAEVAHQLGFLVFVLNPKDTRHYAKAVGLRGKTDRVDAELIARMIAHEHTKLHAWIPPTPQHREIDRLIKRRATLISLREAVEMSLHELDGFAADLKTLRTRFNQLIARIDLRVKTLIDANPDRKQNFTRLCTISGVGPVIGSALVNTLERVPVKSADAFVAFTGLDPRPDDSGQHRGKRRLSKRGPGELRRLLYMAAMSAIKTKTWRPLYDHYRAKGLSSTATLVILARRIARAAWSIYTHKTEFDPGRLTNPLT

SEQ ID NO: 365842 - protein, 378 aa, unidentified
MKRILKIGMDVHTKNYTLCAMEPIIGEDDRVFATIKVTPDYKNILLFIENLKMKLGLNDEYDIQCGYEAGCLGYSLYNQLTAAGVKCVILAPTTMLTPQGVRIKTDMRDAYMIAQCLSYGGYHAVYIPTEDDDSVKEYLRMRNDHKLALKKIKQQINAFCIRHGFCYDGTKWTQAHLKWLKKLEITNQLYRETLDEYMASYEEQEAKIERYDKRIEEIAEQTKYHDKVKRLGCFLGIKTYTALSLIVETGDFERFAKGNQYASYLGLAPGENSSSDSIHRLGITKAGNSHLRQLLIEASGGICKGAVGHKSRELRARQNGNTAEVIVYADKANTRLRSRYYKFIRHGKKRNVAVAAIARELACFVWGMMTDNIEMRDA

SEQ ID NO: 365843 - protein, 415 aa, unidentified
MDILYSNVAGLDVHLRSIFVAVRRVSASKRARVREEVRTFGTMTNDILQLRDWLKTMGVTHVAMEATGVLWKPIWNLLEGHFTLLLVNPRELKQVPGRKSDVRDCQWIAHLLQCGLLHSSFVPERAQRELRDLTRHRAQLRNEQTRIANRIHKVLEDTNIKLGAVATDLLGKSGRKMLRALLQGEHDPVKLADLAERKLRKKIPQLRLALVGHFTEHHHFLIAHLLDHLDFLERQIDALSARIENCLQPFVSSEQFDRLDKIGGVNRCTIENVVAEIGVNMNQFPSADHLSSWAGVSPGNDKSAGKIKRKRCTLGNRWLKRALTEAAWASSHCKNCYLAAQFHRLAGRRGKKRALQAVAHSILVIFYHMLKSPVEYQDLGKDYFDRLHPERLSRYLVKRLEALGYEVALSPRQAA

SEQ ID NO: 365844 - protein, 354 aa, unidentified
MATTSKQNTFTLASVGIDIGKEVFHLVGFDLDGKIVLRRKIRRLALVSEFEKLPPCTVGMEACLSAHFVSRTLRKLGFEPRIIPAIYVKPFVKGQKNDYNDAEAIAEAVLRPNLKFVTEKTQDQLDLQALHRVRSRMVSRRTATINQIRAFLIEQGITVRTGTHALGSSLFAILENRKDEISPRMSALIVDLYEDWQRLDERIETITEEIEMISKAEENCQRLMSVPGIGPIISTAMVAAIGTGDAFGRGRDFGAWLGLVPRQYSTGGKTVLGRISKRGSKYLRTLFIQAAHVILMRPNNWQKFSFGPWLTEASTRLHRNKLATALANKLARIAWSVLANQKGFDSNRNEEPAI

SEQ ID NO: 365845 - protein, 350 aa, unidentified
MEPTFQSNGGDVMKLYCGIDLHSTNNWLGIYDEEDRAVVSKRLPNDLGVVLESLEPYKAELAGIAVESTYNWYWLVDGLMEQGYRVLLTNPAGNEQYNGLKYTDDRHDSRWLARMMRLGIVATGYIYPKEERPIRDLLRKRMRLVQHRTAHIVSVLNTIARNTGSSLSWSKIEAMSDDQISKLLGDELIGMAPRASLEVIKSLDGQISKIEKTAKARAKLRSEYELLKTVWGVGPILGLTIMYETGEISRFSQVGDYCSYARCVGSARISNGKKKGENNTKNGNRYLSWAYVEAANFASRFYPQAHRFIQRKRAKANHTLAVKALGHKLARASYYVMRDQVEFDPARLFG

SEQ ID NO: 365846 - protein, 372 aa, unidentified
MQKDGSAFVGLDTSKLKLSVALAEEGRQGEVRFLGDIENTPGAVRRLVTKLIGKYSKLRFCYEAGPTGYGLHRQIAELEQDCVVIAPSLIPKRPGERVKTNHRDAVTLARLHRAGELTAIWVPDVEHEAVRDLVRAREAAMLELREKRQHLQSFLLRHGRVYAGRRPWTKVHARWLSNLTFSHPAQYLVLREYLQSIEDTEARLKRLTDLVTEVVSTWSMAPVVDAYQAMRGVAFLTAAIFVAEIGDVRRFETPRQLMAFLGLVPSERSTGETVRRGGITKSGNPRARRVLIEGAWTYRYAARLSRPLQVRQENLPKNVRAIAWKAQVRLCARYRRLVAAGKRQTVVTTAIAREMAAFLWAIGREVEPRRAL

SEQ ID NO: 365847 - protein, 342 aa, unidentified
MYYIGLDVHKKTISYCIKEVSGHVYGQGTIGATRYELDVWMKTLPQPWTVAMEATIFTGWIYDHLRPHAAAVKVAHPVMLRAIAASKKKNDRIDASKIADCLRCDFLPECHMASTEIRDRRRTLRYRYLLVRQMVQMKNRISGLLLETGVSHNKQRLHKVKYFRELLATNPELPDSIRPLLKLSRETIVRLQKTDYALVSSLQRDPVLAERVNYLKTVPGVGPITALTWALEMGDVSRIGSVKQAISYCGLCGEEKSSADKVLRTPLSKQRNKHIQHVLVEAAKLAPRQSHELALVYEKEKQKGNTNRATLAVARKMVAYLLAVDREQRAFVPAEKQGSAAA

SEQ ID NO: 365848 - protein, 345 aa, unidentified
MPIVGGLDIHRKQLTFDYLDTVTGEVKRGQVAPADRAHLRAWLARFAGRDDVAFALEGCTGWRYVAEELAGAGVAAHVAEPADTAFARGRKRHAKTDKTDSRHLRELLAEGRLPECWIPPSRILECRALLETYHDLRAEHTAWVQRIHAVFFHQGAPALGEAALRTGRDLQAVRAAAAAHLSPAGQLQVDTALAVLDALEARLDVVRHRLLDAARGLTGARVLAERLYGVGPVTALAMTCWLGGAGRFSSSRKAVRFAGLDITVWSSDRKGPPGRLSRQGPEVLRWCVYEAGKTHARASAPDHRYYAAVKDRQGGKRAALSEARKILRQACHILAELGDDALSAA

SEQ ID NO: 365849 - protein, 416 aa, unidentified
MSLALPEALFFAGIDWAAETHAVCVMDAAGKIAAEFTIGHSADGIATLIRRLARYGDPGDLPVAVERPDGRLADLLLEAGHPVVPVRPHAIRTWRDGEVLSGAKSDAGDAAVIAGYLRLRAHKLRVAAPCSDETRALRTVVRTRGDLVEMRVAATSQLPALLDAHWPGARAIFAGVESPVSLEFLTRYPAPAAAAHPGEKRMAAFCVKHGYSGRRTAAGLPARLRSAPAGTGREALTEALRDAVLAAAGVLIALNASVKNLDRSIAAHLGEHPDGAIFTSLPRSGQVNAARVLAERGDARQACGHPGSVAALAGCTPVTRESGKHRAVHFRWACSKRFRVAITTFADNSRHASPRAAKICNDARASGKDHPHATRVLARARIRVIYRCWLDGVPCDPAAHGTAAALARQTTERIAA

SEQ ID NO: 365850 - protein, 330 aa, unidentified
MFQVHGADGSGRAVLRKKMRRDQVLAFFSELPRCLVAMEACGGAHFWGRELGKLGHDVRLIPPAHVKPFVKRQKNDAADAEAICEAAQRPSMRFVAVKSEEIQGAAAVFRVRELLIRQRTQAINALRGHLGEFGLIVPQGAANAGRLVALIEDPDAGLPKAARVALDHLTETLKQISQRISALDAEISRRARQDETARRLMTIPGIGPLIATALVTLAPPPEMFRRGRDFAAWPGLTPRQHSTGGKQRLGATTKMGERSLRRLLIIGANSVIIKRHVHRSAQPGTWLAGMLSRKPPMLVRVALANTPLTHASMCCRAADGSDRLGVDEDR

SEQ ID NO: 365851 - protein, 313 aa, unidentified
MAQMVATVGIDVSKDRLDVAVHPTDGEFSVTNDAMGWRLLVRRLKPLMARAIGIEASGGYERGAISALLEAGLPVRSVNPWKLRLFAKAAGVLAKNDRLDAGVIARFVATMPSREVRRDLAVEHLAELVTARRQLVDAVQQTTNQTEHLRDPSLRRLQARRVRQLERDVAQLDQLIAEAIAASPLLSARRDLLCSMPGVGPVLAATLLALLPELGSLPNRSIAALVGVVPYDFDSGRMRGRRHIFGGRAAVRRVLFMATQVAGRFNPTLKAFKQRLLATGKKPKVAIIAAMRKLIVTLNAMVRDNLPWRSVAA

SEQ ID NO: 365852 - protein, 340 aa, unidentified
MSEITTIGLDVAKHVFQVHGIDAQGTTVLRKRLRRGQVLAFFSRIPRCVVGLEACATAHYWARELGALGHEVRLMPAQYVKAYIKRNKHDAADAEAICEAVGRPTMRFLPVKTAEQQAMALLHRGREQLVRQRTMLVNALRAHLAEFGIVAAQGLRNVGELIAIVRDDGDTRLPDVARQVLQVLANQIEQIETAVAALERQLLAWHKSNPVSQRLASIPGIGPIIATAIATTVADPKVFRSGREFAAWLGLVPRQNSTGGKTRLGGITKRGNRYLRRLLINGASANLLRSKATKADPWVIGLRRRRPPLVVAVALANKTARIAWAVMLREKEYQPRAMAA

SEQ ID NO: 365853 - protein, 350 aa, unidentified
MIIIGCDYHPGFQQIALVDTDTGEVRELRLEHREPAEKFYRSLAAQRAVVRLGMEGSGHTRWFERMLAELNFELWIGDAAEIRTKRVRKQKTDRQDAQLLLRLMVEDRFPRVWVPSWENRDLRQLLWHRQRMVQARTRIMNQLQAVALNEGLRAKKRLWREAGREQLKSFPLAPWASRRRGDLLELLDQLNPTIAELTQAIEQQVEKYPEARRLMTHPGVGALTALAFMLIVGEAGRFRCGKQIASYLGLVPLEESSGNRRRLGHITKQGNSLLRFLLVEAAQVTARSLPEWRNRYFHLMMRRGRKIAKVALARRLAVRLYWMLRKEWDYEQVKQFGSHAGQPENRHGVQ

SEQ ID NO: 365854 - protein, 416 aa, unidentified
MKKGQNTRGYERYMALDIHREYLLVGAQNEEQDWVLTPRRVSIEKFSEWAKKNIRSGDIVVLETTTNVWTIYDIVAPLASRTLVANAAEVKEIANARVKTDKEDIKKLLKLLIGGIVPEVWVPPLHVRELRAFISYRGRLVKTSAMIRNRLQSLLHKHNLKLSETGLLDQVWWEAQKEISPLEKMQIRQELALLQEVEKLKTAVDEELQRQSTGALWGKPALQLMQLPGVGYIVAMTVLSAIGDISRFESAKKLVGYAGIGAGVHDSGKTHKDKKITKKGRRELRWAMVEAAWRAVGMSPFWKAEYEKYLSRLRKKNQAIVVIARKLLVAIWHVLSKEETDVHASEEDLAYKMLLLSWSLKEDTRMGLTYKQFAKYALMQLGVETDITRFVRRDVPRRLAPKEEVLARMTELGLTA

SEQ ID NO: 365855 - protein, 360 aa, unidentified
MPKKCITRSYQGQRIFVGIDVHLKSWTVTVRILGMEVEHFTMPPSASVLAKHLRSRYPDGDYFSVYEAGFCGFAAHRRLVDQGVKNIVTNPGDVPTRNKERDKKRDSVDSRKLARELQKGSLEAIWVPSPKQEDLRSLCRLRKKLVDHSTRLKNRIKQHLYYRGVVIPAHSELAHWSGRFLTWLEQFCPEGRNPGADSLRITLEELRLQRARITHATRLLRRYTRGNETLALLRTVPGLGFVTAITVYAELMSMKRFRNLNDLCCYIGLVPGSSDSGDKQRNRELSSLGNRHLRYVLIEAAWVAVRKDPDLLDAFSRSTRRMPKNRAIIKIARKLLNRIRHVWNNQTPYQSPAALPASAA

SEQ ID NO: 365856 - protein, 346 aa, unidentified
MEELKVVGLDLAKAVFQVHGINSQGRKLFAKRLKRSEVMDFFANLPPVLVGMEACGGAHEWARRISSLGHQVKMMAPQHVKPFVQGNKTDARDAAAIAEAASRESVPSVAIRNIEGQQMQAVHRVRELWMKQRVAVSNQIRGLLAEFGEVMPLGIRRLKEDVALWQARATPELAVLKDVIEQLVSTLRQLEERISVLEVTIRVLHKGNAASRLIESIPGVGLLSATATVASFGQCESFESARKFAACLGLTPREHSSGGKQMLLGITKRGNKYVRKLLIHGARAVLKARMSKEAYAEDWAVKLAKRRGHNIAAVALAAKNARRIWAMLRTGEVFRVDYAQADGAYA

SEQ ID NO: 365857 - protein, 466 aa, unidentified
MSNYAGIDWAAEKHDVRVCDEAGEELLASTFAHDEAGLRSLCGQLLRLEVELVAIERPDGLLVERLLDAGLRVLPLHPNQVAATRPRFRVAGGKSDPFDAFVLSELARTDHHRFRVLEPDSDQTKALRALTRAREDLVHSKVALCNQLRCELERFWPGPIGLFRDLDSQISLAFLQRYPTPADARGLGVVRMQAFLRREQYTGSKKPVELLARLRRAPESRVGEVELAVRRQLVLALVATLNTLMREIKALARQIAAALRAHPDGAIFSSLFRGPKSVICAATLLAEIGDCRARYPTGDALAGDAGQAAVAIESGKRKAACFRWNCNKRLRQAFVTLADTTRQWHPWAQAIYARAIAKGHDHPRAIRTLGRAWCRIVWRCWQDRVPYQLAKHRAAQQYITVTIPNPSGDRIDVAATQRMAGDALDPSLDVGAGQRSLRAAQPSPQKERSGGGQSKAARQGRAKRAA

SEQ ID NO: 365858 - protein, 331 aa, unidentified
MSNIISIDVSKANLDCAYLRDPDQKRAKRLSCKNEVSSFASLVSWAETKSDLSVKSLAFVIEPTHVYHEPLVQFLHNSGATVYLVNPGRVRKFAEGIGILSKNDLVDADLLARYGLLARNLIAYAPAAQEVNDLRSLLNRLDVLERNLRSELNRQEKVGKTMVFHRLEQQSIARAVKRLKAEVITFKRAIRECIKSTPSLQQSFNLLCTIPGVGAKTAWIMIVILASRPFISAPEVASFLGLNPIEKRSGNSQYRRPRLSKSGSGHYRQKLYFPAMVATRKNPDIKALYERLLAAGKTKMCALGAAMRKLVHICYGVMKNQAAYQAQYMPS

SEQ ID NO: 365859 - protein, 420 aa, unidentified
MSFKIFRKNCCGLDVHKTWIYACIGVTDTNGRTDYKQARFSSFSKGLSELCDWLAKYNCSEVCMESSGKYWIPVFNILEKADISVVLAHPKYTKPQKGNKTDRKDAKWICDLFMCDMIKPSFIPPADIRHLRDLVRYRFKLTCMIVGEKNRAQNCLTVSNFKLDDVFSDIFGKSARSITEQMLAHPGEIFDVAPFVHGGCKTPIEEIQAAVDGALCPEQAVKLRQCLNHIDELRLHIDEVEREILCLSDKYQAPLDLIRTVPGFNKNPMTAIQVLSEIGGDMSVFPTAKHLVSWAGCCPRNDQSASKIKSTRISRAGSYFKPVLVQVANALLKSKKHPEFITRYRRIKARRGHKKAIIAVCRMLLTAIWHILSDLKPYTPEGFLESRPVNKSKILTTSQALNLLKQRGYIIKDEAAPAMN

SEQ ID NO: 365860 - protein, 359 aa, unidentified
MIVIGIDPHMKTHTAVALDAATGRTLAERTVTCDDRGHDELLAWARALSGDRYFAVEDCRHVSGRLERHLLPRGERVLRVPPKMMAGARHSARSYGKSDPIDAACVARAALREPGLPEASLAGPEQDVRLLVDHRDDLVDERKRIQKRLRWHCHDLEIGLVLPPRVLDRYVWLESLEVVLAALPESTRRRIALDLLRRVRELTKDVRSLERELRTRMRELAPELLEIPGCSAVCAANLVGQTARASRFSGDAAFAMHVGVAPLPVSSGQTNRHRLNRCGNRRLNSTIHMIAVTQARMHPPAIAYMQRKQAGGMSYREALRCLKRHLARVVFKTMLRTERATVGKVLRADFSADFVAIAV

SEQ ID NO: 365861 - protein, 421 aa, unidentified
MPNIENGVDSMVKENFIYVGIDLHKETHTAVMIDCYNQKLGEITFPNRPADFPKLVTKVKKCNTDGKEVVYGLENAYGYGRALAVWLIDKGYLVKDVNTAISHRQAKHRGAMYRKSDSDDAKAIALATLNMLDKLPDACPNDAYWSLGQLVHRRDNIMKQRTRLVNQLHEQLCIAYPSYKQFFNDISRPTALYFWEHYPSRKYLKGKSVEDLRAELVPVSHNKCSTKTCEKILDAVASDKVKNNAYQDARDMVTLSIVSDLQHYDSQLAEVDKMLEQMYKMLGCTLTTIPGVNVITAVKILAEIGDIKRFSNANKLAQFAGIAPLHLSSSGKGKDVATKQGNRRLQATIYFLAIQMVQVSSKGTPRNSVVRAYYEKRKAEGKTSQQALICISRRLISVIYGMLKNGTEYRMPVVENAGENR

SEQ ID NO: 365862 - protein, 356 aa, unidentified
MAEGSWVGLDVHARKIVAGVLDAGSGELRILRTPTVIAETVAWLEQLPAPVRVAYEAGPTGYGLARACAAVGIACTVAAPSKIPRAPGDRVKTDRRDAERLARLLRLGELVAVRVPEPHEEAARDLVRAREDARGELMRARHRLSKLLLRHGVVYQASAWTLAHDSWLRLQRFDDRPLAITFDECYAAVQQAKARRDALDQAIVELAGEPPFAEVVGRLVCLRGVATLTALALTVELGDWQRFRPQSLGPFLGLTPSEDSTGERRRLGAITKTGNTHARRLLVEAAWQQRRPLRESATLERRRRDQPAPVRARADQSTRRLHRRWHALEQRGKRRTIVAVAVARELAGHCWALATM

SEQ ID NO: 365863 - protein, 369 aa, unidentified
MPHVTSIGLDVHARSVAAAAFNPFTGEVVHRDFGTDAAEIAEWALGFEEPRACYESGPTGFHMARELRALGLDCAVAAVSKMQRPAADARRKNDRRDAEFIARMLATHNIVEVPLPDAAVEAARDLDRALDDATVEYRRARQRLNMFLIRLGHVWDERNADGTRKGSWTRAHWRWISGIGLEGPQRDVLEYYVTAARCAESDRRQLEKKVLALARTDRWRPAVEALSCIKGIDALTAFRLAAEAGSFTRFRTAPAFASWCGLVPSERSSGETERRGGITKTGNRLARTALVESAWHYLTCTPRPKAPAPGADVPAAIRARADDCTARLCRRRQRLAAAGKSPCKANAAVARELACWVWEIGRRAEGTLG

SEQ ID NO: 365864 - protein, 321 aa, unidentified
MTYVGIDVSKATFVVAYSSAKSSETKTFKNTTKGIREFIRTISPEENHCVLEATGNYSMLLVYLLSKAGFTVSMENPLKIKNFARVMLSVVKTDEIDARLIALYGERMQPAPFKLRSDSLLLLKQKRTVLRQLKKQLTANRNLEGSLKILPFIDSKCKKVLEKTIKFLEKQIEEMEEELTSLAEIEYKKQMNLLTSIKGIGATLAAALIIATGGFTYFDNAKQLTRYLGLSPTYQQSGTSVNVKGHINRNGDAYLRSQLYIGAMASLRCNTECKACFDRLRSNGKPGKVAIVAVANKLIRQAFAVVTHEKKYIDGYKSVKP

SEQ ID NO: 365865 - protein, 350 aa, unidentified
MDSLSDIVDIVIGVDTHVATHSAAAVNARTGGVLGEITVEATSGGYEELVEFANEHSGLRVWAIEGTGSHGAGLTRQLAKNDELVVELDRPERQKRRNGAKSDPLDAIRAAREALSRAKLGSPRTTGERQALSVLLTARRSAVAAAVEAQQQLFALVIAAPEQLRSKLRGKRTLAMAQIAARFRIQAEWDLEIRTTAGVLRDLARRALELWAEADRHEKEILGIVRAWRPDLLERKGVGPIVAATVLCAWSHPGRIHSEAAFAKLGGVAPIPANSGQVTTHYRLNRFGDRQLNLALHTVVLSRIRWDEETLAYVKRRTAEGKTPREIKRCLKRYVAREFFRLLEGVPSAT

SEQ ID NO: 365866 - protein, 409 aa, unidentified
MTAYRFYVGIDWATEAHRVVVLDADRRALHDRTVRHEGVALETFAHWLAEDVAAGAASDVAVALEVPRGAIVDTLLARGVHVFALNPKQLDRFRDRFTVAGAKDDRRDAQVLASALASDQPAFRRLAPEDPLILELRELSRLEDDLRQERGRLTSRLREQLHRYFPQLLQLVPAADEPWLWALLERAPTPSVAQQLPRATVRTILTRHRIRRVDADAVRALLHAPALPVAPGTVQAAQRHLAVLLPRLRLVHQQLADCATLIEGLLERLGESPEHRDVLILRSVVGVGRVVAATMLAEASRLLAARDYHGLRAQAGVAPVTRQSGRRTLVVMRYACNPRLRHAAYHWGQSAARHDPVSRVHYERLRARGHSHARAVRGIVDRLLRVLIAMLTAGTLYDPTRRRVVADAA

SEQ ID NO: 365867 - protein, 434 aa, unidentified
MKATTKITAINPKLLRVPFDIGKDHLYAYTELPLQANALQCIEQTIPNRNQPILKALEQFKTLALQHGFTGLCILCEPTGGFERRLLRLARQTGHFTAYLNAESVRKLRVVQSNDTTKSDLKDPKTMFMLASLGKTLTHRQLSGPWLVLRESHAYYEALDAQNVALRCRIQRLLTQLFCEFSFKKDFLFESEAVVHLVQQFGLNPYRIVAAGQGAFLRKMKPHGVRLRTLERLWQDAQCSSLQQLDPGYSDLLEHQLREAFQDLWRCHRRLEALAQKMIDLLHQLQASGQVRLRAHKGLINEFLLARILAETGPLEDFRGCAQLLRYGGMNLCENQSGTMIGRRRISKKGRSLLRKVLSQAVLPRVRRTDLYGPYYHGKKAKGMVGQKAMMAVARKFLKLLWGLNRSAQGFASGRVFCCASQFKAPQPGLAQAA

SEQ ID NO: 365868 - protein, 355 aa, unidentified
MTSTKYIGLDVHKESISIAVLNSAGKVVMECVIETKASTLLQFIHGLGGDVHLTFEEGTWAGWLYDLLKPHVTELVVCNPRKNALLKEGSKSDRIDAHKLAELLYMSKLSSVYHGEHGLRMLKELSRSYLTITKDLGRVMNRLKALYRGWAIPCAGTQVYAPHYRSEWLAKIREAGVRRRAELYYQQLDALRLVRQQARKELLAEAKKHRATKLLRQIPGIGPLRAAHLVAVMQTPHRFRTKRQLWNYSGLGLETHDSAQYRVVEGQLQRSKKPVTLRGLNDNHNHDLKDIFKGAAMRASTAAGPLHDFYEALLAKGRKPTMARLTLARKIAAITLIVWKKEVRFDANYLKQQAA

SEQ ID NO: 365869 - protein, 365 aa, unidentified
MDNGSKGAAKTTAGLDLGDKYSHLCLLDTESGEVIEEDRVRTTPKAIRRRFDSEQPLKIAIEVGTHSPWVSRLLEECGHQVLVANARKLHLIYGNKRKTDKLDAENLARLARVDPKLLYPLEHRGEQSQAHLALLHSREALVRARTQLINHVRGTVKSFGHRLPKCSTQSFHKKVVDGIPEVLRAALEPILETIASLSARIRDYDRKLEALAQEHYPETNLLRQVQGVGTLSALAFVLTLEDPDRFEQSRTVGAYVGLVPGKDQSGDSDPQRGISGEGDEMLRRLLVGSAHYILGPFARDSDLRRHGMKIAERGGKNAKKRAVVAVARKLSVVLHHLWVSEDVYDPLYNARRLERASCPSVKAVS

SEQ ID NO: 365870 - protein, 366 aa, unidentified
MLYLAIDQHRKQLTVNLRDEDAQVLVQRQVSTRWQAVREFLQDIQERGRQAGGWLVIVEVCGFNDWLLKLLVEYGAKEIVLLHPEERRRQKTDRRDANRLGELLWLNRHRLATGLRVQGLRRVVIPTADEQLDRKLTTLRWRIGRERTRLLNRIKNILRRYNVEQECLTKSVTCQTGLRWLRQLAVGELDRLDLDQLLARLETINTERAALEQKIRERQGRNPAAARIASVPGMGAYISLGLACRIGDIRRFPRPRSLANYWGLTPSARNSGENKQRLGSITKQGSALARFLLGQAVLHVLRKDSVLREWYKGIKRRRGSKIARVAVMRRLATIIWQLLRKEQNYVPGGPRRQEKRRAKAAQAAVA

SEQ ID NO: 365871 - protein, 399 aa, unidentified
MSLKGSFDGFVGIDVSKDKFDACGITGDEVKLFQFSTTMDRKGFEKLKGHLAAVSISSVLIGMESTASYHVNLFSYLVSEGYKVFLINPLLISNYVKMQLRKTKTDKKDAVVIAQFLLTNGDTLVQRATPSLVSDLRDLSRQRESLIDEMTSLKIEIKQLLNITFPELEHMAGIFTKSILKLLQQYPSAFALRDANLGQLSQMLIVDSYGHKREAFAAELIKAAHSSIGSKSPAKDMILKQKIALLHHLEDALQEITGILIEMSRKLMEEEINLMTSLKGIGEKAAANFLIEMGGDINQFERSGKIIAMAGLDPAVYQSGKHDGKGRITKRGNRHLRKIIWLMTTKVIQYTDVFSVYYLKRRKEGLPYKMAVLATAHKLIRVIYAMLTQRTTFCPQVNS

SEQ ID NO: 365872 - protein, 415 aa, unidentified
MALKIVYKICCGIDIHKNFVVACIAKTDMQGVTTYERHHFSTYTKGLKQLLKWLLDRNCKDVCMESTGKYWIPVYNVLEHDCSIVLAHPKYVKAIRGKKTDKKDAKWIADLFKHDLVAGSFMPPADIRQLRDLMRYRFKLTCFKSSEKNRYQNCLTVSNIQLASVVSDTFGKSSQKIIAKILENPDDTSFDIGPLIHGSMKNKLPELELAIDGYITPEQAAKLKIIKEHFDNLEARKAELEELILALANPYQQEISIILTAPGFKNTFTAIGIISEIGTNMEAFPSAKHLCSWAGLTPANNESAGKKKSVRVSKAGCYIKPLLVQCANAAFKSKKHPEIRDRYLRIKKRRGHKKAIIAIARMLLTALYHMLKNGENYNSDLYQKSDILPTTREITVEQAILMAQFQGYRIKSATD

SEQ ID NO: 365873 - protein, 363 aa, unidentified
MNPVVGLDISKGESQVQAFVDKGKPFRKSFKVTHTLQGLAFLVEFLEVVQKESGLKPPVILEATGHYQTAVVQYLEERGYLLIIINPLISYKAKSSSLRKVKTDAVDAYHLCELFYKEELEPYKKRGVHLLNLRNLTRQHENITGVMIQTKLQFQAILDQVFPEYRGVFGDLYSVVSLLTLKEFPSSEDILEASDETLSNRINELCKSRSIRWANEKALQLKEAAARNPFEKTVYQSHILSLSMYINIILQYKEHLSTLESEIDALAKEVEEYNIIKSIPGIGEKIAATIISEIGEIDRFTDPKKLVAFAGVDPSVFESGKFTATKNRITKRGSSRLRHALYMAVRCAIRDCRKSKTSDEIIP

SEQ ID NO: 365874 - protein, 342 aa, unidentified
MSNVTTIGIDLAKNVFQLHGADKRGKRMFSKRLSRSQLIEFLAQTPPCVIGIEACTGAHYWARRFAQLGHTVKMMAPQFVKPYVKSNKNDKNDSAAIAEAVTRPDMKFVPIKSVEQQDIQMLHRARELSVKQRTALANQIRGLLAEYGIIIPKGIGHIRSSMMDILANAENELTTKGRKILHGLYKQFKLLDKKIDKYEQQMKDLSRTNENCQRLMAIEGVGPITATAIIGAVGDAKVFKKGREFSAWLGLVPRQHSSGNKTRLLGISKRGDRYLRTLLIHGARSVVRVAKDKADKRSQWVMDKKERGGENKAAVALANKNARIAWALLANNEEYRKAVIAA

SEQ ID NO: 365875 - protein, 452 aa, unidentified
MIPSYHSSPRLWEREIKQEYPPSFLMVPEKNKGGFMYYLGIDVSKSKTDYLILDEKGERFQKPFSLENTREGFETLLKKLSEFSLTPENLLAGLEATGSLWENLYSFLTEKGYKVILLNPYQTRKFHQALGQKATTDIISAFVIADLLRSNRYLSSIVPEEEIEALRELVKLQFHLEEEKKRFSRRLVSLLALVFPEYEKTALRNVFSIASRRVLEKWPTAFDLAQAKVSQIEKVVRSIKGNNFNISEIGSLIETAKNSIYSGRAREVRAFTIRVLLSQLDRVLSSLEKIKEEIDKILSPKDGSGSFPGSNLLSTPAIGKNTLAVFLSVAGSNGINYPSGKKLIGHIGFFPQIFESGQTRKDNIISHRGPNYVRKGLYMAAVSSLRHNPEMRTLYNKKISQGKTRKQALICVAKKLAQMMLSMLKSGQEYRPERVFVPPTALPRFQEGAPVS

SEQ ID NO: 365876 - protein, 341 aa, unidentified
MSEVTTIGLDIAKYVFQAHGADASGRMVFRKKINRGKLLAFFASQPRCLVALEACGGAHHWARELMKLGHDVRLIAPAYVKPFVKRQKNDAADAEAICEAAQRPSMRFVPVKSEAQQAAAMVFRGRDLLVRQRTQISNALRGHMAEYGWIAPKGLAHLEKLAELLADPSAVPEGVRSVCTVLIEHLSLLDGQIALLDKEIVRRSREDEVARRLMTIPGIGPITATAITALTPPPETYAKGRDFAAWVGLTPRQHSTGGKQKLGAISRMGERTLRRLLIIGSSAVVLQMSRRGAPKGSWLEQMMARKPRMLVTVALANKTARIVWALLMNEEDYKAPVAALA

SEQ ID NO: 365877 - protein, 342 aa, unidentified
MTITTIGIDLAKNVFQIHGVDHSGNPVLKKQLRRNQVLTYFIKLSTCTIGMEACGGAHYWARKLTAMGHTVKLMAPQFVKPYVKANKTDAADAEAICEAVTRPNMRFVAIKNAEQQAMLSLHRARQGFVKARTAQANQIRGLLGEYGITIPQGIKYVMKDMLTLLDAPEHELPGAFTDLLKRLHVHLMVLEEQVSDLETQINIWHSNNEYSQRLCKIPGIGPLTATALVASIADANCFRNGRELAAWLGLVPRQHSSGGRPMLLGISKRGDTYLRTLLIHGARSVVRVAKNKSSPTDKWTNEMLNRRHQNVASVARANKNARIVWALLAHGRDYNAEYKIAA

SEQ ID NO: 365878 - protein, 478 aa, unidentified
MTPRKGKGFAKDVAAARRHSGMELLRPHAAGIDVHSRQHYVAVPADDVPAAWINPDPHLPVGVRIFGTNTGDLEAIAAWLLDCGIKTVALESTGVYGEVLLTILERHGLEVVLVNPQQTATAPGRPKTDVLDCQWIQRLHSCGLLRASYRPSVEIRELRSYQRQREMLTRCAVSQVHRMQKALEQMNVKLTEVVSEITGQTGMNIIKAIVRGQRDAYKLAKYRHVRCKATEAEIASALLGTWSAAALFDLKQALQAYEFHQRQLQACGEQIKTCLQQFADRSEGKPLPKPVRQFGRKKNRGVFDNARQLLYQLAGVDVTLIEGIDETTALVLLCELGYDLSKFPTERHFTSWLGLSPNHRGSGGKIKSRRVRPVANRVARALRVAAQGCHHAKHALGAFYRRIAARCGGPKAVVATARKIAERFWRLLTKGTDYVRQGMDEYEKNYHFKLARRLAQRAAELGYKLVPLALTPEPEPQP

SEQ ID NO: 365879 - protein, 355 aa, unidentified
MDSKKYIGMDVHKESISMAVMNGAGKIVMDCVIETKASMILQFFDGLRGDLHVTFEEGTLAAWLYDLLKPHVTKLVVCDPRKNASMKEGNKSDKIDARRLAELLRMNHLNPVYHGEHGLRSLKELVRSYLTITKDFGRVMSRVKAIYRSWAIPCAGKQVYAPRHRAEWLGKITEPGVRRRAEFYYQQLDALRTVRQQVRRDLLAEGKKHEVWKRLCQIPSIGPIRAAVLLGILQTPHRFRTKRQLWTYCGFGIETQSSADHRSVGGQLQRAKKQISILGLNRNCNHDLKNVFKGAAVVASSKPGPFREFYTALLTKGIRPEMARLTLARKIATIVLIVWKRGACFDAQHLKPQTA

SEQ ID NO: 365880 - protein, 400 aa, unidentified
MLYLAIDQHRKQLTVNLRNEAGDVILKRQVSTEWKRVREFFEDLQNRSMPEGGFVTIVEVCGFNDWLLKLLAEYGCRETVLVQPEKRTRHKTDRRDSNSLGELLWTNRHRLLAGKNVQNVRHVIPPSQRDAEDRQVTIMRQRLIHMRTRAINRVHHLLLKHNLQQECPTKGLKTKAARKWLAELSLGSIDRLELDKLLAQWELLDKQIGEVEAAIGEHQVERATARLITTIPGAGAWGSLALACRIGAIERFPRPGSLPKYWGITPRSNNSGDNKQRLGSITKEGSALARCVLGQMVMHVLRRDAVMKEWYMRIKKRRGSRIARVAVMRRLATIIWYMIKRQQPYKLSSPRGDDHAREACVVPTGRNAFFKAKQGRSKGENEKSCPDTNITGSSAPLTRP

SEQ ID NO: 365881 - protein, 346 aa, unidentified
MDFDPKEADVKFCGIDLHSNNSVVIVSDEEDRIVFNKRLPNDLGRIRAALEPHRKELAGVVIESTYNWYWLVDGLMDAGYWVHLAHPAAIKKYEGLKHSGDFADAAYLAQLLRLGLLAEGYIYPRAERGARDLARKRMQLVRYRTAQILAIEGILMRQTGARMKGEAVKRLTTEQVDAFAFAPDVALAVEANRAVSQALGQQIEALERRLKERVSLRPEYRLLKTVPGIGQTLATTIMLETGCIDRFAQVGNFSSYCRCVDSLRESNGRKKGEGNAKNGNKYLAWAFIEAANFALRCCPQAKSFYERKKSKANRVLALKALAHKLARACYYILRNQEPFDVSRCFG

SEQ ID NO: 365882 - protein, 400 aa, unidentified
MNTDKKLWRNRKAKKELARRLQSENPGLEVVHPNAAGIDVGNGAHYVAVRPDRDPQPVRRFECFTADLYRLANWLQSCGVQTVALQSTGVYWIPLFDILEERGFKVYLVNARHTKNLPGRKSDVQESQWLLKLHTYGLLNNSFQPPSKIRILRTYWRQRLQHVTGAATCVQRMQKALTQMNIQLANVISDLSGVTGQLIVRAIVGGERDPRMLAELSHPRIQASRAEIAKSLEGNWRPELLFVLQQELEMYDTYQRRVAECDQELQKHLRAFSDTIPPPVKEALPPKKKKKQNKNNPHFHLADELQRITGVDLTRIDGIDVMVAQTVISEVGLDMSPWKTEAHFASWLGVCPDNRISGDKVLARGTRHVLNRAATALRLGALHSAKKPNLPRGTVPTLTQ

SEQ ID NO: 365883 - protein, 355 aa, unidentified
MYGLKHQKEKRSMDHFAGLDVSVKKTSVCIVDDTGKIVREVKVASEPEALLAVLKNPAYQFKRIGLEAGPLSQWLYSALAEAGLPVICVETRHMRAVLKAQINKTDRNDARGMAQMMRVGLYRPVHVKTLRSQKLRMLLTHRQLLLSKAIALENDLRGTLRNFGLKVGMVGKVKFEARIRELVETLPDLAVLVEPMLIVRRVLREQIVILHRRLLAVVRDDEVCQRLMTTPGVGPVVSLTYRATVDIPARFRKSKSVGAVFGLTCAKYQSGEVDWDGRISRCGDEMMRTMLYEAAQAMLRSKKWSWLKAWAMQIARRRGIKKAIVALARRLAVILHRIWVDGTEFRWTREQAVAA

SEQ ID NO: 365884 - protein, 364 aa, unidentified
MVKKATRISRFVAAVEDQPVVVGLDVHKKTYSVALFSKEDGLVESYTCPSGEAALAHQLTELGINLEHIVYESGPTGFALSRVLTDAGFDVSIIAASRISRGYAAAAKNDRLDAVKLATYYARGLLRPIAVPTVEQEGYRALVRRRKRIAESRGKIKQKIKGFLLASGIDEPDSIQKWSLAASADLTALDVPPQHHMALASMVREYLFLLSEDKMLRAEIRTATKRMHPEPYKRLTSIVGVGETAATSFLAELFSPERFNRPEEVTSYLGLAPVVSPSGGSAARARIKPVGQKRLRGILVEAAWQWTWRDPEAKELYNRHFAKHGIGQKAIVAVARKLATKLWRLAMEARPASMGDAASGARSA

SEQ ID NO: 365885 - protein, 420 aa, unidentified
MNQVAGKPFTAYVGIDWATAKHDICVQAADSESREFKRIAHQPDQIEAWAQALHERFGGRIAVALELSEGPIVSALQQFDFFVIFPIDPQRLAKYREAFTPSGAKDDPTDAEFALDYLMRHPERLKALKPQSVAMRKLRYLVEARDRLKGDQSRCVNRLVQALKQYYPQALEWFNEHNTVLFCDFLTQWPTLEKAKRARKIKLETFFKDHNVRFARIIETRIEAIKAASPLTRDPAVIDAHRLQAEILIQQLRLTIQALKRFDEEISATAEQLPDYDLFRPLSGAGIVIAPRLLAAFGEDRDQYPRAEHLQRHAGISPITKRSGNTTWVHWRWQCPKFLRQTFIEYAAQTINKSAWAGAYYRQQRAKGASHQTAVRALAFKWIRILYRCWQDRTPYDESRYLEALRRSGSPLLKQLAEAA

SEQ ID NO: 365886 - protein, 292 aa, unidentified
MNITAVGIDLAKNVLQVHAVDARGKAVLRRQLRREQVTAFFAKLPACLIGMEACASAHYWGRTLERFGHTVRLMAPQFVKPYVKTNKNDVADAEAICEAVTRPNMRFVPIKSIEQQAVLSFHRVRQGFVKARTAQANQIRGLLGEFGLVIPKGIWHVAQRVPGLLEDASNELPLALRQLIDRLTDHLKGLDRQVRELEREILTWHRNCGLSRKLEQIPGIGPLAATALVASIADARSFDNGRQVSAWLGVTSKDLVHHRSRGRGCSTCARDMTGRPAHITRSPGSARVASPR

SEQ ID NO: 365887 - protein, 431 aa, unidentified
MSCTDLGHPVPTATRSEDNILFAALELSRKSWLIATSSPGDDRISKRVVTAGDGPGLLALLGKLRETAERRLGGAVRVVVIQEAGLDGFWVHRLLVDNAIDSHVVDAASLAVDRRKRRRKTDAIDAEGLLRALMAWARGERRVCSMVRPPSPEDEDRRRLCREREALVTERIRHTNRIKGLLAGQGILDFDPLRPKHRARLDELKTGDGRPLPPCLLAEIRRQLGRLDAVVRDLATVEAERNGLVGLRAMDRPAQSPEEGAEPGGVAEAVTAPVAHGTDPAVAPEEVASSAASVTAPAEPAALLMKLKGIGPEFAAVLWLEALFRSFGNRRQIAAYAGLAPVPWQSGGIDRDQGIAKAGNPRLRKTMIQVAWLWIRHQPGSAISQWFARRVGTARGRVRRIAIVAVARKLLVALWRYVTQGVIPEGAVLKA

SEQ ID NO: 365888 - protein, 379 aa, unidentified
MGHDEVIIFEKTYGVLTPDLRQMCQDMVDRGVTEAAMESTAVYWVPVWNELCDSMELKLVNPYFIKQLPGRKSDVKDAQWIAECLLKNLIRGSFVPEPIVQDMRKLNRRIMDLNDDMTYNCNKLDAALQRCGFRLSNYVSTIKSRSYQKVLAAIINGTTDPEELTQMVHGRTINKHGRNTISSAVTASFSKTDITIFRQTKEVIDTIDRQIEECQKELTALCQEHFPEQYRRLQTIPGVKERAATAIIAETGVDMKMFATAACLVGWCGLKPRNDVSNGRYKSRKVTHGNRYLRQILIEIAWAASRTRNCFFSNFSYVQTTVKKKSKMKIQVAIARKILVALWHMLSKGEDFIDIYLKRLQKQKELEEQIKRLEATFVN

SEQ ID NO: 365889 - protein, 355 aa, unidentified
MSNEKYIGLDVHQATISVAVMDSQGKIVMESILETKASTLLEFFAGLRGSLFVTFEEGTWAAWLYDLLKLHVSEVLVCNPRKIPMHKHGNKSDKIDARKLAERLRMHDLKPVYHGNHGVRMLRELARSYLTVVKDLSRVMNRLKALYRSWAIPCAGRDVYYRRHRKEWLEKIPEAGTRRRAEQLYQQLDLLRHLRQQARRELLAESRKHAITAKLGKIPSLGPIRSALAVALIQTPHRFRSKRQLWTYSGLGLETRDSGEYHYVRGQVQRRKKQATIRGLNKDYNHDLKSLFKGAATQASVKPGPFQQFYQRSLAKGIQPTMVRLTLARKIAAITLTLWKKGEDFDIHKLNSQAA

SEQ ID NO: 365890 - protein, 413 aa, unidentified
MLLVQVFCGIDWAEDHYDVALVDQAGVMLMERRIDDDASGYQLLLALLAEHGDDQGEPIPVAIETPRGLVVACLRRTGRQLYAINPLSVARYRERHSVARTKSDRVDAQLLANILRTDRAAHRPLPTDSELAQAIAVLARAQQDAVWNRQLVANQLRSLLREYYPAFLEAFKDRRPGGLAHPDAGAVLAVASTPTQAARLTRPQLSAALRRAGRQRGIAAASIRLQAIFRRTSLHQLPMVEEAMGCQALALLKQLEAATHAADDLAEATRLVFQQHPQMAIFTGFPGLGELPAARLLAEIGDDSTRFADARGLKAYAGAAPVTRASGKKLVVLHRKVKNQRLAAVGYLWTFAALRLSTGARAHYDRRRLAGDRHTAAQRHLFNRFLGCLYYCLQTGQTYAEAQAFPVAQPIAA

SEQ ID NO: 365891 - protein, 320 aa, unidentified
MPQQGRIVGIDVSKLKAEACIRSLQQRRCEPSTPQGEAALIAWLRANAVTLAVMEASGGYERGWAEALRKAGIAVRVVDPKRVRYFAKSAGRLAKNDPIDAEMIAWFGETFTAEAEPAHDPERAALDQLVTARRRLIGLATQVAQLAEHRQPRVVAQAQQAIGKIVKTQLAKLEIAIDAKIAANAAFRARAAIIRSVPGLGPHFTAGAIAWLPELGRISSKAAAALVGVAPYDDDSGERQGERRINGGRREIRDLLYMATLAAASRHNPVVKAYYQRLRAKGKKAKVALVACMRKLIVILNTMLARGQNWNPPAAAGVLA

SEQ ID NO: 365892 - protein, 405 aa, unidentified
MPCFGGLDWGGTGHAVCVVDGAGAAVLRLEIKHDAAGLAELCKRLAKLAPAGELPIAIERPSGLIVDALVEAGHPVVPIHPNVVKACRPRYRAAGGKSDPGDAFMLADILRTDGHRFRALTPCSDEIKALRTLVRGRDDLVAERVCLANRLRSLLDSFWPGAGAIFADIDSPIALAFVQRYPTPDSAARLGEKRLKAFLASHAYCGRRSPADLLDRLRAAPTGLAGEAEAEAKGEMVRALAAVLERLVAEIAKLSARIEHTIAELPDGKVVMSFPRAGRICAAQILAELGDVRERFQTPDQLAAEAGVSPVTHASGKSRGVVFRWACNHRLRAAITCFADNSRHACAWAAAVYRKARDRGCNHPHAIRILARAWIRVLWRAWYDAKPYNPEQHTASRALNLVPQG

SEQ ID NO: 365893 - protein, 321 aa, unidentified
MQSNKISFKGQKIFVGIDVHAKSWKVAIAPEVGFVKGHSQKPSAKELFDFLKKNYPDGEYFAVYESGFSGFSTYYALTDVGIDCIVIHAADVPTTQYEEVMKTDRIDAAKLARSLKAGQLKGNYVPEKQYIDDRSVVRIRRTIQKQLSGYKSRVKHLLHCHGVEMPERFSKIQTHWSRAFITWLMNDVKLMSDTRTSLDLLIRQVEVIRGTLLEATRQLRKMSQTERYKRRHDLLRTIPGIGPIVSMCILTEVCDVKRFHNENEFAAYLGLVPTSHSSGEKTVHGEKTFRGNKQLGPMVVEAAWVAIGWDAGLSPTSSSPS

SEQ ID NO: 365894 - protein, 342 aa, unidentified
MQITTIGLDIAKNVFQVHGIDASENVVVRKQLRRSQVLAFFKALSPCLIGMEACATAHYWARELTKLGHEVRLMPAKDVKAYVKRNKNDAADAEAICEAVRRPTMRFVQAKSAEQQGQLMQHRTRDLLMRQRTQLINALRAHMAELGIVAAQGREGIKQLLTIVASERDARLPVDAHASLVVLAAGLQAVQTMIGSIERRIIIQHRSNEASKRLKTIPGIGILGATAIAATVPDPRAFRSGRDFAAWIGLVPRQDSTGGKQKLGPISKQGDQYLRRILVVGAHAVLKRARQQPEKYPWLTQLLARKPFRVVAVALANKMARIAWALLAKGGTYRAPALAVAA

SEQ ID NO: 365895 - protein, 477 aa, unidentified
MKDHRIEGTRRQLSQKQRRHPGPALLERMQPDAAGIDCGATSHFVAVPRDRDPQPVREFRTYTADLQRLAEWLVQCRIKTVALESTGVYWIPVYEILEARSIEVVLVNARDVHNVRGRKSDVQDCQWLQELHSVGLLRASFRPAGAIVALRSYVRHRQTLIEAAATCIHRMQKALTQMNLQLHHVLSDMTGVTGMAIVRDILAGVRDPHALAAHRHGGCKASEPEIAAALTGNYRPEYLFVLRQNFAAFEFHQRQIADCDQAIEAQLTSLADTRPPTPTELPAARPRCKPSKNEPRVALRSPLHRITGGADLSQLDGIGPYGALQLIAEIGTDMSRWATEKHFTAWLTLAPDNKISGGRLLSSRTQPSASRAAAVLRRAAMSLTRSATARGAYYRRVAYRLGRPKAITATARKLAVLVYRVMRGDLVYRDPGATAYLQHHHARLVNSLRRRAKELGLGLINLATGEVLDHAPVATVS

SEQ ID NO: 365896 - protein, 370 aa, unidentified
MGNASTLHVGLDVHKESIAVAYATEDGATAPVPLGAIGTRQCDIDALVRKLQSKSARLVFVYEAGPCGYWLYRYLTRKGLTCFVVAPSLIPRKPGDRVKTDTRDAVTLARLARSGDLTPVYVPAVPDEALRDLARAREDALHDLNAARFRLKALLLRNDVRYAGRANWGAEHLRWLARFVFPTPAQQIVFQEYVRTVTERTELLQRLEAELLEQAKTWRLSPVVEALQALRGVQFTVAITTIAELGDLTRFDTPRQLMSYLGLTPSEYSSGERRRLGGITKAGNRHARRVLIEAAKAYRHRAKVSEQIQVRQEHLPAVIRDIAWRAQVRLCGRYRKLLARGKHPNTVAAAIARELAAFMWAIAKARPVPA

SEQ ID NO: 365897 - protein, 342 aa, unidentified
MKIIGCDFHPSFQQIAMVDTETGEHTERRLNREEAIVFYRSLNGKVLVGMEACGNTLWMERLLTELGHELRMGDASKIRAMEVRKQKTDRKDAELLLRLLLEERFPQVWVPSPQQRDSRQLLLHRQKLVSARRQFKNQLQHLALNQGLQQKQKLWTKSGRELLEELPLTGWTAQRRADDLELLDQLERRIAELDVSVQQEAASDPIAVLLQTHPGVGPVTSLAFVLTLGRIDRFASSKKVVSYLGLNPAEHSSGGQQKLGSISKQGNPMVRSLLVEAGQSAARLVPELKRAYQRLKHRKHSGVAKVMIARKLAVRLYWIWRTQQPYTATRMQGSPSHLVGVR

SEQ ID NO: 365898 - protein, 344 aa, unidentified
MTHASSRYRLFVGIDVAATTCAVAWMHATTTPSRAITIDQTAAGFAALQRKLLSIEPEPQAVLIVMEATGTYWMRLASSLVAASFAVAVINPAQAHDFAKALLKRSKTDAIDAQTLAMLGARLQPECWTPPPPVYTELQQRLVHRDGLVAARTQFRNQLHALLQQPVVIASVRTRLETLISTLNEEIATVEQEIAATLQQDEAWAVAATHLATITGLGTLTVAWILTTTINFTLTTTPEAAANYAGLAPQLRQSGSSVRGRPRVGHGGNARLRRALYMASLSAIQHNPVIKAFYTRLRAAGKPRKVAVCAAARKLLRIAWAVANKKEDFDPAYATCSRQEVGGR

SEQ ID NO: 365899 - protein, 398 aa, unidentified
MNAIGIDVSKGKSKIAIIRPFGEIIAKPFDIAHHPDQLAELAQYIHSLDGESRVVMEHTGKYSEPIANFLCNAGIFVCMVNAKLIHDYGGDTIRRVKTDKVDALKIAGYCLDKWAKLSPYELTDEYRKILKTYNRQLSEYTKIKTMLKNNLISLLDQTFPGANELFSSPAREKDGHEKWIDFVLAFPHCHYIVSLSKQKFTTKYEKWCRKNGYNFCPHKAEHVYSAALNCLSTLPNNDFAKTLIIQTVNQLNHLCETIAVVKSEMSKIASALPEYGTVIAMHGVGKTLAPQLIAEIGDIRCYPKRSSLARFAGIEPPENQSGIYNQHSRRISKQGSPHLRKALFQVMCCVLQLAHEHEPTFQFIDRKRSEGKPYKVYMIAGANKFLRIYYARVNECYV

SEQ ID NO: 365900 - protein, 399 aa, unidentified
MRKSSPLELRVGVDVGCHSHNVAIGLSNGEILEEFSIKHEPEGFRQFFACIEKHEKKHSLPVSVAMEGYNGYARPLDTLVRARDYRLFNINNLKLARFKEIFPGAAKTDEIDARKALELFQLRDYLPVAKDVLQEVRATPKENEVLKRLSRRRRRLVNERVRVLNNFQADLQSVCPGLLEITGDAGNLWFLRFITSVDSLPKLARMREGTIRKLPGIGAKYTGIIITWQKQAHFSHEVEWVSDMILEDAWRILELHESIDSLDRRMAAVAIDSEIAQNLSTIPGFGSTTIAELAGEIGTVERFKDEQSLALYLGMTNLDNSSGKKKGSKPPKQVNERAKAAMMTAVDRHRKQVPQSQTYYRKKRAEGKKHNQAVRALGRHLCRVIFKMLKENRGYLLPQ

SEQ ID NO: 365901 - protein, 360 aa, unidentified
MFTERTSVGLDVHARSVVAHAMDVQTGEIFKARLCPDPVEVTAWIKALPGPSAAIYEAGPTGYGLARTLLSHDIRTVVAAPSKLQRPSGSRVKTDAIDAEHLSTLLRLDAFTAVTVPDELTEAARDLVRAREDCRSDLMRARHRLSKLLLRHGIVYSGGQAWSNAHDAWLRRQRFDSPLVQAAFDEAYDSVITITARRDRLDERIEAMAENSQYTDAVRRLVCLRGISTLTGFGLAVEIGDWSRFTGNSIGSFVGLIPSENSSGQSRSQGPITKTGNSHARRLLVEAAWHHQHRYVPGKTIRDRWDLASPAARARGDLGNRRLNHRWNQFKKRKKRPIVANAAIARELAGWCWSLAVLEE

SEQ ID NO: 365902 - protein, 331 aa, unidentified
MSRATHELEFTRKGSTMKPCSVAGVDVSKLQLDVCTRPADAVSSVPNDLDGIHRLIRQFQQDNVQLVCVESTGGLEALLVRQLHEAGIPVAVVNPRQIRDFAKALGRLAKTDRLDALTIALFAEKIEPQPTPPRSENAEKLRALTTRRDQVRRLLTQEQNRLDRTADKLVRKLIEKALGFYQKQLQTLDKEIAQVLEADEELQATARIVQSVPGIGATTAALLVAELPELGSITRGQVAALVGVAPRNRDSGTMRGKRTTGGGRKSLRCALFMPTLVAARYNPVIQAFYRHLLNQGKAKMTALIACMRKLLVILNSLVKSQTSWTPTPQTS

SEQ ID NO: 365903 - protein, 358 aa, unidentified
MQIIGCDLHARQQTIAMLDTDTGAFVEKTLEHDGEELRKFYSGLTRPVLVGIEATGSMQWFLEWMEELSIECRVGDPAKIRAAEPRKQKNDRRDAQLLLKLLSENRFPTIWMPSTEQRDLRTLLRHRHQWVRMRTRVQHTLQSMALNHGLRRGHSLWNQAGQQALRALPLAPHASERRKALLTLYPRLQESIDELDREVSQQAQNHPAARRLMTHPGVGPITALATEVFLGDPLRFTDGKAVASYIGMIPREHSSGGRQRLGAMSKQGNALLRYLWCEAAMHAVGRDPELKRFYRRKLAQKGMGKARVSAARKLGIRLWIMMRDQIDYEEFCRRGKARQESGSVCAGMSDITNGPAEA

SEQ ID NO: 365904 - protein, 416 aa, unidentified
MGKQREKACGADIHKNKIVATILSLAGTKNQSEFGTTLPELLRFKAWLNDNACDVTAMESTGTYWIPIYSVLENSIEVIVANPYMIKHIPGKKTDLTDSEWLAELCLKDLIVPSRIFPKEDRVFRSLTRAREGLVKIRTQLKNRIHKDLSSSHVKLSSVVTDVFGKSGMHILRGLLDGRSIDEIIEGIPSRRIKKKADEIKASIENNLDPSQIFLVESSLDLIGCVQDKIDRIDMDLKRKISTRQKDLKIAMSIPGIEFTSAATILAEIGNYRNFNSPEQLASYFGIVPFVNQSADKLHTGRITKHGSKHLRWIMVQVAHAASKKIGSRLRKFYLRVRAKKGAKVAIVALARKILCILYHLLMNQEAYEEPGVAKRSRLARVDQLSPQRKLTAQEMIDALLKMGYELKKIDPGACG

SEQ ID NO: 365905 - protein, 398 aa, unidentified
MCLEERPILEPNAAGIDVGAREMFVAVPPGRDENPVRVFATFTEDLERLTDWLEQCGVTTVALESTGVYWIPLFEILEQRGIRPCLVNARHMKNVPGRRTDWHECQWLQFLHSVGLLRAAFRPGQDICAVRTLVRHRNELVSAASQHVQHMHKALTQMNLQIHHVISDITGLTGLAIVDAILAGERDGAELAKLKDPHIKADTETIRKSLEGNWRPEHLFTLGQSRALYRIYQQQIVSCDLEIERMLGEFEPRVDPTQKLLPPDGKRNRAGRKRRRKNGHPHPEFDLRTEVYKLFGVDVTQIPGLEENALPLFSEVGRDMSRWPSAAHFVSWLALCPDNDISGGKLLWRGARRVKNRAGHLFRLAAFSLHHSPTPLGNYLRRMKTKLGPKRCHHGHRP

SEQ ID NO: 365906 - protein, 403 aa, unidentified
MNAVGIDVSKGKSMVTILRPFGEIVSSPFEIKHTSSDIHSLIKLIHSIEGESRVVMEHTGRYYEALAHQLSAADLFVSAVNPKLVKDFNNDSLRKIKSDKADSVKIARYALDKWQSLEPYSITDELRAQLKVMNRQFHFYVKQKTAMKNNLIGLIDQTYPNANTYFNSPTRSDGSQKWVDFVSTYWHVDCIRKMSLNAFVEHYQNWCKRKKYAFNKSKAEEIYTKTKELVPVFPKNEITKHIIRQAIDQLNSTSVTVETIRTLMNETASKLPEYSIVMQFKGIGPSLGPQLMAEIGDVTRFTHKGALTAFAGVDPGVNESGSYAQKSVPTSKRGSSNLRKTLFQVMDVLIKPMPQDDPVYQFMDRKRTQGKPYYVYMTAGANKFLRIYYGRVKEYLSVLPDPS

SEQ ID NO: 365907 - protein, 419 aa, unidentified
MSEDIRWLCGFDWASQKHHGCVLDAAGRRLGERDVDHGGAGLGEFCDWLIEKTGGTPAEIAVAIETSSGPVVETFLERGFPVFSLNPKQLDRFRDRFSVAGAKDDSRDGWVLADSLRTDRPAFRRLSVEDPVIIELREWSRMGDDLTAELNRLGNRLREQLWRYYPQALQVAGADLTAPWFLALWHQAPTPAKAAKLRQTAVERILAEHRIRRLDAAQVLLMLRQKPLTVAPGATEAASGHIRLLLPRIRLTSDQLKAVHRRLDELCAKLEAPEESEPGQECEHRDATILRSLPGVGRIVLATMLAEASEPLRRRDYHALRALSGQAPVTRRSGKSCIVLRRYACNKRLAEALFHWSRVAMQHDPISRQRYAELRRRGKSHGRALRTIGDRLLFVACTLLERGTLYDVNHERAPVTAAA

SEQ ID NO: 365908 - protein, 415 aa, unidentified
MLKIVYPICCGIDVHKTFVVATIATTNRENITTYQTKRFSTFTKDLRALALWLSNNECVHVCMESTGKYWIPVYNILEPSCRITLAHPKYVKAIRGKKTDKKDSVWIADLHKHGLVPGSFIPPADIREIRDLLRYRSKLVSFASSEKNRVQNSLTVSNIMLSNVVSDTFGKSASAILSHLLKHPDDQDFDFRPLLHGSMLKKQDDIALAVDGTISEVQAGKISMCLSHMDVIKSYIAQIEATTIRLTASYSSAIKIIQSVPGISLFSALAILSEIGADMSAFYSAKHLCSWAGLAPSNDQSAGKKKSVRISRAGVYIKPLLVQCANAAIKDKDFPHYRIRYEAIKHRRGHKRAIIAIARIMLTAIYHMLSNGELFNPALYEKAQCKPGFVASSEQHAVKLLQRLGYSVVKIAESA

SEQ ID NO: 365909 - protein, 390 aa, unidentified
MQVKADRPEAPSAIRSDLGAIFVSLELSRSIWLITSLSPGAGEKMSKHSVPAGDIGALLARFSEMKQKAFARTGKSFPIIVIQEAGLDGFWIHRVLQKEGIESHVVDPASIATSRRRRRPKTDRIDGEALLRALLAYKRGEPRVCAMVKAPTPEEEDRRRLCRERKVLTTERVQHVNRIKGLLFCQGVSGYEPLRRNRRQRLDELKTGDGRLLPDHLKAQISRELDRLELLLEQIKAVEAERNALFAVAKAAAPTAAPVALLLDLKGIGPEFAAVLWMEAFFRSFANRKQIAAYAGLAPTPWQSGSIDREQGVSKAGNPRLRTTLIQLAWLWLRHQPQSALAIWFKERVMCNGGRFKKTTIVALARKLLVALWKYVTAGVVIEGAVMKTV

SEQ ID NO: 365910 - protein, 372 aa, unidentified
MDERIKFFIGLDAHKESTSVAVCEATREPARFAGTIGPDVRVLLKLLAKAGDPAQVSVVYEAGPTGYGLYRELRQRGYRCEVVAPSLIPRRPGDRVKNDRRDCARLAELSRAGELKAIWVPDEAHEALRNLWRAREDAVNMRLKTRQQLKAFLLRQDRRYPGRTSWTKSHERWIAEQRFDHEADRIVLAEYQLAVDSAEQRVQRLTIALTEAVQGWRFEPVVAALRALRGIDTVSAIGLVCEIGDINRFASARQLMGYLGLVPSEHSSGNSVRRGSITKTGNAHARRLLTEAAWNYRFPARLSRDLRARSRALPEAVRAQAWKAQLRLCSRFARLSSRGVQVNKVCVAVARELSGFIWAIARQASPAVQTIH

SEQ ID NO: 365911 - protein, 448 aa, unidentified
MPKPQVIDDQQHERVLDRVAAADVAKREGVVCTRLPHPSRPGGRQSAVWTVPATMSAVTGLAARLPADGVQMVTLESTSDYWRIWYYVLEAAGLAVRLVTASQARNLPGRPKTGKLDAMWLARLTENGLLRPSFVPPAPVRALRHYCRARTHLVQDRTRCWQRLEKLLEDALTKLSAVASTLTTLSAQDMIKAMIAGERDPQVLAGLARGRMRAKHEALAGALAGLFAGHHAELAGLLLDQIAFPDGRIARLTILISEQLASLSDAWGVNADGTTGPGAGTSPDAPVLSAVARLDEIPGISAGLAASIISGTGLDMTRFPAADHLVSWAGLCPRTLQSGTRTRHGKGTGNTYLRGHLGQAAAGLAGTATFPGERHARLARRRGPAKAQVAIARSLLVIIWHLLNDPQARYADLGPGHYQNRIDKTRKARSHIRQLEAPGYQDTLTQPA

SEQ ID NO: 365912 - protein, 355 aa, unidentified
MNIHRVQDFVVKDKEVFVGLEDSKKTWKLAVRCERMLIHRASMEAKYPVLVRYLRNNFPECRVHVIYEAGFKGFNLFDRLTEDGIDCVVIPAHMVTEPKVNRVKTDKRDANRLALILENHDFRDACHVPDRERREDRQVSRTLIGIQKDIIRTRNRIHRLLEFHGIEVSFATRGRKGFQSLKKLTLSEPLRMSLDILLAQLEQLWAHQVSLRAALRAMGRKERYRRAFEIARSLPGIGWATAIRLILELGEDLSHFTTGKKIASFVGLTCSEYSSGETERKGCITGMGSGFLRSTLVENSWVAIRRDPVLLAKFSRVWRASGSKKKAIVAVARMLIVRLRACVVMGTPYVMGTVR

SEQ ID NO: 365913 - protein, 348 aa, unidentified
MRSQNAVATVYGIDLGKTYFHVVGTDSTGKPVRRAKLTRNNIFEFFANVPVAIIGMEACPGSQWLARKLLALGHVVKIIPAQFVKPYVKSNKNDTIDAAAIAEAVTRPTMRFVPIKHTEQVDLQALHRSRDLSVSSRTRLISQMRAFCLEYGLPIRISPAAFKSAIPGIISDDTNDLTPAMRRLLESLWQDFRILDDRVAAVTAEIAAIANQSDLARRLETVPGIGPLTATAIVSAVGGGKQFRTARDLAAWLGLTPAQYSTGGKTTLLGISKRGNSYVRRLLIHGARSCVMHLDRTRDRLGAWLVGLESRIHANKVVVALANKLARIAWVILNKPGALYERRDPHFA

SEQ ID NO: 365914 - protein, 397 aa, unidentified
MYIVGIDIAKRKHEAAVIDGDGAVIIKPFSFTNNCSGYNRLLAMLAKAKLPLDEVSFAMEATGHYWLALFTRLQKEGFRVQVINPVQTNSIRSFYIRQAKTDPRDALLIAEVIRFGHFSESTLHPENIYELRELCRGRHAIVSMQADVKRKVVALLDQVFPEYETAFTNLFGDTSMAILQTCPTPKELSEMPLEELCHLIEVSSHKRFRMAKAQELQALARNSFGFAMAGDVFSTMIRLYAKHLDFLKQQVREMDRKIAEIMDTLDTPITTITGIGPTLGAYILSEIGDISRFSSAAKLAAYAGIDPTMRQSGEYNGVRNRMSKRGSPYLRHAIWLAASSAVLHDPALKFYFQKKRDEGKPYMASVGHACRKMVSIIYAVMRDNKAYTPYIPNEISA

SEQ ID NO: 365915 - protein, 405 aa, unidentified
MVFLGVDWAEEHHDVCLLDEQGKVLGRARVANSLEGVSRIHALVADYADEPGTVVVGIETDRGLLVQALVAAGYQLYAINPLAVDRYRDRHSVSGAKSDAADAKVLADLVRTDRNNHRQVAGDSEEVEAIKLLARAHQSLVHSRQRQVNQLRSTLREFYPAALEAFKDDLGGRDAMAILEYAPTPTSGRSVSQAKLISALRKAGRERNLEARAVELQGMLRQPHLEQPATLVAAYAVIVKSCIQMIRELNAQTKALEDELTKSFELHPDAALYLSLPGLGFVLGARVIGEFGDDPNRYLDAKGRRAYSGMAPITKSSGIRHVVLARYARNRQLADACYLWAFSSLTGSAGAHQYYRVLRARGKSHHQALRALGNRWVSILHGCLRHGTLYSEAVAWTTPATAIAA

SEQ ID NO: 365916 - protein, 335 aa, unidentified
MTRFCVGVDVSEKELAIAYWEHDKSVFVGTYPNNQDGYSAIKVKIDELNKADAIVHLVMEPTGGYEQPFAHFADKQGWKVSIPNPLKPKQFARMIGKRTKTDPQDARTLAHYAFVQEPPTWKPLPKEVQELEHLLNRQEDLSDMLRQEKNRLHSAEYSVNIHSAVIQDIKETICSLEQKISAIQSAIKEHLKANSHLDEQKKLLLTVSGIGEKNVLYILVVLHRWGVLTEGNGDSKGLTAYLGLDPAICESGSSINKKARISRQGNRPLRSRLYIGALGGVKGNNPLRAFYQRLVGRGKPKKLALVAAARKILVWAWAVFISNTPFDANRFHHVN

SEQ ID NO: 365917 - protein, 440 aa, unidentified
MSNPRPLTRGDRRRNEKLARLRSIVRRDLAIVGIDLASAKQAAVVADHDSITLGRRMFDGDPWVIDDIIDWALPIAAEAGFVGIVVGCEPTGHRWKPVLDRCRARGIEVVCVNPMLVHRGREEEDFTRDRSDFKDSTIIARRVADRHCYVPYGLEGHWCRLRHLGARRNDQLVEATAARQQLRDLFECVWPAVLRSAAKPLESTTWRAAMAVSVDPAEIADMGYETFAAAVGVELARWGGQRRNHRVLQAIWAAAIEPDGVARERPAAIERATFALRDWQRALDELADVEARMVEVLDALELTELVKSIAELSAVGAAAILAEAGDPARFDSARTWVKHAGLCPRANESGTFAGQTKVSGRGRPGLRTAAWRAIWGALHHNTVYAARYTHLRTRTDNPLRDGQARAAIAAALLRQLFVVVTRRVAWNPAIAAGEEAPIAA

SEQ ID NO: 365918 - protein, 303 aa, unidentified
MDNFYFIGVDVSKKKLDFCVLFEGKVLREEQVSNHQQAVARLIGELKNDLEMDNEQFLICAEHTGQYTFPLVCACKSVECKLWLENPSQIKYSSGMQRGKNDKVDAKRIAIYASRFGDKVKYYDRPTEEIERLKQLERERALYVTDLAKYKGQMYDQKDFMPAALYRKKTKRMKGLIQELQAAIDAITAEMEKIIGSTEVLARQMELLMSIDGVGKVVALNVIIETEAFSRFDNPRKFCCHAGVAPFSYTSGSSQHSKNKVSHRANKNIKKLLHMAAVSVTHRKEGELKAYYMRKVEEGKNKM

SEQ ID NO: 365919 - protein, 376 aa, unidentified
MNKISTFVGLDVHKKTISVAVAHQDGEPRGWKKIANEPEAIARMIQEWGAEGTRYAYEAGPTGYGLYRRLREMGAECIVAAPSKIEKAPGERIKTDRRDALKLARLLRRGDLHAVWVPTPEQEAFRDLTRARQTAKAEQQRVRNRITKLLLRLEVVEPTGVNRWTTAYRRWLGDLRLAQPLEQGVLDEFRGALGEAEARLDRLVQALKTACKSYPQASLIAALQTLRGVAVITAATTVAELGDPSRFATPRQLMGYVGYGVSEDSSGERVHRGRITRAGNAHLRHTLGEGAWHHARPVRVGKVLKAQRRGQPPAVVAIAERADERLHRRYWRLVHRGKLPQQAAVAVSRELVGFIWAIACEVNGLPVPAPRARAAA

SEQ ID NO: 365920 - protein, 341 aa, unidentified
MEKATIIGIDLAKRVFQVHAAAKDGRPVLRKKVSRAQLLGFLTKQPRAIVAMEACATAHEWGRAISGLGHEVRLIPPIYVKPFVRRQKNDAADAEAIAEAASRPTMRFVALKTEEQQARSMIFRTRDLLVRQRTQLVNALRGHLAEHGIVAAQGLAKVKVLSTAMQDTGSLHPLVRELGQRYLDHIARLDAEIAELDKRLRRPSKDDETAKRLQSMPGMGPITAAAIEAFAPPMAAFKRGRDFAAWLGLVPRQHTTGGKPRLGRTSKMGQRDIRRLLIIGAMTVVRWAVRKGAAKGSWLARMLAHKPRLVVAIALANKMARSVWAMLSKGEEYRGSALAPA

SEQ ID NO: 365921 - protein, 360 aa, unidentified
MGEGSWIGLDVHARSVVAAVIDDATGEVVAARAPVGVDELVAWVRSHRGPVRVAYEAGPTGFGLSRALEAVGVGCVVAAPSLIPRSVAGKGRKRDATDAELLARSLRRGELVAVRVPDARDEAARDLVRAREDARADLMRARHRVSKLLLRHGRVFDARAWTLAHDAWLRRQVFEHPGSGAAFDDYYQAVLTVRLRRDGLDEKIAELAGDPRFAPVVGRLGCLRGVGTLTAFALCVEIGDWTRFTGATIGSYLGLVPSEHQSGQKHTRGPITKAGNSHARRLLVESAWHHRQPHRTSLELERRRDGQRPEVRARAEQAGRRLHQRWRHLEQRRGVRSTVVAVAVARELAGFCWSLAVMDD

SEQ ID NO: 365922 - protein, 355 aa, unidentified
MNKINSNFEGQTIFAGMDIHKSSWNLGIHLNDMFVRNVHQKPNPAIMAKYLKQHYPGANYKAAYEAGKFGFWIQRQLTALGIECLVVNPADIPKSQKDSLQKTDPRDARNLGLRLQSGVLHGIHIPDEQQEADRAFFRHRKRIWKDLTRCKNRIKGLLAFSGIDIPEQYDNASWSHNFINWLKALDCKQQSRRRALDYMISQMEYLRKELLQISNEIRKMMREQRYKKNYYLLRTIPGIGPLTAASILVELGDIKRFETFCHLNSFVGLLPMEHSSGQSENKLSLTVRKHRQLRSDLVESAWTAKRTDPAMALYFQEQIKRKDSKIVIIKIARKLLNRIRYVLINQQPYEMGIVK

SEQ ID NO: 365923 - protein, 397 aa, unidentified
MYIVGIDIAKRKHEAAVIDGEGAVIIKPFSFTNNCSGYNRLLAMLTKAKLPLDEVSFAMEATGHYWLALFTRLQKEGFRVQVINPVQTNSIRSFYIRQAKTDPRDALLIAEVIRFGHFSESALHPENIYELRELCRGRHAIVSMQADVKRKVVALLDQVFPEYETAFTNLFGDTSMAILQTCPTPKELSEMPLEELCHLIEVSSHKRFRMAKAQELQALARNSFGFAMAGDVFSTMIRLYAKHLDFLKQQVREMDRKIAEIMETLDTPITTITGIGPTLGAYILSEIGDINRFSSAAKLAAYAGIDPTMRQSGEYNGVRNRMSKRGSPYLRHAIWLAASSAVLHDPALKLYFQKKRDEGKPYMASVGHACRKMVSIIYAVMRDSKAYTPYIPNEIST

SEQ ID NO: 365924 - protein, 340 aa, unidentified
MDTIGLDLHKRESQLCILTEEGEIVERRIVTSRERFSAVLGGQPRARILLEASTESEWVARHLESLGHEVIVADPNFAPMYATRRRGVKTDRRDARTLAEACRLGAYRRAHRASDEQRHIRAELAVRDALIRTRTRTVALAKALIRRDGLRLPSGGPAHTEAKLTALPLPPALAAELAPLRALWAPVNTQIAAADARLAHVAAADPVVAQLMTTPGIGPVTAVAFVATLDVVTRFASAHQVEAYLGLTPREYSSGEQQRRGRISKTGNARMRYLLVEAAWRVLRTKDPAAAALRAWAEGIAQRRGRSIAAVALARRLAGILYAMWRDRKDYRAPPPAAVA

SEQ ID NO: 365925 - protein, 356 aa, unidentified
MGLKGCCKRLKTVLKNQTKIKVGLEATGHYSYNILGFLLDNDLPVYVMNPLHTNLYRKSMSLRKTKTDRVDAKTIATMLMSNVDLKSYTDIVYHNEELKSLTRYRFDKVQECAKLKQSVSRLATILFPELEGLVSSIHGTSIYALLGEYPGAKQISEAHLTRLANILVTTSRGHYRKDRATHIRDAARTSIGSVMPAKSLELKHTIKLIQELTSEINEIEDAIRKIMDELKPPILSIPGMGFYSAAMILAEVGDFSNFNSPDKVLAYAGCSPSTYQSGKLTNCYAHMEKRGSRYLRYALYTATKYVCYWNPVFTEYLTKKQAEGKHYNVALSHATKKLVRLIYALQKSGKAYLAIT

SEQ ID NO: 365926 - protein, 425 aa, unidentified
MAIMKDCCCGVDIHKSFIIAVIAKFKDKEVTFTKYERFSTFTSGLREFKEWLRFHNCRDVCMESTGKYYIPVYRIVSDAEFHVDVVHPKYVRAPRGKKNDKRDAKRIADMYMRDHIAEYSIIPPAEILVLRDLTRYRRKTVNTITAEKNRMSNCLTVSCIKLDEVLNDVYGKTGQAIIGQIIERGGCSFDPTPYIDKRVKASVEDFREALDGDITPSTLTNMKIIQERLGYLSNQKAELESSMESLSKDFNRQINILVSAPGIDTISAVSIISEIGVDMGVFGSLKKFLSWVGVVPQNNESAGKKKSTRIGKGNTWLKPVIVQCANAAIKSKKHPEIREKYIALKKRRGHGKAVVAIAKRLMTAIYYMLLRGEMYSPCYGIDRAPNRGKIRVENLIAYYRSKGYTVVDTDGKLLQAEPSLPAQVS

SEQ ID NO: 365927 - protein, 425 aa, unidentified
MNDDVLIAVDPRQAGNTAAVLDPVTKTVLEAARSANSADGHAQLTAFTSRWDRRRWAVEGCCGAGRSLAQRLVADGELVLDVPAKLAARVRVYSRGQGRKTGKHDAVSAGLAALHGTGILPVACDDATVSLRLRCDRRAELIAQRTQAVGRLHRLLAELTPGGMRRELTANQAQALLARIRPAGDVAVVRVHIARDHLAGIRALDARLKYLSGQIAALVTAPGTGLTGLFGIGPVIAGRILAEVGDVARFPTKDAFASDHGTAPIDASSGDQVRHRLSRAGHRRTGHARHMMAVTQIRCPATPGRLYYQRKRREGKTPKEALRSLKRRLSDLVHHQLLADRRGTIEACRSPTTPRPARPASTSPAPRSSRPHHPSGRHTAGHERVRRAGLERPPPRQHRDPRTPAPAATPTSPTRPKFSAETAPS

SEQ ID NO: 365928 - protein, 338 aa, unidentified
MQHLAIDLGGKESQICVRDAKEQILEERRLPTKRLGEYLAKQPPSRVIVETSAEAFAVADLARHAGHDVRVVPATLAPSLGVGAHGIKTDRRDAQALSAVSCRVDLRSVHIPSEQARAWRMLCNSRDALVSTRTKLTNTVKSQLRCRLVLTYKRRSTATPEQIRTLWTELEGSVPPHVERQLQVIEVLDGQIQEADKEIRQLAKKDEICPRLRTVPGVGPLTAMRYVATLDDVTRFTTAHHVQSYLGLTPGEDSSSRRTRRTHLTKAGSPQMRWLLVQAAWTAMRCAPKDPMVTWAVQIAERRGKRVAAVALARKLAGILFALWRDGTTYNPKRGTAD

SEQ ID NO: 365929 - protein, 345 aa, unidentified
MEQLIRIGMDTSKRVFQLHGVNAAEDVVLRKKLRRKEMVALFADLAPSVVGIEACGGAHHWARLLRSFGHEVKLLPPEYVKAYRKRGKNDAADAAALCEAMSRPTMRFVPVKSAEAQAALMLAGLRERPVRQRTQLSNAIRGYAAEFGHVAAKGLDKIEPLLARLAADEDLPELAHELFALHAKEHAELQAKLAAIEAKLMAWHRTNACSQRLDKIPGIGPVSAAMLTMKVPQPQLFRSGRDFAAWIGLTPKNHSTAGTTRLGVITRAGDETLRSLLVVGATAVIQQVQRGRGRPSPWLAALLKRKPPKLVAVALANKLARIAWKLMVSGESYRAAPIPAMPVAA

SEQ ID NO: 365930 - protein, 479 aa, unidentified
MCLPSLRLVRLKSLQTCLFGLSAHRLLFNGHALNVDPIMSRCSYVARLRLSFKTRTSLISYNLESGDFMNDLLLYLFVGIDVSKENNQVYAMNFSQDKLASFSTPNHQSGAQTLEAKLLEILDRHHLSKIIIAMESTGIYSAHIATYLSASKSLFPFDVRVYVLDPKISRNYRHSFSDMDKTDPKDAFVLADLARVGRCDRLTPFKGPQKIALQRLTRHRHHIAELLAKEKVYALNNVFLKFSEFRGVFSNDFSKTAVDLLLNFKSVDEIIDIPLEELVEFVMTSSKNRFADSNQIALTLKAAARNSFRLDKMAYEPINLSLAASFNCIQTYQNQLKSIDTAILKQVKGLNPNHYLSLISIPGIGPVYASGILAEIGHINQFDSEDALAKYAGITWRKSQSGNFDAEDTKMTKTGNVYLRYFISEAANLARIHNPVFKDYYLKKFDEVKTHQHKRALALTARKLIRLIFGLLSTDRLYK

SEQ ID NO: 365931 - protein, 347 aa, unidentified
MTKLMAGMDLHSNNVMIGIVDLEGQRVVHRKVECDLAKVAAFLKPYKARLEKVAVESTYNWYWLVDGLGGLGYAMVLANPAKIQQYSGLKHGDDKGDAYHLADLLRLGILPEAYIYDKELRPVRDLLRRRMGLVQQRTSLMLSFKSLYTRTTGQAMTLSELKGMAVKKAAELYHHPANRLIAQVQKQHIEQLTESIEKLEKVILKSAKELPYYEKLKTLPGVGVILGQTITLEVGDIGRFAEAGHFASYCRTVDARHLSNGKKKAENNQKCGNKYLAWAFVEAANFARRSDEKCRRWFDRKATKTSNVIATKALACKLAKAAWHVMAKEVSYDETRVFPELAAKKTS

SEQ ID NO: 365932 - protein, 391 aa, unidentified
MVCVGIDVAKDKHDCCILDSDGMVRADCFTIPNNMDGFKQLLQTIRNCTKKSDKIKVGLEATGHYSYNILGFLLDNDLAVYVMNPLHTNLYRKSLSLRKTKTDRVDARTIATMLLSDVDLKSYTDIAYHNEELKSLTRYRFDKVQECAKLKQSVSRLATILFPELEGLVSSIHGTSIYALLSEYPGAKQISEVHLTKLTNLLTTASKGRYGKEKAIQIREAARASIGSVMPAKSLELKHTIKLIQELASEIDEIEDSIQKIIDELNPPILSIPGMGVNSAAVILAEIGDFSNFSSPDKILAYAGCSPSTYQSGKLTNCYAHMEKRGSRYLRHALYNATKYVCYWNPVFAEYLAKKRAEGKHYNVALSHAMKKLVRLIYALQKSGKTYLTSA

SEQ ID NO: 365933 - protein, 411 aa, unidentified
MEVFCGIDWAEDHHDISLADRDGTLLARRRISDDAAGLAQLLELLAGHGDTAEDPVPVAIETPRGLLTACLRATGRKVYPINPMAVARYRDRHSVAGRKSDHGDAFVLANVLRTDLHAHRPLPDDSELAQAIAVLARAQQDAVWARTAAHNKLRSHLREYFPGFLAAFADARGGIMRPGARPILAAAPTPAAAAALTLTQLRGLLKEAGRSRGIDTEATRLRDAFRVRQMRQLPLVEDAMGRQALALPGQLDAACTAADDLEQAVTGSFNQHPDAGIITSFPGLGPLTGARVLAEIGDDRSRFADAKGLKACAGAAPITRASGKTRSVTRRHIKNNRLNAAGYSWAFSALTASPGARGHYDRRRDAGDRHAAAQRNLFGRMLGCLHHCLITGQHYDEATAFPAPTKLPAAA

SEQ ID NO: 365934 - protein, 425 aa, unidentified
MLGVGIDWSEEFHLVALGRPGEGVIDISRVEHTPTAVDTLVGRIAGLEPDPAEVRVVIETRHGLLVERLIDAGYVVVPVNPDLVARRRGPAKKKDDSEDARIACLIALDRHERLRPLIPHGEIAGELRSIARDDERAARDERRLGNRLRQDLIATFPAALQIGGDDLGAPTFLRLLERWPTANALAGASREELVAFARSCRHGWPERFADRVATSLAADHFRPKEYLVRAKADTIRLAATQLLAIARQRRAWERRMGELLLGAPRRGRDHQPRGDGLGNGFPDGEIYLSFPGLGDRLAARIAGEIGDHPEQFDSPSSLQCYAGKAPVTRRSGKSELVVACRLAHNRFLGAAVQQWAFCSLKRSGWAREFYDAQRARGKGHHAALRALGNRWLEILWHCVRRGVLYDETVHVANRNRALGRTAEAA

SEQ ID NO: 365935 - protein, 482 aa, unidentified
MKKPSIYPDRSQELLALFEQAGNNKKIMCVPIDYAKKDHIVMFCNGYGEVLRKPFSVDNSVDGVKYLLDQVSRSCRHRHIRQEHVFFGGEDVNSYAENFANTLRANGWLVANVNAHDAKKQRENLQASTDRTALMGIAAMLLNRRANCCPAQSGIYRNLRTLVRHRKKLVKMKTEVRNRIHTIVDRLFPGFLNEKKSGIVPFSSSSLYLMQERFSAPQIRRRKRPVLIQHLEKRGTKKAEQIATKLQDYATQVLTTPDEYAATLQISLANHVSHFRCLLDGTQQLVKEMALLLAQTQGAFLTSIKGIGIVLASGVTAEIGDPLAQRSTGRLASYAGIIPKVKQTGGSQGPSITGRVSKRSNHLLKDFVVQSAYHIGRSGPKDLQNDYSRRVSAGQHADFGIGRRFVRMAICLMRTSQIYLPPDLRNTHIETEQRADYYLSMWPYLKDKWSKTGALDMAFAKDKPLGQWRYIVQELYGIKLKL

SEQ ID NO: 365936 - protein, 351 aa, unidentified
MERYLGADVHAASVTFSVLDASGKQIRRDVVETNGKALVGYLQQLAGNLHLCLEEGEWSQWLYEILSPHVAELVVYRGEWKPGLKSDAIDAHGLAEKLRTGRIDRPVFKDARLFTALRDRARAYTMLTRDVARVKSRLKSFFRARGLPCAGEALFKPAERAQRAAALPVATREAVDLVGRELEQLSALKAEAEASMLRESHRHRISRVLETAPGLGPVRVALLLPIVITPHRFRTKRQFWSYCGFAVVTRSSSDWVQEQGRWMKARVAQTRGLNFNHNRMLKAIFKGAATTVIAHCGPNPLRQAYDRQLANGTRPNLAKLTVARQIAAIVLAMWKTQEVYDPGRRSPLAIG

SEQ ID NO: 365937 - protein, 349 aa, unidentified
MSQTLSDAVAVIGIDIGKNSFHIVGLDGRGAIVLRQKWSRGQVEARLANLPPCLIGMEACVGAHHLSRKLKAFGHDARLMPAKYVRPYSKGQKNDFRDAEAIAEAVQRPTMRFVATKTTDQLDLQALHRVRERLVSQRTGIINQIRAFLLDRGVAVRQGLRFLRVELPRILAAPPDVLSTRMISVIEDLAQDWRRLDERIDHLSGEITALARQDVGCERLMSVPGVGPIISSAMVAAIGTGDVFSRGRDFAAWLGLVPKQISTGDRTILGKISKRGNRYLRVLFVQAAWVVLIKPQSWERHGLKSWIEAAKKRLHRNVLAIALANKLARIAWSVLAHGRSFETSKLATA

SEQ ID NO: 365938 - protein, 339 aa, unidentified
MKLYAGIDLHSNNSVLVILDEQDRIVYERRLSNELPLILAQLAPYRRNIDAVAVESTFNWYWLVDGLMESGYTVKLVNTAAVKTYEGLKYTADEHDARHLAHLLRLGLLPTGYIYPQKERAVRDLLRKRAQLVRVRTAQNLSIQNLVSRNTGQGISTREIGQLDENIIHELSGGDGNRALAIESNLAVMKVLEDRIRQIECVVLAEAKLKPAFEKLLTVDGIGKILGMTIMYEIGTIERFSKVGRFASYARCVGSSRWSNGKKKGEGNRKNGNKYLAWAFVEAAHFSVRYNERIKRFYQRKKAKTNGIVAIKAVAHKLARACYHVLKDQVLFDAERAFA

SEQ ID NO: 365939 - protein, 343 aa, unidentified
MQAVTTIGLDIAKSVFQIHGVDAAGNVIVRRQLKRRYVLPFFQRLPPCLIGIEACASSHHWSRELKALGHTVRLMPAAYVKPYVKRQKNDAADAEAICEAVTRANMRFVATKTLEQQSCLMLHRTRHLFIRQQTAVINAIRAHLAEFGIVAPVGRNGVEDLLNIVADCGDKLLPDVARACIAALGAQLRMLKARILEFDRLIVAWHRSNEASKRLDDIPGVGPALATALVASVADPKAFRSGRDFSAWIGLVPKQHSSGGKDKLGSISKQGDRYLRSLFTAGALAVIRYAKIHGTKHRPWLTALLARRPTKVAAIALANKIARMAWAMMARGDRYKEPVALAA

SEQ ID NO: 365940 - protein, 437 aa, unidentified
MSIPFALDTVLAVGVDPHRESLDVIAIHFPEEIVLDETFDNTRVGHRALWSKARALAAEQGLSLIFGLEDGSNYGYALGRYLVNQGICVKEVNPRMTSRQRDFYGEDKTNRLDALATAAILLRAYDRLPDVAVVQEATEATQELSRYREQLVKEQTANLNRLHRHLANQYPTYKTFFSQLNGVTALHFWATYPTPAHLRATTPQELAHFLHEKSKHCLGAESARQKARQIFKALDDAPWSEPGLLAKAQGTLIRDLAQRLLQLKRSIQGIEAKLEETVPATGQQLETFQGIGTVSAAVLIGETRDTARFNHDKDRFAKYNGSAPVTKGTGKHARQVENHWCNRRLKSILGQVALAARHNEPLSAEYYQACLDRGLDPGEAHKRLMRRLSDIIFAMMRDKTPYDPEIHRRKQQRHKRKGKSAAPAVTGGLSLALFPPR

SEQ ID NO: 365941 - protein, 387 aa, unidentified
MQKPHDNSKASPAAFMQDNTLIAVIELSLSNWLVAGLIPGVSREPLKKLEPNPEDLLKLLHGWRDEAIKAGRPITRIAVAYETGRDSFWLARWLRERGIDAHVIHATSVAVSREHRRAKTDRLDTAMLKRGFLGWLRGERGHCTVAIVPTMEEEDAKRPHREREGLVHEQTRVVNRMKSALIQFGVRNFNPKLRKARVKLETVRTPEGKSLPPNTIAALRRDMERLKIIKEQIKAIEQARLQQFEQKPEALANRMVYLLVRIYGLGLETAGLLVHELLSRTLRDRKAVARYAGLTGSPDESGSKRREKGLSRSGNARVRKIMIQLAWRMVKFQPDSALVQWFKQRTENAKRSRKPMIVALARKLIIALWRYANDGVIPEGFRLHSAA

SEQ ID NO: 365942 - protein, 353 aa, unidentified
METPIKQTAGIDCGMQELVVSFGILTGDGTFICKLTKVFANTAKGFQQLLQWINEVSSKETAVLYAMEATGVYYEKLAYYLVANDCHVSIVLPNKINAFAKTCTSKKQDDQQASKVLCEFGCVKHVDEWQPPHPLFAALKQLTREKHQLQQELVIIKNQLHAEQTKAITASASIKRMKARCRLIEKQIAEVEKEIIDTLNDDAAIKEKINKICTIPGVGLSTAVTVIAETNGFNLIRNARQLVSYAGLDVVQKQSGISVKGRAHISKKGNPHLRHCLHLPSFVAVKYNLPMQQLHHRIVEKQAIKMKAYVAVQRKMLMLIYTLWKKNEAYNPSIKFLEQPVEAALTELDYIRS

SEQ ID NO: 365943 - protein, 366 aa, unidentified
MTSVSSVAELIHLGMDTSVKEIVVAVLRPGEEVPVVDRIPGDEESVRRLIGRFPDRRLLSACYEAGPGGYELHRLLASMGVACDVVAPSLIPKGSSDRVKTDKRDSVRLALTHRAGLLTPVRVPSPAEEAVRDLVRARGDLLDDRKRMQQRLNAMLLRHGRVWRGGKKWSYAHRAWVDRQVFDEPALAEAFALYRGGLEAREAELAAAGARLAAWAAREPLAGPVARLGGYRGIAQLTGLTLAAEVVDWRRFASARAFMGFAGLIPTEYSSGSRSRRGHITKAGPEGVRTALIEAAWAYRYRPAIGATLRHRQAGLPPETLARSWKAQQRLHAKYAKMTARGKPPGVAVVAVARELAGFVWAEMIS

SEQ ID NO: 365944 - protein, 370 aa, unidentified
MRFYQGQHPFYCGIDLHARTMHVCILDQAGKTLFDKGIPCRPEALLRAIQPYRDHLVVGAECMFAWYWVADLCVEQDITFVLGHALYMKAIHGGKAKNDRIDAGKIARLLRGGTFPLAYAYPKGMRETRDLLRRRTYLVRKRAELFTHLQILNAQYNLAPFPKKLSFAANRTEMHVAERFADPSVQKSAAINLALIDRLDELISDLELYLVRTAKVDDVQTFYRLRSIPGVGKVLALILLYEMHDAHRFDTAGQFLSYARRVRCAHESGGKKLGTGGKKIGNAHLRWAFAEAACLFLRSSERAKKWKQQQAAQRGEGKALAILAARLGRAVYHMLRKGEAFDEERFWSGARRAETGSSSLSRKEVRDAGH

SEQ ID NO: 365945 - protein, 343 aa, unidentified
MQVNTIGVDLAKNVFQIHGVDSAGKVVITRQLRRKQVLEFFSKLPGCLVGMEACGTGHHWAREISKLGHTVRLMPPSYVKGYVKRSKSDAADAAAICEAVTRPSMRFVPIKSTDQQALLMLHRTRDLLIRQRTQLINALRAHLAEFGLVAETGREGLAQLGAIITDESNRGSLPAAMKQALQAIVDQLAALELQVGALDRAIHAHHRANDMSCRLETVPGIGVIGATAIASTVTDPNDFKSGRDFAAWIGLVPRQHSTGGKERLGGISKQGDRYLRRLLVIGATAVVRHARQHPQKHPWIMRLLAKKPAKLVAVAVANKMARIAWAIMAKGGYYRAPELAAAA

SEQ ID NO: 365946 - protein, 449 aa, unidentified
MSSHKGNAAGLPVIHDRAAGIDVGSRFHVVAVGADLCNEPVQTFQAFTSDLQRMADWLMAMGITTVAMESTGVYWVPVYEVLEGRGIDVILANAREARAVPGRKSDVNDAQWLQRLHACGLLRASFRPGRDIAALRVYLRLRERHLDYGAAHIQHMQKALTFMNLQLHHVVADVTGVTGMKIIRAIVNGQRDPEVLAQMRDVRCKASLETVRAAMVGNYQPEHVFALTQALALYDFYQACVDECDAQIEVVLAALTAEKASPSAPLPKARHRTVQPNAVSFDVRPVLYQLAGVDLTQIHGIGPYLALRLIGECGTDLSRWRSAKHFTWWLTLSPGCKISGGKVLSAHTRKTTNRVAAHLRLAAVTVGRTNTALGAFYRRLSARIGKAKAVTATARKIAILFYNAMRFGIDYQDPGATHYEQKYRERVIKQLHRRAAEFGFTLQEAVSVS

SEQ ID NO: 365947 - protein, 443 aa, unidentified
MKALPVLDPKAAAIDVGSEKLHVSVAGDTPQVFGTFTGDLENLRAWFQEQGVRTVALEATGVYWLYLYEVLEAAGLEVVVVNGRHVQNVPGRKTDMADCQWLATLHAHGLLRGGFVPPADIRQMQDYQRLRADHLVGAASQVQKMQQALERMNIKFHDVISDLVGVSGLKVVRAILQGERRPGELLALCDGQIQKRKADRVKESLRGCWKKEQLFALRQALELWETYQHKIADCDRELEALLREMAGPLPPPEPGGSREMKLAPAKAPGKNAPAIERFQELLARLCGGRDATQIPGMSAYLVLQLISEVGTDMTRWATEKHFVSWLGLAGGRKQSGKRKGRVKAHRNRAGRLLCAAARALAQSVDKALGGFYRRLRGRLGGLAANVALARKLALLFYRLLRYGVEYVEKGLKNYETKVLESETRLLRKLATKQGFALVPAAAQ

SEQ ID NO: 365948 - protein, 398 aa, unidentified
MRLFVGDDWAEDHHDVELMNEQGRVLARKRLPEGVAGMARLHELTGEQLGEDADDAEVIIGTETDRGPWVAALVAAGYTVYGVNPLQASRYRERHGVSGAKSDAGDSHMLADMVRTDSHQLRAVAGDSPGAGAVKVVARTHKTLIWERTRQVQRLRHQLREYFPAALAAFEDLDAPDVLELLARAPDPARAAKLTRAQISAALKRARRRDIPGKATVIMAALRGAQLGQPPAITAAYAAAVRSLIAVITTLNEQVKILQGQVEAHFGQHPDAEIYLSQPGLGPVLGARVLGEFGDDPHRYASGKARKNYAGTSPITRASGKKKMVMARFIRNDRLIDALMAQALSALGSSPGARAFYDAQRAAGTEHNAALRKLASRLVGILHGCLMSVSGFAVRQTR

SEQ ID NO: 365949 - protein, 346 aa, unidentified
MPEKNFFASWIGLDVSKDTFTAALQTVSEENAIFPGQDSFPISRAGVRQLLKWAHGHTGGVACGIAMESTGRYSGKLAQLILKEAPGQHVSVCNPLAVSRYRSSFTDAKADLHVDPKYIARFACDRQPEAYDPPAQEDAELRELVRERTAIVEACQQFQNRQEDLQSKVARDANRQIVAAFRRKIETLDKAIRALVEKNEEAEREIGLMATVPGVGFLSAATIYAEMGTLSAYTRRQLSALSGVCPVTRQSGTSLRKGAMSHKGSRLLRRILFLDSTQAIARIPSVASLHERLLHRPASSKMTAKCACMRKLLLILRGIVVSGKEYDPQYRPELFTHSQKKSEKSA

SEQ ID NO: 365950 - protein, 488 aa, unidentified
MKPDSPALYVGMDVSKGYADLHAINHARSVYATGRFDDTREGHERVLKVLTQWREQHPGAAMCVGVEASGGLERNWVRMFHERMPGVTVARLNPLAVKRSLAVKVHRSVTDQGSAAGIATYLAEGRPLHETRWDPRREGLQELYRDIRARIEHLQQTKNRLQSLLPRVHPGLVEFTRSDFAKWLLTVLTRYPTAPALACARVEDLVHIPYFKDEARAVEMIEAAKVSVAGQTDTLTARTVVSLASEILHQQQQIKALQDAMYEELKDDPGIRAMSSITGIGKWSAVCLRVEIGCVERFPTAEALTAYAGLDPVYHQSGDKTRVCRISKHGRRQIRAVLYMCVCSALRSNPVIDVFVNRLIAAGKPKMVALTAAMRKMLHLAYACWISETSFDPNHEQARRARRALAPRPDAAVPATNDEASHVANHPSIEEANTVVHDEATGGTAHAVTVASAKPGTVLPRISAPVSRREAQRRRRNAEEQSKRQRPE

SEQ ID NO: 365951 - protein, 407 aa, unidentified
MIFVGVDWAEAHHDVHVEDAEGRRLGGGRLPEGVEGIARFHELVGAHVEDPSEVIVGIETDRGLFVAALVAAGYLVFAVNPMSTSRYRDRHSSSGAKSDPGDAKVLADMVRTDRHNHRPVAGDSEVVTAVKVLARAHQSMIWSRRRQANALRSALREFYPAALSAFDDLASADATEVLKVAPTPSLGAALSLAKIASALRRGGRQRRIDERAREIQAALRAPQLRGSALVASAIGASVQASVAVISMMNVEITKLAQQLEAGFEQHPAAKVVRSLPGLGTVLGARVLGEFGDDPDRYASAKSRKNYAGTPPITRASGTKRVVLARYARNMRLADAIYLWAFASLTASPGARAFYDAHRKAGDTHHAALRALGNRLVGILHGCLVNGSFYDEHTAWGHRSESQLTEAA

SEQ ID NO: 365952 - protein, 317 aa, unidentified
MPRRDIFIGIDVAKEVLDIAVRPTGEAWQVTNDEVGIAALVERLRALRPTLVVLEATARLHVAAVGALAAAGLPVQAVNPRQVRDFGKATGKLAKTDAIDAGVLAHFADAVRPAVRPLPDAQTEALSMLLARRRQLVEMLTAERNRRAGVSPSIRAEIDEHLAWLTARLKQADRELVRVLRSSPMWRERDALLEGIPGVGPVLTATLVADLPELGTLNHKQIAALVGIAPLNRDSGRMRGKRAIWGGRSAVRAVLYMATASATRCNPVIRAFYQRLVASGKLRKVALVACMHKLLTILNAMARTNLPWVAVEPQITA

SEQ ID NO: 365953 - protein, 396 aa, unidentified
MAKQTTQSIKTHKSGKAAKATLSSKESAAASIAAKPETSLAQSVPLPEIIHLGIDVHLRQHVVCRKTDAATVQPAQRMKPEELVAWVVKQKSHAKRIVCCYEAGPFGYTLQRQLAAQGITCYVVRPQDWDRHGERVKTDSRDARELAEALARYEAGNKHALAIVRVPEVEQEQRRLITRQREGFVREVRRLGAMGRSHGMSQGHEVSGHWWRKGAWSALSKRLPQHLKDLLAPLVQVLVKLDELIAQREAEIEARATAATARPKGLGALTERIIENEVLDWTRFNNRRQVSSYTGLCPSEHSSGGKRRQGGINKHGNPRLRHALVESVWRFIRLQPGWKRLLKVVERLKGDGGRAPANKKKIAVALARELAVDLWRLNTGRSTLEALGLIAAKTAA

SEQ ID NO: 365954 - protein, 343 aa, unidentified
MEAYAGRQYVGIDLHRRRTVIVRTTEAGEVLEAVRIVNDVQRLASVMARAGDCPEVVLEATYGWYWAVDALQAGGASVHLAHPLGVKAFEYRRVKNDFRDAQDLADLLRMGRLPEAWIAPPPTRELRELVRHRAKLVGLRSHCKAEVHAVLAKCGVQVLMSDLFGLAGTELLDRLDLPAPYAARIASLRRVMDDLDFETNVFAGIIRGRMAQEPGYTAVQKIPGIGPTLGAVLVAEIGDITRFASASKLTCWAGLTPKHHESDTHVRRGRITKQGSRLVRWAAIESVKTVSKASEVGVLRERVADRRGRNIGSVAAARRQLELVFYALRDGHVRALEHLPRVA

SEQ ID NO: 365955 - protein, 388 aa, unidentified
MEARTANALPPAAADHAAIRCLLAIELSKKSWVVAINTPLADKIGRHTLPGCDWTGLLELIQRVRTRVARELGRPVEMISCYEAGYDGFWLHRLLEGQGVHSLVVDPASVQVDRRARRAKTDRIDAERLLRSLMAYLRGEPKVWSVVRVPSVAEEDDRRLHRERDRLIAERIQHVNRIKGLCAIHGIYDYQPMRPDRTRRLEQLRTGDGRALPPRLKAEIARELQRMELVLQMLKEIDAERNAIASARMSAHTNAKKIQDLVKLKAIGPEIATVLIGEVLYRRFNNRRELASYVGLTPSHFQSGSTCRDQGISKAGNPKARTTMIELAWLWLRHQPDSAFSVWFREHVGNLKGRIRRITIVAVARKLLIALWRYLETGVLPTGAVLKV

SEQ ID NO: 365956 - protein, 347 aa, unidentified
MNHYVGLDVSLEETAICVVDSTGQIVKEARAASEPETLIAALREIDLPLERVGLEACSLTAWLHDELHSAGLPAVCIETRHANAAMKTMPNKTDRNDARALAQIMRTGWYRQVHVKSRQCRLWRSLLVARRTVLNEMRSIENVVRAVLREGGLKLGTPSRAAFAERVRDLMAEDASVKPLVDPLLTILVTMLDQFARLTKQVLDIVRREKVCRRLMSVPGVGPITALAFRATIDRPDRFRRSRDVGAHLGLTPARYQSGETDVSGRISRCGDELARTALYEAAHTLLVRSRKWSSLRAWGMKVAKTRGMARARVAVARKLAVILHRMWSDETEFRFGRNPAAALAAA

SEQ ID NO: 365957 - protein, 412 aa, unidentified
MRRVVGMDIHRTFGEVVIWKNGVLRHAGRVDMTRSALEGLGNRLAATDEVVIEATGNSMAVSRVLSQFVARVIIANPLQVKAIAHAHVKTDKIDAGTLASLHAAGYLPEIWTPDAITERKRRLATRRYQVVRHRTRLKNEVHSILHAHLIPKCPHADLFNARGRTWLARQPLPDDERSAIDRHVRELDRLADDLDILDREIAQGALDDQAIKRLMTITGVNLTVAAALMAAIGDIGRFKSPGKLVSYFGLNPRVRQSGLGAAHHGRISKIGRSHARAMLVEAAWAAARAAGPLHAFFVRIRARRGHQIAAVAVARKLAVLCWHLLTKDEDYLWARPALVANKTRAMELLAGKPQKKGNRRGPAYAYNVKALRDQEMQIAGQAERNYARFVARWKTRPSGEGVRERLNPARQE

SEQ ID NO: 365958 - protein, 340 aa, unidentified
MTITIVGIDLAKNVLAVHCVDQNGKAVLVKPKVSRAALSELIAGLPLCVIGMEACSGAHYWARLFRKYGHDVRLMAPKFVSPYRMAGKTGKNDATDAIVICEAVQRPHMRFVPVKDESQQAMQCLHRTRQGFIQERTATYNRLRGLVSEFGVIAPQSTDALRHAVSDKKETLTVQVRLCIDGLLAYVTNIEEKIAEYDRVLSRVAKTDHRSQQLMELKGIGPTTASALVASIGNAHDFKNGRQLAAWLGLTPSQYSSGGKSKLGRITKAGDAYLRTLLVQGARSVMVGAENRTDSFSRWVCSLIGRRGYWRAVVAIAAKNARLCWASLHYGDDFRLYSTT

SEQ ID NO: 365959 - protein, 418 aa, unidentified
MGKRKNRVCGADVHKDIIVATILNSDNTEFQGKFGTTSMELGRFRDWLIAHNCEQVAFEATGVYWFPVYDALSPSIDTIVANPWMIKGIPRNKSDTLDSKWIADNCLDGKIKRSRVLPKDDRDLRTLTRARSAYTKTRTQLRNRIHKYLALCGITLSSYISDIFGKSGRHILDGLIESKDIDTILDSIPSGKVKKKRELIKASLGKGLDDVSRMLVKDTLELLHHLEEKVNDTSLVILGRLQERAKDLAIVMSVPGIGFVSASIILAEIGDYHDFQTSEQLVKWCGLAPGLNESAGKKRPCGITKQGSKSLRTILVEIAQVVAKMSNNKLSRFFHRLRARKNYNLAITALARKLISIIFHLLINQELYQENNCTTVKTKPIKKDLSCLSKEEQLKDGVAAIVDAFYHLKKKSSLEGGG

SEQ ID NO: 365960 - protein, 370 aa, unidentified
MYVCILNQAGETLLHRNMKTTPEAFLKAIAPYRPDIVVAVECLFTWYWLADLCADEEIPFVLGHALSMKAIHGGKAKNDKIDSQKIAVLLRGGLLPQAYVYPAEMRATRDLLRRRMHLAHKRGELLAPVQNTNSQYNLPALGKNIAYKANRDGVAERFADPAVQKSIEVALSLVSYYDELLRDVALTIVKTAKQHDANTLYRLQTVPGIGKILSLVLLYEIHHIDRFPRVQEFASYCRLVKCAKESNGKRSGTSGAKIGNAHLKWAFSEAAVLFLRENPAGQKFLARLEKKHDKGKALTILAHKLARAVYYMFKRKVAFDMKRFLNDEGRGVGERDVSLDNHGMNLILATLYNASMTASLNAYERLGHYP

SEQ ID NO: 365961 - protein, 461 aa, unidentified
MKKRKGGAAVKVDRGSQLSVIQSDVAGIDIGSREMFVCAPAGRGEDREMVVFATTTQQIHECIRWLKQKKVRSVAMESTGVYWIPVLEMMESSGLEVLLVDTRPLSRVPGRKSDAEDCQWLQTLHSHGLLRGAYRPSEQISELRMIVRQKAVLVREQADWIRRMHKCLDQMNVRVHHAVSDTKGATGMAMLRAIVDGERDPRNLAELRDRGCQKSEAEMVELLTGNWRSDHLFNLKQHMAMFDSASSQIAVYEEEIQRRMQEITPAGRQDLQAPPLANSEKRKTMKRRNQEGKRQTLYRAMGVDLTTIDGVGVETVEVIMSEYGTEMSKFHTEREFVKHVGLAPHRPVSGGKVLKNKRRKQKGTRTAEVLRNAASSLKHSRSALGAYYRRIARRKDSGMAVFAAARKLAGLVYRMLRFGQPYVDVGQAEYEKRYEETRIRALKSTASQLGFNIVRQEPVTA

SEQ ID NO: 365962 - protein, 351 aa, unidentified
MLIIGVDYHPSFQQVALFDQETGECGERRLNHSDGEAEKFYRELQQRGVRVRVGMEATGYSRWFERLLAELGIEVWMGDAAKIKTKRVRKQKTDRQDAQLLLKLLLENNFPRVWVPSPENRDLRQLLWHRHRLVQMRTRIMNQLQALAMNEGTRWKKKLWSEQGRSELEKIPLAPWASRRRQDLLELLDRMNPTIAELTAAVEQEAKKRPEVLRLMTHPGVGPLTALAFVIIIMTPDRFPCGKQIGSYIGLIPCEDSSAGHQRLGHISKQGNALLRFLLVEAAQAAVRYDPDWRRRYLHLAMRRERRIAKVAMARKVAIRLYWMWRNGWEYSQSVEFGSHAGQLATGHGVN

SEQ ID NO: 365963 - protein, 350 aa, unidentified
MKKAAGVPSITVIGIDISKSSFQLFGVDERGNPKLDKVLNRNRFKEFFTNLQPCIIGMEACAGAHYWSRYLQAHGHQVKLIAPQFVKPFVKSNKNDRADAEAICEAVQRPTMRFVSAKTVEQQDIQSLHRIRSQVVANRTALVNQIRGLLLEYGVDMPNGIRRARVQIPLVLEDAENGLTGRFRNWLAQLYSELVHLDERVSGLDSEIEQIAASEEDAKRLMSIPGIGPMCSTALIAAIGDIRNFKNGRELSAWLGLVPRQCSTGGKPRLLGISKRGDVYLRQLLVHGARSVVQRVDGKSDPRSRWLQELLKRRNKNVAIVALANKMVRTAYALLAKKIEYRQDLALPTT

SEQ ID NO: 365964 - protein, 337 aa, unidentified
MIVVGVDVHKQSLTAVAVDEVGRSVAELTVGSALELVVWSASLAAERLWAVEDCRQLTGALERALLAAGESLVRVPPKLMAPQRRAGRMRGKSDAIDALAVARAALREPRLDHPRSGEAAMRELKMLVDHRDDLVDERRRAQQRLRWHLHDLDPELAVPAGALDRTVWLDRVARRLSRAEQTVQVRIARELVGRCRSLTRTILALDRELQARIDKTAPALLALPGCGALSAAKLLGEIGPIDRFDTDAQLARHAGVAPLEASSGKHRRHRLDRGGNRQLNCALHRIAVTQARIHPPARAYLERKQNEGKSRREALRCLKRQLARTVYTTLKNEPPLT

SEQ ID NO: 365965 - protein, 341 aa, unidentified
MEQFIGLDVSLKDTFISVREGGQRVWRGKCPSDPKLIAEVIRKRAPNAERVVFETGPLSVWFYHALKQEGLPAICIDARHAKAALDMARNKTDANDADGLAHLSEVGFYREVRVKSFDSMLTRTLVAARSQMLKATTQLSNQIRGLMKTFGLVVPKGTGRVFEGHVRSLLTSNAGLEQIILPVLEAWRGLRTRAAELSKQLVASARASEECQLLSSIPGVGAVTASSFVAAIEDPENFRKSRSVGAWIGLTTRRYQSGGVDYDGHISRRGDNHLRGLLYEAAVVILTRTTADSALRIWGLKLKEKIGFKRAAVAVARKLAVIMHTMLRTGELFDRSITAEA

SEQ ID NO: 365966 - protein, 425 aa, unidentified
MGVYCGVDWAEGHHDIALVDDEGRLVGKRRIVESLDGLAELTAMLAAAGDSAAEPIPVAIETPRGLLVAALRATGRPIYPINPLAVARYRERTSVSGKKSDHVDAMALANILRTDAHLHRMLPDDTSLARSITVLARAYQDAVWRRTKTVQELRARLREYYPGFLAAFAAGTGSGGGLSTTRLASRDARAVLAIAPSPAEGLRLSTARVEKALRRAGRQRRIAAVAGQVVAALRVPQLRQDPVVEHAMRIEALALLAVLDAVCASIEDLENALVAAFAEHPDHEIITSFPGLADVSGAIVLAEIGDDRSRFADDRALQAFAGSAPVTRASGKSRTVTRRRTKNNRLASIGYSWAFTASARPSPAREHYLRRRDRGDGHPAALRHLFNRMLGQLFHCLQTGQPYDPVKAYPHSTTITGAAATTVAA

SEQ ID NO: 365967 - protein, 411 aa, unidentified
MHFVGIDWSDQALDYQLRSTEGHVLRAGQVKPTLEGIGELFAALEAHGAPAEFDIAVETAHGAWVQALLDRGYVVYPVNPKTADAFREALSAAGNKSDRIDAQVLAMFLAACHTQLRPLQPDDPEIITLRIACEDRLRLVHERTAKLNELRAVLKVYYPAFLACFDDLSREIGLKLLLKCPTQNALRGHTPRRLRNWLQRQGYPRADRVDKILAALKAPVLPVAEHLQAAKAPLVRYLAQALIALKAEIAERDEEIRQHFDRMPEADWLRSLPGSGPVLAPALLACIGRDPQRFPTAADARAFMGTAPVTKTSGGNRMRCVQFRRGCWMFARRTLQLLAQTSLRSCPWAQTFYRRQRDSGHRHHAALRALAHKWLKIILAMKRTGSRYDEHVFTHSQDRYLLNSERTAAIT

SEQ ID NO: 365968 - protein, 420 aa, unidentified
MKAYNINDFAALIGIDWADTKHDICEYPINTQKYHYCIIKSKPEALHKWAMSLKQRYPNQQIAVACELKKGPLIYALAKYSHLTLFTINPSSVANYRKAFTPSNAKDDPSDALIQVEILTLHMDKLTVIEPDSAAMRSLAQLVEYRRSLVQDSVDLSNKITATLKNYYPQALEWFKEKDTFIFCDFISKWPSLTKVKRVKKQTLLDFFNSHNSHYSQVNDARILSIKSAMPLTEDIGVIEPNQLLVEVLIAQYRVLLKGIESLDKAIKLAYKSHDDKVIFDSFPGAGPQLAPRLLVAFGSNRERYKDANELQKYAGIAPVIERSGKKMWTHWRYSCPTFLRQTFVEWAGFSIRYSFWAKAYYEQQKSKGKPHNSIIRSLAFKWIRILFRCWKTSTPYDESKYLEALKRRGSPLLKFAVNS

SEQ ID NO: 365969 - protein, 373 aa, unidentified
MKKRSSSQKSPKPTVKNKGTKERVTIGMDLGDKTSRYCMLSHEGEILREGQVPTTKAGMVEAFGSLGPARIAIEVGTHSPWVSRLLRSLGHEIIVANPRQVKLITESTRKDDRLDAQTLARLARIDPALLRPIQHRSEKAQTALMVIRVRAALLSARTSLVNTARGLAKALGERLPKCDADQMGVRQTESLPPNVRQVLEPLLKEVESLTEKIKESDHEIEQIARRDYPETALLEQVSGVGPLIALTFVLTVEDKDRFQKSRDIGCYVGLRPRRCDSGQSQPQLRITKEGDPYLRTMLVEGAHYIISRRGPDTDLKRWGLHLAESGGKRGKKKAVVAVARKLGILLHRLWVTGEVYEPLRNHNLRQERKKIAA

SEQ ID NO: 365970 - protein, 315 aa, unidentified
MTKHLPPVNVGVDVGKNQLDLYLLERDRALTVPNEEQAILVLVRSLSRYRVERIVVEATGRLEQPFVRAALAAGLPVIVVSPLKIRRFADVIGQLAKTDQIDARLIAQFAATVKPLPRPASDANAQAIKDLVVRRRQLTSLRTMEKNRREVMPNDLKPSFDRILKALDRELKSLEQLINLAIDQHASSRHKRELLTSMPGIGNCVAATLIGDLPELGSLDRRQIASLTGVAPFNRDSGTLRGKRRIRGGRTHSRTALFLSAMVATRFNPDIKRFYQRLLTAGKHKKVALTACIRKIVTALNAMLRDNLPWRSAIA

SEQ ID NO: 365971 - protein, 354 aa, unidentified
MSAQHFIALDTHCEFCEMVAVSSTGKIVQRARCATTIPTLVAALDGIRSPRTLTFEEGPLADWLARNLRPHVERLIVCDPRRNALIAKEGDKDDPLDAERLAQLLRGGYLKEVHQAQSLDRTVLKQHVSFYHDRVRERVRQGHQLVSLLRRHGVFASAADLLDPAEKALLWRKLPPRKVLRRDLDLVLGVYELLLEHEQEIHRELIRLARREEPVRRFQALPGIGWIRAITFYVYIDTPNRFPGKSALWRYCGLGLKRRHSGSGPVHSQLAHDGNRRLKNMLLGAALSAAARGDNPFADKYIHWTQEEGIHPATARRNVARALACTLWSLWKTGSQYDPAQVRGIGRPPAATPT

SEQ ID NO: 365972 - protein, 337 aa, unidentified
MSYLGVDLHTNSFTVCCRTKQGKERISTYAINRLDAFRKTLRKQDRVAVEATGNTAWFIEQVRSRVRKVIAVDPNQFKVIRKSVKKTDKHDAKMLALFLSKGLLPEARMKQKENAQLHSLAATRDKLVKQRTALVNKIHNVLNSYGLKWKKETLTIEKGLKSIMAFEWDTIVKVELEVLADQIRSLTKNIKRLDNDIIEHGKKLKGHKNISSIKGIGEKSASVLLSVIGNVKDFANEDKLAAYLGIVPRVKDSNETIRHGRITKHGSTLARTTLVQCTLSAKRYSPYLRQYYERIRRTRGSGKAIIATARKLLGIIYKTLVNGWVFEDFPNFVIAKT

SEQ ID NO: 365973 - protein, 350 aa, unidentified
MLIIGADYHPSFQQIAFLDQETGESGERRLNHSDGEAEKFYRDLKEQGSSVRVGMEATGYSRWFERLLAELSFELWIGHPAEIKARRVKKQKTDRKDAELLLRLMREGNFPRVWVPSPENRDLRQLLWHRHRLVQMHTRIMNQLQAIAMNEGMRRKTKLWSEQGRAELEKLALGPWTSRRRQELLELLDQIDPVIEELSKAAEQEAHKRPEVVRLMTHPGVGFLTALAYVLIIGTPERFHCGKQIGTYVGMVPSEESSGDKQRLGHISKQGNSLLRFLLVEAAQAAARSNPEWRRRFVRLAMRRHRNIAMVAMGRRLAIRLYWMWRNGCEYSPSMEFGSYAGQLGTGHSV

SEQ ID NO: 365974 - protein, 462 aa, unidentified
MAKKGKRRCDTLPVLHPDAAGIDVGASELYVAVSADRDPQPVRSFPTFTRDLHALADWLVHCGIHSVAMESTSVYWIPVYQILEARDLEVYLVNAQHVKNVPARKTDVSDCQWLQYLHSVGLLRASFRPPGFICAIRSLWRHRGSLIQMASEHVLHMQKALDQMNLQIHRVLNDITGVSGLRILDAILAGERNPLTLARLCHGGVKSSEDVIAKSLEGDYRPEHLFALRQSLAAFRYYQQLVLEADREIQLQLAELKTAATAQPTTPARTKVNPHYARHYEPRTFDLRGELYRVFGVDLTNVPGISALTAQTILCEIGTDVSRFRNASAFASWLGLCPEKNISGGKVLFTKSRRVRSRVATALRMCAQSLHHAKDYLGEFFRRITRKLGRPQAITATAHKLARIVFHLLSTKEAYTETVFHKSEEETIRRAAYRLRKQAAQLGFQVIPAGERLMFLGSMQLA

SEQ ID NO: 365975 - protein, 343 aa, unidentified
MEHFAGLDVSVKETSVCIVDEMGKIVREVKVASEPEALLAVLANPAYHFKRIGLEAGPLSQWLYSVLAEACLPAICVETRHMRAALKAQINKTDRNDARGMAQMMRVGLYRPVHVKTLRSQKLRMLLTHRKLLQSKAIAIDNDLRGTLRNFGLKVGVVGAARFEARIKELIQNVPDLAVLVEPLLVVRRVLREQLAILHRHLLVVVRDDAVCRRLMTIPGVGPVVALTYRATVDVPARFRKSKSVGAVFGLTCAKYQSGEIDRSGAISRCGDEMMRTMLYEAAQSMLFHSTKWSWLKAWAMQICRRRGMKKAVVALARRLAVIMHRIWVDGTEFRWTREVAAV

SEQ ID NO: 365976 - protein, 383 aa, unidentified
MKQSFSEPLNRTIFMMGWTPRTASMCQSGVFEHHLREASVSGVITVGLDIAKHVFHAHGVDDQGRALFSKRISRGKLLDFFAAQPSCTVALEACGGAHHWARQLTQLGHEVRLIPPAYVKPFVKRQKNDAIDAEAICEAAQRPNMRFVAMKSEQQQAAGLVFRTRDLLVRQRTQLINAVRGHLTEYGWIAPKGPSHVAELAHLIEEKRMAGSLPEAARAMFRLMLDQLASLNGRIAVLDKEIARRAREDEVSRRLMTIPGIGPISATAIAALAPPVETFAKGRDFAAWLGLTPVQRSTGGKQKLGATSKMGERTLRRLLIIGSSAVVQQASKRGAAKGSWLEQMLARKPRMLVTVALANKMARIVWALLVKREVYRAPVAANA

SEQ ID NO: 365977 - protein, 407 aa, unidentified
MYYLGIDISKKSFTVSILDEEGEAITKPLTYPSSRRGMEKLVDKISSLKLEKDKILIGIEATGNLWENLYSFLEGYRVLILNPYQTRKYHQVLSKKAKTDKVDSLVIAGLLRSKEALASYVPEDEVQVLRELVRLCHHLQKDKKNYLRKASSLLNLVFPEYTNLIKNPFRKVSSMILKKYPTAVDMARAKKANLVKMARRIQGNNYSFELAEKLIQAAKESIYSGKASEVRGMALRILIDEIQSLENKIKEIEDKINEILSSNEPSSPQKRLLCIPGVGPKTVAAFLGEVGDDVSRFSSVSKLIGFVGWHPRISESGESKNLHPKMSKKGPSALRASLYMAAVASLKHNPYLRSLYHRKISEGKESKQALICVGKKILCIMYSMLKYEADYDPQRIFFQFEKERVLT

SEQ ID NO: 365978 - protein, 343 aa, unidentified
MDYFAGLDVSVKDTSVCIVDEAGKIIREVKVASEPDALLAVLNNLAYHFKRIGLEAGPLSQWLFSALAEADLPVICVETRHMRAVLKAQINKTDRNDARGIAQMMRVGLYRPVHVKTLRSQKLRMLLTHRKLLQAKAIAVENDLRATLRNFGLKVGTVGAVKFEARVKELVDNFPDLVELVEPLLVVRRVLREQISILHRRVLAAVRNDEVCRRLMTVPGVGPVVALTYRATVDVPARFRKSKSVGAVFGLTPARDQSGESDRPGAISRCGDEMMRTTLYEAAQVMLLRSAKWSWLKAWAMKIARHRGMKKAIVALARRLAVIMHRIWTDGTEFRWTREAAAA

SEQ ID NO: 365979 - protein, 277 aa, unidentified
MENVALIGIDLGKHSFHIHCQDRFGKALLRKKFNRTKLIESLATFPVCTIVMEACAGAHYMARRLAEFGHESKLISPQFVRPFVKSNKNDFIDAEAICEAACRPSMRFVTPKTESQQTLGALHRVRESFVRDRVKASNQIHGFLLEFGISLPVGHAAIKRLPSVMAEHELPARLITMLERLHAHFKYLEQQIAEIDKELASQLGDDDLGQRLMTIPGVGPITASVLAAELGDGKHYRCCRDFAASVGLVPRQYSTGGRANLKGISKRGDKNLRRLLV

SEQ ID NO: 365980 - protein, 354 aa, unidentified
MPRKTTSLEAVATIGIDIGKNSFHLIGLDKVGAIVLRQKLSRSQVDTRLANMPPCLIGMEACVGAHHLSRQLKALGHDARLMPAQYVRPYSKGQKNDFRDAEAIAEAVLRPTMKFVAIKTVEQLDLQGLHRVRERLVCQRTSVINQIRAFLLERGIAVRQGLRALRTAMPNVLAMTDKLSPRMIHMIEDLCTDWRYLDARIATVSNEIETLSEQDDGAKRLMTVPGIGPIISTATVAAIGSGDVFSKGRDFGAWLGLVPRQMSTGGRTVLGPISKRGNRYLRMLFVQAARAVLLRPQSWEKYGLKSWIEAAARRLNRFKLAIALANKIARIAWGVLHGGRNFEVRSMRTAPQAG

SEQ ID NO: 365981 - protein, 343 aa, unidentified
MDYGAIDLHVRHTLIRFVNQEGTVLLDRRVTTTVEELQHVFGGRPRARILIESGTDSEWVAQAIEACGHEVIVADPTYALMYGHRDPRIKTDRRDVAALAEACRLGIYRRAHRVSAAQRERRRALRVREQLVRTRTQLINLVRAQLRQEGYRLPAGCSTTVVRRCQALPLPPGLRAALEPVLTVLTTIGDELRACTETLAAVAAQDPIVQRLQTAPGVGVITALTYRAVVDDVARFADARGVAAYLGLVPREDSSGTRQRKGTITKAGPPGLRTLLVQASWVVWRQRRGGGALHAWVHQLAARRGRRIAVVALARRLGRILFAMWRDATDFGVAPTAPGATVA

SEQ ID NO: 365982 - protein, 347 aa, unidentified
MALTIVDTPITGGVDTHADVHVAAALDPVGGLLGVAEFPVTPAGYARLLSWLGGFGAVCLVGIEGTGSYGAGLARYVATAGIRVVEVDRSDRQDRRRQGKSDPLDAVSAARAAQSGRARGAPKGRDGSVEAIRALMVAKRSARAERTQTINQARSLIVTGPDDLRIRFARHTVAALVAETASLRPRPGSTVGYATRIALRELGRRAQFLDGQLERLDELIVPLVTARAPGLLALYGVGPDTAALLLIAAGDHPARLRSEAAWAHLCAAAPIPASSGKRTRHRLNPGGDRQANHALWRIVITRMSSHPPTRAYVERRTAEGLSKPEIIRCLKRYVAREIYPRLRAAAD

SEQ ID NO: 365983 - protein, 441 aa, unidentified
MSELSKTTPAEPEWVAFAAIDWANRKHFWRLLPVGSQRYEEGELDNTPEAIEVWAANLQRRFGGRPIAVCLEQSRGPLVYTLTKYPHLVLFPVHPTTAAHYRETFSPSGAKSDPHDAASLLDLLVRHRESLRPLQPDTQETRLLHFLVEERRQLVDEKTRHSNRLTAALKLYFPQILHWFDDLNSSLVADLLQRWPTLEELQHAHPGTLRKFFHAHNCRSEERIEERIEGIYQATPATKDASVVEAAAMSARAAMALMATLRSSIAVFELRIAELVAAHPDRKVFASLPGAGEVLVPRMIAAFGTHRDRYQNAYEMQCYSGIAPVTEASGNSEWVHFRYACPKFLCQTFHEFAEISMRYSIWAKAYYDHMRNDQNAEHHVAVRSLAFKWIRIIYRCWKDGKPYDEEAYMETLRRRGSPLVGALALATSTEWKTIAGFQKLS

SEQ ID NO: 365984 - protein, 416 aa, unidentified
MQKHSNLPVKSEQRSKQTKSRVPVQRDTKELMAELLGKLMEKQDPKAISASAGKEQKQGRLRPNLDRLTVGVDLGDKWSAYCILGLEGETLIEGQLQTAPLGVAEFFQSLPAARVVLEVGTHSAWVRELISGCGHEVLVANPRLMEGSKRRKRKNDRIDANKLARLGRMDPQSLYPIQHRSPQVRQDLVMLRARDALVAVRTELINSTRGLVKSVGARLPQCASPSFSKKVKESLPVEIREALLPLVELVAALSDSIQGYDEKIEKLGSEKYGHTALLRQVKGVGPITALAYVLTLENPNRFAKSRDVGPYLGLVPNQEDSGDIQPQLGISKAGDTMLRRLLVGSAQYIMGPFGPDTDLRRCGLRLCERGGKNAKKRAAVAVARKLAVLLHHLWVSGEVYEPLRQGLSATMRQAAA

SEQ ID NO: 365985 - protein, 457 aa, unidentified
MEEPQEVPDEDYERVWERAAAIDIAKGSGVVCTRVPDEDHPGRRRTHVWTVPARAAAIIELGDHLRARQVQVVTLESTSDYWRIWFVLLEAAGLKVQLVNARTVKNVPGRAKTDKKDAVWLAKLTERGMLRPSFVPPPEIRRLREFTRLRAELVRERTRFWARLEKLLERALIKISDVTSTLDLVSVRKILRAMIAGERNPRMLAELAEGPLRKKRAQLAEALTGKFEDHHGELAEILLDEIGRLTARIDRLTGRISELLAEIPAAWGVDSDGSTGPAAGTGPDAAVLPAVARLDEITGCGTYAAQTVIAEIGLDMTVFGTAARLVAWARRCPATRQSGTKTSHGRTGKGNPWLGGILGEIAAAASRTDTFLGARYRRIARKRGKRRALAAIARSILIIIFHLLANPEARYRDLGPDHYDTHIDRDRKMRSLIHQLNAIDASPDEITAQLARTQPAA

SEQ ID NO: 365986 - protein, 398 aa, unidentified
MDLPVYYELETNNGNRDYRIQIGGHYMNYNTVYVGMDVHKESFTLCSCKYEDEKASHYQRTPASYKNVLRYLAFLRTIYGEYTRFVCGYEAGCLGYSLYHQLENFNVECVILAPTTMLEQRSKRRIKTDKRDAEIIARSLAQHNYSPVHIPTETDNQTKEFIRMRDDHKAELKKIKQQILSFCLRQGYQYDGSGNWTAKHVKWLRSLKPTGLYKEILDEYLLTYTILTDKLNRLDQRIEELASKEEYKESVSKLTCFLGIKIHTALSVIVEVGDFQRFVSARKFAGYLGLVPGQHSSGDDRNGLGITKAGNTHVRRLLVESAQSYTRGKIGYKSRVLRSRQAGNSPQIINYADRANERLRRRYYQMVLKDGKKYNIAKIAVARELACFIWGMMTDNIY

SEQ ID NO: 365987 - protein, 339 aa, unidentified
MKTPTHVGVDLHQRFCYLTAVDASGKTLKQSQVVNEGAALRAWLRQVPGPRQVVVEACGFWPAFARAVQSEADRLVMVHPQRMKAIASARLKNDKVDSETLAHLSRADLLPEAWMANERTQQARLLTRLRITLGQQRAKAKNQLQAVLHQEGFLKPVADVFGKKGRVWLAGLALSPMGRVVVEVWLRIVDQMDAAIAEQQKALEAMAKVDVRAKWLQTVPGIGSYSAMVILAEVGEIERFHTKRALASYAGLTPSVRESAGKKKRGGIGHHGSGTLRWILLQVAQVAARTSPAARAWYLRLKKRKPAQVALIALARKLLTAVWALLRHGVCFDENSFAR

SEQ ID NO: 365988 - protein, 320 aa, unidentified
MSSAASAVHVGIDVAKAKLDLCLLPGGQTLSVGNDDDGIAQVVAWLRQQSAAVALVLLEATGRYERRVASELLEAGFRVAVVNPRQARDFARALGKLAKTDTIDARTLAQFAQLGHARLCEKQPQNRTLLDDLVTRRRQVTQMMAMEKTRAQIPQDKATRAMIAKVIRLLEQQREDLDRRIAELIESDDDWRNKRDLMSSVPGVGPITASQLVADLPELGKLNRQQIAALVGVAPINRDSGTLRGKRTIFGGRASVRSALYMAAFCAMKFNPIIRRFAERLRAAGKPFKVIVVAAMRKLLTILNVMLKENRPWDANTQMA

SEQ ID NO: 365989 - protein, 483 aa, unidentified
MKPKQQEKNKKAICRPTQNNWHAMNRKQRRELTRKLQSEDLSLEVVHPDAAGIDIGNESHYVAVPPTRDSQSVRRFGCTTSELKEMAVWLKQCAIRTIALQSTGVYWIAVYDILEESGFEVYLVNARETKNLPGRKSDVQESQWLMKLHTYGLLRNSFRPSQAIRTMRTYWRQRNDLVRAAGRHIQRMQKALTQMNIQLANVLSDVSGMTGQAIVKAILAGERDPYELAALRNWRVKASEEEIARSLEGNWQEDLLFVLQQEQDGYEFCQRQMAECDQRLQQYLQQLEDRSHGAGLPEEKRKERLRKKKKGNAPQFDLRAELFRMTGTDLTQIDGIDVTTTMTILSEAGWDMSKWKTEHHFVSWLRLCPDNRISGDKIIGKGRLPTNNRVTNALRMAASTLRLSNTYLGAQFRRLRTKLGAPVAIKAMAAKLARLVYRMLRYGMTFIDRGAQFYDAQHRKLQINYLKRKAANFGFQIIEVPAA

SEQ ID NO: 365990 - protein, 320 aa, unidentified
MSKKKSKSFIGIDVSKQELEVAAHESDYQFRCPNKASAFGALIAELVSLRPALIVLEATGGLEIPVVRALHAAGLPVVVVNPRQVRDFAKALGQLAKTDRLDARVLAHFAAAIKPPLRPIKSKEEQELDSLTGRRAQLIEMLTDEKNRRASAASDTVRDKIKEHIDWLEEGIAELDKQLKALLQSSAPWQAKDKILQSVPGIGPVTSFSVIADLPELGTLNRQKISKLVGVAPLNCDSGQQRGTRHIYGGRAQVRRALYMATLTALRWNPVIKEFYERLCANQKPFKVAITACMHKLLNIINVMVRDSTTWKSKEEPIST

SEQ ID NO: 365991 - protein, 493 aa, unidentified
MKQLNVLRGFTMKKRNVFQNQSQEILTLFEVAQDRSKVMCIPIDYAKKDHVVMFCNGNGKIIRKPFSIKNSPEGKDYLIDQVRKSCRHHGINLQHVFYGGEDCGAYADNFIAALRLENYLVAGVNALDAKKHRENVQASTDRLDLLGISKVLLNCRGNCSPAQSGIYWNLRALVRERRKLVHIATGVRNRIHNIVDRIFPGFLNEKKSGIFPFSKGSLALMENRFSVNQIRRRRRSTLAKFLARQLVHHSDHCAEKLQQYASQVLQPPTDRIATLQITLKQQVKLFNCLQESILHLNKEIAEHLAQTPGVLLTSIRGIGITLAAGVSAEIGDPNKQGSLSNLVSYAGIIPRVKQTGGIQGKTLVKKVGKRCNRILKDYVVQSANHIGLYGPDDLKMDYKRRDAKGQHADFGMARRYLRMAICLMRTEQTYLPKILRSTRSNMKERAEYYITSWPTFHSKWKRSGALDLAFDKDMWLGQWRNMIQELYGIELTL

SEQ ID NO: 365992 - protein, 401 aa, unidentified
MCAYDTRGRELSKSAFGFSNTTEGFESMLDWSTKLAAANDKKQIVLGLEPTGHYWFCLTTWLVAKGISVVQVNPYAVKQTKEVEDNSQLKDDKKDPKLIANLVKDGNFGMPYLPEKLYADIRRLSMFRDQLNEDRIRNLNRLHREMKIYFPEYKDAFGKIDGAFSLELLKEAPFPDELAALGTEGMKQIWHEAKLRGRGYANASSILEYARKSVGIRDGADASRQAVKWFVSRIIELDGQLSDIENKLNQRCMEIPHAKNILAISGIGENILSGILAEMGDISRFDDVKEIQKLSGLGLVAGSSGKHTGETKISHRGRKRLRYWLFQAAKSAVAHSEEFKELHVYYTTRKQNPLKKMQSLIVIACKILRVIFTILTKGTTYDPKKLLGDIVRPNQAVPQAA

SEQ ID NO: 365993 - protein, 322 aa, unidentified
MAAVMIGVDPHKASHTAVTISAAEEPLGELRVRACAAQAERLLAWAAAWPERTWAVEGAGGTGHLLAQQLLAAGERVLDVQPKLGARVRLLAAGDVNKNDPNDARSVAIAALRSAGVREVRPDDHAAVLKVWSKRYRDLGRTRTQVVCRLHAVLCELVPGGVSRPIYASCAARTLQQITPPDAVAAARWELAAAFLDDLRRIDAQLRETRKKLAVAVQAAGTCLTGLFGVGPVIAAAVIGDVRDVSRFPGRDHFAAYNGTAPIEVSSGPHKIYRLSRRGNRRLNHAIHMAAITQIHHRHSQGRAYYDKKLAEGKTRKRPCAR

SEQ ID NO: 365994 - protein, 414 aa, unidentified
MDVLHERCAALDIGKRDLKACVRRPSPSGRRSRRQEIRTFATTTNALLELRDWLVTENVTLVVMEATSDYWRGAFYLLEDCLNVILVNAAHAKGLPGRKTDVADAAWLCQLGECGLLKASFVPPEPIRHLRDLTRYRTTLAGELSREAQRLEKELEDAGIKLSTVATDILGVSGRAMLDALIDGERDVHALAQMAKARMRPKIPELMEALTGNFGEHHAFLCRLHLERIDHLKATIAEISARIEEEMHPFARQVELLQTIPGVGQAVAEVLIAETGADMSRFRTAGHLASWAGVCPGHHESAGKQKSGRRRHGNRWLGAALGTAAMAASRTRDRTYLGARYMRLMPRLGKKKALVALEHSMLTAVWHMLTHDAAFHDLGGDYYAKHDPERALRRITRQANALGLTVRFEPIEAA

SEQ ID NO: 365995 - protein, 344 aa, unidentified
MDHFAGLDVSVKETSICIVDDAGKIVREVKVASEPEALLAVLKNPAYHFKRIGLEAGPLSQWLFSALAEAGLPVICVETRHMQAVLKAQINKTDRNDARGIAQMMRAGLYRPVHVKTLRSQKLRMLLTHRKLLQSKAIAIENDLRGTLRNFGLKVGMVGKVKFEARIKELVENLPDLAELVEPLLIVRRVLREQIVILHRRLLAIVRDDEVCRRLMTTPGVGPVVALTYRATVDVPARFRKSKAVGAVFGLTCSKYQSGEIDRSGRISRCGDEMMRVMLYEAAQSMLRSKKWSWLKAWAMQIARRRGMKKAIVALARRLAVIMHRIWVDGTEFRWTREQAAAAA

SEQ ID NO: 365996 - protein, 438 aa, unidentified
MSNKVIFNLDELFISVGIDVGADFSWMSIVLPNQQFVGRPYKILHSSMDSLTTAVSKIKEAEELYSLEIRIFLESTGIYHYPLFCYLRDKGFNCSVINPIITKNSTNINIRKVHNDRFDSKKAALVGLKPDLKVSLMPSDLALNCRNLCREYYDLMDNRSAYINKLQGELRMVFPQYLGIFSKITTNTSLTLLETYTSPSAFLEAERQEIIDTITSTTRFGLTYAQNKYNAIIQAAHEADEFGYIIDSNIKRIRLYISFIRKYDEEIKSILDSMKEFVDANEDTDFVRQIHLIETFKGAGFLSAVTLMGEIGNFSAFSKPKQLFAYFGLDPAVKQSGKFEGTKIQMSKRGSAIARRAIHTLTLQSISISRNGEAKNPVLRDYYLKKCESKPKLVAMGAVSHKVCNMIFAILRDNKPFEIITPQEHIDKYNAAKCNIAA

SEQ ID NO: 365997 - protein, 339 aa, unidentified
MDQVSTIGFDIAKHVFQVHGTDAQGRVFRRKLRRKEVIAYFASLPPSMIGMEACGSAHYWARQLQALGHEVRLMPPAYVKPYVKRGKNDAIDAEACWEAVGRPTMRFVAIKSEEQQSVLMLHRARDLLIGQRTQTSNALRGHLAELGIIAKQGRGGTDELLALVEGNEEGQMPELARTALLVLAGQLRELRLQISKIEREIHAWHRSNAVSRRLETAPGIGPITASAIVATVPDPSRFKSGRQFSAWIGLTPNEDSTGGKQRLGRITRAGDPYLRRLLVVGAHAVLRYSGNAKSAPTKWAAGLLGKKPYTVAAVALANKMARVIWAMMMKGEAFRAVSA

SEQ ID NO: 365998 - protein, 416 aa, unidentified
MKKRNIYQHRSQELLSLFEQAGNSSKVMCIPIDFAKKDHMVMFCNGYGDILRKPFSVKNSQMGVAYLTDQVMHFCRHRRIKKEHVFFGGEDAHSYAENFFNTLRSKGFLVANVNAYEAKKQRENLQASTDRLDLMGIAVMLLNRRANCAPAQAGAYRNLRTLVRHRKKLVKMKTGVSNRVHTVIDRLFPGFLNEKKSGIQPFSKSSLYLMSDRFSAQQICRRRRSTLIKHLKRFRTKNAGNTAAKLQTYAKQMLTPLEEYTATLQLSLAYNIKHYRCLLENIEHLEKEIALLLSQTQGAFLTSIKGIGIVLSAGVSAEIGNPFVQKPVNNLVSYAGIIPRVKQTGGSEGQPYMGRVSKRNNHILKDYVVQSAFHIGQYGPKDLLLDYKRREAQGQHADFGMGRRFMRNIIFLYGHY

SEQ ID NO: 365999 - protein, 440 aa, unidentified
MAVRKREDEVFPNAAGIDVGASSHWVAVPPHLQQESVREFGAMTDDLNAMADWLLACGVDTVALESTGVYWIPVYEVLEQRGLKVWLVDARQMKYVPGRKSDVQDCQWLQKLMSLGFLRAAWRPDGEVCVVRAVARQREVLLVEQASWVQRMQKALVQMNIQLTEVLTDVMGMTGQAIIRAIVAGERDPKVLARHRHSRVKASAEEITKALTGNWRDEHLFVLRQALAMYDDIAGHLGECDTKLQSLLAELGQRKVDLGKAPRANSKLRLEFDARQILANWAGVDLTRINGLGMAAAMKILSEIGPDLSRFANVKHFCSWLGLCPGTKISGGKVLSAKTKRSANRVRQALKMAAMSLSHSGSALGAFYRRLCSRMDKPRANTATAHKLARMVYFMLTRGEDFVDKGQQHYADQQRQRSIAALKRRATELGFQLNSTTAAA

SEQ ID NO: 366000 - protein, 419 aa, unidentified
MSFKIIKNNCCGLDVHKTWIFACIGITDSNNRTEYKQARFSSFTKGLNELCDWLAKYNCNDVCMESTGKYWIPVFNILEQRSLWVTLSHPKYTKPMKGNKTDRKDAKWICDLYMCGMVKPSFIPPADIRELRDLVRYRFKLTCMITGEKNRAQNCLTVSNLKLDDVFSDVFGKSSRSITEQILQHPGETFDVAPFVDGRCKTPIVEIQAAIDGAISKQQAVKLRQFLDHIDELNKHISEVEQEILRLSDKYEVALNLIRTVPGFDKNPLTAIQVLSEIGGDMSVFPTAKHLVSWAGCCPRNDQSNQKIKSTRISRAGSYFKPVLVQVANALIKSKKHSEFTNRYKRIKAHRGHKKAIIAICRMILTAIWHILSDLKPYTSEGFLESRPVKKEKVLSTSQALNLLKQRGYIIKDEPLAVS

SEQ ID NO: 366001 - protein, 335 aa, unidentified
MRSVGVDLHKNMFYVCYLSDSGSSYRRYELFELDRFKASLLKTDRVAVEATGNTRYFVGEISRFVSGVTIVNPKQFRIISDSVQKTDRADAEMLALFLSKDLLPEIKLRDELSNQVKSLCQTRDRLVKLRTSLINKIHNILNSYGIVSKRNSFNTKKGLEKVLWYSIPDLSRLELEIIVSQITHLNEGISRLDQKIKDQGQQLKGFKNITSIKGIGPKSAAILLSVIGDINNFASEKKLQSYFGIVPRIHQSNNTLRTGRITKEGSKLGRTTLVQCTLVAIRYSPYLNSFYLRLKEKKGSGKAIIATAKKLLGIIYLTLKNEWIFEDFPNFVMAK

SEQ ID NO: 366002 - protein, 347 aa, unidentified
MNYYAGIDVSLEQSSVCVVDGSGKIVREAKVASEREVLIGYFGSLDLVLSRIGLEAGPLSQWLYAAMKQAGLAVELLETRHVRDAFSAMPVKSDRNDARGIAQLMRLGWFRPVHCKSIAAQELRAVLTARKLVQSKLRDVENSLRGILRGFGLKVGKTTARSFAGRIRELVAGQSNLEAIAQALLAVHAVLLREFGGFDKRVRLMARSHAPARLLMTTPAVGPIVALTYAAAIDDPTRFNSSKRTGAHFGLTPKKYQSGQTDYTGRISKIGDASVREALYQAAHVMLTKPIKDCSALKSWAMRIARRAGMRKAKVALARKLAVIMHRMLADAKPFNPAAAATIAAAV

SEQ ID NO: 366003 - protein, 369 aa, unidentified
MTTEATAVIGGVDTHKHTHYAAAVDDQGRFVDHQEFPATDPGYQALLSWLRDLGEVQAIGVESTGSFGATLTRALTKAGVRVVEVNRPNRVARRMDGKSDRLDAEQIARAVLGRVSTAVPKAKSGAVEVIRTLRVTRASAVKARTQAFNTLWGVMIGAPSPLRDELVVLTKRTLVNRCLRLRPETDDFLSLSDDPDRLLLAAVKTSLRDLARRWKLLDEEIKGLNRKIDAMVRATAPELVELHGVGVEIAGQFPVTAGDNADRIRNEAAFAKLCGVAPQPASSGRTTGRHRLSRGGDRAANSALYIVTIVRMRHHQPTRDYVERRTLEGLSKREIIRCLKRYIAREIYANLPPSAVTTTETVHLDQTAA

SEQ ID NO: 366004 - protein, 339 aa, unidentified
MNNSVIGLDIAKHIFHLFTQGTDGKMIKKKLKRSELLMYFANYPVSIIGLEACGSAHHWARELTKLGHEVILLNARYVKSFVVGNKNDFNDAAAIYDAVTRPNKRVVAIKTVAQQDIQLVHNIRKELVDKRTALVNQTRGLLSERGIIINKGITQIRQQLPLILEDAENGLTTLSRELFAEQYEKLKALDDEIKTQDQRINRLCNANELSKRFLAVPGVGPVTATIVAADIGDSGKGYESSRDYAASLGVVPRQHSSGDKQVYLGISKRGNRYIRTLLIHGARSVLKNCTKKTDKLSLWLQALVARRGFNKAAVALANKNARILWAMANKNKAYEALVA

SEQ ID NO: 366005 - protein, 320 aa, unidentified
METKELYIGIDISLDTLDMAAYPTGQIWQYKNNKSGIAKTVAKLKIISPKLIVMEATGGLEQELKNAMDEAGLAVAVVNPKRIRDYGKSMGILAKTDKLDAMVMADFAAKIEPLPQASRDKAEKGLDNLVTRRIQINDMLTAERNRLKDYLDQAVSSDIEEHIRWLETKIASLDKEIKDRIRQNPVLKQKATLLKSMKGVGDVLSSTLIAKLPELGHYNQREIAALVGLAPVNRDSGKFRGKRMIQGGRAMVRKVSYMPVLSAIRYNPQIRSLYRHLIAKGKLQKVALVACMHKMFTILNAMAKTNTPWRCPIPAPQFFD

SEQ ID NO: 366006 - protein, 386 aa, unidentified
MQTLNNLSRSLIALEPASTLIAVIEMSLSSWLVAGIVPGIERQPLKKLAADESALLRLLHRWREEAEKAGCRIARIVVAFEAGRDGFWLARWLNSRSIEANVIHAASVAVSREHRRAKTDRLDAELLKRAFLGWLRGERDHCKVVAIPTLKDEDAKRPSRERESLVGEQSRIVNRMKAALIRLGIRGFNPKLKRAAGRLDSLRTPEGEPIPPNTLAELRRDMERRRLISNQIRQIEEARLKHFEQAPNDGPHAMVRLLARVIGVGIETADMLVHEVLSRNMHDRRAIARYAGLTGSPDESGRKRREKGLARSGNGRVRRGMVQLAWRFLTYQKESALAQWYRARTENARGARKPMIVALARKLLIALWRFVRQGVVPDGVVLRPAQ

SEQ ID NO: 366007 - protein, 322 aa, unidentified
MSQPNPLCMGIDVSKATLDIAASSDVAQFTVSNDSDGFNAIITGLRRHSVALVLMEATGGLEVAVACSLQAEGFEVAVVNPRQARDFARAMGYLAKTDRIDARVLTQMAEVINRHPERKRFIRALPDAERQALAAMVVRRRQLIAMLVAERNRLHPFHPQNKKSINTIIKALEDELVRLEKEMDSHIRNHFKEIAERLSSIKGVGTMTVSAMLAEIPELGTLSRREISALIGVAPVNRDSGTMRGRRTIFGGRAGVRSALYMAALVATRFNPVIKTFYVRLLAAGKAKKVALVACMRKLLTILNAMLRKNEEWDESYHHVAP

SEQ ID NO: 366008 - protein, 342 aa, unidentified
MNITTIGIDLAKTTFSLHGTDAQGKTVLKKTVSRGKLLEHFANLPPCVVGMEACSGAHHWARELRALGHDARIIAPRFVTPYRRKGKNDNNDAEAICEAVSRPAMHFVPVKSSEQQAILCLHRIRQQVVGERTALINQIRGLLSEFGLIMPKGRYAAQHGIPAILEDAENGLPSLARRLLHDVWQRIVQLNQQILAYDRELESLARQSESASKLMTIPGVGAITATALVASIADPKQFRNGRQLAAWLGLTPRQYSTGGKPRLGRITKQGDKYLRMLMIHGTRAVLAVLKDKQDRTSQWLRELIIRRGYKRAAVALAAKNARIVWAILNRGETYRLAAVGPV

SEQ ID NO: 366009 - protein, 428 aa, unidentified
MSNKKTIRHGQYCQMINEVSGSDEYLIVGIDVAKEKHHAFMGSSNGKSLMRRLVFENNIDGFSRLLKTVEEIKIQNALSKIVYGIEPTGNYHKPLARHLIRNGYNLVLVTGQAVKNNRQLLDGRWDKNDTKDAANIADLISRGKCHYYDVPSTSILEIRSLLSLRRRLKKEEHRLRMRIRNTLLAKYFPEFDRYYSACESESLAITRWMLDPDIIAGMGFSEFFNTVTERHRGLAQKIRLRKIYHLSTESVGCPIGPAGMLESDILVEKLQQVRCHIKKTDDLIKDFCREFDEYSCLLTIPGFGPYISARVLASIGDPFRFENRKQLIKMAGYDLCANRSGKTSDKAIPVISKKGNGELRYALYQAAKVASSKVDLFRTYFTERLRGRERERGIKTKMCVKLATKMLIIAWTLMKKKESFDPAYLNIK

SEQ ID NO: 366010 - protein, 312 aa, unidentified
MKSYNNFLGIDIGKKAFVVAIHGEKTTKEYGNDATGIACFIKEKKSALSSGLCVVETTGGHEMRLLLNLCDAGFSAHRAPGRKIKNFIRSYGNEAKTDEIDAKALARYAQERFESLELFIPPSQNARQLYELAQRRNDIKQMLVMEKCRLQAPRVEYIKESIEEIIQSLKKSLDIITQKINELIETDKNLKEKKRVLLTVSGIGNIIANELLILVPELGSLNRREIASLVGVAPIARDSGQLKGYRRTGHGRGGIKPSLFLAAMAARQSKTSLKTFYESLIARGKKKMVALTALMRKIIVIANARLKEMAAA

SEQ ID NO: 366011 - protein, 313 aa, unidentified
MQNTIVHYEGAASLEAAATKVKPSGARIKIGLDVHARLYVAVAQYDHLLPKAAQRFSPGEFVPWVQALLARGHSVHVVYEACGFGFSLYRQLIAAGAHCYVIAPCKLDEERSRVKTDPRDATTLCQRLSRYLEGNTRELALIRVPSEEEERARHVSRQRGQLVHHRQKLEAQGRSLLINHALPAPAHWWKEQSWTRLGRHLPAWIRTRLQTARPALLSLQQQINALTSELEASAPSILPRGVGKLTSVVLTREICDWHRFNNRRAISSYTGLCPGERTSGSKRVPGSVTKRGNPRVRTALVECAWRMVRFQPQ

SEQ ID NO: 366012 - protein, 343 aa, unidentified
MDYFAGLDVSVKEMSVCIVDDTGRIVREVKVASEPEALLGVLTNPACHFKRIGLEAGPLSQWLFSALGEAGLPVICVETRHMRAVLRAQINKTDRNDARGIAQMMRVGLYRPVHVKTLRSQKQRMLLTHRKLMQSKAIAIENDLRATLRNFGLKVGVVGTVKFEARIKELVENLPDLAVLVEPLLIVRRVLREQIGILHRRLLAIVRNDDVCRRLMTVPGVGPVVALTYRATVDVPSRFRNSKAVGAAFGLTPSKHQSGESNRTGGISRCGDEMMRMMLYEAAHIMLVRSAKWSWLKAWAMKIARHRGLKKAVVALARRLAVIMHRIWVDGTEFRWTREVAAA

SEQ ID NO: 366013 - protein, 314 aa, unidentified
MSTEYFVGIDVSKDTLDVCVDPTQDTYRVPNSPDGVDELIKRLKPIEPRLIVFEATGGYETLAVSSLAAAGLPVVVVNPRQIRDFAKSIGRLAKTDAIDAGVIARFASAVRPELRPVKDSPSQELTGLVTRRRQIVDMIVAETNRLQAATRRNRRDIQTHIRWLQKRQAQIDDEIKRDIQNGPLWRTTDQILQSTPGVGPATSAMLISCVPELGQLDRKKIACLIGVAPLNRDSGRYKGRRTIWGGRAQVRSVLYMSALSAIQFNPVIRQFYQRLREAGKCFKVAIVACMRKLLIILNAMVRNQTKWRHGEINP

SEQ ID NO: 366014 - protein, 416 aa, unidentified
MSFALPDALFFTGIDWAAETHAVCVMDAVGTIVAEFTIEHSADGIAALARCLARYGQPGVMPVALERPNGRLVDLLLEAGHPVVPVKPNAIKAWRDGEVLSGAKSDAGDAAVIAEYLRLRAHKLKAAAPYSDETNALRTVVRARGDLVEMRVAASNQLAALLDAHWPGAKAIFADVESPISLEFLTRYPTPASARHLGEKRIAAFCAKHGYSGRRSAADLLARLRHAPAGAATEALTEALRDAVLAAAGVLTALNASIKNLDRSVAAHLGEHPDGAIFTSLPRSGQVNAAQVLAEWGDCRQAYEHPDSVAALAGCTPVTKESGKHRAVHFRWACNKRFRKAITIFADNSRHASPWAAKIYNDARASGKDHPHAVRVLARAWIRVIWRCWLDGAPYDPTRHGAAAALTGQPAKQTAA

SEQ ID NO: 366015 - protein, 361 aa, unidentified
MHGTKLFDKALPLDEGKLKDLIHALSEHGTLLFVVDQPATIGALPVAVAQAAGIQIGYLPRLAMRRIADLHPGESKTDSPDVFIIANAARIMPEALRTVEVPEQHVAELVMICGFDDDLAKQSTATSNRIRGLLTQIHPALETVIGKHLEHMAMVELLVKYRAPALLRKAGEARSGALLTKYAPRAWKRWAKDIMTALGAQSVVVSGTEAAGIVLPSLARMLAETRAAREIIAARVEELVEGHPLPVMLKTMPGMGIRTEARILTEVSDKYFATAGHLASYAGLSPVTWRSGTSIHWDRSFAEGKQNSQAGVVPLGVRLAQMHGPRLPGVLRQETSDGKTAQPGCDRVGQATMQGYFCDAA

SEQ ID NO: 366016 - protein, 343 aa, unidentified
MNKLNVIGVDLAKQVIRVSVLSPTNRELQNKSLSRRKFAEFLGQQRRSLVAFEACATAHYWARVAHRHGHEVKIIPARAVTPYRQGHKTDENDALAVAEAARRPKIKLAPLKTIEQQGLQAIQRSRELLVQERTGLSNHIRGLLLEFGIVIPQGFAALHRRLPEILEDGENEVPDLYRATLSLLYERLCALRDDVKRLTIEVETLVRQNPACQRLMALEGVGPIGSVLLFATLGTGEAFVNGRQFSAYLGLTPKQYSSGGKVNLVGISRRVANKRLRAVLIQGARAYVHKLKEPRSAKDRWLWALIERGGYGKAAVALANKNVRTAWAMLTQGTEYQRYPATA

SEQ ID NO: 366017 - protein, 345 aa, unidentified
MQYIALDAHKQYTWARVELPDGTLIRETRIPHERGAIQGFLTSYEPGSPVAVETMGGWYWIVDEIERAGFRPHLVHARKAKLMVGQVNKTDKLDTRGLLQLQRTGTLPTVWIPSHDLRDLRELPRTRMVLVRQRTQVKNRIHATLAKYALALPCSDVFGKRGRALLLQRLAELPPQTAFTTLCLLAHLDALTERITHIEQRMADLLEVNEEITLLMTIPGVGFILAVVILSEVGDVGRFGRSEQFASYAGVVPRVHDSGGRRRYGPLRSDVNHYLKWAFVEAANAVCRHRARHPARHTSRLYERVRKRRGHQKAIGAVARHLAEAAYWVLTKREPYREPRSSTGA

SEQ ID NO: 366018 - protein, 353 aa, unidentified
MNNTKDTAKPKLFIGMDIHKRSWRIQTATDLVQGKAITLPSVPEALQAYLNKNYPDYEVYTAYEAGCCGYSAHRAFLSYGWHSIVVNPADISRTGNLQYQKNDKLDAKNICRELKDGRLNAIGVPDKEREHLRCLFRRRCDLSKEVRRLKSQIKSQLLYLGVKLPEKYDNPHWSKEFLAWLRDLYFENPTAEAALESRLNQYDFVEKELRCISNDLRAWCREHYKTDYNLLRSVPGIGPIVACGIISELGDLRRFKNFKQLAAYVGLIPGMSQSGDGKVHSRGINPRGNRIIRSYMVESTWQAIRFDPVMERYYRKHNGKDSKARLVKTARKLLSRTYAVVKTGIPYQAGVVE

SEQ ID NO: 366019 - protein, 344 aa, unidentified
MLYVGIDVSCKEFVVYAVNERKQKVFDNKIESTREGLRKLVKELGEGPKLVVFEAGNQMKWIAITLKKMKGVQIHVVHPNEVKWISQSNGKTDKVDAKKLAELARSDMLPRAVHIVDGEIRELRELVSARDRLQSKRVALTNTIRAMMLQEGVRLPVKFFQGMEWREKIEKLKIGGVQRLIVESYMKSVDQLLISEEEITARMMEIKDRRIELLESIPCLGKISSRVLVSAIDNVERFDNKKCVANYGGLTPTIRQSGEVKVMGRINRDGRREVRKVLLQCSHALSRTKSAGALPLKIFYEGIERRRGKKKAIVALARKLLTTAYGVLKNNEYYDPQKLTAYAV

SEQ ID NO: 366020 - protein, 423 aa, unidentified
MNNSSGGQYSAYIGIDWADTKHDICLQAADSERREFDCIPHQVEDIEQWALALRKRFGGPIAIALELSKGPIVYALQKYDFLVLFPINPSTLAKYREAFTPSRAKDDPTDAELALDLLLCHPDRFQPLQPQSAELRALATLVEQRRGLVNDRVRITNRLRNALKQYYPQVLEWFEDLDTPLFCTFINRWPTLVQVKRARSSTLERFFRQHGVRFPQVIARRIKAIKAATPLTRDVAVVMPYRLHVLVLAEQLRVTLESLRRYDDEIAQLAPQHPDYALFSALPGAGPSLAPRLLVAFGEQRGRFNSAAEVQMYSGVAPVTERSGHKHWVHWRWQCPTFLRQTFVEWAAQTVNKSFWAGAYYRQQKAKGCSHRVAVRALAFKWIRILYRCWQSRTPYDELVYLDALRRRGSPLLDQLGATAENA

SEQ ID NO: 366021 - protein, 350 aa, unidentified
MTMVGGLDVHRQQITFDYVDDDGVVHWGEIRPATRKTLRAWLGEHCRDGDAEFGLEGCTGWRYVSEELAAAGVGVHLGDPAKTAAARGPKKRAKTDRADARLLRTLLLEGRFPESWVPPAHVVEIRTLGRLYATLMDERRAWQQRIHAQLFHQGCAPIRALLTQAGREALAQAELSPAGRQYVDTALRRIDELSAEIGPLRTQLVNFARRQAGCRALQAHYGIGWLCAAVIWAEIGDARRFASSDQLVRFAGLDVTVYSSDAKRSPGHLSRQGSPELRWAAFEAAKSAARHSSPDYAYYHKLAAKHDGHNGKNPTLAVERKILRRCYHTLRALGDAALALPVPEREEAAA

SEQ ID NO: 366022 - protein, 391 aa, unidentified
MVCVGIDVAKDKHDCCILDSDGTIRADCITIPNNMDGFKQLLQTIRDCTKRSDKIKVGLEATGHYSYNILGFLLDNDLAVYVMNPLHTNLYRKSLSLRKTKTDRVDARTIATMLLSDVDLKSYMDTAYHNEELKSLTRYRFDKVRERAKLKQSVSRLVTILFPELEKLVPSLHIASVYALLSEYPGAKQISEIHLTKLTNLLVTASKGRYGKDKAIQIRDAARTSIGSVMPAKSLELKHTIKLIRELTSEIDEIEVSIQKIMDELNPPILSIPGVGIQSAAMILAEIGDFSNFESPDKVLAYAGCSPSTYQSGKLTNCYAHMEKRGSRYLRYALYNATKYVCYWNPVFAEYLAKKRAEGKHYNVALSHATKKLVRLIYALQKSGKAYLTAA

SEQ ID NO: 366023 - protein, 388 aa, unidentified
MIYVGIDIAKLNHYAAILSSDGIVLTEPFKFTNDGDGFRMLSSELSDYAPESMIIGLESTAHYGDNLVRYLVANDYKVCVLNPIQTSSRRKDRIRKTKTDKVDTIVIAETLMMQRSYRFITFYDLDIMDLRTLGRFRQKSIKQRTRLKIQLTSYVDQVFPELQYFFKSGLHQKSVYALLKEAPTPKDISSMHLTHFSHLLQTSSHGRFNKETAKQLRALAQKSVGNSDSTVSIQITQTISQIELLDSQIDKVEAEMTEIMKYDDSVIMTIPGIGYINGGMILGEIGDIHRFAKPHQLLAYAGLDPSVKQSGNFNASHTRMSKRGSKVLRYALINAAHNVVKNNATFKAYYDKKMAEGRSHYNALGHCAGKLVRVIWKMMTDDVDFNLD

SEQ ID NO: 366024 - protein, 341 aa, unidentified
MSIITVGIDLAKNIFAVHGVNEAGKPELVKPKVTRDQLLPLVANLPPCLIGMEACTGAHHWARLFRQHGHTVRLIAPKFVTPYRMSGKRGKNDAADAAAICEAVTRPQMRFVPIKDEHQQATLTLHRTRQGFVEERTALYNRIRGLIAEFGIVLPQKVERLRHEIGAHLEDLPGWANRCVGDMLSHADRLDERIHEYDHAIAEIAREDARCRRLMQLPGIGPTSATALVSSIGQGHDFDHGRQLAAWLGLVPGQYSSGGKARLGRITKAGDGYIRSLLVLGARAVLNSLMDKQDRFSRWARNLLERRGYWRATIAIAAKNARLCWAVLKYGEDFRLNPSEA

SEQ ID NO: 366025 - protein, 339 aa, unidentified
MNCMAVGVDIAKNVFQVHYVAQDTGEIVNKPIRRAKFLEHFANRAPCLIGMEACGGAHHWARQLTKMGHEVRLMPAEFVKAFNIRNKNDAADARAIWLAVQQPSKAVAVKTEAQQAVLALHRARQQIVKFRTMQSNCLRGLLTEYGEVMGKGRAALDKAIPAVLERVAERLPAVLIDTLREQWNGLTKLDEQIAEIERRLRQWMKEDKAAKAIAEIPGVGMLTSTAAVATMGDAKVFRSGREFAAWIGLVPKQTGSGGKVNLHGISKRGDTYLRTLLIHGARSVLTHAKEPGTWVEQMKKRRPANVVIVALANKMARMIWAVLAHDREYQKGYVNVKPA

SEQ ID NO: 366026 - protein, 362 aa, unidentified
MTHVSHEAFAAFVGIDWADAKHDVCLQPAGSATCECFQLEHTPEAIDAWVTTLRTRFNGQPVAICLELNKGPIVSALRKYDFLVLFPLNPLTLARYREAFTPSRAKDDPTDAALQLELLLTHRDKLQPLQPQSPTMRALAQLVEHRRRVVGDKVRITNRLTSTLKNYFPHVLHWFQEKDTAIFCDFLSRWPTLKAVQLARRSTLDTFFRAHHVRYADVIAQRIQAIKAATPLTTDAGVIAPNALLAQALIAQLRVTLQAIADFDTAIAQCAQNHPDFSLFQALPGAGPVFASRLLVAFGEQRERYASAAELQKYAGIAPVTERSGKKSWVHWRLQCPKFLRQTFVEWAAESIRHSFWAQLYY

SEQ ID NO: 366027 - protein, 343 aa, unidentified
MHVNTIGVDLAKNVFQVHGVDSAGKVVITRQLRRKQVLDFFSKLPGCLVGMEACGTGHHWAREISKLGHTVRLMPPSYVKGYVKRSKNDAADAAAICEAVTRPSMRFVPIKSTDQQALLMLHRTRDLLIRQRTQLINALRAHLAEFGLVAETGREGLAQLGAIITDESNHESLPSAMKQALQAIVDQLAALELQVGALDRAIHAHHRANDMSCRLETVPGIGVIGATAIASTVTDPSDFKSGRDFAAWIGLVPRQHSTGGKERLGGISKQGDRYLRRLLVIGATAVVRQARLHPQKHPWIMRLLAKKPAKLVAVAVANKMARIAWAIMAKGGYYRAPELAAAA

SEQ ID NO: 366028 - protein, 360 aa, unidentified
MQRQITTLDFKGQNIFVGIDVHLKSWTVTILTEELTHKTFTQPACAETLCNYLKRNFPGGDYNSVYEAGFSGFWAHYKLKEMGINNIVTNPADVPTSQKEHLQKDDPTDSRKLARSLRSNELNAIFVPNRATLEDRSLVRMRSTLVKDMTRFKQRIKSFLYFYGISYPPQFERSGTHWSKRFMKWLSEEVSLEHGSGTQALKILVQEAGQQRKLLLEVLKKIRLLSHSEKYAKNIALLRTIPGIGLITAITFLVEIENIERFQNTDHFAGFVGLVPNRHSSGAKSSDGEMTFRGQKTLKSLLIESSWTAARSDPALMMGYLSYVKRMEPNKAVVRIARKVLNRMYFVLKNKMEYVPGVVK

SEQ ID NO: 366029 - protein, 394 aa, unidentified
MEVMVETCCGIDVHQKTIVCCILDGPLETNRPKKIQRTFGTRTCELREALAWLNTHRVTHVFMESTGQYWLPVFNIFSEADFDIVLANPQRIKNVPGRKTDMKDAEWIAQLGRCGLIQNSYIPAPEVMALRMMTRRRLSYTQKRTQAKNELHNILQRANIKLTGYLSDIFSKSGQALLQLFIHGEVLTIENVSDCLHGLVKATPEDILAAMDGKLGAVDRQLLEDSLDEYRFYTTKIAQLEHAIEQYISEHFPDTYALLMEIPGIKQHSAAVILGEIGPNVEAFQTVGHLSSWAGVSPGSNESAGKSSHSRTTRGNKYLRIALLTSGGTAGRSRDAAFSALYHRMVARGSKMKAVVACGHKLLRIIYKILSERVHYDTKKALGLRQQPKSILTI

SEQ ID NO: 366030 - protein, 400 aa, unidentified
MSGARRPIQGFVGIDVSKDKFDACGIREDGAKLFQFSATMDRNGFEKLKSHLSSVPMGSVLIGMESTASYHVNLFSYLVSEGYAAVVLNPLLISNYVKMQLRKTKTDKKDAWVIAQFLLANKDSLIRRATSPLISDLRELARQRESLVDQMTSLKNDIKRILNITFPELEHMTGIFTKSILKLLQRYPSAYALQEVDPDQLTRMLIEDSYGRKRGAFAEALLKAARSSIGTPSPMKDVILKQKVSLHFHLEEALQEITEMLLQTSRGMMGDDMDILNSIKGIGEKTAASFLIEMGGDIQQFDDPNKIIAMAGIDPAVRQSGKHEGSSRITKRGNRHLRRIIWLMTTQVIHYCDVFRVYYQKRRKDGLPYKKAVLATSHKLIRVIYAMLTQRTFFCQAVNS

SEQ ID NO: 366031 - protein, 352 aa, unidentified
MEIIALDCHKHYSVACVQSPEGRYLAESRIEHRRGSIRAFLAPFSDGCPVAVETIGNWYWIVDEIEQAGKVPRLVHARKAKLMLGSINKTDKLDVRGLNRLQQTGTLPTVWIPPAELRDHRELPRTRMVFSTARTRLKNRLHSVLDKYGLQDQLPGVSDIFAAGVRERLEGCIKQLPPQAAYTSELLLEQLEAVQETIEALEKRIAELFQPTETLQRLDSLPGVGLILGVVLVLEIGDIRRFCCAERLASYAGTVPRVHSRGGKTHYGRTRPDVNHYLKWAYTEAANAVAVHRVSLADRHVGQLYNRIRSRRGHASAVGAVARHLAEATYWMLKKNEPYRERGITEVSPQGL

SEQ ID NO: 366032 - protein, 411 aa, unidentified
MIKENYIYVGIDLHKETHTAVMIDCYNQKLGEITFPNRPAAFPKLVTKVKKCNTDGKEVVYGLENAYGYGRALAVWLIDKGYLVKDVNTAISHRQAKHRGAMYRKSDSDDAKAIALATLNMLDKLPDACPNDAYWSLGQLVHRRDNIMKQRTRLVNQLHEQLCIAYPSYKQFFNDISRPTALYFWEHYPSRKYLKGKSVEDLRAELVPVSHNKCSTRTCEKILDAIAGDKVKNNAYQDARDMVTLSIVSDLQHYDKQLAEVDKMLEQMYKMLGCTLTTIPGVNVITAVKILAEIGDIKRFSNANKLAQFAGIAPLHLSSSGKGKDFATKQGNRRLQATIYFLAVQMIQVSSKGTPRHPAFRAYYEKRKAEGKTSQQALICISRRLISIIYGMLKNGTEYRMPVVENAGENR

SEQ ID NO: 366033 - protein, 322 aa, unidentified
MSEVVVGVDIAKRKFDVALFMNGKFKHKTCLNTTQGFEELSQWLKRQAVERVHVCMEATGTYGDELATYMHDAGHTVSIVNPARIKGFAQSELLRAKNDKIDAALIARFCMAMNPEIWTPPPEEIRRLQLLVRRADALIVMRTQEQNRLDTAHGSIEASIREHISYLEQEIDKLRRQIAEHINNDPNLRTKRDLLSSIPGIGAATIAVILSALHIFEGVAHVQKTVAFIGLAPREIVSGSSVKGKTRICKMGHSRLRKALFMPALVSMRYNPVMVDFSTRLRRKGKNGKVIICAVMRKLVHIIYGILKSGKPFDPNYKLNVA

SEQ ID NO: 366034 - protein, 339 aa, unidentified
MNNSVIGLDIAKHIFHLFTLGADGKVIKKKLKRSELLAFFANYPASIIGIEACGSSHHWARELIKLGHEVILLNARFVKNYVVGNKNDFNDAEAIYEAVLRPNKRVVAIKTVAQQDIQLVHNMRKELVDRRTALVNQTRGLLSERGIIINQGITQVREQLPLIVEDAENGLTDLSRELFAEQYEKLKALDEEIKAQDQRINRLCNANDLSKRFLEVPGVGPLTATIVSADIGDSGKGYKSSRDYAASLGVVPKQHSSADKQHYLGISKRGSRYIRTLLIHGARAVVKNCAHKTDKLSLWLQALVARRGVNKAVVALANKNARILWAMASNGKDYEVLAA

SEQ ID NO: 366035 - protein, 363 aa, unidentified
MEYYVGLDVSQRQTAVCIVDGQGKKIAESKVLTLPTDIHGWLATKIPDLSAIVRVGLESGAMSNWLYTDLTKLGLPMICLEAFQAHQFLKSNRNKTDKNDARGLAQLVRMGGDFIRPVTVRAQVSREDRMLLTLRQNLVKQKIALENAITGSLKQFGFVVARGGVGRKTFRSRIEEALAKADERGFNLRTAIMPSLDLHGVLHQQLAKLTRQIQTTAASNPVCQRLMTTPGVGPIVALSFVTAIDVPERFSKSDDIGAYFGLTPRQFQSGETDLRGDISRLGNSMTRSHLVQAATVLLTSGQKWSALRAWGMKVAKRRGFSKARIAVARKLAIVLHRMWINEQDFRWSNQAAEEKELAGITPA

SEQ ID NO: 366036 - protein, 369 aa, unidentified
MDNITFVGLDVHKATVCVTLAESGRDGEVRQIGVFENRPEVLSRMVTRLGKNGRRLSFCYEAGPCGYGLQRLLTAAGHECVVVAPSLIPIKAGDRVKTDRRDATMLAKLHRAGELTAIWVPDHAHEAMRDLVRARATAIGMLSKARQHLQGFLLRHERVYQGPRAWTLAYRRWLTTVRFEHPAQQIVLQDYIHAAQDAETRRDRLTDQIEELLPSWSMAPVVAALQAMRGVALVAAVTVVAEVGDFRRFINPRQLMAYLGLVPSEHSSGGSVRRGGITKAGNALARRVLIEGAWTYRMSARVSRTIDRRLEPLSAEIRDIAWKAQVRLCARYRRLAASGKPKAVVTTAIAREMVGFIWAIARIAQPKLI

SEQ ID NO: 366037 - protein, 340 aa, unidentified
MKHIGMDLHSTTTEACVRNGKGKIVLRRQIETTRAELEKFVVGIPGRKRVAVEECQMADWVTRVLKPHVDEVIRCQPQFNKLISESEDKCDKTDSESISELLYLNRLKRVHHPELAYRILRETVRAYWIASRELTRAKNRLKGFFLFNGLHEAGDKIYSAHNRSRHLKKLEKAGGHVELGQLLYERMDHCRQLKAKHIRLVRKSAKPMKDLVRLLMTMPAIGAIYASTLVAYLEAGWRIPNKRKLWNYSGLGLRNHESRGIGRRHVSLSGSRLVKHVVMSAAATIASRRGNNALSELWEKDIQNNVDPEQVQRNLARKILVIVQHLLRSKQEYSDEGVRG

SEQ ID NO: 366038 - protein, 367 aa, unidentified
MKKVSTAAMRQSRNISQQQLTIGLDLGDRNSWYCVLDEAGRIQLEQRVRTTAKVLQEVFGAMPRSRIALEIGTHSPWISRLLSELGHEVIVANARKVRLIGESRRKDDRLDAQTLARLARIDPELLYPVKHRSVQAQAGLMTIRARAGLVRARTALVNTARGLAKSYGERLRSCNVRNLDPEKAEGLSPELQRALEPLLATIEELSERIVEYNDRIEALAQTSYPQVELLKQIKGVGTLIALTFLLTLEDPHRFGKSRDVGAYLGLQPGRRKSGESEPQLHISKEGDPYLRTLLVQGAQHILGPFGIDCDLRRWGLKLAERGGRNGKKRAIVATARKLAVLLHHLWVSGEVYEPLHNSGRVTVAAAA

SEQ ID NO: 366039 - protein, 349 aa, unidentified
MNRCYTGQHRFYCGVDLHARTMYTHVLDATGKTVFAKDLPTDPAAFLDALAPFRPDLVVGAECMFAWYWLADLCEDAGIPFALGHALGMKLIHGDKTKTDKIDAAKLAGLLRGGLFPVGYVYPRAKRQTRDLLRRRSFFVRQRAQLITHIVNTNTQFNRPPLSTKLTYAANRSADLVERFTDPSTKLAVAADLGLIDAYDGQIAALERHLVRHAKVDDPVTFGLLRTVPGIGPILGLTLLYEIDAIGRFPGPGNFLSYSRLVRCPHESAGKKKGSGGKKIGNAHLKWAFSEAACLMLRSCLPVKAWMQRTEKKKGKRKALGILEAKLGRCVYHLWRKQAPFDVKRSLAG

SEQ ID NO: 366040 - protein, 409 aa, unidentified
MERQLERCGGLDVHKETVAACVRVGGRAGQAEQHVQTFGTTVGDLLVLRDWLAAHGVTHVAMESTGVYWKPVFYALESDFTCLLVNAAHIKQVPGRKTDVKDCVWIAQLLEHGLLRGSFVPPAPIRDLRDLTRYRKALIHDRTRVANRLHKALEEAGMKLASVASDILGVSGRAMLAALVQGTTDPAVLADLARGRLRGKLPALRQALASRFRPHHAFVLGQLLAHLDYLEEAITTLSTEIERVMAPWAEPLRRLDTIPGINQRTAEVILAEVGADMSVFPSARHLASWAALCPGHHESGGKHKSGKTRKGNRWLRTALIEAAAGASRAKHSALQARFRRVLRRRGPKKAVVAVAHALLRVVYHVLADGTVYREAGATSYDRHQSQRVTRRALQTLERQGYRVTLEPAA

SEQ ID NO: 366041 - protein, 355 aa, unidentified
MKNQAIQYLALDVHQATTVATVRDEQGSIRMRATVPTEAGAIVGLVRGLGARVHVVFEEGTQAQWLHDLLEPHAERVIVCNVRGRSEMTNKSDRIDADGLSEMLRVGSVKSVYHGGSSVLTLKELVRCYTNLVDDSTRVMLRIKALFRARGIRAPGASVYRKSERAKWLAKIESRGARMRADSLLRQLDSLFELRPKAKAAMIKEARRQSGWKVLKSIPYFGPVRVAIMLAIIATPFRFRTKRQLWPYIGFAVITRSSADQEFVNGKLRRSRRAPLTRGLNRNHNPALKNVFKGAANAAAVKPGPLKDFYDGCVRRGVREEMAKVTLARKIASIALRLWKKGELWNPDKVTMQTT

SEQ ID NO: 366042 - protein, 341 aa, unidentified
MTTFQYFVGLDLGSEKFTAAIGTTPWKLLVRAVEFANTPDGFESLFTWWQKQNYPREQTLWCMEATGVYGEALAYFLVARGHAVAVEPPLKVKRAFAPHGHKTDAVDSQQIAEYACRFSDEVKTWQPRSEILEQIKVLLTTREQITVQRTAHQNALHALKRKVVRTPVAEQIHEQVLTQLQTHLRAIDAEMQRLLDQHPPFQKLLSLLLTIPGVGVLLAAHMIVLIHTTPHPLDAKRLAAFLGICPYERQIGKSVYATPTSRHFGPGAQRKLLHLAARSISTHKKPFREYYQRKLAEGKPKKVALNNVANKLLKVICTVVTSQTPYDADYRSAKPELAQVA

SEQ ID NO: 366043 - protein, 405 aa, unidentified
MKQRLKELFAGIDWASKTHAVCVVDDTGGIRARFEVPNTGKTFAGLVRRLCKLGVMGVAIERPDGPLIEAMLDAGLTVYVIPPRQVKALRGRYSSTGAKSDLGDAFLLADVLRTDHRRLVPMTTDSAETKVLRALTRTRKDLVEARVALVNQLRAQLELCFPGAVGLFAKLESDVSIAFLRRYPTNKSVLHLGEARLDAFLRRISYCGRVPVGVLLERLRTAPAAGITEVESDGRAACVKALLDAIEVCNRRAKDLEAEIIERLEFHRDAAIFTSLPRAGRGVRAASLLAEIGDVRAKFPDEESLACLAGVAPVTKASGKARSVGFRWACDKKLRNALIDFADDSRHNSPWAADVYRRAVERGKRHPHAVRILARAWSRVIWKMWQTNEPYDVNRHGGAVMLIFA

SEQ ID NO: 366044 - protein, 375 aa, unidentified
MHATVRSLGSVNDSVLFVAFELAKRQWKLALTSGFGVTAIIRTVASGDWRGVELALAAARRHFQLAADVPVVSCYEAGRDGFWIHRALVARGLGNRVVDSSSIDVKRRRRRMKTDRIDAIKLVQMLVRAWAGEADVWSEVRVPSPAVEAARHVSRERTALTHERTRLVNQLRSWLATVGASLPTQRPAGWWTTIQDWAGAALPASLQQRLERTEARLRLVAEQIAALETTQRAAVQSASAASALPRLVQLKGVATTSAAVLVDEGLVWRAFTNRRQIGGLLGFAPLKYESGETSRDQGVSRAGNDRLQATMVQLAWSWVHWQRESALTQWYLARFGTGKRARKVGIVALARKLLIALWRWVTAGVVPAGAVLKVA

SEQ ID NO: 366045 - protein, 344 aa, unidentified
MKSTTIAIDLAKSVFEVGISHHPGHVSETHRLSREQIGVFMANQPASIVVMEACSSAHYWGRTFQGYGHQVRLLPPLYVRPYVQRSKTDRADVKGMLEAWRNSAIRPVPVKTESQQQLTSLHRVRSGWMEARTKRINMVRGLLREFGLIFPLGASALPERIREVIENTDTNLPMALRELLNQLVREIGELETRVKAVEKQLEALAIQTPMIEQLRSIPGIGLLSSTALVGFVGDITRFPSGRHFAGYLGLTPREYSSGARRRLGRISKQGDAYLRTLLIHGARTVLIRAKTSPQPDRFRTWALELQKRSGHNKAAVAVANKLARVVWAVWKSGKPFESRSPALT

SEQ ID NO: 366046 - protein, 315 aa, unidentified
MTSERRYVGIDVAKATLDVCTSDGEAWQVANADRDMDALCRRLSEVQPELIVLEATGSYELRAAAALAAAGLPVAVVNPRQVRSYARSIGQLAKTDRIDAQVLARFAEAARPEVRPLPDEETRALEALITRRRQVIGMLGAEEARLKTAVAVTRKPIKAHIGWLRRQLAEIDGDIDGAVRRSPLFRAKDDLLRSVPGVGTATSRTLLALLPELGKLDGKQVASLVGVAPFNQDSGTLRGRRRVWGGRARVRTALYMAALVGSQHNPLLKALYDRLLLAGKPKKVALVACMRKLIIILNAMMRDGLPWDPARTAIT

SEQ ID NO: 366047 - protein, 350 aa, unidentified
MAMIMLGIDAHKRTHTVVAVDELGRRLGVKTTTATTSADHLELLRWADQFGQERTWAVEDCRHLSRQLERDMLAAGERLVRVPPKLMAHSRDSARTYGKSDPIDALAVARAALREPGLPTAVLDPASRELRLLVDHREDLVAERTRHINRLRWHLHDIDPGWDPKKRALTTMKHLRLAEQRLDQLDSVVARVALDLVRRIRELTLTINDLEGELDQRTADSAPNLRAVHGVAGLSAAKIIGEVAGIDRFRSRHAFARHNGTAPTPVWSSNSERHRLSKTGNRQLNAATHRIALTQARSLPEARAYLQKREAAGATRKEALRSLKRRISDVIFRAMLADAATTAPVNSLAA

SEQ ID NO: 366048 - protein, 401 aa, unidentified
MIDTGSIDVFLGLDVGKGEHHATAVTPAGKKAFDKRLPNTEPKLRELFAKLQAKHGTVLVVVDQPASIGALPLAVARDMGCPVAYLPGLTMRRIADLYPGEAKTDAKDAFIIADAARAMPHTLRAIDGEDETIAELEMIVGFDDDLAGEATRVANRLHGLLTQIHPSLERVLGPRLQHPAVLTLLERFGSPAQIRKAGRRRLITLLRPKAPRMAERLVEEIFAALDEQTVTVPGTEAAALIVPSLAASLTAVLDQRKLLADRIEELLEAHPLSAVLTSMPGIGVRTGARILIEVGDGSTFPTAGHLAAYAGLAPATRSSGSSIRGEQPSRRGNKQLKRAFFLSAFAALGDPASRAYYDKKIAQGKHHTQALLCLARRRADVLFAMLRDGTFYEPQPSAAVT

SEQ ID NO: 366049 - protein, 465 aa, unidentified
MKPNRRPPWKKPAAGPSLLERMNPNAAGIDCGSDTHYVAVPADRDPTPVRAFQTFTADLHRLADWLTACGVTTVAMESTGVYWIPLYEILEARGLAVVLVNARHVKNVPGRKTDVVDCQWLQELHSVGLLRGSFRPPAAIAALRAYLRHRETLVQSAATHVQRMQKALVQMNLQLPIVISDITGVTGLRILRDIIGGQTDPQVLAQHRDHRCQASAAEITAALTGHYRPEHIFVLQQNLELFDAYQHQLAACDTAIEAHVLTLAAQAPTPASPVPAARTRKKARNNEPRFEIRTPLHQLTGVDLTQIDAIGPYSALRLLSEIGTDMSRWPTEKHFTSWLTLAPRNKISGGRLLSSKTQPSANRAAVILRMAAMNLGRTDTALGAFYRRLAYRVGKAKAITATARKLAILVYRTLRDGLAYQDPGAAAYDAQHRVRVLHRLRQRAAHLGFSLLNRDTGELLEGAVS

SEQ ID NO: 366050 - protein, 409 aa, unidentified
MTPTIRYVGLDVHKHYVMVGAVDQTQQTVLPPRKVALADLEGWAEKYLQPTDHVVLEATTNAWYVHDLLEPRVERVVVAHPPQVKLIAAAMVKTDKKDTMTLARLLAVNLVPTVWVPPVHVRDLRALLAHRRRLVSQQTQSKNRLQSVLHRNHLVPPAGKLYHPDQRNWWLALDLAAGDKLRVRQELLMLDQLDTLIDETSDELHHLSLSEPWQEQLPYLIQLPGIGVMTAMVILSAVGDIQRFPSAKKLVGYAGLGAKIHASGLTFHTGGITKQGRRELRTALIEAAWITVRFDPTWRQQFERLEQRIGRRKAIVAIARKLLVVVWHVLYHRRADRQADPERVVRYFLAWGRQAKAFARLGLKAPEFARQQLDILGIGQELPTLITFGVTYRLPPSSLPVVETAATPA

SEQ ID NO: 366051 - protein, 388 aa, unidentified
MAARTVNNLSPAGAHDDAVRCILAIELSKKSWIVAVNTPLSDKISHHTLKPCDGKGLLDLCEQIRMRVAGATMKRVEIVSCYEAGYDGFWLHRLLEAHGIRNYVIDPASLQVDRRARRAKTDRVDVERLLRSLMAYLRGEPKVWSVVRVPSVAEEDDRRRHRERDRLIGERVQHVNRIKGLLALHGIYDYQPLRPDRMQQLERLRTADGSLPPRLKAEILRELQRLELIVAMIKTIETERDAIASAKIETECGNAKKIQELAKIKCIGPQFATTLVGEVFYRSFDNRRQLASYVGLTPAHFQSGSMCHDQGISKGGNAKARTVMVELAWLWLRHQPASCLSVWFHERVGKLKGRIRRITVVAVARRLLIALWRYLETGLVPDGATLKV

SEQ ID NO: 366052 - protein, 367 aa, unidentified
MSTRKSAATEITFVGLDVHRDSITSAVLESGREAPVVDRFFHDESSIRRFVASLGDLRSVRACYEAGPTGYELARFLHRLGIGCEVIAPSLIPVTPGSKIKTDKRDARRLAHLYRSGELVSVHIPTPQEEAIRDLARTRADLVIDRTRARHRLSKFLLRHGQVFRVTSQWTVAHETWINQIRFDDAALSSTFSHYRAVLLSLDGHLRAVEADLKPYFANGPFAEAVSRLCAYRGVTEMGALTLSAEVCDWRRFAHATTLMGFCGLVPSEYSSGNRVSRGRITKAGNTHLRTQLVESAWAYQHRPAVGPLMKKRQIHCSPETVARAWNAQLHLCGKFRRLAARKTSNKIVATAIARELVGFLWGEMAA

SEQ ID NO: 366053 - protein, 455 aa, unidentified
MPKKTTSDRPELKTVNVSAAAIDIGSKMHMAAVNPACTEVPVRSFGTFTQDLHELADWFTACGVTSVAMESTGVYWIPVYEILEQRGFEVILVNARYAKNVPGRKTDVSDAAWLRQLHSYGLLRGSFRPDAEIATLRAYLRQRERLVEYAAAHIQHMQKALMEMNLQLHHVVTDITGATGMRIIRAIVAGERNPDVLATYRDVRCHSSTETIHAALVGNDRHEHVFALTQSLELYDVYQAKMLDCDRKLEVLIAALNNKGEKPVGKLSKPRIKTKQVNAPTFDVRTALYGVLGVDLTEIHGLGPSLALKLVGECGTDLRAWPSAKHFTSWLCLAPGNKVTGGKVLSSRTRRSSSRAAALLRLAATTVGRSDTALGAFYRRLSSRAGKSKAVTATARKIAVLFYNTLRHGMSYRDPGAEHYEQQYRSRVLANLQRRAKSLGFVLQAIPGDANPAVS

SEQ ID NO: 366054 - protein, 348 aa, unidentified
MLIIGCDYHPGFQQIAFVDTETGELGESRLTHTEEAEQFYRTLKERRVRVGMEASGHARWFERLLTELQYELWIGDAAEIRTKRVRKQKTDRQDAQLLLKLLMEDRFPRIWVPDAENRDLRQLLWHRHRLVQMRTRIMNQLHVVALNEGVRRKKALWRPAGRSELESLVLAPWALRRRRDLLDLFDQLTPKIRDLTRALEEEVEKRPIARRLMTHPGVGVLTALAFELVIGTPERFGCGKQIASYVGLVPSEESSGDRRRLGLISKQGNALLRFLLVEAAQVTVRSQPQWRSKFFHLALRRGRKIAKVAMARKLAVHLYWMWRQGRDYGPFEKLGSHAGQPGNLHGVQ

SEQ ID NO: 366055 - protein, 410 aa, unidentified
MERIVECSAGLDVHRDTVVASIRDLRGKRERVTTRTFETYPDALRSLGAWLKESGAQVVAMESTGVYFLPVYRELRREGLVVWVVNAAHAKNVPGRKTDVNDSAWLSKLAMHGLVRPSFIPDEELETLRMLTRLRVQTVSEASRTKNRVIRVLEALGIKLAGLFSDVLGKSGRNVLRAMLEGNKSPTEIAALVDPRMAKKRPSIERALSVLVHADAKWMLLELLQTLEGIEQRIARLDGRIADKLSRYASDVELLRQIPGLSDVSIAAVLAETGSDMSLFPSAKHISSWAGLAPGKNESAGKNKRTRVLRGNPWLRTMLVQIAWVVSRAKRSPWAQSFARWARTTGSVKKAALAVAHKLLVAVYHVLKDRIYRPQQPLPLTDNQRQRRIQRALANLKELGVDVTVAPLPG

SEQ ID NO: 366056 - protein, 341 aa, unidentified
MNQSSTISIDLAKSVFQVAVFNRHGKRMSNQAMSQKKMLMLINQHPNSTICIEACSASHYWGRTFQDRGHTVKIIPPQKVRPYRNGNKNDANDAIAIYEASLRSDIHVVSVKTPEQQDVAMLLSLRQSYIKQRTAVSLRIRGYAAEHGITFPQGINKLREMIPLAIEDAENELTSVARFVLRELYAQLLSIDEPIERVESELIEFARQIPACQLLITLRGVRWIIASAIFARMGDASAYRNGRGASASLGLVPTHRGSGGKNKNHGISKSGDKTLRSLIVHGARAVVANIRDKKDRLSCWLRNLLERKPFNQVVVALANKTIRMACAMLKSNQSYNEALIA

SEQ ID NO: 366057 - protein, 484 aa, unidentified
MVALRAGLAEPLDGDRVEAGKSAVACDPDQQSGPRCAEVPFFVAPGTREHAWQCLERTCGATIARSDAEASMRVMIERVAWLDVHQETVVACVLIGKPGERPTKEVRTFRTMTRDLEALREWLLSLGVTHVGMESTGIYWKPIYAVLEGSFELIVGNARHIRNVPGRKTDVKDAEWIADLVRHGLIAKSFVPPPPLRELRDLLRYRRKLVESQAAERNRLLKLLETANIKLASVVSDVFGVSGRAMLKALIEGTASAQAMADLAKGQLRRKRADLVLALEGRVEEHHRFLLGLQLRRLEAAEEEIAALDARIDEKLEPYRAPHALLMQIPGVDRLVAAVLIAEIGIDMSVFLSVYHLASWAGVCPGNHESAGKQKSGRARNGNVHLRTMLVGAAISASRAKGSYLKDKFYRLKARRGSMRAALAIAHKILVAAYHMLAKGVGYREIGEAYLDQISQTRTVANLKRRLERLGFQVTLQSKAQSAA

SEQ ID NO: 366058 - protein, 366 aa, unidentified
MKKHTTINQSLSADVSACTTVAVDLAKRVFQVAGEDALGQVIFEDRIKSREAFQVFLRKLPASVTVLVETGPGAQAWARLLQTQGNPVRILPAQLVANHRSGPKNDRNDALAILRAGRDCKISAVPLKSAAALAMQALHRARQGYVRRRTAVSNQMRGLLLEHGVAMAQGELAISQLVPRILEDATQPLPDLLRALIAELLGEWSQLGERVNVLTGRLETAAQEDETAKRLMTVRGVGPIIATALLAKQTEPERFANARLFAAYFGLVPSQHSTGEKVRLGKMSKHGDAYLRSLTIQGAHAVLRQLRPDSQQPDDQRLQRWISRLGRKEAAVRLANRNLRILWVLLQNDQTYRRHPGNGQEAAMSH

SEQ ID NO: 366059 - protein, 380 aa, unidentified
MPEAVIGLDVGKSSHWACVATRDGEVLLSTPVANREGDLDSLFGRFPDALVVVDQSRNIGALALARARAAGMSAAYLPGLAAHGAARLFAGDAKTDERDAMVIAKTALGIPDALLPVGDPGPTIAAARALAAQRNFLTCENTRNKNRLRSILLESCPAFEALVDLSDGPQLRLMASLGGAWSVADAGPRRAAALTRGAARGKIEALVRSTTSSTRPDASVVAAEDRAVKLLARRISENSAEIEAITAEISALLEGDDTYRCLLTVPGIGPKTASELAISIDIEDFPSHDRLASYCGLAPRNRQSGTSISSVTASRQGNKRLKNLLIFSCNCLTRTEGRWGDYYTRCRERGMSHGKALKALARKRLKVIYAVMRDRVPYAA

SEQ ID NO: 366060 - protein, 385 aa, unidentified
MIYVGIDVAKQKHQVAILDDEGEIYRDGLVIMNNRTGFQELHEILCHIRGETKQDCQIAMEDTGHYSLPILQFLKRNNYSTYCYNPILIKEFSKVHTLRKTKTDKIDALVIAKKLMTDFEKREKNLNETKMELKELTRHRRRLGKHQSFLKTQYTRILEKSFPELATYGQVRHSAYMIKLLKKYPSPKKIAAAHQKTLSNLLGVNNSHVSASKLQQLAKESIGYYSEVTELELTQTIEQLNMYEKQIKKVDKRIQEIMDTFDSPIVTIPGISYRLGSIILAEIGDIHNFETPSQLLAFAGMEPSIYESGKSKGSGKMVKRGSPYLRWAMYHAARLIAIYSPTFKTYYEKKMSEGKHYNVVISHVAKKLMRVIFHLLRKGQAYKEA

SEQ ID NO: 366061 - protein, 331 aa, unidentified
MSMHVGLDVGSRTTAMGWRNDGRFAGACNIDQTPAGRKAAVNRLLELKPLSVVMEATGIYYLDLAMELTAAGLPVSVINPKSFHNFAKLMLKNSKTDAIDAQLLAEYGERMSPRLWTPPTTIQLELRAIGRHINRLTCHRTRAKNELHALKATQTTMKMLIEDEEEAIEAFDKRIERFRLAGRALIDNCPTLSAQFGHMIAAPGMGEISVFAALAELTTLPVTLKSAQVSRHAGLDVRLTQSGTSIDKPGRISKGGNAYLRSAMYMPALTAIRCDSNVKAFYEALIGRGKRKMQAIVAVMRKYLTGLWACMRAGEDFNTAKLFSEKHLAKA

SEQ ID NO: 366062 - protein, 295 aa, unidentified
MEQITRGAIVRVGVDLAKQVIQVHAVDALGRVVVARAIKRDRFEAWCAQLPAGCIVAMESCSGAHHWARRLGRLGLQPLVIAAHLVSPYRMEGRQGKNDANDAAAVCEAAARPTMRFVPVKSAQQQAVLTVHRLREGYKEERTACINRIRGLLAEFGVIVAQTPEVLRRQLPEVLEDASNELPSLARTALQQAQLQWVELECHMAWCDERIEAHAKSDEMARTATQLCGVGPITASALVASVADFGQFKSAAQFGAWLGLVPSQNSSGGKASLGRITKRGDDYLRTLLIQAASLR

SEQ ID NO: 366063 - protein, 336 aa, unidentified
MRSIGVDLHKRTFTCCFLSERGKRLKEYTVSDMKVFKRDLRKTDRVAVESTGNTRWFSDQIRDLVEEVVVVNPRQFKVISQSVRKTDGSDAELLAFYLSKGLLPEIRMRDELSDEIKSLCVTRDKLVKLRTALKNKIHNILNAHGIQSRREDYSSEKGLRKVFEYPIHSIAKVELEVIVEQIRHLNEGIKRLDGEIEEKGQGLKGFENITSIKGIGSKSGSILLSVIGDIEDFESSKKLESYFGIVPRTRNSGDRVCHGRITKQGSKLGRTTLVQCTLVAIKYSPYLRRFYLRLKQKKGSGKAIIATSRKLLGIIYQTLKNDWVFEDFGNFVIRAT

SEQ ID NO: 366064 - protein, 366 aa, unidentified
MKKISTVQIFGNEIFKEQKLTIGVDLGDRWSFYCVLDEAGKIILEQKVPTTPEAIKQTFGKMPQSLIALETGTHSPWVSRLLTELRHKVIVAHAQKVQLITKSNRKDDRHDARTLARLVRIDPELLGPVRHRSAKAQIHLTVIRARAELVSARTALVNAARGLVKSFGERLPQCGTYQVSEKLAEGLSAELREVLVPLLREIESLSERIQEYDEWMEKIAQEVYPEVSLLEQVKGVGTQIALTYVLTIEDPYRFAKSREVGCFLGLKPGRRNSGESEPQKHISKEGDRYLRTMMVQGAHYILGPFGEDSDLRRWGRKLAERGGKNAKKRAVVAVARKLAVLLHRLWVSGEVYEPLRNSQKAMRAVA

SEQ ID NO: 366065 - protein, 421 aa, unidentified
MTMALKHDSEIVSVVHPICCGLDVHKKEISACLLSNDAQGQVETLIAEFGTFTDDLAALRDWLKEHDCPVVALESTGIYWRPVHNVLEGEVQVVLVNARHIKNVPGRKTDIADSQWLAGLLRHGLLRGSFIPPQHVRQWRDLTRLRKSYQESLGDFKRMTHKLFESANIKLGSVVADLFGVTGRNLMNLLATREGEISLEDISQAARAGLRQKTTELWRSIQGFFTDHHRYQLQLLLSTIAALEAQVAGLQERLKELMMEQHPLLQRLKGIPGISDVAAATILAEIGHTLETFPSSAHLASWAGLCPGNNQSAGKRKSGHSPVRQHHLKTILVEVAWVTVRQPGSYYKEKFHRLRSRRGTKRAIVAIAHRLLKAIYYIIKDGVGFRDLGEEYLNRKHQASRLYVLQKQAKMLGYELVPLAA

SEQ ID NO: 366066 - protein, 344 aa, unidentified
MEYYGGIDVSLKESAVCVVDQDGKIFREAKVLSEPEAPIEWFTSLGVPFVRIGLEAGPLSQWLYPPMRNAALPVELLETRQVKTVLATMPVKTDRNDARGIAQLVRFGWFRPVHCKSISAQEKRTLLTTRSMIQSKLLDIKSGIRGILRGYDLKVGDVSPRNFPGRVRQLVAGHQTLTDTIESLLKVQEALEAEFNKLDKKLVSMARSDADARLLMTTPGVGPVVALTFTAAIDAPDRFKSSKDVGPHFGLTPKRYQSGETDYTGRITKKGDKSVRCALFEAANVILTKPIRGCTELKSWAVKLSKRAGMRKAKVALARKLAVILHRMLADGTPFKTSDKNAVA

SEQ ID NO: 366067 - protein, 412 aa, unidentified
MEGETVIAGVDTHKDVHVLCLLDGLGRKIWSGSFGADPEGYDRLAEAIGDPGSCMVVGVEGTASYGAGLTRRLAELGYNVVEVLRPKRDKARPGEGKSDPLDAERAARKAASGRGCSVPKSQDGWVEAVRQLYVARRLAVATSTSCVACAKSMLTTAPGALRERFRGRERPKDLMPLLARGRKAGDALEESVLASLRSVAAVWKEARSQVESLDERIRALLEANAPALLGIEGCGTTTAAALVVAAGDNPGRLKGEAAFSMLCGASPIPASSGKTERHRLNRGGNRQANWALYEIAIKRMAYDERTRRYVARRTSEGKSRREAVRCLKRYIAREVYRVLMDPNPDGAAPEGPELAKMRKAMRVTQKQAAAGLGMSAASLGHLEHGRRRSTKLERRYYELLCELERTLPQTAS

SEQ ID NO: 366068 - protein, 338 aa, unidentified
MSNIAVSKQAFCGIDVSAATLAVAVQRPDRNATDQREFPNSAPGHRQLILWLGKLAASMRVSLEATGVYSLDLALALDAAQSIEVAVLNPNQVNHFAKTLRRSKTDKADALVLAEYSLRMPFTPWRRPDTITQQICAIGRYIATITQEHTRLSNRFHAATAAAATPKCVRQDLKRTMDACRKRIQNLRKQALNLIQQNPELKQKFQLLLQMPGIGETSAIHLLSQIAPLAPEMTVRQWVAHSGLDPAHRTSGTSVNLPSRISRHGNKHLRRALYMPALVATRHDPYFRAFYQALQTRHKTKLQALMAVARKLLHAIYGIFKTNTPYDGAKLFPQQKPA

SEQ ID NO: 366069 - protein, 423 aa, unidentified
MNELTLCVGADVHLDEIVLRAVDKTDGHEVLERFHVTNNLPGAQSAATTLAQAATQHGYTHLEIGWEATGLLWVPFHRFLSTSPLLQPFTPELVCFNPKLVANFKDGLVLRRPKNDERDAWDVAARVRFGEWPVSYVPADYWQGLRRLTRYRYQLARNLSREAMRFQSYAFLKCSDWKRVEAFSDVLGATSAALLTEFTAAELRQMTHDQLANLIAHRGRGRFYDPHATARAVQHALCTSYPVDYQTDLMVTAALATAWEHIRAIKRLIKRLDQHISRYIAPVPNPLLTIPGLGPVITAGLLAEIADISRFPEHKHLAQYFGISWTRRSSGSFVSQNTSMTKVGNPYGRYYLVQGADKMRQHNLEYKAFYWRKFNEVSTHQHKRALVLTARKLVRLVHALLTKNVPYVRPQTTADLEEVDLLR

SEQ ID NO: 366070 - protein, 413 aa, unidentified
MQVLYERCCGLDVHKKTVVACVLITSPDGQVQKQVRTFATTTASLLALADWLASLDISHVALESTGIYWRPVFNLLEEGRTIILVNAQHMRAVPGHKTDIKDSEWLADLLRHGLLKASFIPSKPTRDLRDLVRYRKTLVQERAQEVNRLQKVLETANVKVSSVVSDVLGKSGRRMLAAIIEGVSDAEALADLARGTLRHKLPQLQEALHGQIESQHRVLLGQIFAHISFLEHSLEHLQQEIEQRLCPFEEAMQLLLSIPGIQAITAAAILAEIGVEMSRFPSAKHLASWAGVCPGNKQSGGKRLSGKTTKGNVRLRAVLVEAVWNISRMKENYLSAQYHRLARRLGKLQAAIAVAHSLLIVIYHVLRDKKPYHDLGTDYFDSLDKERLTRQALRRLEALGYAVTLTPKEEVVI

SEQ ID NO: 366071 - protein, 384 aa, unidentified
MEKSSTLYVGLDVHKDSIEIATADAGRDGEVRHVSGIGGDLVALDKALRKLLSKGHRLHVVYEAGPCGFVIWRHLTAQGLTCEVVAPSSIPKRPGDRVKTDRRDAMMLARLSRSGDLTAVRVPGAADEAVRDLVRAREDAVREQRNARHRLKALLLRNGIPYAGKTSWTAAHLRWLATLKLEHAAQQIGFQEYLHSITEAGSRIARLEQAMRDTLSEWTLKPLVQALQAMRGVQLIAAMTLVAELQDFLRFENPRQLMAYVGLVPGEHSSGPKRRQGSITKAGNSVARRMLVEVAWHYQHSPRVSPIIATRQDQLPKEITDIAWKAQLRLNAKYKRLVARRVMKTKAVVAVARELAGFVWAIGQEVQTSGWQGVEIKPASSTRA

SEQ ID NO: 366072 - protein, 341 aa, unidentified
MYYAGLDVASKGSFLYVQERHGRKVEGREIPTTRWGIKEAFKKYKSSLIEVAIEAGGQTRWIYDTLKAMGIRVYVVNPNKVKAIAESKRKTDKIDAKLLSDLLRLGALPQEVIMAEGEARQLRDLIQARQKVIDGYTSLMNYLRGLLRQEGILLPSRAFNNPETFLKLLKSHLPEHVRQIITHYHELFGKMIAEKKNLEQKILRYDNEDIAIMKTLPGIGEMSSRTIDAAIGYIKRFERAKKLTSYSGLVPSVRSSGERTEYGHITREGRSEIRRVAIQCAHALLRSKSQESLPLRQWYKRIATRRGCRTAVVALARKMLTTMFYMLRDKKPYDYRLLTVN

SEQ ID NO: 366073 - protein, 409 aa, unidentified
MQVLYPRCCGLDIHKKTVVACVLLTDPDGTIHRFVHTFGTMTVDLLALGDWLHLHEVTHVAMESTGVLWRPVFNVLEEGRTLLLVNAQHIKAVPGRKTDVKDSEWLADLLRHGLLRPSFIPPPPIRVLRDLTRYRKNLVELRTQQINRVHKVLETANIKLGAVASNVVGVSGRRMLEAIQQGESDPQVLAELAKGRLREKLPALRLALDGRVQAHHQLLIGELLDHLDYLDRAIHRVEVNIAALVAKEAKAVELLLTLPATGPVTAAAIIAEIGTDMSRFPSAAHLASWAGVCPGNKRSAGKQLSGASTKGNKQLKTILCEIAATIARTPGTYLHALYQRIARRRGKPRAMMAVAHSLLVSIYYMLRDQVSYQELGPDYFDQLQAQHLERHYVRRLEALGFQVTLTSAS

SEQ ID NO: 366074 - protein, 354 aa, unidentified
MKCDKYIGMDVHQASTVIVVLDAEGKLVLETIVATEAAALIRLVQSLSGPLHVTFEETTQAEWLHDVIRHFVKEVVVCDPRRNKLLGEGSKADKPDARKLAELLRAGLLRPVHHGHQGTRTLKELVRAYETLSEDSQRTMLRIKALYRSRGIRTPGRSVYQASQREQWLKQLTEPGFRQRVSLLYEELDQLRPLRKQAKQAMLAESHKHRAVTLLRTIPQLGPIRCAQIVATVDTPHRFCTKHQFWSYVGLAVVTHMSSEYEIRDGRVVRSRKPLATRGLNRNCNRRLKDVFISAATRGSQTEPYRTYSEGLYKTGMRPEMARLTLARKIAAIALRIWKKGETFDPKKLNWATT

SEQ ID NO: 366075 - protein, 370 aa, unidentified
MKHFITFVGLDVHKDTIDIAIAESDDSKEVRHYGKIDGDLAALDKAVRKLQSKGAELRFVYEAGPCGYDIYRHLTKQGFSCIVVAPSLIPKKSGDRVKTDRRDAMSLARLYRAGELTAIYVPREDDEAMRDLSRSREDAVNASRTARQRLGAMLLRLGYRYHRKTMWNASHFNWLSTIKMPHPAQQIAFQEYINSVTECGERVNRLTEQIQKLIPEWRLAPVVKALQALRGVSLMVATTTIAEIGDLSRFENPPQLMAYLGLVPSEHSSGKKEKRGGITKTGNGHVRRALVEAAQAYHHQARVSRILLARQEGLPDSIRKISWKAQVRLCGRFRKLTGRGKPRNKVVTAIARELSAFMWAIAKEVPLKYA

SEQ ID NO: 366076 - protein, 333 aa, unidentified
MLHVGLDFHQNSSSLCIMNNCGQILKNIRVPGRWPAVVKAIAQLPAPVSVAFEASGACGMLYEKLCEVAHHVTVAHPGALRLIYASRRKNDRIDAQKLAKLLYVDAIPAAHVPGAQVRQWRQLIELRRSLVKRQTALKNQLHAMLRNLGIASPRGLFTRKGRDWLLALQIDEASSLQRTILLEQLHQVHLQLRQLQRDLDRRGDADPRVALLQTVPGVGPRTAEAYLAYVDRVERFARVNRVSSYFGLVPCEDSSADRTRLGHITKQGPPTVRQLLCEAAWTAIAKDQGLKERFDRICNGDQDRRKIAIVAIANHLSRSMAAMLKTGETWRTK

SEQ ID NO: 366077 - protein, 398 aa, unidentified
MAAIIVPDGQGGLRKEVRTFGTMTVDLLGLSDWLLSFRVTHVAMESTGEYWKPIYNILEENFEVLLVNARHIKQVPGRKTDVMDAEWIADLLRHGLLRSSFIPPVGQRELRELTRHRTNFVRERASLVNRIQKTLESANIKLASVASNVMGVSGRAMLEAIVAGTANANEMAGLAKGRLREKREQLDKALDGRVKPHHRFVLSELLCQVDSLDESIARFDAEIEKYCHPFEEEVELLDTIPGVAQRIAEVIVSEIGNDMSRFPTADHLAAWAGVAPGNNESAGKRYSGTTRHGDRALTSALVQAAHAAARTRNTYLSAQYHRLAGRRGKKRAILAVAHSILVISYHIIQRKEPYRDLGGDYFDQRRPEATAKRLLIRLQHLGYDISRIEQPATLSAVA

SEQ ID NO: 366078 - protein, 350 aa, unidentified
MIIIGVDYHPSDQYIALVDTETGEYEERQLNHSEGEAEKFYRELAARGASVRVGIEATGYSRWFERLLAELGMELWIGDAAKIKTKRVRKQKTDREDARLLLRLLRENNFPRIWVPSPENRDLRQLLWHRHRLVQMRTRIMNQLQALAMNEGQRRKKKLWSEAGRAQLEKLPLAAWAARRRKDLLELLDRMNPSIEELTAAIEREARKWPEALRLMTHPGVGPLTALAFVLIIGTVERFQCGKQIGSYVGLIPCEDSSAGHQRLGHITKQGSSLLRFLLGEAAQAAARCDADWRRRYLHLAMRRQRNIAKVAMARRLGVRLYWMWRKGWEYAEWVKFGSHAGQLGIGNGV

SEQ ID NO: 366079 - protein, 412 aa, unidentified
MDVLVERCAGLDVHRDSVMATVRVPGKRRRQREQHRRAFGTTIAQLQELGEWLEGFGVTLVGMEATGVYWLPVFDVLERRFECWLLNAQHLHNVPGRKTDTIDSAWICQLVEHGLVRPSFVPPPEIRRLRDLTRLRKAQINERARAIQRLEKVMQGVGIKLTSVASAAYSVSARAMLEALLAGTTDPNELAELARGSLRGKIPQLRGALANRFELAHHGVLVSGLLAHIDALDQGIAALDARIVEATEPLAELVELVSTIPGVKQRNAQVLIAECGIDMSVFPTVHHFASWARICPGTNQSAGKHRSGKTLRGSRWLRQALTESARAAARTKGTYLASHYWQIRGRRGEPKAIGAIRHDILVAYYHIARDRVPFRELGADWLARRYSPEHRARRLVRQLEALGLKVTLEAAA

SEQ ID NO: 366080 - protein, 301 aa, unidentified
MKNIFIGIDFSKETFDATIICSSMMIAPVHEKFENKPGGFSKLRTWIRKNSYGTTEENWLLCGENTGVYCQNMCDWMFAKGIDIWIENALQIKRSMGLKRGKNDKTDSANIAEYASRFVDKMRPYVPDSKEIKELRGIFMRRRTFSKMRKQLKNEHQEKIDVLGKDYILRGITTCSEKIIKELEDAIKKCDKMMCDIINSSSELKKTFDIVTSIKGISLQNGVAMIIYTNNFSKFENVRQMLCFWDVAPFEHSSGTSVHGRTQTSFFANKMLKELISDAAANSTRFNDKMKKYYNRLLNQR

SEQ ID NO: 366081 - protein, 334 aa, unidentified
MEKILVFVGLDYHKDSVQVCVLDSGGEVLGNRSCDNDPRRVAEYVATHGRVRGAAMESCEGAADFAEGLIAAAGWSVDLAHPGYVHRLRQNPDKTDYSDARLLADLERVGYVPKVWLAPQAIRELRRLVRYRRQLVNERRNVKLRVRALLRTHRRGCAAPRWGVAWFQWMRSVDLPEQSRWILDRHLDRLQQLNGDIQGVERRLDVVTKDDAVVQKLMTLPGVGPVTAWVLRAEVGRFDRFRSGKQLARFCGLTPWNASSGSRQADAGLIRACNHDLRSVLIEAGHRLKRCDPRWSALANQLRQAGKPGSVIAAAVANRWMRWLYHEMTAAQAA

SEQ ID NO: 366082 - protein, 348 aa, unidentified
MTLTIVETRAITGGVDTHAGAHVAAALDPIGGLLGVAEFPATPAGYARLLAWLGGFGTVCLVGIEGTGSYGAGLARHIAAAGVRVVEVDRSDRQDRRRAGKSDPLDAVSAARAAQSGRAAGAPKGRDGQVEAIRALMVTKRSARSVRTQTINQARALIVTGPDDLRARFARHTPADLVAELASLRPRPGSMIRYHTLLSLRELGRRAQFLDGQLARLDELIVPLVTARAPGLLALYGVGPDTAAMLLVAAGDHPERLRSEAAWAHLCATAPLSASSGKVTRYRLNPGGDRQANHALYRIVITRLSSHPPTRAYSDRRSKEGLSKKEIIRCLKRYVAREVYPHLRPPAR

SEQ ID NO: 366083 - protein, 422 aa, unidentified
MKNTAARKLKQVPEGYLIVGVDPHKKKHAAVAITQDLTIHDRFKFDNTKEGLEFLLQRVKAEMVKSGCRGIMFAIETGGHYWRNIAYYLDERGIPFRFINQYTLKRRREGKDLNKRKNDFRDSEVAAQLLCTGEFVESGIPQGVYAELRTAHNAYRRLVKERTRITNLVKGLLDSLFPEFVHVFKDPCALTALSVLSTCSIPGEIAGMTENEFIAVIEEQHHGRRLMRKKLGELRSLARASIGIEAGARSLSIEISFLVEKRKLIREQIQTIERTLKKLVDASEEGKYLLSIRGLHYIAVAGLLAELGCFKSYRSAKQMIKMAGSNPTESESGGKRRSRTPMSKQGRPVLRYCAWTAVIPMLRLNPDFRAWAKERRERPAHANPLNGREVVGAALNRLLRLAFALVKNETFYRSPHLVQVTG

SEQ ID NO: 366084 - protein, 412 aa, unidentified
MPATRPRRASGAAQISVVHPHAAVIDIGAQFHVVAVGAERDAEPVRSFRSFTKKLHELADRLKQVGIRTVALESTGVYWIPVFEILEARGFEVVLVNARDAKNVPGRKTDVNDPQWLQKLHSYGLLRASFRPSQDVATLRSYLRQRERLLEYVASHIQHMQKALTLMNVQLHQVVEDVTGATGMKIIRAIVASERNADDLAKYRDVRCKASVETIRDSLISHYQAEHVFELTQALALYDFYQTQVAQCDERIEVALRHLQTGVEPPTAPIPVARHRTKQPNGFAFDVRAALYGMLGVDLTQIHGLGPYVALKLVAECGNDMSRWPTVKHFTSWLCLAPGNKISGGKIPYQRRAALPARRQLRYGWPQRRSAGRTLLWVVSIDACQPGSARPKLLPPPRARLPFSSTTRCAIA

SEQ ID NO: 366085 - protein, 335 aa, unidentified
MSIMNMHPQGGVANRDHRPNVGVDVCKQHLDVCLGTLELRVVNDATGWDVLIAKFKEEDVDLVVLEATGGYERGLVCALQGAGITVARVNPRQARDFAKSMGVLAKTDQVDARTLRDFGDVLARHKDRGKFITPLVDEQRQVLAELMTRRRQLVDMRVAENNHLEHAGKHSVRSIKSVLKTLDRQLEAIDHEVDDHLDRHFKDQRTLLDSFKGVGPVTILTLTAALPELGSLGRRQIAKLVGVAPLADDSGPRKGKRRIWGGRADVRSVVYMAALAAIKHNPAIEVFHSRLIAAGKPKKVAIVACMRKLLTILNAMLRDQSMWNAAKHLQNTKTA

SEQ ID NO: 366086 - protein, 333 aa, unidentified
MKDLSTLQHFIGCDVSKDTLDFAIHARGKDYRTFEHIKVENSLDGFRAMRKWLRSFRIQMKDAVIAMEHTGSYSMALAEWCFKKGITFVFLHPLDVKNYGARGRNKTDKTDSQFIADYAYTMREKLAPSAPEAPAIKRLRQLRNERQMAVRSRTAYINLSKTFSDAATTKRIGKMIAVFDAQVRLIEEEIKKVIASDEALSRNYRLLVSIPGIGMVNAITTIIATGNFTRFQTARQYAKFCCVSPLSRQSGTSVNQGDHVSKTGHNDIKATLTEGARSAITHDRQIKAYYERKRAEGKSHGCVLNAVKFKLICRMFAVITRQTPYVNTDKYLS

SEQ ID NO: 366087 - protein, 387 aa, unidentified
MYFVGIDISKFKHDCAIVDELGDVITPSWSFQNDREGFSLLKELLDALDGEKKIGLEATGHYGQNLKLILENNDFSFMEFNPLLINRFVHSKSLRKTKTDSIDALMIAQYLMTVEYKPYPPSFYTFEKLKSLTRFRDSLIRQRSRQLVELTNILDKVFPEFKPFFKGKFSATALYILSHYASPEKISNMNSKSYEPLRRLSRGRFSMVDFVELKTLARNTVGSTSDYLLQEMEITIDIYNQLQSKVEEIELQINDCVLGLAPPILTIPGIGVASAAVILSEFGDLSKFNSPSKLLSFAGMEPGYFQSGTSESSGKMVKHGSSHLRYAMMNCAQTVINNEPTFAAYYAKKRAEGKGHRVALTHVAKKLLRVIYTLQTKGLSYNPDLVR

SEQ ID NO: 366088 - protein, 358 aa, unidentified
METRERRSKDFTNKNIFIGIDNHKKNWKVNILCEAIDHKTFTMDPAPEILNKYLHKNFPRGNYFSAYEAGYCGFWAHEQLEQLGIKSIVVNPADVPTMDKERRTKNDKVDCRKIARSLRSGELMSIYIPSREVQEDRTLLRLHVQLTKEQTRIKNQIKSILGFYGKTIPEEKTNSNWSRAFIRWLETIEFKTESGRLALNIQIERLLSIRKTIASLLIQIRQLSKTDRYRESSELLMSISGIGILTAMHFLVEIVDINRFTNLDELSAYIGLSPGEHSSGEKIITGKMTKRGKSHLRYLLIEASWIAIKKDPALMMAYTDYKKKMIAQKAIIKIARKLLNRIRFVLKNKQRYEISVTN

SEQ ID NO: 366089 - protein, 314 aa, unidentified
MKKTVEIFVGIDVSKAWLDKAVHAQKEVTRFSNDEAGIASLVKALKKLKPKLIVLEPTGGFEMLVVAELSQAGLPVAVVNGKRIRDFAKATGQIAKTDKLDARVLAHFAAAIRPEVRPLQTEEEEQLTALLTRRRQVLDMITVEKNRLVTVRAKMRPALEAHIHWLSDNLKELDQEIEEFVKGSPSWKEKDTLLQSVPGVGPVTSATMLGMLPELGILNRQEIAALVGVAPMNKDTGNKQGKRSIYGGRADIRSVLYMAALSAKKHNPLIRKFYERLIRHGKEKKVALTACMRKLLVILNAMVRTNQPWRSQTA

SEQ ID NO: 366090 - protein, 359 aa, unidentified
MREQRNKISFRGQKIYVGIDVHLKSWSVTVLSETSVLKKFSQNPSLEALYGFLTRSYPGAEYYSVYEAGFCGFWIHERLTALGIDNIVVNPADVPTKSSEKLRKSDAVDSGKLERSLRANELKGIYTPDSVSLEMRSLIRLKNSITKDTTRQKNRLKSQLRYLGIEIPQEFLEPFSNWSKRFFAWLKEVETLTPSGRQALDIQIRHLEELRRQKLEMTRALRALAKTDRFREPLRLIMSVPGFGQAMGMAFLSEICDIARFRNAEQLAAYIGMIPMCHSSGEKDGTGDITLRKHAVMRCNLIEAAWVAVRQDPAMNLFYTEQYKRMPKSKAIVKVARKLVNRLYFVLKHQTEYVNSVVS

SEQ ID NO: 366091 - protein, 360 aa, unidentified
MEFQRTSVGLDVHARSVVACGLDRETGEVFERRLTPNHREILEWIGGLPQPVAVTYEAGPTGFGLSRSLATAGIDCVVAAPSKLIRPSGDRVKTDARDAALLARLLHLGQIVAVTIPTVTQEAARDLVRAREDCRSDLMRTRHRLSKLLLRQGIVYSGGKAWTGAHERWLRQQRFAAVGLKLAYQEAFDAMLVTQDRRDRLDAAITTMAADSEFTAVVTRLGCLRGVSTLTGFALAVEIGDWQRFTGRTLGAYLGLVPTECSSGAIRVQGGLTKTGNGHARRLLVEAAWHHRKPYRPVAALRRRWDAATPAARARGNNANRRLHTRWERFDDRKKRPVVANAAIARELAGWCWSLAVLDD

SEQ ID NO: 366092 - protein, 350 aa, unidentified
MPCKTVAIAHTIGIDTGKNTLHMIGLDKKGTIVVREKISRTRIAARLVNVPQCLIGIEAGMASHHVARELLALGHEVKQVPPAYAKPFRQGHKNDFRDAHAIAEAVQRPSTRCVPVKTADQLDLQALHRVRSRLIGNRTAVINQLRGFLLEHGIPVRQGLRFLRQQLPQILAMRTDVLSPRMIRIIEELIGDWEHLDERIERVTDEIETLARADENCRRLMTVPGIGPIIASAMVAAIGNGGAFAKGRDFAAWLGLVPKQMSTGDRTILGRITKRGNRYLRMLFIQGARAILFRPAGWAKHSFGPWLAAAARRLHRNVLATAFANKLARIALTVLVEGRSYAARVEPRAA

SEQ ID NO: 366093 - protein, 339 aa, unidentified
MNITTIGIDLAKTSFSLVGTNKHGKVVLRKTLSRKKLLPFIAQCPPCMIGLEACSGAHYWAREFDKLGHEVKIIAVKFIEPYRKGSNNDNNDAEAICEVVRRPNIWYVPGKTADQQASLCVHRVRQGVVGERTRWINRVRGLLSEFGIVIPKGRYAAQAAIPVILTDGDNGLPELARQMIHDLWLSIQQANEQVLGYDRALSQLAREDETAKRLLTIPGVGEQTATGVVASVPDPRLFTNSRQFAAWLGLVPRQYTTGGKIRLGRITKRGDKYLRMCLVHGARAVVAKLGDKQDHVSCWVRDLIQRRGYLRAVVALAARNARLIWTLMVKRENYRAIEL

SEQ ID NO: 366094 - protein, 319 aa, unidentified
MGIDISKDTLSVDAGDLFKGDVPNTPKGRAGLVARLRKAARGAVLHLCFESTGPYGAPLFEACCKAGIRASLLNPAKVRHFAKAMSRSAKTDPIDASVIRHFAQTRKPAPSHAPGANERRIRQLVLARDALTKNVVQLSGTLDSLTDAGAKKHAEKAIRMSKGEIRLLDRQIAETVKGDERLEGLTGTLAGIDGVGALTAAKVVALAPELGTLGRRGSAALAGVAPFKRESGKYKGKAFIHGGRASLRQALFMPAMVAIRCNTVLKAAYEKLVKAGKPHKVALTAVIRKLFAHMDSLAAKWLAEHSAVTGVPAQALSAT

SEQ ID NO: 366095 - protein, 395 aa, unidentified
MFIVGIDVAKRSHEVCMITSDGQTVQRPFSIRNNCTGYNLMLEKIRKHTNIKSQIVFAMESTAHYWLALFTRLRKDGYHVILLNPIQTSAMRDMFIRKIKTDAKDSFIIAELIRFGRYAESNVAQDRLLALKELCRNRFYLVDMAGDLKRKLIALIDRVFPEYEAQFDTIFCKSSVALLKKYPTPQKLSNAHLDKLTELLWNSSNGHFGEWKARELRELARNSFGVEDCDGAYSTLILLMLDQIQSLSEKADALEKEISRLFQSFDTTVTTIPGVGPIIGAVILSEVGDISRFSSADKLAAYIGVDPSVNQSGEFQAAHAHMSKRGSPYLRRCIWMASQVAVQRDPMFRAYYEKKAAEGLKYMTIIGHVTRKMTAVVFAILRDHKVYEPVLPTAA

SEQ ID NO: 366096 - protein, 384 aa, unidentified
MMKWTPPGDSAASKCQTPGTRGSEGGVREEAYDDRCGHRKERVEIAVSDRPGHVSERQRLTRARMLAFFRERPPAVVVLEACGSAHPLGRELGEMGHEVRLLPPKHVRPYVLRDKTDRTDARALLEANRNEEIKPVPVKTVGQQALSAVHRLRSGWLRTRTARLNTLRGILRELGVTIPVGARHVESRVLEVLGAGRVSQPLAMLLTSSLGEIRQLEQSIAEADRQLKNLAREMDSVVRLQTIPGIGLLTATALVASVGEPSRFRSGRRLASFLGLVPREHSSGQTRFLGRITKRGDPYLRTLLTHGARSALLAAARRRNKGGALDRLGQWGLELSQRRGHNRATIAMANKLARLAWAIWSRHDVYRPVLQPPVPMITDMASTH

SEQ ID NO: 366097 - protein, 370 aa, unidentified
MKETITSFVGLDVHKESIAIAVAEAGRQAPRFIGTVIPSLRSLQSALRKINSASRTLVVYEAGPCGYGLARRLNAQGYACEVVSPAHIARSPIEQRVKTDRRDALLLARESRAGNLIAVVVPDERDEAIRDLSRTREDVLAARLRAHQQMKALLLRHGRTCPGRIAFSAAHERTLSSIRLSHPAQEIAFVEYRNAIKDAHERLERVTEALRLQSNQWRMNPLVRALMCLRGFDFIAAITFVAEIGDPRRFARPTALMAYLGLVPSEFSSGQSRHQGSITKAGNKHARRILIESAWAYCHSPRVSRDLEVRQQGQPKAVRDISWRAQLRLTKRFRHLRMARHLPQNKVCVAIARELCGFIWDIARQIKPLP

SEQ ID NO: 366098 - protein, 346 aa, unidentified
MLYAGLDLSRKRLDFHLLDAEGATVDVGASPPDADGLRGLSERLERHGAPIRAAIESMNGARFVHDRLELSGWQVEIADAQKVKGLAPLACKTDRIDAWVLAELARRDLVPAIWLPDPQVRAERERARWRLHLVRHRSSLKQRVHAVLLTHGTPCPVSDLFGVRGRQLLARLGLPEPWQATIDASLRLIDELDREITDCERDLRRLGADHRYVPLLCTVPGISWVLAYTIAAEIGDIDRFPTPRKLAGYSGLCPRVYQSGERDLRGPLAKQGPRYLRWALVEAATHACTAPVYRDRYQQTKARIGKQRGAKVAQVDLARRLSEAIWHMLSRGEPFAPKGATDPLAA

SEQ ID NO: 366099 - protein, 338 aa, unidentified
MQLYCGIDLHSNNSVVSLINENDQLISEKRLNNNLEAIEHHLQPYQDAISGVVVESTYNWYWLVDGLIEHGYPVHLANTLAIQQYNGIKYTTDETDARFLAHLLRLGILPTGYIYPKAMRHVRDLLRRRLLLVKQRTAQLLSLQSMIGRHTGLRLSSHQVKRLTQDDLAHYFKANATLFAAQQTHQLMQQLNTQIEAMEAFVLARCEESERYALITTTPGIGKILGMTILLETGPIERFAQVGNYSSYARCVPTDRISNGKSKGKGNAKNGNRYLAMAFVEAAHYATIWEPAIKRYYQRKCKKKPLMVAKKTVANKLTRACYHMLKEGTAFDVTRAFG

SEQ ID NO: 366100 - protein, 411 aa, unidentified
MGERVRLFIGDDWAEDHHDVELMDVAGRVLARKRLPEGVAGMTRLHELIGQHLGVADEDAQVVIGIETDRGPWAAALVAAGYAVFAVNPLQASRYRERHGVSGAKSDRGDAHMLTDMVRTDSHQLRAVAGDSPDAGAVKVVARAHKTLIWERTRQVQRLRHQLREYYPAALAAFADLDAPGALELLARAPDPARAAKLTRAQVSAALKRAGRRDIPGKATAIMAALRSGQLGQPPAITAAYAATARSLIAVITTLNEQVKVLQGQVEADFGRHPDAEIYLSQPGLGPVLGARVLGEFGDDPHRYATGKARKNYAATSPITRASGKRKVVAARFIRNDRLTDALMAQAFTALSASPGARALYDAERARGAEHNPALRKVANRLVGILHGCLKTRTRYDEAVAWPHHEIKLAA

SEQ ID NO: 366101 - protein, 356 aa, unidentified
MSHDVKYIGMDVHKEAVVIAVLNESGKQVIESVIETKASSILQFLHGLRGELHVTWEEGTWAAWLYDLLQPQVQHMVVCNPRRNALLKEGSKSDKVDARKLADLLRTGMLRPVYHGENGLRTLRELGRSYQTISKDLTRVMNRLKALYRGWGIPCAGTQVYAARSREEWLSKIPQAGVRRRAELLYQQLDGLQALRREVRPEFLAESRKHKAAKLLRQIPCIGPIRAARLIALMQTPHRFRSKRQLWTYSGLGIETHDSAQYRFVRGQLQLSKKPHQLRGLNRNHNHEMKEIFKSAATRASCGRGPFYDFYAALLAKGMKPEMARLTLARKIAAITLTLWKKEERFDAEQLKTQAA

SEQ ID NO: 366102 - protein, 320 aa, unidentified
MNSKNLQGKSFVGVDISKTSLDVYFPHNNELQQIDNADEAIATLCSLLKKHKRPLMVVMEATGGYEQLLVKHLASHQIEAAVVNPRRVRDFARGIGLDAKTDPIDARVISNYADVVVPQPMATKSNHDLKHGALVARRNQLLELINQESNRLKQAWDEDAKQSIQDVLETLKKQLKDLDSKLAKMLQKDDENKRTIEILQSVKGVGPVMISTVLAELPELGKLNRGEIAKLVGVAPINRDSGSKNGKRFIGGGRNQVRRVLYMATIVAIRHNPAIKTFYASLKSKGKESKVAIVACMRKFIGILNLLIKTDQLWENKMSV

SEQ ID NO: 366103 - protein, 328 aa, unidentified
MTMNPALSAFNHVVAFEVAKDSLVIHVLPADQQSVAANKPKAIRKALKAEMRRNAEASLGPLLVVCEATGGYERHVLEVCQELGIAAHKAHGSRVRCFARYLGLIAKTDSIDVRVLALYGLKTPDLRLYTPPAPELLALRDLKTRRDQLQAMLFAETNRLEHARHASVSRSLKAHIESLRKELAALEAEIAAHIQASEALAQKARLMRTLKGVGPATVSSILAYLPELGSFTRGEAACIAGLAPINNDSGACQGPRHIQAGRAAVRKTLYMTALVAIQHNPTMRLFAEKLRRKGKPSKVVIAAVMRKIIVTLNAILRSGEPWKHAKAA

SEQ ID NO: 366104 - protein, 366 aa, unidentified
MSSVTLAAGPIHLGMDTSKNTIVVGILMPGDEVPVIDRIWNEEGSVRHLVSRLGDPAALRACYEAGPCGFELHRLLASMGVACDVVAPSLIPRRAGDRVKTDRRDASRLARLHRAGELTPVRVPSAAEEAVRDLVRVRAALLADRKRAQQRLTAMLLRHGRVWRSGSCWTQAHEQWIAGQRFEEPAQAAALAHYRAALDTRRAELDAIEAELVPWAGREPLAGPVARLGCYRGIAELHGLALAAEVVDWHRFPSARAFMGFTGLVPGEYSSGDKTRRGSITKAGSEPVRTALVEAAWAYRFKPAIGVTLRRRQRGAEPGTLARSWKAQRHLHAKYKTMTARGKPPAVAITAIARELAGFVWAEMTS

SEQ ID NO: 366105 - protein, 337 aa, unidentified
MKRYLGVDLHRTQFTVCTRWENGESSVRQWRIEQLSQFVQQLQADDEVAVEATGTTARFYDAVVGRVARVVVVNPHQFKLISQSVKKTDRGDAELLALYLAKGLLPEVRMKEKKHRELQHRSETRDLLVKQRSALKGKINNLLAAQGINLKKEALSSQVGLERVLALAASAVVKIELRVLVEQIRSLSRSIAEVEKLIAEEGEQLPGHANLTSIKGIGSLSATVLLTAIGPIQDFADEDKLAAYLGLVPKIQNSNETERSGGITKRGNKLARTALVQCGLVAQRYSPYLKRFYERIKQRRGGGKAKIALARKLVKIVYHTLKNNWVFEDFPSFTLAA

SEQ ID NO: 366106 - protein, 401 aa, unidentified
MRCIFGIDVSSKSCNVAVAVNKHLVEELKLSLDAIGFNQLKVALDVYTDPEVVFEATGVYSRRLERFLTDNGYHFIRLNPLQARIELTSFRYNKTDVNDAQNLALSSFDRKRQLTTPTARVYQDLRDLNRFYQNVNEDVVRLKNRLHKVLQLTFPELEQILSTTDGEFYWRIVDHYAHPTLVSSEDQTQTIAFLASISKKKVTSTYLQRIAQRLTALSHQAFPAVAIDSPKVMEIRYYAQQLIHGHQQKAELIEQMVTIAKELPEFRNLVSIPGFGENTVVTLIAEFGDIRRFKSSNAMNAFVGIDFRHYESGKFVAKDTISKRGNAIARKILYKAVLNCVIASHYHPNHIGDFYRERKKQSSSPQTKKIAIGAIHRLIRTMYHLVKNDQLYDYTKVHVDR

SEQ ID NO: 366107 - protein, 499 aa, unidentified
MAPCPANRRLVVRGRIEECSSTGHGLCHLSINKSNDITMAKKAKKVKTAKGAELRIVNPDAAGIDIADGIMQVCIPADRSKDNNRAFGAYTSDLHAISAWLRECGIKTVAMESTGVYWIPLFCRLQEDGLDVVLTNARDVKNITERKTDESDAEWLMLLHQYGLLKASFQPHNDAKRMRTLTRHRDTLSREASSMVLRMQKAMQQMNIKLTLVLSDITGKSGIRIIEAILAGERDPKRLADLADIQCKTPKEEIAKALEGNWEEDLMFVLRQNYDTFKHYCTQLGECDAELEKLMENYRAEVAKVEDTSYSPAKKRRDYKKTRHTVGFDVERKAYEMWGVNVFEIPGISHLTALELMSELGHDFTRKFPSSKQFCCWCNISPNTKISGGKRISSHVPHRRNNVGLIFRSIASSLANAKNQLGNFYRRIRSRAGGKAAVIATAHKVAEIFFAMVANQTTYNPERVGIDEKVLLEKRITRYKRELERITGTHIEIGNACVP

SEQ ID NO: 366108 - protein, 420 aa, unidentified
MGRLKIVYPVCCGMDVHRDFLIACIAATNAQGVTEYQSRRFSTYTGSLRELRDWLLANDCKDVCMESTGKYWFPVHNILEESCHVVVSHPKFVKAIKGKKTDKKDAQWIADLFKHDLVRGSFIPPKDIRQLRDLCRYWVKLSSYMTGEKNRAQNCLTVSNFKLDDVFSNVFGKSASAITTQLLEHPGEQFDVAPFVDGRCKTPIAQIQEAVDGIFTYEQAEKFKIIRGHMDSLERHKAELESLILEIAQNYLPQIELLLTVPGIHDAFTAIRILAEIGADMTVFDTSKHLCSWAGLTPQNAESAGKKKTTRIGKSGAYLKPLLIQVALAASRGEKHPEIYGKKQALQKRRGKKKAIVAIARRLLTAIYHILSKNEPYNPAAYIQEDKNPMARQISQEKAFEMLARMGFIVSNPSPLSSSG

SEQ ID NO: 366109 - protein, 323 aa, unidentified
MSLPSPLTSIGIDVSKETLDIAVHETETHWTTKHEFTEFPQLLKSLRSLTPTRIIIEASGGTENLLVSYLATNGLPVIVINPRQVRDFARATGQLAKTDRIDAFVLARFGAVLQPAVRPLKSAENQELEALVARRAQLVNMLTAERIRLQQAQQQHRHSIVADLKAHISWLEKRLDKCEGDLSKLLRSSPLWRATDERLQSVPGVGPVTALVLIAELPELGHLPDKQIVALCGLAPHARDSGKWRGKRTTRGGRARVRTALYMAALVATKHNLVIKTFYRRLLRAGKEKKVALTACMRKLLVILNAMFRNQTSWQPPRLEPDA

SEQ ID NO: 366110 - protein, 341 aa, unidentified
MDYFAGLDVSVKETSVCIVDDAGKIVREARVASEPEALLRVLTLYRFKRVGLEAGPLSQWLYSVLAEAGLPVICVETRHMRAVLTAQINKTDRNDARGIAQMMRAGLYRPVHVKTLRSQKLRMLLTHRKLLQSKAIAIENDLRATLRNFGLKVGMVGTVKFEARIKELVENLPDLAILVEPLLTVRRVLREQITVLHRRLLAIVRDDDVCRRLMTVPGVGPVVALTFRVTVDVPARFRNSKAVGAVFGLTPSKYQSGESDRTGGISRCGDEMMRAMLYEAAQILLVRSAKWSWLKAWAMKIARHRGMKKAIVALARRLAVIMHRMWVDGTEFRWTREVAAA

SEQ ID NO: 366111 - protein, 459 aa, unidentified
MARHQRKGNGLPAQLAAVNLHAAGIDIGAQEHWVAVSPDSDSQPVRRFGACTADLEALASWLQQCGVQTVAMESTGVYWIPLFELLEAQGFAVVLADAREVQRAPGRPKTDVQDCQWLQRLHTYGLLAAAFRPPEQICVLRSYLRQRAMLVTYASQHIQHMQKALTQMNLKLQHVVSDVTSVTGMAIIKAILSGEHNPTTLAQLRARNCHHSEAEIARALQGNWRAEHLFALQQAVELYEFYHHQIAECDRQIEAQLQTLADHSAGRTLPPAPRPPKRRRNEHHFDARLPLFRATGVDLTAIEGINEHTALVLLSEIGTDMTRWPTEKHFAAWLGLSPLHKISGGKVLSRKVRPSANRAAVALRLAASCLHHSHSALGAFFRRLKARLGTPKAVVATAHKLARLVYRLLKHGEAYVVQGMAEYEHAYRERVVKNLIRKAKELGYQLLPTSEQTAQEAPA

SEQ ID NO: 366112 - protein, 312 aa, unidentified
MPCFVGIDVAKAQLDMALRPSGERWAVPNDAIGVMTLVDRVQALHPTLIVLEATGGLERAVTSALATAGLPVVVVNPRQVRDVARATGQLATTEALDARALAHFADVIRPTPRPLPDAQTQELRALLGRRQPLIVMRTAEQNRLAGTSARLTKDLEAPMTWLNAGIATLDDDLAALLRASPLWRENDDLLQSAPGIGPVCARTFLLELPELGTLTRQQIAALVGVAPLNCDSGTMRGRRTMWGGRAHVRTVLYMGTLVATRHNPRIKVFYERLLAAGKVKKVALTACMHKFLTILNAMLKQRTPWQAQEVQS

SEQ ID NO: 366113 - protein, 356 aa, unidentified
MAVTGGTRRIVGGVDTHKDLHVAAVVDEQDRVIGTRSFATTRQGYRQMLAWMRSFGELQRIGIESTGSYGAGLLRFMQQAKVAVLEVTTPDKQDRRRRGKNDDLDAQNAAHAAFAGQRTVTPRSRDGMIESLRILMACRKTAVSARRVALQMIHNTIVCAPDGVRDQLRSLTCMQLVRTLASWRPDLTAYRDLDSAYRIGLKSLARLELHDEIADLDVMIAAIVDELAANLVARNSIGHIGAAQLLLTAGDNPERLRSEASFASLCGVSPVPASSGKTVRHRLNRGGDRAANSALHIIAIGRLRTDQRTKDYVARRIAEGHSKLDAIRALKRYLAREVFTLVTQRRREINATQIAA

SEQ ID NO: 366114 - protein, 331 aa, unidentified
MSNIIGIDVSKASLDCAYLRDADQKRAKRIGCFNQVRCFAALVAWAEARSGLPVQSLAFIIEPTHIYHEQLVQFLHNLGATVYLVNPGRVRKFAEGIGILSKNDLVDADLLTRYGLLARNLIAYAPVAQEVNDLRSLLNRLDVLERTLRSELNRQEKVGKTMVFHRLEQQSIARAVKRLKAEVKTFKRAIRECVKSTPSLQQSFNLLCTIPGVGAKTAWVMIVILGSRNFRSAPEVASFLGLNPIEKRSGKSQYRRPRLSKSGSGNYRQKLYFPAMVATRKNPDIQALYERLLAADKTKMCALGAAMRKLVHICYGVVKNQTPYKAQTIPS

SEQ ID NO: 366115 - protein, 351 aa, unidentified
MKTSAKAVPTTIGLDIAKNFFQVHAVDAAGQVVVRRKLSRGEVLRFFEAQPKALVGIEACGTGHHWAREIAALGHEVRLLPPTYVKAYVKRGKTDAADAEAICEAVTRPNMHFVPIKTPEQQAALMMHRSRELLVGQRTALVNALRGHLAELGIVAAKGIHRVAELLAELVGVDDSRIPPLARASLRCLAAQIETVEMQIGKLEALILEWHKGNEASRRLARIPGVGPITASAVVATIGDASNFTSARHLSAAWGLTPKQNSSGGKSRQLGISKAGNTYLRRLLFIGAIAVIRSKRAQETGSWLARLLERRPSKVVAIALANRTARVIWAMLRTGEAYRAPRTAAAMPATA

SEQ ID NO: 366116 - protein, 345 aa, unidentified
MELHTIGIDLGKTVFHLVGLNPHGEVVVRKKFSRTQLLRFTTNVHVELIGMEACGGAHFLGRALREQGHEVRLIPAQYVKPYVKTNKSDYIDAEAIAEAVARPTMRFVPIKTDDQLDLQSLHRVRERWVMRRTAVINQIRGLLLERGITLRKGRCHVGAALPGILEDADAKLSGALRMLLAQLKLELDHLDLRIDEADALIKKTACENEACQRLMAIPGIGPVTATAVIAAIGNGGAFRKGREFAAWMGVVPREHSTGGKQKLLGISKRGNSYLRRLFVQGARAVMQQRTKQSSGLSAWLAQLTSRSHRNVAGVALANKMARMAWAVLAKNEPYRPPVLADVAAA

SEQ ID NO: 366117 - protein, 431 aa, unidentified
MQLTARPGAKGESVANTREWYLGIDWGGETHQFCLIDAEGHVRGERAVPHTAVAVHEALRWVRTLTRAAAHEIAVGIETPHGVLVDTLLEQGFLVFAINPKQLDRFRDRFSASGAKDDRRDARVAADALRTDRRAFRAVRLDDPAIIQLRELSRMLDELQVDERRLANRLREQLARVHAAWLTLSPAADERWLWTILRDTPQPQAWSQVPRRRITLALRTHRIRRLTADDVVTILREPRLPVAPGVTDAVAIRIAALVPQLLVIHEQRVTAEREIDRRLEQLATAAATDGELREHRDVEILRSLPGVGRTVTATMLTEAAEPMATRDYLMLRTYAGAAPVTKRSGKRTFFVHMRYGCKRRLRQALYHWGRTSIQCDVAARAYYAGLRARGHNHARALRSVADRWLRILVAMLRTGTLYDPSRFAAAVEITV

SEQ ID NO: 366118 - protein, 434 aa, unidentified
MNESKDIVLVVDYHLENLEVRQLNQATGEERCFNRKNTATGILRLVRQAQGEAAVSGGKVVWIMESTTGWARVKELLGDQVEFLLANVLQMPLPPKARRRKTDKIDTGRIQREYGNGSLPLAYQPPRGLREVRRLVDCRRDLVRRQTALKNWISHYLSHETWYGTKNLWSQCGLQRLKSLALSVPDRWLLDRKITELEHVQALLEQVEDRMMEVYRAWPDAQRLDEVRGIGPISAVTILAYIGPIDRFASAEQLISFAGLAPGVHRSDGRGYGLRIGGGGTHSQLRFFLIEATRWLKEIPRYAAAYDRMEARRGKKVAKVALARMFLRSIDKMLRTGASFAPEGGLAGVPSKRGPDTTGRRNRMGPQRPSRPPRLLRPPASAVLAAAHAIPAGRGQRGAGQENESEGSRTARRPVGLAVHRGARQEAFCATTNE

SEQ ID NO: 366119 - protein, 419 aa, unidentified
MEKLVERGSGLDVHRDTVSACVRIPGSGGAKKQEIVQTFGTMTEELLALRDWLKAHGVTHVAMESTGVFWKPVYHVLENDFTVLLVNASHIKNVPGRKTDVKDCAWIAELLEHGLLRGSFVPPEPIRDLRDLTRHRKALMQERSRGVQRLHKLLQDAGIKLSSVATNIMGVSGRAMIDAMLEASEHPTASQDATALADLAKGRLRAKLPALRKALEGRFRKHHGFMVGEILSHVDYLDEALERLTKEIDEVIRPFEEEVTRLTTIPGVERKTAAVIVAEIGVDMKQFPTAQHLASWAGLCPGNNESAGKHRSGKTRKGDRWLRTALVEAGLAAMRSRKTYLSAHDQRIARRRGHRKAIVAVAHSILVMSYHMMSRKASYHELGRDFFEQKDQEAIKRRCIRQLERLGLNVVVTEKEAAA

SEQ ID NO: 366120 - protein, 340 aa, unidentified
MTEITRIAIDTSKSVFTLPAVDGNGRAMVRRNLRRQQVVPFFTDRPPVEVVMEACGGSHHWGRTLQGLGHRVRLIPAQYVKPFVKRGKNDRNDAEAIAEAANRPGMHDVAVKSAEAQARAMLLSVRELLVRQQTQMINALRGHAAEMGLVAPKGDGGLAKLRADIDADTSMPAPAKAALQMLGGEIDRIEARRATADKQLLAQHKADADSRRLAAIPGIGPVSALSFVHSVDAKQFESGRHFAAWLGLVPREKSTGGKQRMGGISRAGNERLRELLVLGATSVIQHANPQRRGVSAWLLKLLERKPRKLAAVALANKMARIVWAMLTSGKAYRGTSPVAA

SEQ ID NO: 366121 - protein, 312 aa, unidentified
MDALSIGIDVSKDTLDVAAHSRSIAPFQVARTHKGIADLVGFLKPLNVRLVVLEATGGFETIVAAGLAGAGLPVAVVNPARVRNFAIADNQRAKTDRLDALVLAKFAEKMDPPVRPLSDDETRALGDLVTRRQQITEMISAEQQRLKRASGRAAKSMERLLKALQKELDDLNTDIDERIRKSPAWTEKVDLLKSVPGVGDQIARVLIADLPELGTLDRRKIAALAGLAPWARQSGKWRGKTFIGGGRASVRRALFMGAMVAARYNPQLAKFRDSLVKVGKPKLVALIAVARKLLTMLNAIIRDKQPWRDQTT

SEQ ID NO: 366122 - protein, 398 aa, unidentified
MFYLGIDIAKHKHYASIIDQTGKPITKPFPFRNHKEGGQALLNWMYRYIESPTEIMIGMEATGHYWLAVYSFLLDHGFSFVVLNPIQTNAWRKGTEIRKRKTDAIDATMIADIIRFGRFVETPLVDEKMFALKQMSRFRNALVSNMSDLKRKALVVLDQTFPEYQSIFSDVFGKTSSQILLEYSSPSDYEQISIDDLTQIIEQTSRNRLGKKTANKLMELASNSFGVTFCKNAFSFQLKMLMEQIRFIEDQIKECEEEMSQLLIDLDTPIMTIPGVGPILGATILSEIGDIHRFDKPSKLVAYAGIDASVSQSGQFESSGTSISKRGSSHLRRALFQAAITAHKHDPVLKAFYEKKRKQGKHYYVCIGAVARKLCYIIYAILKSNKPYEVPPHSPVET

SEQ ID NO: 366123 - protein, 317 aa, unidentified
MMTTTIGLDLAKSVFQVHGVSSEGQVTVRRKLRRAELMKFFRDLPPCLIGMEACATAHYWARELSALGHEVRLMPPSYVKAYLRRQKNDAADAEAICEAVTRPTMRFVPVKSAERQAILTLHRTRELLVRQKTTLIRAIRSHCAEFGLVVPQGARRISDLLQLVQETHPSTLPEAAVLTMQMLGAQLNALAVQIRTLERRLLAWHRENKTSQRLATIPGVGIITSTALAASISDPNLFRSGREFAAFLGLVPRQNSSGGKERLGRISKKGDGYLRKLLVVGATSVIRRARTGVMPSSGWVQALLERRPSRVVTVHGQ

SEQ ID NO: 366124 - protein, 342 aa, unidentified
MYYIGLDVHKKTISCCVKDAAGHVHREGKIGSTRRELDAWVGTLPEPRTIAMEATIFSGWIYDHLVPHAVAIKVAHPLMLRAIAAAKKKNDTIDASRIADCLRCDFLPECHMMPREIRDRRRTLRYRHLLVKQMMQMKNRVSGLLMETGVEHNKQRLHKVGYFHEMLSKNTEIDAGIRPLLKLSRETIERCQKTEYVLVSSLQRDPLLADRVRRLRTVPGVGPITALTWALEMGDVVRFRTIKQAISYCGLCGDERSSADKVIRMPLSKQRNKHIQRVLVEAAKLAPRLSPELATVHEKEKQKGNSNRATLAVARKMVAYLLAVDRQQREFILAEQRGRRAA

SEQ ID NO: 366125 - protein, 364 aa, unidentified
MDDPRQTREQVTLGVDTHAEVHVAAALDERGRLLGTCTIPTTAAGFAELLRWTSQYGELSRVGMEGTGSYGAGFARWLRARHVVVFEVDRPDRRTCRRRGKSDSVDAEAAARAVLAGTATAQPKAGNGAMEMVRTLRVARQSAIKARTQAANELHALVVTAPDAMRADLRRLKLPQLVATAAAFRRSAELTTPTAATKLALKSIATRYQHLAAEIEALDKHLDQLVAVAAPALVAIKGVGTDIASTLLTIAGDNPERLASEGAFAHLVGVAPIEASSGKITRYRLNRGGDRQGNRALYLLAVGRMGWDPATKAYVARRTAEGRTKPEIIRCLKRYIAREFYPVLLVMTPEARPGRSPKSSLQTA

SEQ ID NO: 366126 - protein, 367 aa, unidentified
MKHYIMAGCDVHDETLVLKIAEGRSEPQTRTVENTPRGRAELVRQLREASRRARGAKVVLVYEASSQGFGLRDELLEAGFDCQVLAPTKIARSSRDRRQKNDGRDAGGLLELLRGHLLGGNKLPKVWVPDLETRDDREIMRGRQDASEKAASIKAQVRMLLKRHGQRPPAGRSKAWTCTFEAWLRGLIAPGGALPHGAAVALRSLLRQKSALEEEIERLDGEVAALSETVRYTEPARSFMTVKGVGLLTAMVYLTEMGDLSRFSSRKKVGAFLGLVPSSHDSGPEADRKGHITHQGPWRVRRALCQAVWARVRTDPAEKAVCERIVRRNKKHKKIAVVAAMRRLAVLLWHIGRAAQRRHRCFAPRAA

SEQ ID NO: 366127 - protein, 348 aa, unidentified
MAYFVGLDVSVKETSVCVVDDSSKVISEQMVLTEPDNIITLLTSIGETYARIGIEAGPLSQWLVNALIAADLPVICVETRHMKALLTAQQINKTDRNDARGIAQMMRVGLFKPVHVKTLVAQEQRMLLTSRKLLQRKLLDVESDLRGTLRNFGLKVGAVSGGRYDARVRELVEGFPGLAAIVEPLLTVRRVMRQQFAVLHKMLLDTVRDDPVSRRLMTAPGVGAVVALTYRATIDQPQRFVHSRAVGAHVGLTPKRYQSGEIDYDGGVSKCGDALLRTMLYEAAQTMLTRAKKWSWLKAWGMRVAQRRGIRRAIVAVARRLAVVLHRMWVDGTEFRWSKDSATVPNAA

SEQ ID NO: 366128 - protein, 345 aa, unidentified
MSTTIGVDVAKSVFEVAVSNRPGRIVKRHRLSRGQFARFLATRAPATVVMEACGMAHFWGRQAVASGHRVVLLPPHAVRPYVPRNKTDRADATALLEAARNATIHPVPVKSVTQQALTGLHRLRSTWLATRTARINTVRGLLREFGVTIPVGARQVVPRIAALLAGPDDTVPAVLHPALAAVISELRELDVRLRTVEQQLTAIAAAMPAVERLRTIPGIGLLTATGLVAFVGDARRFPTARHFASYLGLTPREHSSGLRRRLGAISKRGDTYLRMLLIHGARAVLCHAKKAITPARLQRWALHLERLRGHNKAAVALANKLARIAWAVWTSGTEFRVAHLTPTPA

SEQ ID NO: 366129 - protein, 307 aa, unidentified
MQVSTIGVDLAKNVFQVHGVDSAGKVVITRQLRRKQVLDFFSKLPGCLVGMEACGTGHHWAREISKLGHTVRLMPPSYVKGYVKRSKNDAADAAAICEAVTRPSMRFVPIKSTDLQALLMLHRTRDLLIRQRTQLILPSAMKQALQAIVDQLAALELQVGALDRAIHAHHRANDMSCRLETVPGIGVIGATAIASTVTDPSDFKSGRDFAAWIGLVPRQHSTGGKERLGGISKQGDRYLRRLLVIGATAVVRQARLHPQKHPWIMRLLAKKPAKLVAVAVANKMARIAWAIMAKGGYYRAPELAAAA

SEQ ID NO: 366130 - protein, 348 aa, unidentified
MSCYLGVDLHRNCFTVCTLKEDGQSELRKWSIHALGEFAQTVQATDAVAVEATGNTRYFCQSLKDRGCRLVVVNPQQFQVISRSVKKTDTHDAKTLAQFLARDLLPEVRQKDALLAEIASILQTRDKLVKLRTTLKNKINNLLAGRGILIRRESLSSDKGLEQVLQASVIGLERVELEVLIGQIRHLNGSIQKLEAAIKKQGPKLPGYQNLKSIKGLGDIGSSTLLSTIGDINDFASEGKLAAYFGIVPRVTNSNATARSGRITKRGNKLGRTTLVQCALIARRYSPYLAHYYARIKAARGTGKAIIALARKFLGIIYRTLKNGWVFEDFPRFVIAPAEGKTSLLKQG

SEQ ID NO: 366131 - protein, 352 aa, unidentified
MARFIGFDAHKSYAYVVELREGKRQDYRVEIPGGLERFKERLDSTVQLVLEASTNSFRLADELRPHVGRLVVSDPAQTRGASSGAASTDRSAAEALAKLLASDFIREVWTPPQEIRSLRSLVELRVKLARMRVGATNRLRALSRQELVPDGKLVEEELKSSIPQDPTMQNYCSSLFRLSRSFQAESDALDAIFHEWCRTSKEARLLMSIPGVGPLVAACIVAQVGDIKRFGSPGKLCAYAGLVPRVHSSGQSYRSGGITKSGRRSLRWAMGLAAMSASRVDESLKQFKEKLSERRPKAVAMTACARKILVSVWHVWSRGVVYKGGEERHLLKLKRLDRKKRPKKEGQKADAP

SEQ ID NO: 366132 - protein, 349 aa, unidentified
MTVYVAVDFHAREQTISWCDTADGEVHRTKLRHQHDDVRAFYQQFNDEVIVAFEASGYSAWFEQMLAELGHTVWLGNPAEIRRKAPRRQKNDRRDADLMLDLLLKGDFPRVHGFSEESRTVLRQLRYRHKLVKVRTIAKNSLHAIGINAGLPLKRRLLTEKGIAQLQALSLSPVLTQQRDEWLQLIGSMNERIAAVEAQLQQRAQNDAAIALLQTHPGLGLLTSLALRYTLLPTARFSTTRQVTAYVGLDCMEDQSAERRRMGSISKAGSKLLRFLLNEAGHTAARHDPELKKFYRRLLHRRDKPKAKVAVARKLLVRSFIMLRDQIDYAEFVRRGVAARVAREAHSLP

SEQ ID NO: 366133 - protein, 310 aa, unidentified
MAEIVITAGIDVSKDRLDLALWPEPGANGSFTPGEIEPLISWLGAHRVSRIGLEASGGYEREVVRRLSAAGFVVVVANPLRVRRFAQAKGRLAKNDRADAATIAEFTATLAPQRQLREAALDRLGEYLMVRRQLQQAVTDTVNQLEHLREAELRRLVAAQRAGLKRRIQQLDRRIAARVAEQPHWQALAKQLRSVPGVGPVLAHTLIALLPELGRLTRRQVASLVGVAPFDDDSGRRNGARQIAGGRTAVRGALYMAALVAKRCNPTIAAFARRLAGKNPKVILVACMRKLIAILNAMRRDGKPWQPVAA

SEQ ID NO: 366134 - protein, 340 aa, unidentified
MGEISIVGVDLAKQVLQVHGAAADGQVLFRKKLSRAQFAKFMASLPPCVVAMEACATAHYWGRELSRLGHEVRLIPPIYVKPFVKRQKNDAADAEAVAEAAQRPTMRTVAVKTADQQARAMLFRTRDLLVGQRTRLVNALRGHLAEHGIIIGQGVGNIARFAACLDQDTLPDLVRDLGRLYLDQIAQISDEIDKLDKRIATAARENSTARRLQTMPGIGPVCALAIASFAPEMREFRRGRDFAAWLGLVPRQHSSGGKQKLGRTSKMGQRDIRRLLIIGAMSVVHWRGRHGGRPGSWLSRMLARKPRKLVAIALANKMARMIWAMLAGETDYRDPTGAIC

SEQ ID NO: 366135 - protein, 494 aa, unidentified
MQTPASSLAAKRRTRNAQQLKRQAQKRAPAAASPPLEALAIVHRRACGIDVGSAENYAAIPAEGLGAGEAAVRVFGVFSAEQDALVEWLREHQITTVAMEATGIYWLSLYDKLEAAGLEVYLVDAHSVKAVPGRKSDWLDCQWLQKLHTYGLLAKAFRPDPPIRRLRKLTRQRTELVMAGAAHQQHMGKALVAMNVHLPLAVSDLIGETGLGIIRAILKGQRDPKELVKLRDPRCHKSTVAEMEQALTGTYNEEDLFVLRQSVEAWEFYQGQMEACDQRIDEALKAIPTAQAVAPAAPPKPVPAAPPTARRRKEKRPDQGPNAPTIDFTETLVRICGVNLMKACGFNLLTVLMLLGEIGVDMSRWRSARAFCSWLGLCPGTKISGGKVLSRRTRKVKNRASTILRLAAWAAGKSDTWLGRFYRRIKARRGPSIAVTATARKLACVVYHMLKYREEFVFLDTSKYEAQAEAHRLRRLKRVAKTMGYELVATQAAA

SEQ ID NO: 366136 - protein, 370 aa, unidentified
MLDTTTFVGLDVHARSIKAVSLDVMTGEVRAATFGYDAGAVAEWVRSVDPGARCVYESGVTGFDLQKRLSGLGVDCVVGAVSKMIKPSADRRRKNDRNDAEFLARMLSVGNVVEVWVPDDECEAARDLTRALEDARDDLSRSKQRLSKFLLRHGLVFDERTPTGRRKGNWTRAHWSWIESIRFAEGADNDALAYYVDAVRRAAEEKARLEGLVEAEARKPRWRRRVESLRCLKGVDTASAADLVFEAGEFSRFRNARSFAAWVGLTPSEHSSGESDRRGAITKAGNKHLRKTLAEAAWHYMTCSGRPKDLAKGQVPDPAARRHAAKGVRRLVDRREALLARGVHGSKANVATARELACWVWAVGLMAEEA

SEQ ID NO: 366137 - protein, 443 aa, unidentified
MQNAPSTLSSALPPAAPNGVTGGIDWARDDHAVAVVDATGTPIERFTVTHTADGLRELPRRLDRLGVSEVAIERPDGQVVDALLEAGLTVVVISPNQVKNLRSRYGSAGNKDDRFDAFVLADTLRTDRARLRPLTPDTPATVMLRAAVRARKDLVGHRVALANQLRAHLRAFYPAPVGLFHELDGIASLKFLARFDCQDRADWLSSKRLGAWLTGIGYSGRTEPEAMHAQLVTAPRGATGDPGVAAAGITRTLVTALTALVEQIKSLSEQIVEQLAQHADAHIFTSLPRSGRVRAARLLAEIGDCRARFPTPESLMCLAGTAPSTRQSGKSKVVTCRYAVDKKLRDAVVDFAGDSRHSNPWAADLYRRAIARRHDHPHAVRILARAWLYVIWRCWQDGVAYDPEQHGALQRLLARDRPPATCGQCGASPNHRPGQHDQTAAVH

SEQ ID NO: 366138 - protein, 354 aa, unidentified
MKRNSKYVGLDVHQAMTAVTVRTEGGRVIARSVIETSEHSITEFFDALAGTVHVAFEEGTQAQWLYDLLSPRVGRVIVCDLRGEKRSGNKGDRIDADYLSERLLRGGLRAVYHGSRERADLKELTRAYRNLVEDSTRVMLRLKALFRARAIRTTGSGVYDPTERAAWVAQLAGQGARLRAETLYAQLDVLRTQRKKAKAAMVTEAKRDPAWGVLETIPYFGPVRIAMLLATIGTPWRFRTKRNLWAYSGLAVVTHTSGEYEMFDGRPRRRHRRPLTRGLNRNHNRVLKAVFKGAATTATGKPGPLQDFYHGMLERGMREELARVTLARKLAALTLRLLKTGEVFDPTQLSRPQT

SEQ ID NO: 366139 - protein, 338 aa, unidentified
METYAGIDLHSSNNFIGVINNKDKRLYGKRHSNRLTDVLTALAPFKESLKGVVVESTFNWYWLVDGLQENGYQVHLANPSAIKQYEGIKHTDDQWDSFWLAHMYRLNLLAEGYIYPKEHRGARDLLRRRVLFVQQRTAQILSLQSMISRNLGFKMSNNEIKKLTANDIEELFDHPNLVLMATNSWATIEFLKHIIRGIEKRVMSQAKLREEFTMLLTIPGIGNILALTIMLEVGDIGRFAKVGDYSSYCRCVESKRLSNGKKKGENNKKNGNKYLAWAYVEAANFAKRYCSKAHSFYQSKKAKTKNVVAIKALSNKISRASYYIMRDQVAFDEDKLFR

SEQ ID NO: 366140 - protein, 343 aa, unidentified
MRIVRVGLDLAKYVFEVHAVDARGKVLLRKRLRREAVSNFFANMPPCLIGMEASNGAHYWARILSGLGHEVRLISPQFVTPYVKSNKNDQNDAEAICEAVGRPTMRFVAMKSVEQLSVQAVHRIRSRLIKGRTQLVNQVRGILAEQGIVIARNIAKLRQSLSDIAGSNDNGLSDLIRALLLELQQELTDLDHRIVAYDRRIRELYRSSEVCQRLGKVEGIGPLSATALMAAIGDRQCFKNGRQFAAWLGLVPKQRSSGGRARLFGISKRGDRYLRTLLIHGARAVLGRARGKKDPRSLWLGKLRERRHANIAAVALANKNARIAWALLSGDAAYDLGLTVGST

SEQ ID NO: 366141 - protein, 309 aa, unidentified
MKQSIVYIGVDVAKEYLDVAWQRQSRRFGNNKSGHAALVAWIKQSPTVVQLICEASGGYERGLLESLERNAVKVTLMQANRVRQYARAAGILAKTDKVDARVLAAFGAAMHPKPTVPASAKQKRLREYDAQRRHLSRILLAEQNRLAQLSCVQLRSLSRSLISKIKNQIATLDTSISDLIAQDQELRLKAQKLTSVIGVGARTATLVLAQIPELGQLNRRQTAALGGLAPFNRDSGTLRGKRAVFGGRRALRSGLYMAALSAARRNHILSPFYQRLRAKGKPHKLALTAVMRKLLIVLNQILKPIPSPA

SEQ ID NO: 366142 - protein, 336 aa, unidentified
MNGSIERWVGIDVAKSKLDVAMLDEHGKLKSHVFVNDAKGHAALMAWLRQRGNSQQQIRVCMEATGCYGEALAISLVDAGWCVSVVNPARIKGFAQSELVRNKTDRADAALLARFGQALRPAPWVAPSLEVRQLRALVDRLHSLKEMHQQEANRLEAAMNQTGMRESIESHMQWLQASISQLERQIDDHIDGHPQLREDAKLITSIPGVGNTTAAKVMAYLGDVRRFKNAKALAAFIGVTPRLKLSGSSIRGRSMISRSGHAAIRHALYMPALVALKHNSIVKIFGERLKNGGMAPKAVVAACMHKLVHLIYGILKSRTAFNANFVVVQLDSKDGI

SEQ ID NO: 366143 - protein, 338 aa, unidentified
MNTYAAIDLHSNNGVLTIIDETDKVLRQRKLPNELGAFVNELEPFRATLKGVAIESTFNWYWLVDGLITHQFPAMLVNTAAIQQYNGLKRTDDQYDAWWLAHMMRLGILPTGHIVPRQERAVRDLFRKRLHLVQQRTANILSIQNLEQRNRGTKIAVKEVKKLTAVQVHELYDNDDLALAITTTLNVITALTEQINALEKAVLRKAKLRPEFELLRTVWGIGEILSLTIMYEAAGIARFASAGDFASYARCVDATRTSNGKKKSENNGKNGNRYLAWAFVEAAHFAVRAYPEAKRYYDRKSAKTNAIVATKAIAHKLARACFHVLRDQVPFDPKRVFV

SEQ ID NO: 366144 - protein, 342 aa, unidentified
MNKYNTIGVDLAKNVIQVCVVSPANKELQNKELTRKKFAELLIKQKPALVAFEACATAHYWSCVARRHGHQTKIIPALAIAPFRQGHKTDQNDALAVAEAARRPNIKEAPIKTVEQQSMQAIQRSREMLIQNRTALSNHIRGLLMEFGVVIPRGFSSLHEKIPWILEDGENELPDSYRPTLNLLYERLCQLRVDLEYLDKQIAEVVKENVACRRLTQLEGVGPISSILLFATLGTGEAFKNGREFSAYLGLTPKQYSSGGKTNMIGISRRIANKRLRAVLIQGARAYVHRIKEPKTVKDQWILALIQRAGYGRAAVALANKNVRTAWALLTKGSEYIKVQYA

SEQ ID NO: 366145 - protein, 446 aa, unidentified
MSTKRNYRRCRVKDVSLESLKEVAIVKGGTGTTVGLDVAKSEIVAVVRWPDESYERPWSIRNPSEIGLLIELLCLLKEICGSLTIGLESTGTYSEAVRRAMTESFLEIHRLSGKGVSDYKEIFDGVPSQHDGKDAAMIAELTHFGKGTPWPWLPVSEFDQTLHHQVARLSAFQNQANQWTGRLEGMLARHWPELTGLLDLRSATLLKICIHYGSAARLAADENAKQQLRVWGRGFMKFPKIEAVIESARTTAGIPIGAGETAWLQEIASEVRAALKEVKACEKRLKQIAASHEGMQRYVSAVGAVTLCVIWSTVGDPRDYSSSGAFLKALGLNLKELSSGKRVGQLAITKRGPSLARKVLFYWALRAVQQAELKGWYTGFQKVGRGKAGTSEHRKMKGLVAMMRKLCRSLWYVYDQNEAFSYSKVFPGKPLQKPRSRTRRRRRVDA

SEQ ID NO: 366146 - protein, 351 aa, unidentified
MNVKHYIGFDVHKKSINYCAKLADGTIVEEGKLAARRATLQRWAGNRSEPWHGAMEATVFSSWIYDTLKPYAAKLEMGHPAMMKAIGASKKKNDKLDARKTSDLIRCNLLPACWVAPSEIRELRRMMRYRGLVVDQASRMKNKISGLLMECGAEYNKKRLHGEKYFAELLGKLEEVPESVKDLLKLSRGALETFQATQQQLLRRLQKDPQLAERVARLKSIRGVGDVTALTWALEIGDPHRFPSIGKAVSYCGLTSALISSADKQQRGPISKQRNAHLQTVLIEAAKLAPRWNPQLAALHEKEIQSGHHRNRATLEVARKLVAYLLAVDKSGKPFEARAPAKAEEEVEPAA

SEQ ID NO: 366147 - protein, 379 aa, unidentified
MEISSSTLPAVAAEHATMFVALELSKSSWLVALHSPVADKVSLHRFVGGDVAGLLALIARKQTQAKARLGRTIRVLSCYEAGYDGFWLHRLLCARGIDNRILDAASILVDRRSRRAKTDRLDAAGLLRTLMALDRGESRVCRVVRVPSVAQEDARRRSRERTRLVVERGQHSNRIKGILMTLGVRDFEPTRRDWQQRLGGLRTADGRELPACLKAEITRECRRLHQVIVMIAEVEAEQAAALDAEESQAARLIRLRGIGLVSATVLADEVFFRDFRNRREVAGYLGLASSPWASGRVQRDQGITKSGNPRARRTAIELAWLWLRHQPGSFLTQWFRQRVGTTRGRMRRIMLVALARKLIVALWRYLSDGLIPDGAELKA

SEQ ID NO: 366148 - protein, 345 aa, unidentified
MEIHTIGIDLGKTVFHLVGLNLRGEVVVRKKFSRTQLLRFTANRQVQLIGMEACGGAHFLGRTLREQGHEVRLIPAQYVKPYVKTNKSDYIDAEAIAEAVGRPTMRFVPIKTDDQLDLQSLHRVRERWVMRRTAVVNQIRGLLLERGITLRKGRCHLDAALPGILEDATLKLSGALRLLLAQLKLELDQLALRMEEADGLIKKTAQDSEVCQRLDAIPGIGPLTATALIAAIGNGAAFRKGREFAAWVGLVPREYSTGGKQTLLGISKRGNGYLRRLFIQGARAVLQFKEKQSPGLSAWLAQLTSRTHHNVAGVALANKLARMAWAVLAKNELYRPPVLASAAAS

SEQ ID NO: 366149 - protein, 401 aa, unidentified
MGIWVGVDWGSGAHAVCVIDAKGMVLDRFEVSHDRAGLAVLVTRLQQHGALEGIPIAIERPSGLLVDALVEAGFVVTPIHPNAVKACRPRYRAVAAKSDPGDAFILADILRTDGHRLRPLAPQSDAIKALRGLVRGRDDLVGTRVALANQLSALLESFWPGAARIFSDLASPIALAFRERYPAPEAAARLGPKRLAGFLAQHRYCGRRSPEALLERLRSAPIGGAGEAEGEAKGELVRALARTLQALVAELAKLSSRIEHAIAALPDGRIVMSFPRAGTICAAQILAELGDVRARFPSEHQLAAEAGVAPVTYQSGKSRGVGWRWACNKRLRAAFTCMADNSQHESPWAADVYRRARARGCDHPHAIRILARAWTRVLWRAWTDRVPYDPGQHRGAQASAA

SEQ ID NO: 366150 - protein, 390 aa, unidentified
MKTENATENETGAVHTTLGAIFLSLELSRSTWLVTSLLPCNGAKMSKRAVKAGDTAGLLDLVRQLKAMVRRRTGRDVPVIAIQEAGLDGFWIHRILELEDIESHVVDAASIATSRRKRRAKTDKLDGETLLRALLAYKRGEPRVCAMVVPPSPDEEDRKRNSRERRALIAERIKIVNRVKGLLFSQGVVGFEPLKRDRRIRLEEVRTGDGRELPSHLKAEIVRALDRIELVLRQIKEVEAARDEVARNECDLSKVVSGMSMLKQLRGVGADFAEVLWSEGLYREFANRRQLASYAGLTPTPWQSGSISREQGVSKAGNPRLRTVMVQLAWFWLLHQPRSALAQWFQERVALDGGRRRKPAIIALARKLLIALWKYVHHGAVIEGAVMKPA

SEQ ID NO: 366151 - protein, 386 aa, unidentified
MPSTNLQNSIDFNGQKFYVGLDVHKKSWAVTVRSLERQVAHFTQPPSAEALVNTLKEKFPGGAFYSAYEAGFCGTGHHELLSKLGITNIIVHPGDIPSTDKQKKNKTDLHDSRSIADQLERKGIHGIHILTREQQELRSLFRLRESKVQDVTRANNRLKSFMIYYGIEIPKSISKKEFISKKILEWLDNLELASDAGTIAKEELTEALRYQRQQECKITKLLRKQIQQHHPDAYKRALTVPGIGGITTMGLLAEIGDFTRFDDPDDYIGYLGLTPWNDSSGDTIKTKGVQPRCNKHLRPLLIEAAWVAIRTTPQLFAYYSKHAVKNNKHAIIKVARKLALIVKGVILNNQDYQTDYLQQKLKKDPIEKKLKQTTSQTIKNKEVFLA

SEQ ID NO: 366152 - protein, 428 aa, unidentified
MPYNIAGIDVHKRMLHVVFSDVEVDGEYQFVRQKFDTSPSQLRMLADWLLEQQVEEVAMESTAQYWKPVWETLERYWKPVCEKREGAKPESGTLHLAQALSNRGRRGRKKDFRDAERLVKRLVANELILSFVPDPEQRLWRTVMRTKYQMTCNRVQLQNRLEALLEEAHIKLSGLVSDLLGASARRMLKAIADGESDPAALAALADRKLRATPQQLSDALGACTELNPVYRRLIKMALEDLESIEKRIVQLEQEMADLLRPHEDQVKRLAEVPGLGVDSAQQIMAEVGATAATFPSAEHLSSWVGACPGDEESAEVSQSHRSPQGNRHMRRILNQAANAAVKLKGGIFEILYRRYVPRLGHNQTIGVIAHKLCRLVWKILHQGVHYEERGPAVSKVSKQKRTQRMLRELRALGYRIELAATQAGSPSA

SEQ ID NO: 366153 - protein, 389 aa, unidentified
MVTEKNQPIRATIRKELVIMKDTIKYVGLDVHKEKIAVAIAEEGRGEPRYWGMIPNKVEDIRKLVKKLGDPAMLRVCYEAGPTGYGLYRLFLSLGIECDVIAPSLIPKKPGERIKTDRRDSIRLAQLYRAGELTSIYVPTEDDEALRDLVRAREDAKEDELRAKHRLTKFLLRNNIRAPQGIKNWTYKYREWLNTLKFERSQLKIVFQEYLHHLYEIEQRIKRLEEEIQVQATKGVHAPMIQALQTLRGVAVITATSLVAEIGSFKRFTTAKHFMSYVGLIPSESSSGESRRQGNITKTGNRHVRRLLIESAWSYRYQPAVKGELKKRQEGQPASVQAISWKAQNRLHKKYFRLLSRGKAGGKAVTAVARELAGFIWAVTQEMENLTEA

SEQ ID NO: 366154 - protein, 423 aa, unidentified
MMKLKYSICCGLDVHKNVIVATIVTTNKDGISEYLQKSFSTINSDIQRFHNWLIENNCYHVCMESTGKYWIPIFNYLENDIDVCLTHPKYVKAIRGKKTDKKDSKWIADLYKFDLVRCSFIPPKDFRQLRELSRYRFKLVCMKSSEKNRIQNCMTISNVGIASVLSDPFGKTATEIISYLLEHTADSMDEKAVRKLIKKGAKSKSDEIIEAIKGYTIETDQAKKLELARGHLEYLDDMITQTEVELYVRIKPYYEFVEFVSTMPGMTELSSTIVLAETGVDMDIFDDAKHLCSWCGLSPANNESAGKKKSVRIAKAGDYLKPMMVQCALAAIKSKKQPYFAIKYGRIKKRRGHKKAIIAIARMMMVCIYHMVSEKKPFTPTDYEELTDPQNHVESVVLNENNVFAYLESLGYDSSKLVKRNDN

SEQ ID NO: 366155 - protein, 403 aa, unidentified
MNSVGIDISKGRSTIAVMRPFGEVVISPFEIRHTGSELSKLAKQLKSLDGETRVVMEATGNYHASVAKLLHNAGLYVSVINAKLVHGYGNNELRRVKTDRKDAVKLANYGLDRWLTLPRYIPEEDTRLLLKNCYRQYRQYSKVQTVLKNNLISLLDTVFPNANRLFSSPIRGDGSEKWVDFVAEFWHCRCASEKSERAFTSKYLRWCRKHGYNFREAKAHTIYAEASGHIGVMPKSETTKLLVEQAVAQLRATSTALAALKQEMQSLASVLPEYPVVMDMFDVGPTLGPQLIAEIGDVRRFYSKKALVAYAGLDAPPNDSGDVTGRHKSMSKIGASSLRRTLFLVMSVYLQTAPLDEPVCQFMDRKRAEGKPYRVYMMAFANKFLRIYYATVKAYLESLEHTV

SEQ ID NO: 366156 - protein, 383 aa, unidentified
MKKTQETLRIKDSIKAVILYIAFELSSSKWKLAFSDGSKIRYKTITAGNLSQLQVEIDLAKGKFKMIEDVRVVSCYEAGRDGFWIHRYLEGQGIENLVVDSASLEVNRRKRRAKTDRIDVAKLMRMLLRYWGGEKKVWSVVRVASEQDEDARHLHRGLESLKKERTKHRNRIKGLLIQQGIKVSNPSQKKFLEVLEKLRTWNGQAVLPGLKSQVVMEYERLQMVEGQIKALEKEKTERLKNPDTASLKKVAKLALLYGVGSVSSWTFVMEFFGWRQFQNRREVGALAGLTPTPYDSGKSLREQGISKAGNQHIRALAVEIAWAWLRFQPQSKLSQWYMKRFGGGGKRMRRIGIVAMARKLLIDLWRYLEYDKIPEGARLKSVT

SEQ ID NO: 366157 - protein, 338 aa, unidentified
MNIVFLGIDLAKNVFQLCGLNQAGKPVYTKRTGRKELLQTLANIPACLIGIEASTGAFYWQREFEKLGHKVKVISPQYVKPFVRGQKNDGNDAQAIAVALMQPTMQFVPPKSPEQQDIQALHRARRRIVNHRTATVCQIRGLLLDRGIPIGSAVSRARRAIPLIPEDAENGLSSRMRRTIAELYDLFNDLGRRIHFFDKEIETVFRQSEACQRIAKVKGIGPETATAVVAAIGKGTEFKNGRHFAAWLGLVPRQHSSGDRQVLMNMTKKGDKHLRTLFIHGARAVVRVATNNNDGHMNQRVNQLKERRGFNKTTVAVANKNARIIWSMLRNETGYQVV

SEQ ID NO: 366158 - protein, 454 aa, unidentified
MASKKGTRRRRSPAIVVNRPQVAGVDIGSREHWVCGPASVDGAANVRVFGCTTPQLNELVDWLESQKVESVAMESTSVYWIPLFELLEARGIEAVLVDARQMHNVPGRKTDMNDCQWIQLLHSCGLLRASFRPSAAICKLRALQRQLSNLVVEKAKFVQWMQKALDQMNVLVHRAVSDVTGKTGMGIVRAIVAGERDPKKLAKLRDPRCRKSPKEIIAFLTGTWHEEHIFNLGSALQMYDMIDGQIRGYEARILQEFEALQPPERRDAPVPSHPSATKERAIAKRGEQPLRATLWRVAGTDLTRIDGLGAPAARTILTEIGLDLTRFPTEKHFVSWLRLSPRSPISGGKPIRKRKNGLGATRVANVLRMAAAALSRSKSALGAAYRRVARRKTGAVAVKATARKLAQLVYRVLRYGHTYVDLGEARYEARFHEQRLKGLKSTAQAMGYELVLSG

SEQ ID NO: 366159 - protein, 338 aa, unidentified
MGCTRVYPIFKNMKKLIVGIDISKDVIDYCVLEKGSHQVIDRGVVQNERSFLNSWIKSFDLNNTCFSMEHTGHYGALLSWLLSERKAVYYMINALEIKRSLGIQRGKTDAVDAYRIASYSITNNFKLSPFILPCEELLKLKAMMTVRQQRVKMSVQLQNSIKANLILNRTVDISELIEDESRQLESIKKSISFIDRQMLEIIKSCEPLEQTYNKITKVIGVGPITAMKCIIETANFTKFDSARKFSCHSGLAPFPYQSGSSVKGRTRTHYLKNSSLKSILFKAAASAIQHDPQLKNYYNRKLKDGKHKLCALNAVANKVVLRIFAVQKREEPFVKLAA

SEQ ID NO: 366160 - protein, 343 aa, unidentified
MESIYYIGLDVHKKTIAYCIKTVTGKIVCQGMVKAQRRALHQWLVDLPGSWVGAMEATMFTGWVYDFLKPYAVELKVAHPAMLKAITAAKKKSDRADAEKLADLLRVNLLPECTMMSEELRELRRILRYRNMVVRTSSKMKNKISGLLMEVGATYDKRKLHGKKYFGQLLEQVEDVPESVKDLLKLSRSSMELFEAVQKKLLKILREDSLISRRVELLRSISGVGEVTALTWVLEVGDPERFSNSRQAISYCGLCSAQHESAGKEHRGPISKKRNKYLQTMLIEAANLAPYWNPQLAMLYEKELTRGNRNRATLAVARKLVIYMLAVDRRGEPFITEKESLVA

SEQ ID NO: 366161 - protein, 270 aa, unidentified
MAIAIVGLDLAKHVFQVHAVDETGRAVLRRQLRRAGVEAFFKTLPPCVVGMEACASAHYWARRISALGHEVRLIAPAKVKPYVQRGKKNDANDAAAIVEALMRPHMVFVPIKNEEQQAVLMLHRTRDLLVRQRTMLVNAIRAHLAEFGIVAAQGRRKVKDLITGLDNTEIPELARLALWQIADQIDECDNHIDTLERRILAWHKSDEASCNLATIPGIGPITASAIAATVPDPSAFRNGRQLAAWLGLVPRQNSSGGKDRLSGITKAGNP

SEQ ID NO: 366162 - protein, 351 aa, unidentified
MLLIGCDYHTRFQHIAMVDTSTGEIAERRLEHANGEARKFYASLPGPARVGMEATFNAQWFEGLLAEYHHELWVGDAAKIRAAEVRKQKTDARDALHILDLIMQGRFPKIWIPSSEERDLRQMLRHRNKLVGFRTSIENQLHALAMGQGLCRKSKLWTERGRQELEGLELDPWASRRRQELLQLLDQLNPSIKELDKAVEKQAASRPEAVRLMTQKGVGPVTALAFVLTVGPIMRFANSRKLVSYLGLNPSEDSSGGRQRLGAISKQGNSLMRHLLIEAAQAAARYDPELRRDYLRLKFRRGISGVAKVALARKLAVRLYWKLCAAAQPYTAAHMQGSPTKPMVDESPSTS

SEQ ID NO: 366163 - protein, 363 aa, unidentified
MGDSISAQAQWTVGLDLGDRHSQLCVLDDLGEVVEEGRVATRESALRARFEGGSLMRIVVEAGTHSPWVSRLLSDLGHEVIVANPRKVALISGNESKTDQVDARTLARLGRVDCSLLHPIQHRSAQTLADRAVLRARDVLVRMRTQTINAVRGTLKTAGVRMPSGGSSAAFARRAAAHVPASLEPALGGLLEQIAALTERIRAYDARVEALCTASYPHTERLRQVSGVGPVTALAFVLSLEDAARFTRSRAVGSYLGLRPRRSQSGARDPELRITKAGDPDLRRLLVTSAQYILGPYGPDTDLRRFGERLAARGGKAAKKRAVVAVARKLAVLLHRLWVTGEPYEPLRIADRVAAQTAAPQAA

SEQ ID NO: 366164 - protein, 348 aa, unidentified
MDGTILAIDLGKFNSVLCWYDPSTRAADFRTAATTPRDLSRELTRRRVAHVVVEACAQAGWVHDLCGELGRPVTVASTTGAAWQWQRVKRKTDRDDALKLARLAAVGELDPVTVPPRAARQWKSLIGLRKRLVSERVRGQNRIRGLLLGQGLPAPGGARAWTAVGLAGLAQWASPPASCRPDELWRGEVHLLLERHRFLEAQVRVIEARLDELAAADERVALLLSVPGVGVRTAEVIAVHLGEAKRFHSADEVSAYAGLVPRQYQSGTTDRRGRITRRGPRLLRAALVECAWCSLRYNAWARRVWLRLQTNGCSRKKAVVALARKLLVRCWAMLRTGRPWREEVAAGV

SEQ ID NO: 366165 - protein, 391 aa, unidentified
MSMYFVGIDISKYKHDCCIISAANQKVVSKVIIKNNKAGFNELLTIIHSLANPADIRIGFESTAHYALNLELFLENSLLTFMEVNPVLISEYKKSKTLRRTKTDSVDCESIARWLMTVEYKPHSKGFYHAYSLKSLTRLRDKLIRQRSFYLVKITNVLDHTFPEFKPFFNERLSKTALYLLENYGSAEKMARMNSASYEKLRSLSRGKFSPQQFLRLKELAANTVGVNNSIFDVELNSLLSLYKSLVKEIDTIKKEINQLIEEVHPHYMSVPGIGPLSAAVIYSEYGDISNFTNPGQMLAFAGIEPGINESGTESHGGKMVKRGSSQLRYTLINCCLPLIRFDMTFATYYAKKRGEGKPHRVAITHVAKKLIRVIYALESQDIDFNAQELR

SEQ ID NO: 366166 - protein, 373 aa, unidentified
MDQDTTYVAFDTSKETLAVAIAESGRRKEVRFFGTIASRPEAVRKLIEKLAKQHQRLAFCYEAGPTGYGLYRQIRAMGYDCQVVAPSMVPVRPGGHIKTDRRDATTLAALFRAGELTGIWVPDAAHEAMRDLSRGRQAAMEGLRRARQQLLSFLLRHGRIYPTRSHWTRAHRRWLAEQRFDHAAQQIVFEELIRAVEQVQSRRDRLEQQMVALLPSWSLRGVVAALQALRGVAQLSAITLMAEIGDFRRFTNPRELMAWLGLVPREHSSGATTARGAITKAGNHRARRMLVEGAWTYRLPARVGVELLRRNRALPEAIKDVAWKAQVRLCARYRRLLRAGKPTNVVTVAIARELAAFVWAIATTVMPPLEPAE

SEQ ID NO: 366167 - protein, 371 aa, unidentified
MGPTPDNMNKCLHTELSSHEGTRSEFNPGKTLIKLGIDVHQEFYVVVAQEGGVNPKPAQRFKKEAFLSWVAQLKHKSGGEIHAVYEACGFGFGLQRKLAALGIACQVVCPQKLDEQNKRVKTDGLDAKALCLKLDRYVEGNRAALALVRVPTEEEEQLRAIHRQREQLVKARKQLEAQGRSLMVNHGIEPVKGWWKRRTFAALAVPEWMKQLLSNSQPILLALEEKIRALTVQLQAAASPHQPRGLGMMTSVVIDREIGNWERFVNRRQVGSYTGLCPGEYSSGNTRFQSCVTKHGNPRLRAALVELAWRLVRFQPNYKPVVKWRRVLQKGALATGAARKKAIVSVARQLAVDLWRIRTGRLSPEQLGLSI

SEQ ID NO: 366168 - protein, 349 aa, unidentified
MSSTPSTVEYRCFVGVDIAAASFTAIWTTDGRMQPKAVTFSQSASGFAAFQQHLQATHVAPTQTLIVLEATGSYWVALAVTLHEAGYAVAVLNPAQLHNYAQSLPRRGKTDALDAQVFVRFAAERKPAPWTPPPAVYHELRQRLVARDGLLSMRQQARNQRHALKQWPVMVASVLEQLDGVIADLDLRLASLEKEIGEVLRDGAWASSAALLSTIPGVGLVTTAWLLVSTLNFSLCRTPEQAAAYAGLVPLQRESGTSVRGRAQLGHGGNGRLRTALYLASLSATRYNPAIKAFYERLRASGKPMKVARCAAARKLLHVAWAVVTKGQAFDARHTQPEPAPTAVVALAA

SEQ ID NO: 366169 - protein, 371 aa, unidentified
MEESSKSLYVGLDVHKESIAVAYAPEERGTEVVSLGAIGTRQCDIDKLIRKLQSKGAPLVFVYEAGPCGYWLYRYLTRQGLSCHVVAPSLIPRKPGDRVKTDRRDAITLARLMRSGDLSAIYVPQIEDEALRDLSRGREDAMQDLKRSKRRLKSFLLRQDIRYEGRANWNAAHLRWLSEVVCPTPPQQIVFQEYVRAVTEQQERLQRLERELHEAVKGWRLYPVVEAIQALRGVELTGAVILMTELGDLTRFDTPRQLMSYLGLTPSEYSSGARRRQGGITKAGNSHARRALVEGAWAYRYPAKVSRHLQLRLEKLPAEVQAIGWKAQVRLCKRYRQLTARGKHVNQVVVAIAREMAAFAWAIARLVPLAS

SEQ ID NO: 366170 - protein, 358 aa, unidentified
MKPIKQSLAFDVDSKELKVSFRILEEDLSIKTKGSRKFKNNATGFKNLKQWSEKKRTADLPVHVIMEATGVYYENVAYFFNDLDSYIVHVVLANVSNAYFKSLNLKSKTDEIDARALAQLGLERELKVWEPASSQMQGIKTLVRERLRLIKEKTMVSNQLHAHTASYHKNSKVIKRYEIRIRFIIKQIKEIESDLRAIVKLDPELDARIEEICEVRGLGFISVVGVIAEYNGFILFENRNQVISYAGYDVVLRESGTSIKGKPKISKRGNSYVRQMMYMPAMCSAVHEKHNKNYYKRIVIKTGIKMKANVAIQRKLLLLIYTLFKSGERYDPDHYLKVQKRLAPKDKLNKKIELEKVA

SEQ ID NO: 366171 - protein, 324 aa, unidentified
MLPTLGIDISKDSFHLELSINDKLRHRKFANRQEGFGELCVWLVKHKATQVHACLEATGPYSEALALYLHQQGHTVSIVNPIQIKAFGQSELRRNKDDRPDAGLIRRFCEKQRPAPWTPPPVHLRELQALTRHLENLIETRQQQINRLEATNTKNVAKSLRKLVAHLDAEIKRTEQQIDDQVDRHPDLKRQSELLESIPGVGKRTAAKLLAEITDISQYKSARQVAAYAGLTPRNNRSGTIRGKTRLSKTGNARVRKALFFPAIVAKRHNPIVRAFCERLSSHGKNKMQVIGAAMRKLIHIVFGVLKSGKYFDPTHELLLNSVS

SEQ ID NO: 366172 - protein, 363 aa, unidentified
MEEKKAVTRFVGIDLGKRTYEAAFVGKGGKVTMSNGKTYIGGRQALYKKLRRGDKVALEVGNLAFIIAKEIEAAVGCQVYVLNPSRLALIYASMKKTDKEDALKLAHIVEDMKEERLPVVPVPSEKEMKRRKILAGYRRAQQSRGREINKLHALFLAQGITTKVRADLGTSEDRKEAIKELVGLEREEAEYLVACLELHERRIEALNRRMKEESEGDEVIKRLQSVPGVGPMVAFAFVSHVAPERFESTGQLSNYLGLVPRIYISGETVKYGRITKRGNGYLRALLVQAAWALIRTKKGGKLKERYEYMTIEKSKSKKTAIVAIARRIAEELYTLMKNGTNHQHKAFIKEKKVEELAKSAISA

SEQ ID NO: 366173 - protein, 453 aa, unidentified
MGRCIGLDVHRDFAQVAIWENGRVRDAGRVATSPERLREFATTLRKTDKVALEATMNTAAIAGLLAERAGEVVVSNPFKTRVIAEAKIKTDKVDARVLAELLAADYLPSVWQADEATKALRRQVGQHISLVRQRTRVKNQVQAILARNLLPRCPFSDLFGIKGRRWLGDQELAADERRTVHSLLRQLDFAGQELKLVDAELACVALDDVNARRLMTIPGVDMAVAVAIVATVGDFSRFESPDKLVSYVGLNPSVRQSGGLPATHGRISKQGRAWARGMLVEAAHAASRTPGPLHAFFERVKARRGWQIATVAVARKLLVICWHMIHDERDYAFSRPSLVAKKTRALELRAGAPAHRGHPAGSAAAYNLRTVRDRERALGEQAEAAYNHLTRNWQPTRPAAKAQPASPKRARQTSVPTTPARPVKAAPAGGSAGLDRPPATAGTRKPRVTRLNA

SEQ ID NO: 366174 - protein, 340 aa, unidentified
MTITTVGIDLAKNVFAVHCVDQNGKTVLVKSRVTRAALHGLIAGLPPCVIGMEACSGAHYWARLFRQYGHEPLLMAAKFVSPYRMAGKSGKNDAADAQAICEAVRRPHMRFVPVKDESQQAMQCLHRTRQGFIEEKTATYNRLRGLISEFGVIAPQSTDALRHMVSEQKNSLPLQVQQCVDDLLEHVDRIEANIAEYDRILSRMAKTDHRSQRLMELKGVGPTTACALVASIGNAHDFKNGRQLAAWLGLTPSQYSSGGKSKLGRITKAGDSYLRTLLVQGARSVLIGAEKRTDSFSRWVCSLVERRGYWRAVVAIAAKNARLCWASLHYGDDFRLYSAS

SEQ ID NO: 366175 - protein, 466 aa, unidentified
MERKGGKGALAEAAGRRQRKGRGKRAGKAGFELAHPDCAGIDVGSGSHFVAVPADRENPSVREFGSFSDDLHRLADWLSACGVRTVVMESTGVYWIALYELLEGRGFAVYLVNARHVKNVSGRKSDVLDCQWIRDLMSFGLLRGAFRPSQEVCALRAVMRQRDMLLAGQARHVQHMQKALAQMNIQLANVISDVVGETGQRIVRAIVAGERDRSRLAALRGPRIHASQEEVGRALEGTWRAEHLFALKQALALFDTYAQMLMECDGELERMLERLARYDGDPGKPKRRGRQKNAPRFDVRVHLFRACGVDLTRIDGIDTTTALKVLSETGPDLSRFPTPKHFTSWLNLCPNTRITGGKRLKGRERNRCNRAGQALRQAAVGLSTSKSALGAYFRRMAGRLSKAVAVKAVAHKLARLVYAALTKGMVYVDRGMAAEEERYRARAFKHLAKRAAALGYSLSPTLQAAK

SEQ ID NO: 366176 - protein, 393 aa, unidentified
MRFAGIDIASETHVVALVAADGSVELKATPFGEDDLGYQKALALLGTPGEVLIAMEATGHYWKNLFAVLAAAGHAVALLNPLRTHRFAGVDLERTKTDAIDALTIARFAAQKRPAATTVPDALTEELRELVHLRQRLLQDFGDRVRQLHRLVDLGFPEFTRYVRTLDSELASAILRVYPTAAAFRGVSVRRLAALRYDGRHHVGLDLARLLTEAARRSVGQHHSATYRLQIRYACDDLDTLRRRLRDLDRDLDGKLRKHEVGRLLTTIDGIGTHTAARVIATVGDPAHFRSGSALAAYVGTIPALKQSGQRQSVRGAVTPIGNAQLRAALWMPTLTAVRCNPWLRAHYQRLLARGKLPKVALVACMHKLLLAIYSVAKHRRPFVPNLTAPATP

SEQ ID NO: 366177 - protein, 414 aa, unidentified
MPSPLFVGIDVGSKDNVVCCLTREEASRPLSRFTVKNNRPGIMEFKDRISKLVHKHGFEETLFGLEHTGCFSTHAAMYLQRHLDFGCPSTRVYMFNPSLIKEFKKSHFLDAPKNDRIDAWFIASKLRTGHLPHPFTWNEPLMALQRLTRARFHLMKDLTRESNFLATNLFLKCSDYPLAFQNKLSATSLAVMEEFESAEAIAEIPLDQLVDFLVLHGKNRFDDPESVARTLKKAARSSYRLPESMADSVNLAMASSIRVIRTVQEQLKSLKKAIQDHLDTIPQTLDSVPGIGPIFASGILSEVDIHQFKTHKELAKFAGLAWTENQSGTFTAKRTRLIRSGNRYLRYYLFEAANSVRVHDPVFAEYYSKKLAEPKEFAEKRALALTARKLTRLVFYLLKTNRLYEPRGGIRQND

SEQ ID NO: 366178 - protein, 351 aa, unidentified
MPHKLNSGIAVIGVDIGKNSFHVVGHDKRGAIVLRQKWSRGQVEARLANLRPCLIGMEACVGAHHLSRKLQMLGHDARLMPAKYVRPYSKGQKNDFRDAEAIAEAVQRPTMKFVATKTAEQLDLQALHRVRERLVSQRTGIINQIRAFLLERGIAVRQGLRFLRAELPRILAASCDALSPRMLRVIEDLAGDWRLLDQRIEGLSSEIEALARKDKDCERLMTVPGIGPIISSAMVAAVGTGDAFSKGRDFGAWLGLVPKQISTGDRTILGSISKRGNRYLRTLFVQAAWVVLVRIGPKHWDRYGLKSWIEAAKKRLHHNVLAIALANKLARIAWSVLAHGRAFEATKIQAA

SEQ ID NO: 366179 - protein, 350 aa, unidentified
MNVNHYIGFDVHKKSINYCVKMADGQIVEEGRLRATHDALRRWAGRRQEPWRGAMEATLFSGWIYDTLKPFAAELQMGHPAMMKAIGASKKKNDKIDSRKIADLVRCNLLPACYVAPAEMRELRRLLRYRNVVVAQGVRMKNKMSGLLMEVGAEYNKQQLHGKKYFTELLGKLEEVPESVKDLLRLSRGALEMFEATQRQLLDRLRKEPRLVERVAVLESIRGVGEVTALTWALEICDPQRFRSIADAESYCGLTSALDCSADKQHRGPISKQRNGHLQTVLIEAAKLAPRWNPQLAQVHERELQRGNRNRATLAVARKLVAYLLAVDKSGQPFRIRNQPAPTTEVATAA

SEQ ID NO: 366180 - protein, 413 aa, unidentified
MEVLNPRCAGLDVHEATVVAAVRLATTGRVAREVRTFATTTAGLLELAAWLAENGCTHVAMEATGIYWRPVWHILAEHGFALVLANAAQVKNVPGRKTDVGDATWLAELLAHGLVRASFVPDAPTAELRSLLRTRKQLVRERAGHVLRLQKTLEDANVKLDGVVADLLGKSGRAMLEALVAGETDPGRLAALAHPRLSATPERLREALRGRVTAHHRFLLRLHLDQVDALDAAVGRVDREVEAHLAPFRAAADLPTSIPGVGALAARVIVAEIGLDMGRFPTAGHLVSWAGLCPRSDESAGKRRSTRLRKGAPWLKTTLVQCAWAASRKKASYLQAQYHRLRARRGPKKAVCAVAASILTAAYHMLKDGTVYADLGPDHFDRRAKEVQARRLVRRLADLGYAVELAPLEPAPA

SEQ ID NO: 366181 - protein, 314 aa, unidentified
MDKITVGIDVSKDRLDVAVRPSGEVFVVARNAAGLEELVERLCSLGPHLVALEATGGFETVAAAALAAAGLPVVIVNPAQVRAFAKAIGQRAKTDPIDARVIAHFAEATQPEPRPLPDEATRLLADLVARRRQIIDMIGAERQREKRAPARLKKSIVRLVKALEKELTSVDGDIDDAVRGSPAWRETEDLLASVPGVGSTIARTLIAELPELGTLDRKQIAALAGLAPHTRQSGQWKGRSFIGGGRANVRTALFMGAMVAKKHNPVLKAFFDRLVAAGKPKMLALIAVARKLLTILNAIIRDHRPWQGTVVAAS

SEQ ID NO: 366182 - protein, 406 aa, unidentified
MELLNLYKRVIGLDVHQAQITACAIIEDADGTTRVEQRQFGAFKRDRRELAQWCASFTPGEVVMESTGIYWKSPYAALEVVGIRAKVVNARHVKNVPGRKTDIGDAQWLATLARAGLLRGSFVPPTKLRELRLISRHRQKQVGILASEKNRMHKILTDGGIRLGVVVSDLHGQSARAMIKAIIDGKPPNEVLMFASKRLKASREQLFDALQGEITDNHRFVLDELMQHIEEIEARIARFDARLLEGLAAEQSALALLQTLPGVDLIGAAMLLVEIGTDMAAFGSADRLASWVGICPGNNESAGKRKSGRVRKGNLYVRRLLCEFAHAASRTKSAFKLKFDSLIVRRGHKRSIVALAHKLLRTMYFMLDRGEYYRDSATDYEALSVQRNASRWIKKLIAFGFIPKPA

SEQ ID NO: 366183 - protein, 344 aa, unidentified
MGEVITIGLDIAKSVFQVHGVDEAGAVVILKRISRAKMLEFFGGLKPCLVGIEACPAAHHWGRELQALGHTVRLMPPNYVKAYLKRSKNDANDAAAICEAVTRPTMRFVPLKTKEQQAALMLHRARQLLVRQRTMLSNAIRGHLAELGIVSAKGRNGTGTLLEIIADAGDSRVPPVARGILEVLARQYSAIGSEIVSIDRSILAWHRSCEASRRLEEIPGIGPVVATALVAEIGDWKAFDSGRSLAAWIGLVPKQNSTGGKDKLGSITKQGNRYLRWLLVAGAMAVIRYAQKHGTQKRPWLGRLMDRRPTRVVAVALANKIARMAWAVIVHGDRYREPQPSLAV

SEQ ID NO: 366184 - protein, 405 aa, unidentified
MEVLYPRCAGLDVHAGQVTACVRVADGPTVSYHHRTVATNTRDLLLLAEWLTGYACTHVAMEATGVYWKPIWNLLEGEFERVLVNARRVKNAPGRKTDVKDCQWLAHLLACGLLRGSFVPRRPQRELRELTRHRAQLVGERARAANRIEKTLEDANIQLGAVVSHLLGVSSRDMLRRLARGETDARSLAELARSKLRGKIPQPRQALEGRLTERHRFMLERLPDHLECVEGQIDRFEALSRPFEQSPAALAQIPGVAERAAQNIASEIGIDMSPFPTERRLASWVGLSPGNNESAGKRKSGRTTKGNRRLRGTLVQCAWAATRRKGSYFQAPYRRLAPRRGKKRALVAVAHSLLTVIWHILKHGVERQDLGADCFDRQKGEQLLRHHVKRIADLGHDATLHQRAA

SEQ ID NO: 366185 - protein, 404 aa, unidentified
MIFVGDDWSEDHHDVCLMDQAGKRLASRRLPEGLTGIRQLHELIAEHAEEPDQVVIGIETDRGLWAGALAAAGYQVFAVNPLAVARYRDRHHVSGAKSDASDAKLLADLVRTDRHNHRPIAGDSLDAEAIKVLARAHQSLIWARTRHTNAMRSALREYYPAALLAFEDLAHGDALGVLGRAPTPEQGAHLDLPAIQSALKRGGRKRNIAARARQIRAALRSEQLAAPAPVAAAFGATTRAAVGIIVELNRQIAELEAELATHFEAHPDADIYRSLPGLGVILGARVLGEFGDDPNRYTSAKSRRNYAGTSPLTVASGKKRAVLARHVRNRRLYDAIDHWALCALTSSPGARAYYDHHRAAGDVHHQALRALGNRLVGILHGCLRHHTTYSEHTAWAHRQITQAA

SEQ ID NO: 366186 - protein, 433 aa, unidentified
MQDVQDEPLFADRVAGLDIAKAEVEVTIRVPSDTAPGRRQQESRTFGTTRRQLDALADWLRSWGVTKAGMEATGDYWKPVFFLLESRGLDCDLYHAGQVKALPGRPKTDRADSVWLARITERGMISSSFVPPEPIRRLRTHTRYRRHLTQARTAEKQRVEKLLEDGHLKLSSVITDIHGKSGRAMLEAIAAGQRDPRALAQLALGKMRPKIARLEEALDCSFFTEQHAAVLAMMLTVIDHYTAQIQTLTATIEELAEPWLHQISQLDAIPGFGTITAQDIIAETGTDMTVFPTAAHLVSWARWSPQVKQSAGKRKGSNSTGRGNPYLSAALGEAMTSASRTQTFTGAKYRRLAKRMPKKKALVATGNSTLAIVHTLLSDPAATYHDLGPGYYEQRAHARRQARNHVKSLERLGYKVTIEAINPDTGELIPQAS

SEQ ID NO: 366187 - protein, 410 aa, unidentified
MQVLYPRCCALDVHKLTVVACLRIADDSKVTSEVRTFETTTASLIGLRDWLTANKCTHVAMEATGVYWKPVWHILSDGEFELVLANAAHVKNVPGRKTDVSDAEWVVDLLAHGLIRPSFVPNSQTQELRALMRTRKQLVREAASHIQRVQKTLEDANIKLDSVISDIMGKSARAMIEAMIAGETNPAKLARLAHRSLKASPAQLREALRGRVTKQHRFLLRLHLKQIDGLEAAIAEIDQQVEADIEPFRAAVKQLSSAPGVKALSAQVIVSEIGIDMSRFPSDGHLVSWAGICPRNDESAGKRRSNRLRKGAPWLKTTLVQCAWSAVRQKDSYLRAQFYHVKARRGPKKAIIAVAASILTAVYHMLKTGKTYQDLGPNHFQRRNKDQQKHLLIKRLADLGYAAALTPLPG

SEQ ID NO: 366188 - protein, 408 aa, unidentified
MEILYPRCAGLDVHKDMVMARVRCVSEPAVDETRRFATTTGALIELQEWLSSHAVTHVAMEATGVYWKPVWHLLEEHFELILANAQHIKNVPGRKTDVNDAAWIADLLAHGLINASFVPPKPIQELRDLTRTRKQLVREVSQHSLRIQKTLEDANIKLGSVLSDVLGHSGRAILNALIAGEIDPERLADLARGNARKKRSELIQALHGRISAHHRRLLKLHLGLIDALQQALATVDADVGKILAPIQECARLLTTMPGVSELTAHVLVAEIGVDMARFPTAAHLLSWATMCPRNDESAGKRRSTRTRKGAPWLKTALVTAAWAAVRVKGSYLQAQFLRLKARRGAKKAILAVAASMLNAAWHMLKHRVEYKDLGADHFASRDRSKAIRRLVRRLKDLGCKVELTAEVA

SEQ ID NO: 366189 - protein, 410 aa, unidentified
MEVLVSRGCGLDVHQATVVACLLTGAPGALPRKQVKTFSAMTGALIELRDWLKSEDCTTVAMEATGVYWKPVYNILEGHFELIVANARHIKAVPGRKTDIKDAAWIADLLRHGLLQPSYVPPPELRELRSLLRYRVKLVNARSAERNRVSKLLESANIKLSSVASDVFGVSGRLMLDALKRGQATPEEMAELAKGRLRSKLPELKLALDGRFEAHHRQLLSIQLDRLDRFDRDLKQMDAKLEIRLKPYARQMELLDGIPGIDWVVAATVIAEMGIKMSQWPTVGHLASWAGLCPGQNQSAGKRGKSKIRPGNPYLRSALVEAALAVTREKDCYFREKYYRLKARRGHKRAIVAVAHKILIAIYYVLSSDTPYQELGCDYLDRLEPERLKLNLVRRLERLGFQVKLEPKRA

SEQ ID NO: 366190 - protein, 412 aa, unidentified
MTATNQFAAHVGLDWADKKHDVCVQFKNGERVFHVIEHTAEALDVWLTELHQKVKGRIAIAVELKKGPVVYALQKYPFITVFPVRALSLARYRQAFSPSGAKDDPQDAELALELMLRYPQKIKAIEPANADIRLLQQLVEQRRQLVEDKRRFVNRIINTLKQYYPQPLEWFSHRGSLLLCELIIRWPSLQQLKRARRETIRNFLNAKGGRAIALTEQRIASIDNAISLTTDPSVIEANALMATALATQIKVVSEIIKTYDERIEALFDTLPDAGLFKSLPGMGPCMGPRMLAALGDNRDRFNSAEEIQNYAGIAPVTERSGQKCWVHWRWQCAKFVRQTFVEWAAKTVNSSYWARLYYQGLREKGKSHQSAIRALAFKWIRIIYRCWKTRTQYDEAKYLLALEVRHSPLLKP

SEQ ID NO: 366191 - protein, 387 aa, unidentified
MTDPFDVRKSDRPFDQDHTLVAVIELSQLSWLVGAMVPGLKRSPLKKLKPDKEELIRLLQRWRDEAIKAGPVITRIAVACECGRDGFWLVRWLRAQGIEAYVIHAASVAVSREHRRAKTDRLDIEMLKRAFLGWLRGEVGHCSMATIPSCEEEDAKRPSREREILVKERTRLINAMKSDLIRLGIRNFNPKLRNAPTKLETLRTAEGASIPPNTLAKLLRDMERLRLVVAQIKAVEAARLERLERSPRDKPHAMILLLARVIGVGIETADMLVREVLSRRLRDRRAVARYAGLTGSPDESGSRRREKGLAKAGNARVRRGMIQLAWRLLRFQKDSALVQWYRERTTDCRGNTRKTMIVALARKLLIALWRLVKTGEVPQGLILRPAS

SEQ ID NO: 366192 - protein, 359 aa, unidentified
MASIASDPADVIVGVDTHKDQHVAVALDGLGRRLGERFAPATPSGYADLLAWAASLGRVAAFGVEGTGSYGLGLARFLRRHGIVVLEVARPPRKGQRRRQGKSDPVDAEHAARELLAGASAVTPKTAEGAVEAIRLLKVARDTAVTAHSQAMITLKATLVTASDTLRAELEPRTDFALVTACAELEVAGDLADPDVAARHALRALARRWLALHEEIKVHTRQLKRLTSQTAPALVATFGIGFDCAAELLCAAGDNAGRVRSEAAYAKLCGACPIPASSGKTTRHRLNRGGNRQANAALFRIVVVRMRWHPATIAYVQRRTTEGLSKREIIRCLKRYVAREVYRLLPVPTATPAEPLQAA

SEQ ID NO: 366193 - protein, 430 aa, unidentified
MIAAIIERCAGIDVGKKFVAICIMTGPADGEARSEIRNFGTTVAELKQAREWIVSNGCTHVILESTGSYWKPVFNILEGHVEVTLANPEEVKARKGHKTDNKDAWWLAHLLRHGMVTPSFIPPRPQRELRDLTRRRRKLIQSAAAEKNRVSKVLEDANVKIGSVLSDVFGVSGQLMLEALLEGKADAAEVACFAKRRAKQKLPSIIAALEQHQMTDHHRTMIRLSLDHMRFLEEQLTVIDELIRQKIHEAGYEKQFELLRTLPAVEENAAAILAEMGPDPAPFPSAKHLGSWSGLCPGNNRSAGRSKSSHTTKGNRWLRAALAESAWGVSRMKEGHLRQKFWRIAAKGEPKRSRPIAVVAIAHDLLKLAFFVLQRGTPYEEQRGKPMSDQQQRRLIRHHLRRLGKLGIRLRPSPAPSPPKCRRQATSPNH

SEQ ID NO: 366194 - protein, 317 aa, unidentified
MKYVGIDIHKKMCQAAILGDDGELLDEIRFPNDADGIEEFSGKLTSFNDEVRAVVESTGNLWIPIHDRLEEHGYEVALSNPAKTRLIAEAKIKTDKVDARTLAGLLRADMLPTCYVPGEELRSRRELLRHRLNLVKIRTEVKNRIHALLDKHGLRMPGTTPFSKGNVAWLRERSLGFMDDAILRSDLALLETVDVQVGLIEEKIAALAAEDRRVRLLMTMTGVGYFTAMLIVSEVGDVSRFRSDKAFASWMGLAPSVHQSGERTRIGGVSGPGNRRLRWAMVECAYAAVRHDARFGALYERRSRRRREAPPTPTPRS

SEQ ID NO: 366195 - protein, 343 aa, unidentified
MKLTRVGVDLAKQVFQVHGVDRAERAAWCKRLKRSRWIADLERDVEPGCEIGMEACGGAHHWARVLQAKGYRVKLIAPQFVKPYVKTNKTDANDAEAICEAMSRPSMRFVAVKTVEQQDLQAVHRVRSSLIKERTAKANQLRGLLYEYGLVAPRELSSLRRAVPEWLEDAGNGLTVRFRALLSGLYGDLRLLDERVRALDLEIAAIAREHEPVGRLKQICGVGPLTASALYALVGDGRQYRNGRELAVALGLTPRQHSSGGKEKLLGISKRGDKYVRTLLIHGARSALRVAPGKTDRISRWAVALAERSHMNVAATALANKTARVAWAMLRHGTNYEPERVAA

SEQ ID NO: 366196 - protein, 428 aa, unidentified
MISKAYRATRVNDVDWDRLVRGNEGVGITLGIDVGKRDLWPVCRWDTGRFERPWRVKNPEEIPTLIALVQQMSKDRKLVVAMESSGTYTDALRQALFDAKIAVSRVSNKASHDYAEIFDGVPSQHDGKDAAVIAELASMGKAQPWGYEAPSEWDQELNYWVEWMVVHRQILTNWQGRLEALVSRHWPEATRVLKLSSVTLLRALEHYADPKSLAADLDAAEQLGRWGGVFLAPSKAERLVEEARSSVGVRAGEWQRRQIKEYAREALMARQQVKAAERRLRELAVGNKVLEAQGNAVGTPTACVLWTSTGDPRNYHAAAAYRKAMGLNLKERSSGAYQGQLRISKRGSARTRQWLYFAALRLVQRSDVRPWYEAKKARNEDDARRAVVAVMRKLAVALYNVGVKGEEFQPRRLFARIGRRGVQVKSKK

SEQ ID NO: 366197 - protein, 464 aa, unidentified
MVLSEMECPNGSLPMFNKQSPSGCRSSQNIKLMEKIRNNVSGIDIGAKKVFTAVEGQPVISHFTFTEDFLKLRDYLIRHKVESVAMEATGVYWVILYEILEEAGIDVWLVDGRQTKQVPGRKTDVKDCQWIQELHSYGLLNRCLVVEADIKELRSYLRLREDHIRSSSMHINHMQKALTQMNIRLKEVLSQLHGKSGIAIIEAILNGERNRDVLVNLCHVSILKGKKDLVYKSLEGRYTESGLFALKQAYDAYKFYQHQIQQCDARISTVLNRIGKSGQGQNNDQKRKPIRHHKPQVDHLGSNLLNIFEGKDATLISGITDYSWVQLLSEIGNDLGKWPSEKHFTSWLGLSPGQNDSGGKKRRVKKKGRPVAGQIFRTIAQGLINSKNIAIGAFGRRLRARKGASIAIKAMARKLAILYWRIMQKGLDFVEKGIKKYEEQLAAQKLKTVMRLANELNLDISHYH

SEQ ID NO: 366198 - protein, 450 aa, unidentified
MVRPQVIDDEERERVYEKVAAVDVAKDSGMVCTRLPHPSRPGARQSTVWTVQARMGAIRTLGRQLARGGIEMVTLESTSDYWRIWFFVLEGCGLAVQLVNSSQAKNLPGRPKTDKLDAIWLARLTEMGLLRASFVPPAPIRALRDYTRARTRLTQERTRCWQRLEKLLEGALIKLSSVASKLTTLSAQDMVRALIAGERDPQVLAALARGKMKAKHDDLVEALDGMFGDHHGELAQLLLDQIAFLDGKIAELTARIEEQAAALPGAWGVNADGTTGPDAGTAPGDPVLPVVQRLAQVPGISEDLARSIVAETGLDMSRFPDAAHLVSWAGLCPRAHQSGTRARNGKKGRGNGYLRGYLGQAAIGASATATFLGERYHRIARRRGKAKAQVAVARSILVIIWHLLASPEARFTDLGYGYYQARTDKDRKIKNHIRQIEALLGHPVTIAKAA

SEQ ID NO: 366199 - protein, 341 aa, unidentified
MKNLFIGIDFSKEKVDVAIIFAEGLAETSVRVFNEFKNSVSGYKQLVKWVDKNANGIDPSMWLFCGENTGDYSKPLCNHLYGRGYDIWLENPKCIKDASGIRRLKSDRADAAMIAEYAMRNHDRAVGYEPLSESLTQLREYYLYRQVLVRHRCSFEVRRGEKRLLMEKSAAKTVIAQSGKHIVSELNKEIAKINKKIASLIESSDELSEVYQIVTSVPGIGTQNAVCLMVYTDNFRRFNYDARSIACYYGIAPFGKDSGTSVHVDPHVHHMANRHIKAMLTQAALAAVRFNPVIAQYYQRLIARGKKMPVAMNNVKNKLLHTVTSMVKNKQVYNPEYRLSV

SEQ ID NO: 366200 - protein, 416 aa, unidentified
MDTMYERCCGLDIHKKTIEACFRSGKKKAHMSFGTTSAELRKLTMWLVENGCQSVAMESTGSYWKPIFNILELSGTDMEIIVVNARHMKNVPGRKTDVNDAEWIAELLQHGLLRPSFIPDREQRELRELSRYRKSLVGERAREINRLQKMLEGGNIKLTSVVSEVTGYSSRRLLDRLLRSDEPMTEEVISELVHTSLVGKSKELEIALDGLLSELQKGLLIKVLDHIDDMNKRIADLDDFCRKQMKKYEDALDKLDEIPGIARRTAETILIETGLDMSRFPTAKHFARWAGLAPGNNESAGKRSSGRTTKGNPTLKSTLIQSAKVAARKKNSFFKARYQKIAARRGANRASVAVAHSMLIAIYHILKSGERFKDLGEDYYNQFNREKKKNYYLKKLTKLGVNLKEATLLISIQAAT

SEQ ID NO: 366201 - protein, 358 aa, unidentified
MQIIGVDLHTRQQTVAMLNVETGEVVEKTLQHEGESVREFYSTLPGPTRVGIEATGSMQWFLELMEELGIDCQVGHPAKIRAAEPRKQKHDRRDAALVLQLLIENRFPSIWMPSSEQRDVRALILHRHQWVRIRTRVQNALQAIALSHGLRRGSSLWSEAGQHAIASLSLTRYAAERRTALQSLYRHLEEQIDDLDRKVEELAWQRPQARRLMTPPGVGPITALATETFLGEPKRFVDGKAVASYVGLIPSEHSSGGRQRLGRLSKQGNPLLRFLWCEAVGHAVRKDAELQRFYQHKLVQKGLGKAKVAAARKLGIRLWVLLRDQIDYQEFCRRGQLRQKHGGAHAGVPAREHDPAQQ

SEQ ID NO: 366202 - protein, 353 aa, unidentified
MGRSIGVDLHRNNFVTATRAENGRTYVRTWKLEDIGRFADQLRPEDRVAVEMTTNTRLFYDAVRPSVADVQVVNTAQFKVITKSVKKTDRRDAETLALYLEKDLLPTVRLKEMEQGQLAGLVSTRDTLVKQRTTLKNKINNRFAMYGRSIKREQLSSAKGLAAVEAEPFDTLVQIEIRVLVAQIRALNASIGELDKTIEASAEKLKGYESLISIKGVGTVSAATLLTVIGDVEDFANAGKLAAYMGLVPRVSNSNETERSGRITKRGSKLARTALVQCGLIAKKYSPYLHAFHARVKQRKGGGKANIALARKLLEIIYRALKNDWVFEDFGRFQLEGGISPVKPKAKTKRRAG

SEQ ID NO: 366203 - protein, 443 aa, unidentified
MSKFKKTFELTYPNAAGIDIGASSHFVAVPADRDDQPVREFASFTEDLHAIADWLTACGIDTVAMESTGVYWISLFELLESRGFTVFLVNSRHVKNVPGRKSDVLDCQWLQQLMSFGLLSGAFRPQGDYAALRVVARLREMLLRYQATHIQHIQKALLLMNILLTEVLSDVMGETGQKIIRAILAGERDGGTLARYRNGHVKASEEEITKALQGSWRDEHLFSLKVAVELYDFYAEQLVACDQQIEQLMKDLARYDLKPEKHKRRGGKPKNAPKFDARLLLMQMCGVDLTRIDGIDVTTAFKVLSEIGADMSKFKSAKHFASWLGLCPGTKISGGKVLSAATKRTANKAAQALKMAAVNLRNSQSALGAYYRRLCGRMDKGKAVTACAHKLARLIYAMLTKGEEYVDQGRTYYEEKYRERVLKNLTKRAEALGFQLTPAPEMA

SEQ ID NO: 366204 - protein, 343 aa, unidentified
MGRKIGVDLHKNSFRVCYYQNDRKYDFATYHVSVKGLEHFKKGLKKTDELAVESTGNTGHFFRAVEGKVNRIRVVNPMQFKVISESVKKTDDEDALKIAKFLSKDMIPEVRMKSKAESQLGSLIGTRDKFVKLRTALKNKVHNILNANGIVTKTELLTSDKSLDKVLGHKLDETCLFELEIITKEIRNLNEAIVKIDDQIKDKGSKLDGHKNITSITGIGETSAAIFLNTIGDIKYFKDDKALASYFGIVPRMRISNETAHMGRITKMGNKIARTALVQCSYVAIRYSPYLRAFYDRLKAKKGSGKAIIATARKLLGIIYNTLKNKWVFEDFASYKLAPQCAL

SEQ ID NO: 366205 - protein, 352 aa, unidentified
MRHFIGCDAHKKYSVFVAIDETGNVKPAVRVNHDRELYRGFLRGLPAGSEIAVETIGNWYWIVDEMEEAGHRPRLAHARKSKLMMGEIDKTDKLDGRGLATLLRNGTLPEVWIASREVRDQRELLRLRMTLVGMEIRLKNRVHAILAKYAIQLEEVRDVFSQQGRRLLLGATLENLPPHTAKVIRQHMELLESTEQQRKIAEERLKSIVKERADVNLLMTLPGVGWILGTVIAFEIGDIDRFSRAPEIASYAGTVPRVHSSGGKTRYGRVHPDVNRYLKWAFVEAANVIVMHQKRLGDVHVVRLYKRLRQRKGHGRAVTAVARHLAEAAFWVLKKQQPYQQPQGCRVSSTHR

SEQ ID NO: 366206 - protein, 343 aa, unidentified
MKNSNVIGIDLAKNIIQVCKVDKHGELTSNKAISPNKLKELLAKSVPSIVAMEGCGACHYWARLARKYGHDVRIISPRRVKAFLQGHKTDANDALAVAIAATQFGMVFSQIKEEEQQSLQTLETSRKFLDKELTALNNHIRAYLYEYGITMNRGQKSLRATMVIVLDDLDTRLPECLKSTLKVLWERYQLTVIQLKETERYRAALVKQLEPCKRLMALEGIGEVCAAMLYASMGDGREFKNGRQASVYIGLTPKQHSSGGKTYMMGIDKKGGNKALRAALYQGALSVISRLPNEPRTVKEAWLLKLVERAGIKRACIALANKTVRTAWALLATGKSYEPVLLS

SEQ ID NO: 366207 - protein, 412 aa, unidentified
MQDLLECCIGLDIHRDSIVACLLYGPVDTKPECEIRTFGTLASEMEKLREWVVANRCHSIAMESTGIYWQPVYELLEPCFDGEIRLMVVNARHMKNVPGKKTDIRDAEWTATLLRAGLLKGSFIPDKVFRELRHFTRYRKKIIVDITSQKNRIDKFLQSSGFRMSMFLSDIFGASGRNIMRHLVVHGSIDREGLDKCLKTQTRNRLEDVLISVNGSLSTHQREFLSMMLGYLEQIERHKKEVEIAIDAEIEKHSGALSLLCSIPGVDVTSASAIIAEIGTDLSAFPSAEHLCSWAGLAPGNNESAGKRKNTHVGKGNNYLKSMLCEISWVICGKRKLYLSGWYWRIKQRKGAKRAVVALARKLLSIIYTMLKTGQPYNEDCFEHRRKQCEQKRASRMIHELTKLGYRVEPIA

SEQ ID NO: 366208 - protein, 370 aa, unidentified
MRIIGCDLHARQQTLAMLDTETGEVVNLTLMHEGNNVREFYSKLPPPVLVGIEATGSIQWFLNLMEELGIECRVGHPAQIRAAEPRKQKHDRRDADLILKLLAQNRFPAIWLPSKELLDLRALLLHRHQWVRMRVRMQNALQAIALANGLRRGPALWSYDGQAKIAFLPLLPHAAYRRSALQAMYKNMQSEIENLTRRVAEQAGNRCGARLLMTHPGVGPVTALATEVFLGDPQRFTDSKRLASYVGIIPREYSSGEHQRLGGVTKQGSPLLRFLWGEAGAHAARRDPELKRFYRRKLVQKGLGKARVAVARKLGIRLWIMLRDEIDYQEFCRRGQIQQKTVRPVVGMPETGNGAKSHRPSDEATRLPES

SEQ ID NO: 366209 - protein, 416 aa, unidentified
MNAAGIDVSSRKSTVAVLRPFGEVVKLPFDVRHNAEDLAALAEQLKSIKGETRVVMEHTGRYYEGIAKVLHEAGLYVSAVNPLLIKEYGNNSLRKVKTDKADAMKIAKYALDNWIELRDYTPMDTIRYDLKTLNRQFQLASKQKTATANNLIALQEQSFPGIRKLFDSPVRSDGTQKWVDFTHDFWHVDCVRSGSQNAFTERYRKWCKRNRYQFSMEKAAEVYALAKSAVVLVQKTSVTKTLVQEAANQLTAISRSVETYRSEMNKLASQLPEYPVVMKMYGVGESLGPQLMAEIGDVRRFERKQSLVAFAGIDPAPSESGDYCSRSNKTTKRGSPYLRKTLFNIMTVHLQRAPADEPVFQFMDKKRAEGKPYYVYMTAGANKFLRRYYGKVMAYFSTLENLPPVDMDSTGLQHAD

SEQ ID NO: 366210 - protein, 360 aa, unidentified
MFTERTSVGLDVHARSVVAHAMDVQTGEIFKARLCPDPAEVTAWIKTLPGPAAAIYEAGPTGYGLARTLLSHDIRTVVAAPSKLQRPSGSRVKTDAIDAEHLATLLRLDAFTPVTVPDELTEAARDLVRARDDCRSDLMRARHRLSKLLLRHGIVYSGGQAWVGAHDVWLKRQRFDSPLVQAAFDEAYDSVITITARRDRLDERIATMSADSPWTDTVRRLGCLRGISTLTGFGLAVEIGDWTRFSGNSIGSYLGLVPSENSSGQSRSLGPITKTGNGHARRLLVEAAWHHQHRYVPGKTIRDRWDLASPAARARGDRGNRRLNKRWNQFKARKKANNVANAAIARELAGWCWSLAVLDD

SEQ ID NO: 366211 - protein, 325 aa, unidentified
MSKVIGIDISKQTFDVCIRKGKKLIQLIFENNPKGFKKFLKTMDLDTDFVVMEASGPYYVRLASFLFESKVVVSVVNPLIIKRFSQMKFYRSKTDKKDASIIMEYGETEFSNLRVWQPESKEVHQLKQLHSSIELFRKQISQSKNQLEAFNSSGLLDITVKKCLKKSINQLIKKVELLESVMLEICEAHYLESLSLLTSIPSIGNKTAIQLIAITDNFRKFEHYKQLIAYVGFSPRTYQSGTSVRGKDHICKMGSSQIRKLLDMCTWTAKKCNKGCVNMYERLKEKGKPERVIKVALANKLLKQAFAIATSKQKYNENYQLNVCF

SEQ ID NO: 366212 - protein, 381 aa, unidentified
MKKDIRFVGLDVHAETIAVAVAEPNGQVRSLGIIPNRPQAVAKMIKRLGPAENLRACYEAGPTGYVLYWQFTALGVRCEVVAPTLVPVKAGDRVKTDRRDAEKLARSYRSGDLTAVWVPDAAHEALRDLVRAREAAKSDQLRARNRLGKFLLRQGWHPPTGTRTWTGKYLAWIKKDVAFDQVAQSAVLLDYITEVEHAAARIERLERSIDEAVETAPERMRAVIAALQALRGIAKVSAVTIVAEVGELSRFSRPRQLMGYSGAVSSEHSSGGKIRRGAITKAGNSHLRRIVGEAAWSYRHRPAVGWPLRRRQEALSEEVKEIAWKAQHRLHRRYHRLAAKGKVKQQVITAVARELLGFIWAIGVTIERVGAKPVHTKQMVA

SEQ ID NO: 366213 - protein, 395 aa, unidentified
MFIVGIDIAKRSHEAIIIAEDGQVVRKAFSFRNNCTGYNLLLEQVRRLTLVKSQIVFAMESTAHYWLALYARLLKDGYAVMVLNPIQSHSLRELYIRKAKTDARDSLIIADLVRFGRCKASNVPQDKILALRELCRSRAYLVDMAADLKRKLIALLDRIFPEYESLFDSAFSKASIAVLRKYSTPQKVKNANLRKLTDILMESSNGHFGEWKAHQLKEAACSSFGIDDSGGVYSTLLGMFLEQILSLTAQADSLEKQISVFFQEFNNPLTSIPGVGTVLAATILSEIGDITRFSSADKLLAYAGLDPSVKQSGEFKSNQNRMSKRDSPYLRRAIWLASTVAVHRDPMFQTYYEKKLSEGLHYMNVIGHVSRKMTAVIFAVLRDGQPYQPILQSAG

SEQ ID NO: 366214 - protein, 384 aa, unidentified
MQTVADRPEAPTAIRTDLGAIFVSLELSRSTWLITSLSPDGGEKMSKHVVRGGEVAGLLERFAQLREKTRARTGEVFPFIVIQEAGLDGFWIDRALRNEGIESHVVDPASIATSRRRRRAKTDRIDGEALVRALLAYKRGEPRVCAMVKAPTPEEEDRRRLCRERKVLIAERVRHVNRVKGLLFSQGISGYEPLRRDRRVRLDTLQTGDGRLLPDHLRAQVRRELDRLELLLEQIKAVEAERDVALAEQQAPSAMLLGIKGIGPEFAAILWSEGLFRHFDNRRQVASYAGLAPTPWQSGSVDREQGLSKAGNPRLRTTLIQLAWLWLRHQPQSTLALWFEERVRRNGGRLKKTTIVALARKLLVALWKYVTAGVVIEGAVMKVA

SEQ ID NO: 366215 - protein, 338 aa, unidentified
MEKYINVLGIDLSKLTFDVGVIINDQKDNVRYRKFKKTEEGLHEFSDWLKQLDVILDEHTLVCMEFTGLYNRMVLNFLEKTDIVIWVEMAAHIKKSLGLQRGKSDKLDAKRIALFAWRNQDSVRAWSSVDKDAQKVKDLLAQRERLVDTKKRLLVPLEEMIQEGFGKEAEQLKNYQKPVITQLDNSIDKIERAIKDIINNNEKLKSKSELVQSVKGVGLVICWYLIAFTNGFEHLKSGKSLACYCGVVPFDNTSGTSVRSKARVSNIANKKLKSLMHMGALSAVKYDPELKAYYERKVTAGKNKMSVLNAVKNKLLLRIAAVLRENREFEENYVHKAA

SEQ ID NO: 366216 - protein, 344 aa, unidentified
MATYYIGADVHCNNTELAIEKRGKIVARYSVPTTIPAISTVLNSLQGKKILAMEEGPMAGWLYRNLNEKVEKFIVSEPRRNKLITCEGDKDDRIDSGKLVVLLRGNFLKAVHHTSDSHRAHLKHWVNLYNDRVRDGVRNICKIRACCRMHGIAIPRKVVRNNVHRHDWLSGLDNAVLKVQLQMLWIGYDATKEQVGLAKKQLSSYVRKYPIIKYWRKLPGVGLIRAATIFAYLDTPWRFKNRSKLHKYCGVGLVRATSGKDKKGRPKPARLKLPWAVNRRLKNAVIGAATSAIRHRDNVFKDYYERMLSNGITPANAKHSVARKMVSTMSAMWKTDSKFDEKLF

SEQ ID NO: 366217 - protein, 348 aa, unidentified
MQFTANLPVIGLDLAKSVFQLHIVDVETGEIQRRQVKRAKLTEFFAKCQRSLVAMEACSTSHHWARVIRSLGHEVKLLPAQHVKAFLLRDKTDAMDAQAIWVAAQQPHIKPVPVKSERQQACMALHGMRRQLMKIRIMQTNAVRGFLAEFGIVLPVGHSQLLKKVQGELAKAQQDALLPEDLVVSLQEQLKRIDALQDDIDHIGHRLRAIIREDRQMQAIQQIPGVGELTASALVAAVGDFSAFKSGSQFASWMGLTPRQVGTGGKTQQLGISKRGDNYLRTLLIAGARAVIARSEKSGWITRLLERCHYNVVVVALANKMARTVWAVLAKGSAFDQVKWNPLEHART

SEQ ID NO: 366218 - protein, 350 aa, unidentified
MLIIGCDYHPGFQQIAFVDKQTGECGERRLAHREQAEQFYRELKQQSVAVRVGMESSGHSRWFERLLHELGFELWIGDPAEIRTKRVRKQKTDRQDAQLLLRLLIEDRFPRIWVPDAGNRDLRQLLWHRHRLVQMRTRVMNQMHVVPLNEGLRRKKALWRPAGRKELEAIALAPWASRRRQDLLDLLDQLTPKIQELTRALEEEVEKRPVTRLLMTHPGVGPLTALAYELVIGTPERFHCGKQLASYVGLVPEEKSSGDRRRLGHISKQGNVLLRFLLVEAAQVTVRSQQEWRSKFFHLAMRRGRKIAKVAMARKLAVHLYWMWRRGLDYGQTHKLGSHAGEPGHPDGVQ

SEQ ID NO: 366219 - protein, 471 aa, unidentified
MSGKYSIRSKRKQYRKRSGRKLPKNLSVLNPDAAGIDIGGAVHYVSVPEDRDDEPVRHFGCYTPDLHQMGQWLVDCGVKTVVMESTGVYWMPVFRVLESYKLQVLLVNPKHVKYVPGRKTDVADCQWLRQLHTFGLLKGAFVPPHEIAELRNLWRHRRNLVEDASKAILQMQKALTQMNVQLHVVLSDISGVSGMKIIRSIIAGERNPEVLARLVNKQVKATHEELVEALSGHYSSAHLFVLAQVVEKYDSLQKLILETDQEVHRNLKGFESKADCDALGKHPKRSARSIYRRKNEPHFDLRSELWRITGVDFSQIDGIDCNTAFSVLSEIGFNVDAFATEKHFASWLGLCPDNQLTGGRVKRRSTRQVVNRAATALRVAAQSLCRSKSYLGALYRKFAARLGPSKAITACAHKLALIIYRCLKYGFEYVDKGQEHLEQQHKERAIKALKKQATRFGFLLMDPETGELINA

SEQ ID NO: 366220 - protein, 362 aa, unidentified
MGLRLGIDIACRAAHQASLADERGEFVWSGRSFRTRTRDLEALWAMLPPGTEPGGVTIVMEPTRNAWVALAAWFRRRGATVVLVPPERAADLRAYYAKHTKSDRLDSRLLARLPLLHPDGLHPERGLGPGDALRRATRLHSSLVLRRGKSLARLDALLEILGPGWHDAFRGDLANKTPLRFLAAGYADPDTIRRLGRARLARFFARHSRGMWGEAKADELLAAAAETHALWASELDYPDLAEDIAIEARLALGLTDEIKELDERIAVMLDRADPVGIIRSAPGVGAITGAAILGRLGDPGRFASLAAARSFTGLVPSLDASGQAGRHGGPTKRGDAVLREALFLAADHARRLDPSLAARFTA

SEQ ID NO: 366221 - protein, 317 aa, unidentified
MSKANIVCAGIDTAKTKLDVAIRGVAKRWCFDNAAHGHAALSTLLREYHVERIGIEASGGYERAVVAELRRDGFVVIVFQPMQVRAYAQFRLQRAKNDHIDADLIAACTAATEKIHAPPDPRLMPLADRQTLIDQIIDDIAKLKNRRESCRDEYFRQFWKEEITRLKKRERAELKELVAAIRQHDDLARRLDLIASVDGVGLPTAVAILVRMPEIGRVSREEVAALAGLAPYDDESGGRTGDKHIAGGRERLRKNLYNAVLAAAYHWNAQLIAFKDRLLAAGKLHKVMRIACARKLLIYVNTVVARGTPWVSSPLPA

SEQ ID NO: 366222 - protein, 323 aa, unidentified
MKENRYPFSQFIGVDVSKAKLDFTFVDSTETVKIDNTAEQIVDHLIGRINDSRATIIVMEATGGYENLLVKVAGENNVAVAVVNPLRIRKFATGIGRDAKTDPIDAQAIAFYGQVVKPKPMLAKSDEETKLAALVARRRQLLDLINQEGNRLLQTTDPEIRDDIKESLETLKKQVKTIDGRLAKSVEASTVDRRKIEILQSVKGIGPVSISTFLAELPELGKLNRGQIAKLVGVAPMNNDSGQSSRRRRTFGGRSYVRRVLYMAPLVATRSNPRIERFYQQLLARGKEKKVALIASMRKLLTIINTMVRNDELWRTEPKKTSV

SEQ ID NO: 366223 - protein, 315 aa, unidentified
MRSTVAQSVGVDISKDTLDVAIHPGGESFRITNNPEGHRALIKRLKGFDIARIVFEATGAYHRLFQQAMVEVGLPWVKVNPCQARRFAQATGKLAKTDRCDALMLARMGAVLELETRAPASKTVEALRELVNARDALIKDRVAALNRQAIAVSPLIKRQLAQRLRQIDGQIEAIDRRLKTLRNADSDLCQRFDILTSIPGIGEVTANVLVVETPELGRLEHAQAASLVGLAPVPRDSGQTHGKRSIRGGRPRARQALYMPALNAIRLNPEFKAKYEAMVKAGKPAKVAIVAIMRKLLILANALIRDRRKWAPANP

SEQ ID NO: 366224 - protein, 387 aa, unidentified
MYYIGIDISKFKHDCAVIDDAGDVVTPSWSFANDHEGFLQFKALLDSLSAETRIGLESTGHYGMNLKLFLESDGFSFMEFNPLLINRFVKSKSLRKTKTDAIDCEMIARYLMTVEYKPYPPSFYHTEKLKSLTRFRDSLIRQRSRQLVELTNILDKVFPEFKPFFGGKFSVTALHILADYSSPEKIANMNSRSYEPLRRLSRGRFSTTDFAKLKLLAKNTIGHSSDFLLQEMDIVLEIYSQLDSKVDETERLIRECVSEINPPLLSVPGIGVDTAAVILAEFGDFSKFDNPSQLLSFAGMEPGYFQSGTSESTGKMVKHGSSYLRYALMNCTQTVINYEPTFAEYYAKKRAEGKPYRVALTHTAKKLIRVIFTLQTKNIAYDPNSVR

SEQ ID NO: 366225 - protein, 309 aa, unidentified
MFIGIDVSKTKLDVAVRPSGERWSVSNEEKGVSQLCQRLQSLSPQMVVLEATGGLELPVASALAVAKLPVAVVNPRQVRHFAKALNRLAKTDAIDADVIAQFAEAVKPELRPIADADMQRFSELLTRRRQLVEMLVSEKNRLAVATTKPVKQRISYHLHFLKEELKSLDQELEKEIRASPLWREKDDLLQSVPGVGPVVSRVLIGELPELGSLTGKEIAALVGVAPFNHDSGKLRGQRHIFGGRAYVRTTLYMAAVCGTRWNPVLKRFYAKLLAAGKPAAVALTACIRKLLVILNAMVRDQRPWAPEVA

SEQ ID NO: 366226 - protein, 318 aa, unidentified
MTNKTYHFNIGVDIAKQKFDVSFDDQRMASFENNLDGFKRLLKELKNKSETRVVMEATGGYEKPLAQFLQSQGIAVSIVNAKRVRDYAKALGRLAKNDRLDAEVIRLFAEAVNPQVMATASATQQALDALVHRRDQLVKQRAMEKQHLETVGNKEAVRSIKRTIDYLDKEIKRIEQAIKALIDAEPALTEKVERLSAVKGIGDISALTLIADLPELGRITNKEISALVGVAPFCRDSGTLKGKRTTWGGRAQVRSILYMAALSAVQFNPPIKAFYSRLVKNGKTKKVALVASMRKLLITLNSMLRNNTEWNPEHGNLA

SEQ ID NO: 366227 - protein, 359 aa, unidentified
MAIKVQRNKINFKGKMISIGIDMHKRSWRITALAEGDIVMSITLARPNYDSFRKILSHFEGNYVRIVYEAGPGGFDLYDRLTADGIECIVTPPSLIPTESGNKVKTDKKDSYKLAKLLANNMLKKVWVLTPKERAQRQLVRTRRQIVNHRSDVMRQIKSLLLFNSIEIPFPHRQQWTGSFITWLHELDLKDEYLNTSLKALVHLFDYLSSEKKRLTHAVIHLAREEKYASRVKLLKSIPGIGALSAMEILVEIQDMGRFETADELAAYLGLTPSQYSSGEHIRMGHITHMGNSRVRTALIESSWILITKDQDMREKYENIKYRRGGKRAIVAAARTLSARIRRMLLDQVPYEIGFQKAA

SEQ ID NO: 366228 - protein, 448 aa, unidentified
MSKAATLQVLDEYAAFVDVGSEKLHVSIAGGPPEVFGTVTAELHRLRDWLKERRVRSVAMEATGVYWLPLYSVLEAAGLEVIMVNGKQTRNLPGRKTDMQDCQWGATLHAHGLLRAGFVPPGQVRRLQDYLRLRGDHIGNAAACIQLQQKALERMNVKLHDVISSLAGVSGQRVVEGILAGERDPERLLERCDQSIREKKRSRVIESLRGDWQEQHLFALRQAVESWKHYQRLITACDQEIEKVLREISGPPSQPQETIRSWRKPGVNAPNIENLHCLLVRWCGGKDVTVLPAHTDYSWLQLLGEVGTDLSAWATEKHFTAWAGLAPGSHQSGKYKRSTGRKRNRTGRIFCVMARSLARSKHLALGGFYRRMAARRGGLLANVALARKLAAWFWRLMVHGASYVEQGLAKYEEQVLETKRRALARLARQLGHMVIPNIPQKEAPATGP

SEQ ID NO: 366229 - protein, 384 aa, unidentified
MFAGIDIASERHVLARLDDAGAAIGKPITISEDRAGYDALLAALGRAPVLIVMEATGHYWKNLFVVLTTAGHDVALLNPLIARRFQETNLARTKTDALDATGLARLAFEKRPAPTHLHDEIAETLRELVRHRDRLRQDFDDRVRQLHRLVDLGFPEFTRYVRSLDSMLATCLLAEYPTAHAFARATPRRLARLRYDGRHFVGPELAHSLVEAAKHSVGQHHGPAYKLQARHICQDLDTWRKRLAEIEHDIENLLNTHVTGKLITSIDGIGPQTAARIIAATGDPAHFKSAGAFAAFVGVVPALRQSGKQKGARAGIGNLGHARLRRALWMPVLSAVRLNPWLRAFYLRLRAAGKPPKLAIIAAMRKLLHAVYSVAKNRRPFVTT

SEQ ID NO: 366230 - protein, 373 aa, unidentified
MKYSTVYVGMDVHKESFSLCCFTNEKEQAEYPQKVDGHYSKVINYLEAMRFHYGDDALFICGYEAGCLGFTLYRQLTDHNVKCVILAPTTMLQQKGKKKVKTDKRDAALIARCLAHHDYSPVHIPTEQDEQTKEYIRMRDDHKLALKKVKQQILSFCLRHNYRFDGTANHWTQAHLRWLRSLKPEGLYAEILQEYLLTYDNLTDKLERFDNRIEELASNETYQENVHKLSCFMGVKTVTALAVLTEVGDFKRFASAQHFASYIGLTPGEDSSGDDQNRLGITKAGNRHVRSLLVEAAQSYSRGQIGFKSKALKTRQDGNPPEVIAYADKANERLRRKYYRMVLKNNKKTNVAKTAVARELACFMWGMITDNIA

SEQ ID NO: 366231 - protein, 330 aa, unidentified
MPDVAGIDVAARKLDVARLSDTGSAQLRQFEQSPAGHRELVAYLRKHQVEAVVMEATGIYYLDAAVALHNAGIPVSVINPRAAHHFAKVMLQDSKTDRIDARLLAEYARRMTLKPWQAPKEDWLALRDIARRINQLTGMRTAEKNRLHALQAQQHTRKTMIDELVAHIEQLEHSIERLTKVAVDVIDQDPALARYDACLISTTGIARASAVALLGELCLLPQELRSNQVSRQAGLDVRLTESGSSIDRPGRLSKVGNAYLRAALHMPSLSLVRHDPRAKAHYEALIARGKKKMQALCAVQRKMLTGLWACMHANEPFDSTKLFAIKPKEA

SEQ ID NO: 366232 - protein, 337 aa, unidentified
MSVYVGIDVHRKRSQVAVVTGDGTVELNKNVVNGSEPMLRLIGNLPPGTPVAFEAAFGWGWLAALLEDYGFEAHLVHPLRCKAIASARLKNDKVDAATLAQLLRADLLPEAWIAPPAVRQLRALLRHRAGLVRLGTQQRNRIHAVVADFGFDRSGSYLSGPGRGWLAGLDLPPVSREVVADCLAVIDGLAPVIDRIDGELRQHAKADPRVKTLTTLPGVGQFTALVMVAEIGDISRFGSARKLASWAGLTPTVRGSDLTVRHGHISKQGSAWLRWVLNQAAQTAKRSPEFAATYAAIAKRRGKKIATIAIARKLLTRAWHLLAELQAADASTPPRRP

SEQ ID NO: 366233 - protein, 391 aa, unidentified
MIYVGIDVAKDKHDCFITNSYGEVLFKSFTIPNNRDGFETLFQKVQSVSDDLTKVKVGLEATGHYSYNLLGFLLNKGLTTFVINPLHTNLYRKSLSLRQTKTDKADARTIASMLMSDMNLKSYSDTSYHNEELKSLTRYRFDKVQERAKLKTSISRLVNILFPELEKLVPSLHMVSIYALLAEFPSSAQIASCHLTRLTNLLANASKGHYNKEKAIEIRNAAKHSIGSNMPAKSLELKHTIRLIQELTSEIDEIECFIKSIMDEIRSPILSIPGINYRMGAMIIAEIGDFNRFSSPDKILAYAGLSPSTYQSGQLDGCYSHMEKRGSRYLRYALFNATKFVCIWDNQFSAYLAKKRSEGKHYNVAISHAAKKLVRVIYQLEKSGQLYHRAA

SEQ ID NO: 366234 - protein, 354 aa, unidentified
MRIIGCDFHSRYQQIAMLDTETGEVVERRLEHENGEARAFYASLPRPVRVGIEATGYTQWFERLLQELRHELWVGDAAEIRARAVRKQKYDQRDAQHILGLMEQNNFPRIWMPSLSERDLRQLLIHRVRLVQWRTRIQNQLHAVAMGQGLCRKKKLWTRSGRQELESLPLDRWASRRRRELLELYDRLNQPIEELNQAVQREAHGNASAVRLMTHPGVGPMTSLAFVLTMGPASRFARGKKVASYLGLNPSENSSGGHRRTGAISKQGSSLLRWLLVEAGQTAARRDADLHRMYQRVKYRRGSQIAKVAVARKLAVRLYWMLRNQSDYAPGKSAAVPMPGSSGSAVMSGSASGR

SEQ ID NO: 366235 - protein, 340 aa, unidentified
MNITTLGIDIAKSVFHLHGTNKQGKLELKKRLRREQLLTFMKNFPPCLVAMEACGGAHYWARKFQSYGHTVKLIAPQYVKPYVKTNKNDYNDAEAINEAVGRPTMRFVGIKALWQQDIQSLHRARSRLMQLRNTLSSHTRGLLMEYGIVVPRQIGQLRQKLPLILADADNELSTDMRALFAGLYEQLQNADRLISEKDKQILAIHRESELSQRLGEIEGIGPLTATAFISAVGDAKMFKRGRDCSAWLGLVPRQYSTGGKTILGSISKRGDRYLRTNLIHGARSVIAKASNKTDARSRWIQQLKSRVGMNKACVALANKNARILWAVMASGERYRASKQL

SEQ ID NO: 366236 - protein, 399 aa, unidentified
MLSLQYQEVVTCLLKILKFNCCGLDVHKTWIYACIGITDSNNRTEYKQARFSSFTKGLNELCDWLAKYNCKDVCMESTGKYWIPVFNILEQHSFWVTLSHPKYTKPMKGNKTDRKDAKWICDLYMCGMVKPSFIPPADIRELRDLVRYRFKLTCMITGEKNRAQNCLTVSNLKLDDVFSDVFGKSSRSITEHILQHPGEKFDIAPFVHGLCKTPIEEIQAAVDGAISKEQAVKLRQCLDHIDELHKHISEVEQEILRLSDKYEAALNLIRTVPGFNKNPLTAIQVLSEIGGDMSVFPTAKHLVSWAGCCPRNDQSNQKIKSTRISRAGSYFKPVLVQVANALIKSKKHSEFTSRYKRIKARRGHKKAIIAICRMILTAIWHILSDLKPYTPKVFLNLVL

SEQ ID NO: 366237 - protein, 324 aa, unidentified
MRIIGCDLHARQQTVAMLDRTTGEVANLTLMHEGDQVREFYSRLPQPVLVGIEAGGTMPWFLKLMEELGIECRVGHPAQIRAAEPRKQKHDRRDAELILKLLAENRFPAIWLPSKELLDLRALLLHRHQWVRMRTRIQNALQAIALANGLRRGHSLWSNDGQEKIALLPLMPHTAYRRSTLQTMYQKIESQIEELTEQVAKQAESRSAARRLMTHPGVGPVTALATEVFLGDPRRFPDGKALASYVGIIPREYSSGGQQRLGGVTKQGSPLLRFLWGEAGAHAVRRDPELKRFYRRKLVQIALAPGDFCAKRTGVRKKDKKRLL

SEQ ID NO: 366238 - protein, 464 aa, unidentified
MTEKKLWRNRKERKEWGRRLQSEDPGLEVVHSHAAGIDVGNGMHYVAVRPDRDPQPVRRFECFTADLHCLAEWLQRCGVKTVAMQSTGVYWIPIYEILEERGIQVYLVNARHTKNLPGRKSDVQESQWLLKLHTYGLLNNSFQPPSEIRVLRTYWRQRAEHVHGAATCVQRMQKALTQMNVQLANVISDVSGLTGQAIIRSIIAGEHDPRKLAELSDPRIHASREEVAKSLEGHWRPELLFVLQQEVVMYDTYQQRIAECDQQLQKHLASFADIIPLLPTAEEPKRKKSKPAKNAPRFELRSELQRIAGVDLTRIDGIDVMVAQTLISEVGLEMSRWKTEAHFSSWLGLCPDNRTSGDKVLARGTRRVVNRAATALRMAAVTLMRSRTYLGAQYRRLRTKLGAPKAITAMAHRLARLVYRMLKYGQHYVDKGAEYYEHRYRRQQIEFLRKKATKLGLQITLAQT

SEQ ID NO: 366239 - protein, 408 aa, unidentified
MRVIGMDIHRAFAEVVALEGKTRRRLGRVDMRRDQLEAFAKVLTKEDTVVVEATGNAASVAEVLAPHVGRVVIANPKQVRVIAHAKIKTDAIDAGVLAQLYASGYLPEVWIPDGATQALRRQVTRRNQIVRQRTRLKNIIQSILHAHLIPACPATNMFGRKGRAWLSAQHLPDDERLAMERHIREIDRLGEDLKVIQRELAQRALADASAKRLMTIPGVDMNVAMAVLAAIGDIKRFASPQKLVSYLGLNPSVRQSGSGPAYHGRITKQGPGRARGMLVEAAWAAARAPGALRPFFLRIRSRRGQHVAAVATARKLAVLVWHLLSKDQDYRWVRPALHATKLRRLELTAGHAPARGQRGRAYYYNIKATRVQERRRVEQAEKQYERFVAGWNPHGAKVRTSAAKEERR

SEQ ID NO: 366240 - protein, 342 aa, unidentified
MTQFLSFVGVDIASASFMSCVGAAPWKVTVKPAKFENVEDGFISFLGWLKEHNLMPETTVVCMEATGVYSEGLAYFLYASDYTVAVEPPLNIQRKFPVNGSKTDELDCQYIAEYACRYVDKLSLWKPRAEILEQVKLLLTTRQHVTVQLTGHKNALHAVNRKKVSSALAKQVHQNMIEQITKHIKSIDQEIRRLIESDPTFKQTLLLLLSVPGIGLQLAAHLLIVMQDTLDPRVLAAFIGICPIQHRSGTSLNLPPTSRHYGPPILRKLLYLAACSVRTHSKQFQQYFFRKVAEGKHKKLVLNNIQNKILKIACAVVTSQKPFIPNYISVNPLVFQKTLTPS

SEQ ID NO: 366241 - protein, 357 aa, unidentified
MRQQNYKKDFNGQNIFVGIDVHLKTWSVSVALPGGYLKTHTQKASAKELFEHLNKNYPNGTYHAVYESGFSGFSTCYALRDLGVDCIVVHAADVPTTQKEKITKSDPTDSRKLARSLMSGELDGIYIHSKDNLDDRGLLRHRAMLLKLMGGIKSRIKHLLYNNGVSYPEEFEQKSKHWSRRFISWLQYDVQLLSETRVTMDLLIEELLYFRTCILNVDKKIRTLANTDRYREKFENLISVPGIGAIVSMCLLTEIDNVWRFSNQRQFASFLGLVPVMQASGDNCYIGEKTFRGNKILGPKIIEASWITIRYDSELAAKFGHLCNKGMRRNKAIIRIARKLSNVIFTILRENRKYVCR

SEQ ID NO: 366242 - protein, 373 aa, unidentified
MEHTITIVGLDVHKNSIEIVTAETAGKQEVRHYGTIGGDMTSLDKAIRKLRSVRSNGAELHFVYEAGPCGYEIYRHLTKQKFQCVVVAPSMIPKKSGNRIKNDHRDAENLARLERAGELTKIYVPQEEDEAMRDLTRSREDAVKAQRVARQLLGAFLLRHGHRYPGKESWTPAHMRWLSDITIPHPAQQITLQEYIHTIAESTGRVTRLTDQIEKLLPQWHMEPVVKALQALRGVAPVVATTSVAEIGDINRFEKPKQLMTYLGLIPSEHSSGESIKRGGITKTGNGHVRRALVEAAQAYSFPARVSRHLLKRQEGLPQSVREIAWKAQVRLCGRFRRLMARGKQRNKVVTAIARELAGFMWAIAKEVQAPGI

SEQ ID NO: 366243 - protein, 389 aa, unidentified
MVNDRIKQGKSFRISNDSFGYQKLYEQLNQYLITPLVVFEATGVYSLSLQAFLEDYHIKYLKLNPLKAKKLMDNNLRHNKTDKVDAYRLALIQFNAPQKLRDPQPREYHELQNASRYYEELTRSIVTTKNQLHRNLQSTFPQIEEILSHPSGRIYWALVSLFPHAGYVLEKNETQVTQMLNSISGIGQQRARYLTTRLYAFAREAYPYDSKDSIIVRAIQRNISNLFSLQQERDYVINYMEKLAKAVNARALSIYLSIPGVARITAVRLVAELGDLRRFSTSAQIDAFVGIDPGRYQSGEKDSSLGITKHGNHIARKILYRVITQMETVKATQPCHITDYYDKKKRSSNSQGYKKIAIASVHKLIRTMFALIKHDQLYDYNIATENKRL

SEQ ID NO: 366244 - protein, 424 aa, unidentified
MKVTFQTCCGVDVHKSFLVATIIKTTGGIEPSYQKRRFSTFNNSILEFKKWLLENECLYVCMESTGKYWIPVFNLLEDEINVTIANPKWVKAVKGNKDDTKDSKWIGDLFRLGLVRGSYIPCKKIRILREFTRYRYKLVSCRSSEKNRYQNALTVCNVALDSVVSDVFGKSSTSIIDYLLEQSGTSIDHEVIASKLLKRLKAKEDAVIESIEGYQMTDSQKYRMHLVRAHMDYITAAINDVDSEIESLIASDPDYENAVELLCTIPGVKYDSAITIISEIGIDMSQFCSSKRLCCWAGLTPGSNESAGKKKSVRITRAGVYLKPALVQCAHAAVKSDKSPYYKKKYESLVKRRGKKRAIIAIARMILTAIFQMLTTGETWNPCDLYKIDMPEALLEKQKQKAIKQAQKLLIREGLLPPTEPIAS

SEQ ID NO: 366245 - protein, 384 aa, unidentified
MQASTVDTPTAGHCGTIFVAIELSQKSWLVTLHSPDRDRISRHKIEGGDHAGLLTLIERMRERAARTLGAVPAVVSCYEAGYDGFWLHRLLLAAGITNYVFDPSSIAVDQRARRVKTDRIDGERMLRTLMAYLRGEPRVVRIVRVPSVEQEDARRASRERGRLTKEQTAHTTRIKALLRLLGMAVGNPRRRDWLTWLVKQRDWQGQAVPPQIMAEIKREHARLMLVREQLDALAQAAADLTPAAAQMAQRSELLLRLKSLGPAFATTLTSEVFYKDFRNRREVASYFGLTPSPWQSGGIDRDQGISKAGNPRARCAAIEMAWLWLRHQPDSNLTQEYRRRTLNASKRIKRVAIVALARKLIVALWRYLTTGLVPEGAMLKTAEV

SEQ ID NO: 366246 - protein, 412 aa, unidentified
MEVLHRHCAGLDVHKDTVVACVRHMVDGTGKREVRTFKTTTKDLVALSEWLSAEDCTHVAMEATGIYWKPVWHILADGEFTLVLANAAHVKNVPGRKTDVNDATWLADLMAHGLIRGSFVPDEPTQEMRNFLRTRKQFVRERSSYVQRIQKTLEDANIKLDSVITDIMGLSGRRMIEALIAGETDPFALAVLAHRRIRASQAELEAALRGRVTDHHRFMLRLLLQHIDAIEAAIGQIDQEVDAHVEPFRTAIEILSSIPGISDLSAGVIVAEIGIDMNRFPTEGHLISWAGLCPRNDESAGKRRSTRMRKGAPWLKTTLIQCAWAAARTKGSYLQAQFQRLRARRGAKKAIGAVAASVLTAAYHMLKNGTLYQDLGAHHFDSRAKGKQVLRLVSRIQNLGFAVQITPIGAAA

SEQ ID NO: 366247 - protein, 319 aa, unidentified
MGTVMNQTSSSVYIGIDVSGTTLDVAIHDTTEHFRVDNEPTAIEQLVQRLLALNPTLIVMEATGKLELAVLRALCEAGLPAVAVNPRQVRDFARATGSRAKTDRIDAFAIAHFAAVLKPVVRPLTDVQTEQLQALLLRRAQLVDMLVAEKARLERAHAAARDSLNDHIRWLKQQIKVADNDIDSFLRSSPAWRQKEDLLRSVPGIGPGAAATLIAFMPQLGSLNRREIAALTGVAPFNSDSGKHIGRRRIQGGRAVVRRALYMACVPALRFNPTIRAFYDRLRKAGKPFKVAITACIRKLVVTLNAMVHNATRWSPSAN

SEQ ID NO: 366248 - protein, 309 aa, unidentified
MEHFVGIDVAKDRLDVHLRPSQETFAVARDGEGLAQLVDRLQTLAPQLVVMEATGGYETIVASAVVAARLPLAVVNPRQIRDFARATGKLAKTDRIDAAAIAHFAEAVRPPVRPIADAEAQALGELVARRRQVIEMMVAERNRRRRVTQSRVRRAIDRHLELLQTELSELEHDIDGAIRKSPAWQADADLLASVPGVGKATLRTLIAELPELGRLDRRKIAALVGVAPINRDSGTMRGRRSIAGGRPTVRTALFMAALVASRANPIIAPYYVKLRAAGKTGKQALTACMRKLIVILNAILRDRKPWQPA

SEQ ID NO: 366249 - protein, 369 aa, unidentified
MNTTTFVGLDVHARSIKAVALDAMTGEVRSATFAYDAAAVAEWVRSLDPAAKCVYESGVTGFDLQKRLAALGVDCVVGAVSKMIKPSADRKRKNDRNDAEFLARMLSVGNVVEVWVPDDGCEAARDLVRALDDAREDLKRRKQRLSKFLLRHGYAFSETTPTGRRKGSWTAAHWAWIKSISFPEKADDDVLAYYVDAVRQAMEDKKRLEKLVEAEASKPRWKRRVDSVRCLKGIDVTSAADLVFEAGEFSRFKSARSFAAWLGLTPSEHSSGESVRQGGITKAGNKHLRRVLVESAWHYLGCSPHSKDLAKGQVPDPAARRHAAKGVRRLVERRRAMLERGVHKNKANVATARELACWCWAVGRMVEGA

SEQ ID NO: 366250 - protein, 313 aa, unidentified
MHYLYYVGLDVSKETFDASLVAFEDANEMAHRKFANSRKGICSCLHWVEKRHGIRLDDVIFCAEDMGSYISEMAVCASDRTLNFNFSLISPLVIKYSMGIARGKTDRVDARRIAEYAITHYRKIALYLPAEKELCQLRTWLILRAYLAKQRVAKLVLLEKLDYKEKFADVSIQRSMLQEEIAYAETHMKTIEREMKELIAADSNICRNYKLLTSIKGVGPITAIVMLCSTLNFTKITDHRKFACYCGLAPFEHSSGTSVRGGCHTSSMANRDIKVQLNRSALIAIVLNAVRAKIAARCFAVVRRGTPYVALQI

SEQ ID NO: 366251 - protein, 332 aa, unidentified
MLGIDVAKDTLVCTQVDPITRKTCWSGQVPNTPAGLTQLLARTPESCPWVLEPTGRYSSLAVRLAQAERRQVLLAPPKRAKAFLASLQDRAKTDRLDSRGLALYALSQPLRPFLLRSEAVEQLQQLLRARKGLAKALTSLQLQRKELPHAAGALDPAIASLKAQKEALDAQIAELVSDTRAFPAVAELDRVPGIGPLTAASVAACLQSKEFAHPDQFVAYLGLDIGVRQSGKRQGQVGLTRQGDAELRRLLFLAAMSNVQAKESPFRLQYERERAKGLSGTAAACAVARKLAKVCWSLVKHSGKYDAARVHQQPKRAPAAAPPTAGAAPLEN

SEQ ID NO: 366252 - protein, 342 aa, unidentified
MTYYAGIDVSLEYSSVCVVDGAGKIIREQRIASEPEALIAWFRGLGFGLERIGLEAGPMSQWLHAAMRTADLAVELLETRHVRDAFKAMPVKSDRNDARGIAQLMRLGWFRPVHCKSMAAQEMRALLTARKLVQSKLLDVQMSLRGLLRGFGLKVGATTPSRFAGRIRDLVEGNATLEVIAAALLAVHETLRRELAGFEKRVRSIARSDGRVRLLMSTPGVGAIVALTYVAAIDDPARFKSSKGVGAHFGLTPKKYQSGETDITGRISKIGDEGVRTALYEAGHIILTQPLKGCTALKSWAMRLAKRAGMKKAKVALARKLAVIMHRMLVDGTLFASAAVAA

SEQ ID NO: 366253 - protein, 366 aa, unidentified
MKKTSTVRVNGNMIFKGQKLTLGMDLGDHWSCYCVLDEAGEILLEQKVATTPEAMKQVFAKIPQSLIAMETGTHSPWVSRLLTELGHKVIVAHAQKVQLITKSNRKDDRHDARTLARLARIDAELLGPVRHRSAQAQIHLTVIRARAELVRARTALVNAARGLVKSYGQRLPKCGTQQVNRELAAGLHAELREVLEPLLQEIESLNERIQEYEVRMEKIAKESYPHVELLKQVKGVGTQIALTYVLTLDDPHRFPKSREVGCFLGLCPGRRDSGESQPQMNISKEGDRYLRTMLVQGAHYILGPFGADSDLRRWGLKLAARGGKSAKKRAVVAVARKLAVLLHRLWVSGEVYEPLRNSQKAMRAVA

SEQ ID NO: 366254 - protein, 401 aa, unidentified
MESPIVSIDVSNGNSHYMCFIKNNKRFGKVKKIDHDIEGFKRLLEDIQKLEAETNEKVCAVFEATGVYTKPLERFLSKNSIKTYIINPLESARKRKEEIHNKKTDKLDPISISKVYYDKEDMMELKKKDESYNWLRKKNRLYEDQLNHLRKYKVTFQNQLSICFPGYLDLFRDGYSDIPMTILKKYPHPDLLKNKKAETVARYLEKNTCHTHKISLEYALKIIEFAKKTYPGCEKDDVEVEIFKILLDKVIETQRECEKTLNEMITVASTLEEYRYISSIDGIGPNLAARIIAEIGDIEEFKSREALVAYAGLDPHIYQSGDQDGKHLKISKKGNKYLRCLLFLAVGCSIRGAKDNPVNRFYQKKKQQSNPLNSKAAKTACTAKLLKIIYGICKNKTTYER

SEQ ID NO: 366255 - protein, 357 aa, unidentified
MGFARANVMRKDKCLGRSSHLMSAYIGLDVYKDWTFAIVLDQSGRVVVRRKLENEDVPSFLENFNVEKIGLESSTYVVPLYRALVDRGFRVEVGHPKKTRYIAEARIKSDRVDSKAIAELVRLEALPQSYMPPPDIAALREKVRRRAFLVRQRAKLMAKIRVVLAYEGLKPPEGLGLFTRKGVDWLESLGLEPVSCYLRLIMAFNGEIHRLSLDLRRLAGLDEDVRLLMTIPGIGYYTALLVKAETGDVNRFSNGEHYCSFIGIVPSTYSSGGVTRHGGITREGNPWLRWALFEAAMTHVKYDTSISRSYHRIAERRGGKVALVATARRLALCCYSVLKNRRPYRAFPHGQALHDSS

SEQ ID NO: 366256 - protein, 323 aa, unidentified
MSQPNLQCMGIDVAKLSLDIATTDTIEPFTVGNDEDGFAVITDKLKHTKINLILMEATGGLEAAIACKLQPEGYDVVVINPRQARDFARSMGYLAKTDKLDAAMLAQLALVIDRHPDRSRYIRHLPDEARAVLAAMVVRRRQLNHMLVAERNRLYPSHPQSRKSIDNIIDALQNELDRINEQMKQHMTAFFQEQARLIGSVKGVGDITVASLIAELPEQGKLNRREISALTGVAPLNRDSGKMRGKRTTFGGRAGVRATLNMAALVATQFNPAIKLFYQRLLAAGKPKKLALVACMRKLITILNTMLRKGEEWNASFQSQVIS

SEQ ID NO: 366257 - protein, 421 aa, unidentified
MNQFSGEPYKAYIGIDWASTKHDICLQVAGCEERLFDRIKHTPEAIEVWAQALHQRLGGPIAVALELSEGPIVSALEKYDFLVLFPIDPKRLAKYREAFVPSGAKDDPTDAEFAMDYLMRHPEKLKALKLESAAMRKLRYLVEARDRIKGDQSRCVNRVIQALKQYYPQAVDWFNDHNTLIFCDFLKQWPTLATVQRARKARLERFFKEHNVRFARLIENRIQAIKAATPLTHDEAVIEAHRLQVEILVEQLRLTIKAMKCFDEEIIAIATQFPDYGHLFTPLPGAGKVIAPRLLAAFGEDRDRYNCAAQLQKRSGIAPITKRSGNSTWVHWRFQCPKFLRQTFIDFAAQTINKSAWAGAYYRQQRAKGASHNMAVRALAYKWIRVLYRCWQERTPYDESKYLETLRRRGSPLLKQLAEAA

SEQ ID NO: 366258 - protein, 410 aa, unidentified
MQVLYPCCCGLDIHKKFVVACLLTTNAEGHVQKESRTFSTLTHDLLAMLDWLQAAGCTHVAMESTSSYWRPVYNLWEGQFTLLVGNAYHIKTVPGRKTDVKDAEWIADLLRHGLIRGSFIPTPAQRHLRDLTRYRTHVVEERARLTNRLQMVLEDANVKLASVVTDIRGTSARAILSALVAGETNPTVLADLTLGRRRSKRAILAQAVAGRFTPHHAFLLTEHLSQLDYLEEAVERVSAEITQRLADDQAALELRDTIPGVGRRAAEIILAEVGTDLARFPTAKHLASWAGICPGHKESGGKRLSGKTRNGNIWLRHVFFEVAHAASKTQDTYLSAQYRRLAARRGKQRALIALGHSILVSAYHILTRRVPYRELGPLYFDVLDRQWVQQRLVQRLERLGYTVNLQLIAA

SEQ ID NO: 366259 - protein, 349 aa, unidentified
MSQTAQTAVAVIGIDIGKNSFHIVGHDERGAIVLRQKWSRGPVEARFANLPPCLIGMEACVGAHHLSRKLNGLGHDARLMPAKYVRPYSKGQKDDFRDAEAIAEAVQRPTMKFVATKTADQLDLQALHRVRERLVSQRTGIINQIRAFLLERGIAVRQGQRFLRAELPRILATPPDVLSPRMARVIEDLAGDWRRLDERIESLSSEIEAVARQDAGCERLMSVPGIGPIISSAMVAAIGAGDAFTKGRDFAAWLGLVPRQMSTGDRTILGKISKRGNRYLRVLFVQAAWAVLIKPKSWERHGLKPWIEAAKKRLHHNVLAIALANKLARIAWSVLAHGQNFEVSKIQTA

SEQ ID NO: 366260 - protein, 317 aa, unidentified
MKLYTNYIGIDIGKYSFLVACYGTKKTYEYENTPSGIKSFLNDFKNKLKTALCILETTGGYEQRLLFTLCEAGIATHRANTCKVKRFIQSYGNDAKTDKLDAHALALYGYERGQRLERYQLPSKKALELFELIQRRNDLKQILVAEKNRLKGPRVERIKTSCEQIINALEEQLLVMTNEINSLIDEDELLKAKKAILMTVPGIGAIVANELLILLPELGTLTRRKIASLAGVAPKANDSGLFSGYRRVSYGRSGVKSMLFMAAMAARRSNSSLKTFFNQLISAGKKKMVALTALMRKIIVIANARVRDAGTKLNVSN

SEQ ID NO: 366261 - protein, 384 aa, unidentified
MRSVCGLDVHKDSVYLCILSEDGELIEKVFGVLTFQLHQMRDLLLAHHVEEVSMESTSVYWIPIWRILAPHFHLQLVNPYFIKQLPGHKSDVADAQWIAECTMKNLISSSFVPPEDIQQLRQYDRRIFDLDEEIVRKLSKLDAVMQRCNIRLSNYVSNVDSKSYKDVVRKISEGVTDPEILIEEIHGRIIKHHGRETILASLTGVISQAEIDVLRQLREELDLAEEHKQECLERMLEICQEKYPDELRRLQTIPGVKERTATSLIAEIGTDMSKFETANHLAAWSGLRPRNDESNRKFKSRRITHGNVYLRKNIIQCAWAASRTKNCFFSRFSYHQTQVRKKNKMKVIVAVARKLLVAAWHVIHDKTDYVDFQKQDRQSPASNG

SEQ ID NO: 366262 - protein, 421 aa, unidentified
MSETRKFFAGVDWASQKHDVWLTDGTGERLGLRNFSHGGEGLKQLCDWLIAASEARPEDIHIAIEVPHGPVVETLLERGFHVYAINPKQLDRFRDRFTMAGAKDDSRDAETMASSLRTDMRAFRRLGLSDAIIIELREWSRMAEDLTGEKTRLANRIREQLWRYYPQMIELAGDVSANWVLDLWDAVPTPAKAVRVREKTVARILKSHRIRRIDAAGALAILRQEALTVAPGTTEAATAHIATLRERLALVNRQLRQAHAELDRINNQLCEPLPAKEGETEPGQIAEQRDAAILVTLPGVGRITLATLLAEAPDALQRRDYHALRCLSGTAPVTRRFGKSRIVVRRLACHPRLRNALYHWARTAVQHDKRSRIKYDALRSRGHSHTRALRTVGDRLLKIACSMLKSGTMYNPSLAAQNIAC

SEQ ID NO: 366263 - protein, 328 aa, unidentified
MTDQYIGIDLHKAFFQACAVTATGERIWEERFPRTPAGIAALTARCTATTAVAVEASTPTWHFADAVTASVGDLRVVDPWKTKLKAGYAAKTDRLDARRLADALRRDSVVGIYYPPLAIRELRELCRARHALVQTRTALVNRVRALLLRQGLAEARRLAKSADDRWLETLPLPPRAAASVRTLRGVLAVVRTEIARAEEEVRHLSATDPVAQGLQALRGIGPLLALTIRAEIGTIARFPTGAHLASFAGLVPRVEASAGRVRYGRITKQGSPWLRWALIEAAMHGTTRTDRVGRWGRGLAMRKGALKARVALARVLCEEIHRHWSRIA

SEQ ID NO: 366264 - protein, 359 aa, unidentified
MGLDVHKDSIDIAVADEVGEVRHHGQIGGDMNALWRAVRKLESQGRELVFVYEAGPCGFGVYRGLIGRGHACWVVAPSNTPRRVRDRIKTDRRDSLKLAGLARAGELTPIYVPDVRDEAMRDLVRTREDAVVMQRQARQRLAALLLRNDVRYAGKTAWSAAHRRWIAELKLPQSAQRLAFEEYVQAVEEASARVQRLGQCIEQELATWRWRSVVAALQACRGIQVIHAVRIVAELGDLSRFSHPRRLMAYLGLIPSEDSSGEHRHQGAITKAGNSSARRALVEAAWAYQYTAKVSALIARRQADVPKAALDIAWKAQVRLCARFRRLAARRVNRNKIVVAIARELAGFVWSIAQQVKPI

SEQ ID NO: 366265 - protein, 414 aa, unidentified
MDVVHPRCAGVDVSKRDAKVCVRIADAGRLKAKSTVTTWGSVTNQVLALRDHLIAEQVTLVVMEATSDYWKPFYYLLEDGPFDVMLVNARHVKNLPGRKTDVSDAAWLADLGAHGLVRGSFVPPEPIRQLRDLTRTRTAITRDRAREIQRLEKLLEDAGIKLSSVASDITGVSGRAMLAALIAGERDPAQLADLAKRRMRSKIPELTEALTGRFGAHHAFLARLHLDLIDQHTAAIDGLTARIEVMIEPFRGARDLIVTIPGISTGVADVIIAETGADMTRFPSAGHLASWAGTTPGSNESAGRIKSTHTRPGNPYLKGALGVAAMSAARSKGTYYSAKYRRIAARRGPVRAIVAVEHAMLIAIWNMLSTGTLYCDPGDDFYTRLNPDKAKNRALDQLRKMGYDVTLNPQAATG

SEQ ID NO: 366266 - protein, 473 aa, unidentified
MAVRNRKPVCVGLDVHRNNVWACVTFKDPAKGKDGLVFVTKKFDSNHSDLASMCEWIYTTLPDLEDRPIDVYMESTGKYSTPVFDVCEEMGLKPHIVNPKHVRTIAGQKTDQKDCAWIAELGANGLLRESYIPVRELRESRRLSRSRTKLVQERGDTIRRIRNILTEANIRMDLVFSGIEGESARSVIEYLLTTEEPDLEEVKKRIRKSCRIMRFSTHKERKEKEEELRKAFAGAKFSSVQKFELENAYERVDRLTAQIQRYEQMMTEILEPFKSYLDLLDSIPGISGLSAMQILSETGTDMGQFKNEKHFISWCGLCPQSNQSNNKHKSVKIGKGGYYLKPVLIQCALNAVKHPYFKGKYEAIAARRGKKRALIAIARKMMVLAYHMFQTGEYFQERKKQIPAVLEKEQSEREQSMETSAEETDAPAIIRTAKEIVEMLQNTDDEMKHKIEQLLAQIGIAQCEYQTGAISTI

SEQ ID NO: 366267 - protein, 392 aa, unidentified
MVVSVGIDVSKDKHDCFIVSSEDEVLADVFTIPNNMDGFRFLLQRIQDCTHAQDKIKVGLEATGHYSYNLLGFLLDNGLTTYVLNPLRTNLYRKSLSLRKTKTDRVDARTIASMLLSDVGLKPYTDTAYHNEELKSLTRYRFDKVKERAKLKSSIARLVCILFPELEKLVPTLHMVSVYALLEEFPGAKQIAAAHLTRLKALLQTTSKGRYKRDMALEIRGAARNSIGFPMPAKSLELQHTIRHIRELDNEIAEIEEQIQAIMDELNSPITTIPGLGFRMAAMILAEVGDFTRFDSPDKLLAYAGMSPSTYQSGQLKNCYPHMEKRGSRYLRYAIYNATKYVCHWEPTFAAYLAKKRAEGKHYNVALSHAAKKLVRLIFAMEKSRQPYCLAA

SEQ ID NO: 366268 - protein, 355 aa, unidentified
MLYLGIDIGKNNHVASLLDEKGKVVFKAFSFSNSTDGANSLLEKISAYSSALEIGMEATGHYWLALYSFLVEQGFVIHVINPIQTDGWRNATEIRKHKTDVIDSVLIADFIRYGEFLETSLVNENVLSLRNLSRFRNYLVSSIGDHKRKTICILDQIFPEYQAVFSNVFGKTSKEILLHLSTPSEFEFITAAQLESVLKEITFKKFAAKKIHKISSVAKTSFGITFGLQSMTLQLRLLIEQMNFIEEQVNEIERQTKTLLEKLNSPITTIPGISTVIGATILGEIGDISRFSNPSKLVAYAGIDASIHQSGNYQSANNKMSKRGSPYLRTALFRAALIASTHDPVFKAYYQKKRL

SEQ ID NO: 366269 - protein, 418 aa, unidentified
MQTEFSQYTAVIGIDWADKKHDVCVQDMATGKRRASQVRHRAEDLDEWARSLHRRFGGPIAIAVELSKGPIINVLQKYDFFVIFPIDPSKLANHRKTFTSSGAKDDPTDAEFALDLLSKHSEHFKPLNPQSVEMRTLMTLVEQRRQLMNDRVRITNRLRSTLKQYYPQPLEWFDHIDTLLFCDFIRRWPALSQVRRARRATLEKFFHEHNMNRKALLERRIKAIKSAMPLTMDDAVIVPHRLRALALVAQLEVTLECIKQYDTEIASLAPQHPDYELFDPLPGAGPVFTPRLMVAFGEQRERFNNAAEVQKYGGLAPVTKRSGQSTWIHWRWQCPTFLRQTFVEWAAQTINKSYWAGLYYHQQRARGCSHQAAVRALAFKWIRILYRCWKTRTPYDETRYLKALQERGSPLLKMAEAA

SEQ ID NO: 366270 - protein, 463 aa, unidentified
MSKRKRIKELSALPKLEALKQINFHAAGIDIGSAEIWVCVPEDRDPQPVRRFETFTADLQAAVKWLKHCDVDTVAMESTSIYWIPIHQMLEAHDIEVYLVNAQEAKNVPGRKTDILDCQWLQQLHTYGLLRASFIPAPELRKLRDLSDHRDNLIRHRATQIQYMQKALHLMNLQLDNVITDITGKTGMAIIRDIVRGQRDPKQLAQHRDPKCKNPPTVIEKSLEGNYDDEHLFQLQQSLELYDVFSQKIVASEKQIEQRYQRFQTKPADHELLPSRKKDSRTKNKMCFDLRTELFRICGVDLTAIDGVNTSVAHTVVAHIGLDMSNWKTEKHFTSWLRLCPKNEKSAGKVLRRSTGKTHNPATLALKQAAQSLHRSQSYLGAYFRKMKAQHGPAKATTAAAHKIARLLYKMLKEQTEFVDLGDDYYIQKHKERALKNLSTRANALGFYLITPEDYQRLIKSVS

SEQ ID NO: 366271 - protein, 342 aa, unidentified
MSEDVGFDVSEEETSFCVKDVSGKILARGKVATDPVALFEVLRAHCVCPERIVLETGTLSGWLSRELGKLGIAVEVIDARQAHAVMKLQHNKTDANDAALLAEIARTGFCRPVCVKSEAAQADRILLKARAHLVGQRRATQNTIRGLLGSLGIRFAKGSGKRAGLVREALEGRDELRATIDPLLRAAAALEREIARLDKAVSGRAKDDPAARLLMTVPGIGPVTALAFAATIGDAERFAKSRTVGAYIGLTSRRWQSGEMDYSGRISKYGDAMLRALLYEAANSLLTVVRKAHPLKDWARRIRKRTSHKKACVTLARKLAVILHRMMITGEPFRWPQKEAAA

SEQ ID NO: 366272 - protein, 309 aa, unidentified
MLSAAGIDISKRYLDCCLQQSNRQFRLSNDLEGVNTLIACLFESAVTRVLIEATGGYEKLLRHELGKVGIEVVCINPRRVRNFAEAMGMEAKTDKIDAQVLAEFAASLKVYKAAPFSVEHDQLSEQIKQRDRFVQHRDDDKRRCQQSSTPVVIDRYQAHIDFLQAQIKEIESLIARTMKEMDDQTVKRLMAIKGIGLVTASNLVCYLPELGSLSRGKIAKLVGVAPLNRDSGEGSKPRYVRGGRGKIRRVLYMAAWVMVRYDTGFKARYERLRERGKCAKVAIVACMRVLIVRLNAMLRDGTPWRSEVI

SEQ ID NO: 366273 - protein, 401 aa, unidentified
MKKSNPDEVRIETASALGTVMEAGMAKRYGAYVGLDVHKETMSVAVALAGREEPQWRGEMAHTVKAVGKLIERLSKEFDGQVLLFCYEAGPCGYGLYRQIVEAGHECEVVAPSLIPKKAGERVKTDRRDALKLARYLRAGDLTAVWVPDEEQEAMRDLCRARGDMKSQERKAQQQLNAFVLRHGHHWPRGKKRWTVAHFNWLEALTFAHDWQQVVLQEYIEAVKAASARVADMMGQMERVLPQWRLASVVHSLMALRGIDKLSAMTLLAELGDISRFQSPRQLMAYLGLVPAEHSSGARRRQGAITLTGNRHARRTLIESAWSYRFAPRQTAHLKRKAANASQQAKAIGWRAQKRLCGRYRTLTQAGKNTKLVCVAIARELVGFVWDIVRQEMPRLRGAAA

SEQ ID NO: 366274 - protein, 312 aa, unidentified
MFVGIDVAKQELVVAVRPSGDQWTVANTPAGLGALVTRVQALAPRSVVLEATGGYERACAAALATAGVPVAVVNPRQVRDFAKATGQRAKTDRLDAAVLALFAERVSPAIRALPDEAQADLAALLLRRRQLTEMLVAEKNRVGLARAAIRRSLHKHIAYLERELHIADSDLGEAIEASPLWRVQDDLLQSVPGIGPVTAQTLLAELPELGQLSRRAIAALVGVAPIAHDSGAMRGKRAIAGGRAAVRTVLYMATLVATRCNPVIRTHYHHLLAVGKAKKVALVACMRKLLTMLNAMLRDQRRWSPPLTPTRT

SEQ ID NO: 366275 - protein, 355 aa, unidentified
MTQVKSLDFSGQSIYCGIDMHKKNWSVTLRTSDRELRTFSHDPDPGALARMLVRQYPKAHFELAYEAGFSGFWVQKQFESIGLNCRVIHPADLPQPDRDRRYKTDVVDSRRIAFELSKGGLKGIYVPSEESLANRSLVRSRAQLIKDQTRFKNRIISFMDMYGISIPAGYKKCTHFSHRFITWLQEVPLNPSSQMALQTKINVLLSIRQQLLSITRQYRLMAKASSYAATITLLRTIPGIGINSALVLLTEIDDIHRFKSFDHLASLVGLKPDVYSSADKSLVKGITHHCNQLLRETLVECAWMVIGKDPALTQAYYDYKKRMHYNKAIIRIAKKLLSRVRYVMIHQQPYQMGRV

SEQ ID NO: 366276 - protein, 400 aa, unidentified
MNAVGIDVSKGKSTVAVLRPFGEVVTSPFDVIHNDNDLKRLVKLIRSLRGESKVVMEYTGTYFEPIAQFLHINGIFVSVVNALLVHDYGGNSLRKVKRDKKDALKLASYALDRWTELDEYVPADEQRKILKLLNRQYNQSIKIQTTMKNNLISLTDSVFPGINRLFTSLERQSDGHEKWVDFLHAFPHKDCVAKLYLSAFKAKYKSWCSRNKYRYSESKAEKIHSYAKSVIAVLPLNESVKLIVTQVVSQLNTILETAFSIRTEMDRIASSLSEYDTVMSIFGVGKVYGPQLIAEIGDTRRFRNRRAITAFAGLDAPPYQSGQLDVSSRHISKRGSAALRKVLFQITEIYILNKPESEPVYQFIDKKRSEGKHHYSYRVAAANKFLRIYYAKVNQVLNAM

SEQ ID NO: 366277 - protein, 347 aa, unidentified
MITFGVDAHKRTHTIVAVDDLGRQVSIRVIGTTSSEHLDALVWAKKHTPQGQQRRWAIEDCRHLSRRLESELLVAGELVVRVPPKLMAHVRDSARTYGKSDPIDALAVARAVLREPDLPAARLDGPEREVRLLVDFRESLVAQRTSIVNRLRWHLHELDPGTEIRPRGFRRYKAYATVQAQLAERDGTVARLARELCARGRELTEQIDALEAEITALTQQLAPTLMAIHGCGALTAAKILGETAGIERFRSGDAYARHTGTAPLPVWSANTARHRLSRTGNRQLNAAIHRIAVTQARGHQPARQLIARRVEGGKSTRESLRILKRHLARTVYQALRTDNQGVQLTAA

SEQ ID NO: 366278 - protein, 360 aa, unidentified
MKFQRTSVGLDVHARSVLGCALDGDTGEVFQRRLTPDYGEIVAWLGDLPGPVAVTYEAGPTGFGLARALAAAGISCEVAAPSKLIRPAGDRVKTDARDAAHLARLLHLGQITAVTIPTASQEAARDLVRAREDCRGDLMTARHRVSKLLLRQGIVYYGGNAWTTRHEAWLRTQRFDNPALQLSYEAAFDATLACLDRRNRLDDAITLLAGDSEFTPVVHRLGCIRGVATLTAFGLAVEIGDWQRLTGRSIGAYVGLVPCEYSSGDSRSQGGVTKTGNGHVRRLLVEAAWHHRNHYRPGAELRRRWDLASPAARARGQAANRRLHARWSAFDARKKRPVIANVAIARELAGWCWSLAVMPD

SEQ ID NO: 366279 - protein, 344 aa, unidentified
MDHFAGLDVSVNETSVCIVDDTGRIVREVRVASEPDALLPLLMNPAYRFKRIGLEAGPLSQWLFSTLAEAELPVICVETRHMRAVLKAQINKTDRNDARGIAQMMRVGLYRPVHVKTLRSQKLRMLLTHRKLLQSKAIAIENDLRATLRNFGLKVGMVGTVRFEQRIKELVENLPDLAALVEPLLVVRRVLREQIVILHRRLLAIVRDDEVCRRLMTTPGVGPVVALTYRATVDVPARFRKSKAVGAVFGLTCSKYQSGEIDRSGRISRCGDEMMRVMLYEAAQSMLRSKKWSWLKAWAMQIARRRGMKKAIVALARRLAVILHRIWVDGTEFRWTREQATAAA

SEQ ID NO: 366280 - protein, 338 aa, unidentified
MAILYVGIDLAKSVFAVHGVNEAGKAELLRPSVARAKLVELIAALPPCVVGMEACTGAHHWARLFMSHGHTVKLMAPKFVAPYRLSGKRGKNDAADAAAICEAVQRPNMRFVPVKSTEQQARLMVHRARQGFVEQRTATLNRIRGLLSELGIVLPLKAATVRREVALVLEDLPGRANLVIGDLLSEVHRLDERIDQYDRQIVQMAREDERARQIMRLSGVGETTATALIAMIGNGHEFKSGRQLSAWLGLVPGQYSSGGKTRLGRITKAGDAYLRSLLVMGARAVLNAAKGKSDSVSRWAVQLAERRGYWRAIVAIAAKNARMAWAVLSRGDRFVMPA

SEQ ID NO: 366281 - protein, 428 aa, unidentified
MTHSEIKSTEFAAYIGIDWADQKHDICLREAGSNRIESLQIDHKPDSISNWVSQLRQRFQGRSVAIALEQKRGPLLYSLMLYEFIILYPVNPHALASYREAFKTSGAKDDPVDADLLREMVYLHHDKLHPWTPDDPLTRELSLLVEYRRRLVDDKTRLTNRLQALLKQYFPQALDWAGELDTLRALEFLTRWPQLEAIQVATPEQVRDFYRQYYRLGEKLPERLAEISAAQPLTRDKAVNNASIIMVKGLLETLRGLIAAIEAFDQRIETCFEQHSDKDIFNSLPGAGAILAPRLLAAFGADRARYQSAKEIQCFSGIAPVTERSGKTKFVRRRLACPKFVRQSFHEFAKSSINWSAWARAYYDQQRRRGNKHNEAIRSLAYKWARIIYRCWQDHKPYDESVYIAKLELRGSPLAKLIPTAAEQAEAS

SEQ ID NO: 366282 - protein, 347 aa, unidentified
MSISIIGLDTAKAIFQIHAVDEVGREVLRRKLRRVEVVRFFNDQEPCTVAMEACGAAHHWARVLTGLGHEVKLVAPEAVRPFVKKGRKNDSADAAAICEVASRPNVKFVPMKSSEQQATLSLHTARSLLVKQQAMLANAMRGLAAEFGVVVPQGIGRLDGLMASVEADETVPERARQAIHELFDNCCALGSRIHVLEKEIIAHARHDETARRLETIPGVGPITASLIAATVSDIHAFRSPRHFAAWLGLVPRQHSTGGKTRLGRITKTGNREIRKLLVLGATAMVYRAPRWNSVAGAWLRNILERRPVRLVTVALANKTARIAWALMTHKEDYHPNGKRIAAAYAVA

SEQ ID NO: 366283 - protein, 320 aa, unidentified
MKKVLFNQVVKVGCGIDVHKENIVATLGKSEDNYETKEFNSFTSSLTELRDWCKSEGVTHIAMESTGVYWKPVYNVLEEGGFEIILVNARHVRNVPGHKTDKKDSRWLCKLLLSGLLKASFIPPVEIRQLRDLVRYKKKIIAQASSEKNRIIRILEDANIKLSSVLTNVDGAVGNRIIDDLIAGKTKVSELMQHYHGKIKVGKDEFRQALQGRLTPHHQFMLRVMKESIVDKEKLIDKIEKQIDELAKQYSVEIELLQTIPGVAYDSAVSIISEIGADMRQFSNEQHLSSWAGMSPGNNESGGKKKAQKPSTETNTSRLL

SEQ ID NO: 366284 - protein, 335 aa, unidentified
MWHVGIDLHREFVVMAAVSDGGEAMSPKRIPCVETAAIADTLKALGAFRAVIEASGTYRWLYDLLRPYGTILLAHPLRLRAMVQRRTKTDKLDAQLLANLLRINQIPLAYIPPEPYQQLRDLTRNRARLVRDQAEVKIKLRALLARQNRQAPYRVPFGVRGLAWFRKQDFGSMENLVRDELLARLEHYRKQLAILEAHVIQVQKAFPQVEVLLEIYGVGPYTALLIVAELGEVERFSTAKQVGAYAGLTARVNQSGGHCYRGSITRQGSPWLRWILVEVAMKVVREDVALKNFYTRVRKRSSAKIARVATARKLAEICWKRLRRWHREQGQPAVA

SEQ ID NO: 366285 - protein, 355 aa, unidentified
MDRTKYIGMDVHQASISIAVRDASGKLVMESLIETKAATILEFLQGLKGTLWVTFEEGTSAAWLYDLLKPHVVKVIVCDPRKNALLKTGNKNDRVDARKLSHLLHAGLLTPVYHGESGVRTLRELARSYLTLTKDLTRVMNRLKALYRSWAIPCVGEKVYSPRHRSAWLEQLSEAGVRRRAEQLYQQLDILLQIRRDARRELLRESRKHPAHELLRQIPQLGPIRVALLIALVQTPHRFRTKRQLWAYCGLALQTRSSGEYRFIAGQLQRSNRLPALRGLNTNHNHDLKNVFKSAAMHVSTSPDALGDFYRSLLAKGMKPAMARLTLARKMAAIVLTVWKKGARFDPGELKRQAA

SEQ ID NO: 366286 - protein, 426 aa, unidentified
MRVMHERVAGIDVHKDMIKVGVRVPGHRAWTRKSEVLEYRTFYGVLLTMAADLRKRGVTHVVMEASGVYTEPVYYALAGQGFEQVAVISPAHARALKGHKTDAKDCLRLAELFECGLLRGSYIPVQDLKDLRDLTRYRAKTVQARTSEIQRLAKALESAGIKLGSVVSDLTGKSASLMIEGLIDGERRGQVLADLAIGRMRTAGKLADLSQALSGRFTDHHAALCRLHLDRIALFDAAVDGLEAKIAARAAPYQRELELLKSIDGFGDTVAQAWLAEIGPAPHEYFGSHEKLASWVTLCPGNYISAGKRSHGRTGKAGAYIKPMLVQAAWSAIRTEGRLQARYHRLVRRFGGPKNPAAVKKAILAIAHTLLKIACQVLRSGKPYEDPGADFYTRRESPDQRRAYLLRQLEKLSPGCTITITPAEPA

SEQ ID NO: 366287 - protein, 359 aa, unidentified
MDGSKERPKVTAGLDLGDRYSYLCLIDTQSGEVVEEGRLRTTPEALRRRFVSEPSLRIAMETGTHSPWVSRLLEECGHEVLVANARKLRLIYANKRKTDEIDAENLARLARLDPKLLYPVRHRGEDSQAHLALIRSRQALIGCRTQLVNHVRGAVKSFGARLPKCPARSFHNKAPEHIPEALRSALEPVLEQIASLTERIREYDRLLVAISKDHYPETELLCQVEGIGPLTALTFVLTLEHPYRFERSRSVGAYLGLVPATERSGDRDPQRRISKEGDEMLRKLLVGSAHYVLGPFGSDSDLRRHGQKIAARGGKNSKKRAAVAVARKLSVLLHRLWVSGEVYEPLYNAHRRQGQEEAA

SEQ ID NO: 366288 - protein, 467 aa, unidentified
MTPHKDFCLDPCPPAPTPTFPQSPVLADALQVCHPHAAGIDIGEAEHWVAVPPGCDPQPVRRFGTFTADLDALADWLIDCGITTVAMESTGVYWIPLFELLEARGVQVLLIDPRQAKRAPGRPKTDRLDCQWLQRLHAYGLLAGAFRPEAQVCVLRSYLRHRQMLITYAAHHIQHMQKALEQMNLKLTQVVSDITGVTGMAIMKAIIAGERDPVALAKLRNPHCHHDTDEIAKALQGTWRAEHLFTLQQAVELYAFYHQQVALCDQQIKVHLETFADKSAGQPLPPKAGRHKKTNEPRFDARTPLYRMAGVDLTTIEGIEENTALVILSEIGTDMHRWPSVKHFCSWLGLCPQHQISGGKVLSRRVRPGAHRVTIALRLAARSVHHSQSALGAFFRRMKARLGTPKAITATAHKLARLVYSLLQHGSAYVQQGLENYEAQYHERKVKTMAKQAKALGYTLVPLVAQG

SEQ ID NO: 366289 - protein, 407 aa, unidentified
MLFIGDDWAEDQHDVEVQDDQGRVLRRERLPEGIAGIEGFGELVGRFAEEDTDVTDVLVCIETDRGPWVQALLAAGYRVFGVDPKQAARHREILGSSGAKSDKGDAHALADMVRTRRHQLRQVAADSEVAEAVKVVARAHQTLIWERTRHMLRLRVALRDYFPAALEAYTPFGLTSTPVLTLLAKAPTPEAAAKLTLRQIAAALKGRRGIDAKAAAIQQVLRAEHLGQPAAVATAYAATVRSLVAILTTLNTEIANLEKDVTAHFGQHPDAEILLSQPGLGVVLGARVLAEFGDAPGRYASAKARKNYAGTSPITRASGKTRVVSARHVHNNRLLDALHMQAACAILHDKQVRLYYDQLRARDVGHNAALRQVGNRLVGILHGCLKTHTPYDQAIGWAHREAAAVAA

SEQ ID NO: 366290 - protein, 355 aa, unidentified
MAQEYLPRDYDVFLGIDVDKKKFSFTVKDRNGTMNRSKTIPSQPQQLYNYVTNQFAGQKVLFAYEAGPTGYQLHDFLLAKKQDCLVVSPASIPKASNQKVKNNRIDSQKIAEELKAGNLIPIRVPQGAYRELRHLVNLRENYVHNRKVAKQRIKALLLYVGLDSEIKDVEQNWSGKYIKTLKTLPCSDAVRQRLNMLLMDLEYARKQTSFVMRALRALVKDQSEIKKQVRHLVSISGIGFITAVTLLGRIGDPGKLKNVRELSAFIGLVPTEKSTGDDVDRGSITHLGNRILRSLLIEAAWSAIRKDSELNQFYFRIKSRHHPNIAARKAIVAVARKLTHRIYCVLKEQRPYIVR

SEQ ID NO: 366291 - protein, 352 aa, unidentified
MTDTFAKNIIIGVDTHKATHVAVAIDTNGARLAEFSAPATSKGYLVLECWARALGATMAFGIEGTGSYGAGLSRHLLANGHKVIEVTRPNRQLRYQHGKTDSLDAEGAARSVLAGQAIAEPKTQTGSVEMIRHLKIARDTAVKSRSQAMVTLKTLIINAPATLRDGLDRIGGKIALIRHIAAFRPGPITSTIASAKTAMRALAQRWLVLHEEIQTHDKALEQLVEAKAPLLLASHGIATMTAAEMLILVGDDPTRIRSEAALAKLCGVCPIPASSGKTNRFRLNRGGNRQANAALYRVAIVRMRNHPPTVAYVSKRKKEGKSNREIIRCLKRYIAREIFNKLCRPEPASLAA

SEQ ID NO: 366292 - protein, 441 aa, unidentified
MGNQALLFVGIDWGSDAHYVRCCDFADTGVWEGVFCSDAAGLVGLAKKLEELSREGPERTFVAIERPDGPVVATLQQAGFRVHCVSPNRVKKYRELWYPSGVKDDYRDAFILSAILRTMPGCCRFLEPKSEPSNRMGAQVRYHWNLAHHKTQFSNSVRDHLKMYYPQFLEVSKDLGAAWVVALWRAAPNPRAAGELTLADVRSVLSKNRGKVSRAPKVLEILQRAPIATMPGEAECKEQQCAYYFSLLESTVKEQKRVDKELTALSAPKPREVSIPPAVEPVAPSSLSVEKEAVEAAREGAPVDQPSVSQILASMPGAGPLTRSAFLGLVPQALEMGNVEGLRAMCGTAPISLISGKQKSVRMRKYCDHQLRDVVHHWAINAVNRDAFYRAKFHRHKSTGLTTGAALRRVADSLVTTLGALIENGCLYDPAYKLAEMAKTG

SEQ ID NO: 366293 - protein, 343 aa, unidentified
MQITTIGLDLAKHWFQVHGVDAAGKVVVKRRLRRAEVVAFFKTLEPCLVGIEACATAHHWARELIALGHEVKLMPPAYVKAYVKRNKNDAADAEAICEAVTRPSMRFVPVKDIDQQSVLMMHRARNLLVRQRTMLVNALRAHLAEFGVIAPRGLRHVEQLIAAIEAESTALPELARSILRLIVNQLNDTQAKIQQVEATLAQWHRNSRLSKLLATIPGVGIMGASAIAATVCDPNLFRSGREFAAWLGMTPRQNSSGGKERLGRTSKRGDKYIRCLLVAGAVAILRHARTRATKDAEWVRGMLARKPAKVVAVALANRTARIVWAVMKRGDGYKAKEIVGQAA

SEQ ID NO: 366294 - protein, 405 aa, unidentified
MFVGDDWAEDHHDVELQDVQGRRLAKARLEEGIAGIARLHELIGRQLDENAEADQVVIGIETDRGPWVQALIAAGYRVYAINPLQVARFRESTSVSGAKSDPADAHTIADMVRLQHHQLRPVAGDTAEAEAIKVVARAHKTLIWERNRHMLRLRHALREFFPSALAAFGDLAGADALELLAKAPDPDSAARLTTAQITAALKRARRHHVADKAQKIRAALRAEQLGQPAIVTSAYSATVRAQAAILTTLNEQIKSMQEQVEAHFGRHPDAEIIVSQPGLGMILGARVLAEFGDDPDRYASAKARKNYAGTSPITRASGRKHVVTARYVHNDRLIDALGRQAYAAMICSPGSRAYYDQQRARGLGHHAAVRQLANRLVGILHGCLRTGTTYDEATAWSHRTEQVAA

SEQ ID NO: 366295 - protein, 455 aa, unidentified
MSKGIGRRRRVRAHLKRVHLFAAGIDIGARSHFVAVPEDLDPTPVREFAAFTGDLHRLADWLVGLGIRTVAMESTGIYWIPLYEILEDHGLEVLLVDARHVRNVPGRKSDVLDCQWLQQLHTYGLLRGAFRPPDEMVRLRAYLRQRERLLATAADAIRHMQKALRQMNLLLDAVVSDITGVTGMAIIRAILAGERDADRLAALRDRRCRAKSREIAGSLEGHYREEHLFELGQAVERYDFLGGQIETCEEAIRRQLDRLGDGEPVVPVPVRRKPKGHSKNALSFEARPLLHRLTGVDLTEINGMSESTVLAVLSETGTDMSAWPTEKHFASWLALSPGTKVSGGKRLSGRTRVSANRAATAFRMAAYALANSKCALGAFYRRLRARLGAPKAITATAHKLARIFYRMLKTKTPFVDTGQDYYERQYRQRVTRSLKKRAAQLGFQLVPLTSTASTG

SEQ ID NO: 366296 - protein, 305 aa, unidentified
MFNRFIGVDVAKAKVDVFLSETGELMQIKNDEKSLHKFVQFLERTEETLVIIDLTGGYETQCVKAFYQAGFTIHRAEGRKVKAFVRACGQLAKTDSIDARALADYGKRLQDKLTLFQPVDNEIKPYVMRLNELKQLLQMEKNRLQSPQTDNKIYEQISRHIAFLKTEINFLAKELQQIIEKMPQLHQKQKVLTSQTGIGETTANLLLALLPELGYLPRRKIAALAGLAPYAKDSGTLNAARHVYGGRKEVKRALFICALTAIKRDKEMKCFYEKLIKNGKKKMVALVAVMRKLIIILNAKCKKLN

SEQ ID NO: 366297 - protein, 335 aa, unidentified
MELTKQSVGIDVSKDSLEVKFKEKSTKGIKIKGSSKFDNTSNGFISLLEWCNKREKAENVVYVLEATGVYHEDVLYFLFGQGKKVSVELPQRIKYYAKSKGVKTKNDLIDSGVIADYGLERELKVWQPPGKEFKTLRDLSREHNTLTNSKSEAKNRLHAAKHSHDKNARVIERLQSTIKFYTNQLDEIEKDIKTTVNADKELSGKIKKVATIKGVGIMTVVKIIAETGGFYLFQNINQLISYAGLDVVENQSGNHNGKTWISKKGNADLRTALYMPALSAIRFNEKMKSFNERIMETHSYKKQGIVAVMRKLLILIYTLWKKNEEFSLNYKWGQA

SEQ ID NO: 366298 - protein, 376 aa, unidentified
MKKIRFVGLDVHAETITVAVAEPDGEVRSLGTIPNREESVRKLVKKLGSPEQLRACYEAGPTGYVLYWLLTSLGVKCDVVAPTLIPVKAGDRVKTDRRDGLKLARLHRSGDLTAVWVPDEAHEALRDLVRAREAAKQDQLRARHRLSKFLLRHGRRFPEAGKAWTLKYMAWVRQVRFTQPAQEYTMLDYLHEVEHMNERVLRLEQAIEEAVKLSPAWMQEVVQALQSLRGVAKISAATLVSELGEISRFDNPRKLMAYSGAVPGENSSGERVRRGAITKTGNAHLRRVVIEAAWSYRLRPGIGPALRQRQKGVSEEVKEIAWKAQNRLHKKYQRLMAAGKDQRKIITAVGRELLGFIWAIGRATETRCRQQSAMTA

SEQ ID NO: 366299 - protein, 382 aa, unidentified
MKKDITATRKHKQLSKGKTARNQIRRMAKQQRLTIGLDLGDRHSCYCILNEAGETVSEGQLPTTQAGLSWLLGKMCASRVAVEVGTHSPWVSRHIAGLGHEVIVANPHKVKLITQSVRKNDRVDAQQLARLARVDPKLLSPIRHRGEEAQADLAVIRARAALVEARTKLINCARGTAKPLGERLKKCDAEQVKEGLGDGLSEAVRTAIGPILKSVEAISEQIAAYDEKIEEIAKRYPEVELLTPVYGVGTLIALTYILTIEDAQRFAHSRDVGAFLGMRPKQRDSGERQPQLGISKNGDRVLRSLLVQAAHCMLRKGAPDSDLRAWGLGKLESGGKNGKRRTLVGVARKIGVLLHRLWVSGEVYDPLYQRKAVAGKAKRKAA

SEQ ID NO: 366300 - protein, 474 aa, unidentified
MSDRPRRRPDRNKTASSPFVVLDDHAAGIDVGSAEHWVAVPPGSDPEPVRRFGACTADLEALADWLASRGVKSVAMESTGVYRVPLFELLEARGFRVRLVDARQTRAVPGRPKSDRRDCQWIQRLHSCGLLAAAFRPDDRVVVLRGYLRQRQMLVTFAAQHVQHVQKALELLNVKLTEVVSDVTGVTGMAIIKAILAGERDPAALARLRDHRCKQDEAAIARALYGNWRAEHLFALRQAVELFEFYQGRIAECGRQAEAHLLTFADRSGGQALPPRPKRKVRHANKGNTPAFDARARLYRASGVDLTRVEGIEENTALTLLGEVGLDVGRWPSVKHFTSWLGLCPSHRISGGKVLSRQTRSGAGRAAQALRLAARALGHSKSALGAYFRRMKARLGPAKAITAAAHKLARLVYSLLEHGDEYVARSMERCEREHRERQVRGLRRKALELGFELVKPQELAPNPVAEPAPGGSGS

SEQ ID NO: 366301 - protein, 349 aa, unidentified
MSQNLNSAVAVIGIDIGKNSFHIVGLNERGAIVLRQKWSRGQIEARLANMPPCLVGMEACVGAHHLSRKLKALGHDARLMPAKYVRPYSKGQKNDFRDAEAIAEAVQRPTMKFVATKTAEQLDLQALHRVRERLVSQRTGIINQIRAFLLERGIAVRQGLRFLRAELPRILTAPPDVLSPRMVRAISDLAEDWRRLDERIDHLFGEIAVLARQDAGCERLMSVPGIGPIISSAMVAAIGTGDAFSKGRDFAAWLGLVPKQISTGDRTILGKISKRGNRYLRVLFVQAAWVVLIKPMSWERYGLKHWIEAARKRLHRNVLAIALANKLARIAWGVLAGSRTFEASKLQTA

SEQ ID NO: 366302 - protein, 399 aa, unidentified
MLAVGIDVSKSKSAAAILNPDGTVHTKPFEFRHSQPEMDALIRYIKDQNQPVTILMENTGHYHYPVLKALEAAGLPVCLINAYQMKKYGDMELRKAKTDKKDALRIARYALEKGYSLVPHTSMDQKYEDLRFLARQYDQRMGTLTTNKVFLINLLDETMPGITKLLSLTTRDPETSLAMLFIKRFKSYDRIKKMGRTRFLDSYNKLARKSRNRRAYGYGLAIYELAVNSITTRGENEFTLAAQDQCVDLVSESQKAADAIILNMQTLAETLPEYAVLRSMAGVGDRLGPLILAEIGDIRRFHSGKALNAYAGNDAPPYQSGTFESHNRHISKRGNAALRKYCFEVMQALKLTRPQDDPVYLFLIKKEQEGKPYNVAKMAGVNKFLRIYYARAMEALRLQ

SEQ ID NO: 366303 - protein, 337 aa, unidentified
MGKYSEAFIAFDVAKKKHAVAIAEGGRAGEVRFLGDVENSPLPIERTIKRLADRYERLHVCFEAGPTGYGLYRQIHALGHDCMVVAPTLIPKRSGERIKTNRRDAVTLARLHRAGELTGVWAPDAAHEAVRDLVRAREAAADDLRRKRQQLLSFLLRHSRIYSGGGHWTLAHRRWLAHQKFDHAAQQIVFQEGIDAIEDALQRLRRLEKQLALIVPEWSMAPVVEAYQAMRGASFLVAVTFAAEIGDVRRFDTPRQLMSFLGLVPAESSTGDTIRRKGLTLAGNRRARRALVEAAWTYRYPARVSDTLRARLEGLPKPVRDSNPPVAAACTGGWVGR

SEQ ID NO: 366304 - protein, 424 aa, unidentified
MKVTYQTCCGVDVHKSFLVATIVKTTGGIEPSYQKKRFSTFNNSILEFKQWLLDNHCHDVCMESTGKYWVPVFNLLEDKINVVIANPKWVKAVKGNKDDTKDSKWIGDLFRLGLVKGSYIPCKKVRILREYTRYRYKLVSCRSSEKNRYQNALTVCNVALDSIVSDIFGKSSTSIIDYLLEQSGTSINHEEIASKLLRSLKSKEDAVIESVEGYQMTDAQKYRMRLVRAHMDYITAEINDVDKMIENMISSNPDFENAVQFLCTIPGVKRDSAITIISETGTDMSQFSSSKRLCCWAGLTPGSNESAGKKKSVRITRAGVYLKPALVQCAHAAVKSDKSPYYKKKYESLVKRRGKKRAIIAIARMILTAIYQMQSTGEQWNPSDLYKIDMPVALVEKQKAKAIKQAKKLLQREGLLPPDEPLAS

SEQ ID NO: 366305 - protein, 358 aa, unidentified
MSEITAVGLDLAKRVFQVHAADREGRAVLRKRLRRSQVLGFFAELPPCLIGLEACAGSHYWGRELQALGHDVRLIPPQYVKPYVKTNKNDATDAEAICEALTRPTMRFTAVKSVEQQSVLVLHRTRELLVRQRTMLINALRGHCAEFGIVTAQGRSRARELIELVENPADERLPSIARQALQCLTSQVQSIQIQIALIEKKLLAWHYSCEESRRLAEIPGVGLITATAVVASVGNATQFRSARQFAAWLGLVPQQRSSGGKERLGRISKRGDGYIRRLLVHGARARLAWSRRKKEVRSAWLTGLLARRPTNVALLAMANKTARVAWAMLSRGERFENRIGAAAEPRAAANGIARVMMI

SEQ ID NO: 366306 - protein, 355 aa, unidentified
MDNLRYIGLDVHRDTISAAVLNREGQLMMQSVVPTRAPAILDFLHGIRGTLHVTFEEGIHSAWLYDLLQRRVARVLVCDPRKNRLLKSGNKGDLIDARKLAELLRNDALSPVYHGELSSLEVQRRTRSYTMLTEDTTRIMSRVKAVFRGQAVPYHGKSIYRPDRRESYLAQLPTEGLRQRVELLYQELDAVHRLRLRAKREMLAECRKHPAMKWLQSVPFLGKVRTAVLIGRVQTPHRFRTKRQFWSYCGLALETHDSAQYHVLHGQVERKPRFVQVRGLNWNHNHDLKDVFKSAATMAAVREGVFRDYYCGLLAKGIRPEMARLTLARKIAAITLKIWKEGGMFNAEQVKPQAA

SEQ ID NO: 366307 - protein, 390 aa, unidentified
MEARTVNNLPPAASHDDDAVRCVLAIELSKKSWIVAVNTPLSDKISRLTLKPCDGKELLDLCERIRTRVARETKQRVEIVSCYEAGYDGFWLHRLLEAHGIRNYVIDPASLQVDRRARRAKTDRVDAERLLRSLMAYLRGEPKVWSVVRVPSVAEEDDRRLHRERGRLINERIQHVNRIKGLLAIHGIYDYQPLRRDRMQPLDRLRTADGRTLPPRLKAEILRELQRLELVIGMIKAIEAERDAIASAKAQTEHTSAKKMQDLAKIKCIGPEFASTLVGEVFYRSFDNRKQLASYVGLTPAHFQSGATCHDQGISKAGNAKARTVMIELAWLWLRHQPDSPLSVWFRGRVGKLKGRIRRITIVAVARKLLIALWRYLETGLVPDGAALKL

SEQ ID NO: 366308 - protein, 320 aa, unidentified
MAEILLKTYVGVDISKKWLDIVVIPSGETWRTENTDEAIGELIQKLEQLEGEIERIIVEATGGYESRLVSRLYDAGMPVARVNPGRVREFARSVGQLAKTDKLDAKILARFGEAVKPPLTRPLSPDEQALDALLERRTQLLNIQSAEKNRLELAPSSIRSSIQEHLNWLKKEIKKLDQEIGQFIDHHPDFKKKDALLQSVPGVGIITSSKLIADVPELGQCDRKEIAALIGTAPFNRDSGFKSGKRSIKGGRGDVRHILYMATLSATRHNPVIKAFYQHLRNAGKKKKVALVACMRKLLTILNAIIRDQIAWQPSSSLDI

SEQ ID NO: 366309 - protein, 426 aa, unidentified
MEVVHECCAGFDVHKKTVMACVRRMLEKGRIERQVREFGTMTADILALGDWLSGLGVTHVAMESTGVFWKPIWNLLEGSFEILLCNAQHIKKVPGRKTDVKDCEWIAQLLQHGLLRASFVPERDQRDLRDLTRNRAQLVQDHTRVVNRVHKTLEDANIKLGSVATDIMGVSGRLMLESMIRVEMDPEKLAELAQRRLRGKIPQLKPALEGRLREHHRFMLEMLLDQLKSLEGLIRRAEVKIEEISCNSKLSVSGEENSKVPFDEAVRLLDTIPGINTVVAQGVVAEIGTEMGRFPTSGHLASWAGMSPGNNESAGKRRSGKTTKGNRWLKTLLVQAAWAAARTKNTYLQAQFRRLVGRRGKKRALVAVGHTILVMAYQMLKNRTSYAELGPDYFDRLDPQRTTRYLVKRLEALGHKVTLEPQQSVA

SEQ ID NO: 366310 - protein, 339 aa, unidentified
MPATIGLDLAKRVFQLHTVDEDTGEVRKVKLRRAEMLPFFANRPPCVVAMEACGSSHHWARQLRSHGHDVRLIATKFVRPFVKNNKTDAADAQAIWEAAQRPEMRFVPVKTEQQQAILALHTMRDGLVKARTAQVHQIRAVFYELGIDLPEGRHWCVKALPSAFERLEACIPAMVIDAMRMQYELIVDLSRRVDEIERKLEAYKQSDERCMRLLKIPGVGLLTATAIVAGVGNAREFRSGREFAAWLGLVPRQRGTGGRVRLLGISKRGSSYLRTLVIHCARAVVARQKKHSAWLERLLATRPWNVAVVAQANKTARTIWALLARGAAYDLNHRTIQAA

SEQ ID NO: 366311 - protein, 385 aa, unidentified
MQRNDMSRSLVAFDQNSTVVAVVELSLSTWLVAGVVPGLKRQPLKKLSADADKLVALLERWRAEAIKAGQVINRMVVAFEAGRDGFWLARLLRDRGIEAYVIHASSIAVSREHRRAKSDRIDTQRLMRSLLGWLRGEAEHCRMAAIPTLAQEDAKRPNREHECLVADRTRLVNRMKAALIRLGIRNFNIKLRKAAEGLAALRTPEGEPLPPNTLAELGRELERLALIRVQIRAIEQARLQRLKAAPQQATHPMILMLAKVMGVGVETADMLVHEVLSRPLRDHRAVGRYAGLTGSPDESGSSRREQGLAKAGNARVRRGMLQLAWRWLMHQKDSALTQWYRSRTADGRKDTRKTMIVALARKLLIALWRYVTTGEVPQGVVLKAA

SEQ ID NO: 366312 - protein, 464 aa, unidentified
MKRRTAKLDKGKKQISVDQGWEMIHPHAAGIDIGSREHFVCVPKQTTAKNIRSFGTFTTDLQALADWLKECGIIHVAMEATGVYWIPVFQLLEERGFKVILVNPRQTKNVAGRKSDVQDCQWIQRLHTYGLLGGSFRPADPYCVLRSYVRYREELIGMRSTQTQHMQKALQQMNVQLSQVLSDVTGVSGMAIIEAILKGERDPAALAGLVHRRVRASTERIQKALQGGYRPEHLFVLQQAFSLHATIEEKIFACDEQIVREAGLLPDRADPQRQMPARKEGRPARMDQMQGQDMREVLFRKFGTDLTAIEGIGVATALAVLTEVGPNISGFKTEKHFCSWLGLCPDNRISGGKVLSSRTRRVINRVSDALRMAAVTLERSQSALGGFYRRMKARLGAAEGITATAHKLARLIYRLIKHGEDYVRQGLADYEAKFRARKLQALRKSAQHFGFTLIANQQLAATVS

SEQ ID NO: 366313 - protein, 321 aa, unidentified
MTYVGIDVSKATFVVAYSSAKSSKTKTFKNTTKGVHEFIQTLSADDYHCVLEATGNYSSLLVYLLSQAGITVSLENPLKIKNFARVMLSVTKTDETDARLIALYGEKMHPAPYKLRSDAILILKQKRTVIRQLKKQLIATRNLKGSMEALPFFDSKCKKTIEKTIAFLERQVKDLEEELANLAQGEYRKQMGLLTSVKGIGVTLAAALIMATGGFAYFDNAKQLTRYWGLSPTYQQSGTSVNVKGHINRNGDSSLRSLLYVAAMASLRCNAECKECFNRLRSNGKPGKVAVVAVANKLVRQAFAVVTQEKPYVDGFKSEKP

SEQ ID NO: 366314 - protein, 359 aa, unidentified
MLTQSNKIDFSGQHFYVGLDVHLKSWKVSIMAEKLTLKTFSQDPNPELLHHYLVKNFPNGIYHSAYEAGFCGYWIHNKLTALGIDSIVVNPADIPTTDKEKVNKTDKRDSKKIAKSLRNGDLKGIHVSSLKTLEDRCLVRTRGTMMKDLTRNKNRIKSFLYFHGIEIPETFTQSSNHWPKRFINWLRSIELVEYSARKSLNLIIDESEHQRLIILDATMGIKELSHSETYAKKIKLLQSIPGIGILTAMIILTEIETIDRFDSFDKLCSFIGLVPTMNSSGEKELIGEITHRGNNFLRSAIVESAWVAARKDMALNKSYHDYCRRMEPNKAIIRIARKLLNRIRYVLKNNEPYNYCVVN

SEQ ID NO: 366315 - protein, 266 aa, unidentified
MKSYVGIDLHSNNSYVAITDESDKVIYKKRLANDAELILKELEPYGESIVGIVVESTYNWYWLVDRLQETGYAVHLANTTAIQQYSGLKYTDDHTDAVWLSQLLRLNILAEGHIYPKEKRGMRELLRRRMILVRQQTSSVLGIQAMLTRYENVRLTGQKIKSCHKKEDEILKHAKDDSVRLAVQAQLKVLNCIIEQIDSLEKNILQEIKDDEFFKLLKSIPGIGSILAMTILLETGNISRFKSPGNFSSYCRCVESKRISKKERSK

SEQ ID NO: 366316 - protein, 327 aa, unidentified
MCVVGASGRIVQEGKVASDPAALIAWFGSLGYELTRIGLEAGPLSQWLYAAMKQAGLPVELLETRHVRDAFKAMPVKSDRNDARGIAQLMRLGWFRPVHCKSMEAQETRAVLTARKLLQNKLRDLEASLRGILRGFGLKVGKTTSKRFAERIKELVVGHPSLEVLSEALLAAHAVLLREFNGFERRVRTMARQDAKARLLMSTPGVGAIVALTFASAIDDPARFKSSKQVGAHFGLTPRKYQSGETDYTGRISKIGDKEVRTGLFESSHVILTKPVRGFALKSWAMRLAKRVGMKKAKVALARKLAVIMHRMLVDGTPFNFAAGAAA

SEQ ID NO: 366317 - protein, 338 aa, unidentified
MIVIGVDVHKQSVTAVVVDEAGRPLDETTVPVGSDELVAWASTHGDERLWAVEDCRTLTGWIERQLLGLGEQLVRVPPKLTVPERRAGRARGKSDPIDGLAIARAALREPDLPRPRPGEQVYVEIKLLVDHRDDLVEECRRAQQRLRWHLFQLDPAFAVPLRLLARPSHLERVSRWLARQDQQLQVKLARELATRIRTLTKTIKELDQQLELRTAQTAPALLELPGCGPVTAAKLLAEIGPIDRFKSDAQLARHSGVAPLEASSGRIQRHRLDRGGNRQLNAALYRMAITQARYHPPACAYLERKKAEGKSRREAIRCLKRLLVRVVFQTLKASPALT

SEQ ID NO: 366318 - protein, 340 aa, unidentified
MKLYGAIDLHSTNNVTVLIDEEDKIVYQKRLPNDLALILKDLSVYQPRVEGIVVESTYNWYWLVDGLMEQGYKVHLANTAAIQQYNGLKYTDDNSDARWLAHLLRLGVLPQGYIYPRAERPVRDLLRKRSQLVRHRTTHVLSIQNLLTRNTGSSMKANQIKGLDVQQVDELLPHRDLALAVKANLSVMSSAAEQIEILEHRVTELVELRPQFRFLKTVPGIGEILALTIMLETGDIGRFASVGNFASYCRCVGSQKISNGKKKGQGNTKNGNKYLAWAFIEAANFAIRFSATINGFYQRKKAKTKGVVAIKAVAHKLCRACYYIMRDQVPFNITKAFGQK

SEQ ID NO: 366319 - protein, 318 aa, unidentified
MLNESFVGIDVSKDWLDVGWEPAQRSERLAHEEVAMVGLCERLTQERPCLIVLEATGGLETHLASALAAAGLPVAVVNPRQVRDYARACGRLAKTDRIDALVLAAFARAIRPQVRAPKDDETLELGALLVRRRQLIDMRVQEKLRLERASPVQRDSIKEHIAWLTERIARLDTDLTHRLRASSLWRDKEDLLKAIPGVGTITRVTLIALLPELGKLNRREIAALVGLAPFNRDSGQHRGERVIWGGRAQVRRVLYMASIAAIRSNPVIRVFYQHLRAQGKPGKVALVACMRKLLTIMNAMLKHNTPWNPSTLDLEHSC

SEQ ID NO: 366320 - protein, 341 aa, unidentified
MEDYIGLDVSMNETAVSIRRGGQRVWRGKCVTDPAAIAALIRKRAPAVKRVVFETGPLSVWFYHALNARGLPAICIDARHAKAALDMAPNKTDAKDADGLAHLAEVGFFREVRVKGFDSMLTRTLVGARNQLVRMTTQLSNQIRGVMKTFGLLVPAGKGSKFERNVRHLLADRTELAAIVLPLLEAWRSLRTQAADLGTRLVATARQSPDCRLLMSIPGVGAVTATSFVAAIEDPANFRTSRSVGAWAGLTPRRYQSGEVDYDGHISRRGDRHLRWLLYEAAAIILTRVRTESSLRTWGLGLRERLGFKRAAVAVARKLAVIMHAMLKTGEVFEPKPGPAT

SEQ ID NO: 366321 - protein, 316 aa, unidentified
MKNYIGIDISKSSIDVYDGQKSYKFENNEDGFQEVVALSENIKKTVFIFEPTGIYSYSLTEFCDKNSIHCVIVSPKVSRDFARSLKVRSKTDKIDAKVLYKYQSHVEPNMVKVPKINYHAIQVQEMLNSYELLKSTIQQHKNQLESISDTNKDAVRLAKRMIKVNEIEADKLFDKIEKLLFKDESIKRKYEAMLTIPAIGNKSALYLISFFIKYPLANAKELTALIGLDPVMKDSGTYRGKQRISKHGGQQIRNLLFLPTLSSLKCNDRIQLFYTRLTSNAKSKKLAVIAAMRKLVLMAFSIFKSEQNYQPLYVEN

SEQ ID NO: 366322 - protein, 343 aa, unidentified
MTHYIGLDVSQKLTAICIVDSTGRRLWRGQCTSDPEQIERVVRRHAEKDARIGVETGAMTPWLVHELRGRGLEVTCLDARHARAALKMQINKTDPNDAEGLAQIMRTGWYRSVHVKSFGSHRARALLGARVQLVGMTTRLSNHIRGVLKTFGLLPGSMRGVPFDRRVEAMLADRDDIAPIIRPMLIAWRQLRQQIATFDKAVRILVRSSPACRHLIGVPGIGVLSVLAYVSMIEDPARFGRSRSVGAHLGLTPKRYQSGEIDRSGRISKCGDTLARTLMYEAAVVLMTRVKRACGLKEWAQAIARRSGAGKARVALARKLSVIMHSIWRSGEPFRWSEQPVAA

SEQ ID NO: 366323 - protein, 345 aa, unidentified
MDHYAGIDVSLECSSVCVVDASGKIVREGKVASEPEALISWFISLGYELSRIGLEAGPLSQWLFAAMREAGLAVELLETRHVRKAFEAMPVKSDRNDARGIAQLMRLGWFRPVHCKSIGAQETRTLLTARKLVQSKLRDVENSLRGILRGFGLKVGKTTERSFAGRIRELASGHPSLETITEGLLAVHAVLLREFNSFEKQVRRVARSDTRTRLLMSIPCVGPVVALTYGSAIDDPARFKSSKQVGAHFGMTPKKYQSGETDYTGRISKIGDAWVRTALYEAAHIMLTKPVKGCSELKSWAMRIARRAGMSKAKVALARRLAVIMHRMLVDGTPFTASKQTAAAA

SEQ ID NO: 366324 - protein, 457 aa, unidentified
MQIVYQRCCGMDVHKDSVTACVLLIDEYGEWRSEKRKFGTMTRDLREMATWLASLRVEAIAMEATGVYWKPVWNILEAENKFRLLLVNAHHIKQVPGRKTDQKDSEWIADLLQHGLLKASFVPPQTIRRLRDLTRMRVKVRQMLATFANRIQKVLEDANIKLGSVASDVLGVSGRHMLHAIVEGQQDPEQLAALAQGRLREKRAELRLALEGHITDHHRFQLKFLLEFVQFGEKQLSQLEAEIRRLIIQLEPGLVSPEGSVTAAPGAGEEAMATAVKSPLQTVVEFWDTIPGIDELTASTLVAEMGANMDQFPSAGHAAKWAGICPGNKESAGKRLSGKTPKGSVWLRRALCQAAWAASRTKDTYLAAQYHRLIARKGKKKTTKKPPTRSAKKTRPAAKKTRPAANASRPMSAAPRADFGKPIDAFFTKQKPPLRAIAEELRTMIERAAPGAESSIK

SEQ ID NO: 366325 - protein, 341 aa, unidentified
MQHELRTVAIDLAKKVFHLVGTDTTGKILWRKRLTRHAFMPFIAQLPPVLIGIEACGGAHYWARRFREQGHEVKLMAPQFVKPFVKSNKNDMRDTEAIAEAVTRPTMHFVPPKEVDQQDMQCLHRVRERLIGARTALINEVHGLMHEYGIVLPKGVAKFRQAVVDKLESEKEKLTALSQEMFGKLVEEFGALEKQLAYYQEKLEALATTHPECQRLMTIPGIGPITATALVAAVGDVGVFKNGRQFAAWLGLVPRQHSTGGQTRLLGISKRGDSYVRKLLIHGARATLRWVKLKTDDRSRWMRGLLARRGWNRTAVAVANKNARIVWALLSRGGVYGDNVS

SEQ ID NO: 366326 - protein, 378 aa, unidentified
MRRGGSQIANDSEGESMKNHTATKQVMSLTDLSACTTVAVDLAKQFFQVAGEDALGQVRYEERIKSREKFYAFLKELPAHVEVLVETGPGAQAWARQLQDQGNQVRILPARLVANHSSGAKNDRNDALAILRAGRDSHIAGVPVKSAAALGMQALHRVRQGCIRRRTAIGNQIRGLLLEHGVALAQGDLAISRTLPRILEDATQPLPDMLRELIDELQAEWQQTGIRIDVLTGRLEVAAQADATAKRLMTVRGVGPITATALLAKHTEPERFANARMFAAYFGLVPDQHSSGAKIRLGKMSKRGDGYLRGLMIQGAHAVLRQIKPDSEQPDDRRLLNWLSRVGRKEAAVRLANRNLRILWKLLQNNDIYSRQPDRQAA

SEQ ID NO: 366327 - protein, 348 aa, unidentified
MVIIGADLHKRTHTAVAIDEAGRKLGQRTVSATPEGHLELLDWSHGFCERRWALEDCRHLSRRLEGDLVRAGESVVRVPPKLMAGARRSDREAGKSDPIDALAVARAALREPDLPVARLDGPERDLRLLVDHREDLVTTRTQTANRLRWHLHELGLAEPGPRSLDRAPVLEGLRIALADQTGTVARIARELVECMATLTASINALEHEIDGLAGKLGPYLRDLQGCGALSAAKLIGETAGMSRFRSRAAFARHNGTAPVPVWSGEKTHHRLSRGGNRQLNVVLHRIAITQIRLGGLGRAYFDHRLAQGDTKTEAIRALRRRISDEVYRRMRHDEAAQAAQREPLAAAA

SEQ ID NO: 366328 - protein, 359 aa, unidentified
MKATLSKKQRFFNQIKLTKDDDLYIGIDVHKTTYHVALYLNGGHAIDFITPADNSKICTTLKKLEPAIKNIVYEAGPTGYSLARQLQHQSLPVQVIAPSKTPQSCARDSKTDRLDGRKLAEYAAKGLLRPIAIPTHTQEANRQLPRLRIQFVKKLKQTKLQIKSFLLQHGISEPQSLRYWSQLAIEKLNKLQLIDQLRYTLDMLIIEYKFLNEKIKDIEKKLEETFAKTTHAKKIQILKTHPGVGRVTSMMFAAELFNPRRFNNKEELAKYVGLAPTIIQSGQSLRDGPISKTGRPQLRSILIQAAWVWIIKDPQARQVYLRVARNTGQKNKAITAMARRLAIHLWKMLCNNEPYRKSA

SEQ ID NO: 366329 - protein, 466 aa, unidentified
MGKRSGGNGMTRGDRRRNARRERLRELLPRDGAVIGIDLAEDKQALAVIDHDVRVLARKTVKVKAFRLGEALDWAVAQARVKGFAQVAVACEPTGPRWMQVQRLCAERSLPLVCIQPLVSHIAREQQDYTPHKTDESDCVLIGRLAAELHCYVPEELDETWAHLRQLGRRRAQLIAAATASVQRIGDFLSVAWPKVTEACAGPFESVTWLAAVQVVTARCGGDPARLAALGLEEFTALVRGSVPGWGGKKGWGRIIGRVFAALTDTEGAVAWSRRGLLRRCADELGDLARTRAQLRATQADMVAVLGELGLSRLGDIPGLTAVGAAAILAETGDPRRYDSSSSLVKHAGLSPSENASGAFEGQAHISRRGRPGLRLTAWRAVWPMLRFNPVMAAKYAAMTQAADAAAAVPGSQQARAAAAAARARRAKARVACAASLLRWIYSMVVHGTSWDAAVAAGAACHPEAA

SEQ ID NO: 366330 - protein, 427 aa, unidentified
MKELTKVCGIDVHKMFLQVCILSRSGEYSQHRFHNTPHGILALKDLVLAEGCEVVAMESTGIYWYRLFLELESDIRTIVANARQIKSIPGRKTDMNDARWIAELALHGLIRPSRIFPRQDREFRDLTRNRETLVRTRTTIKNRIHKILDSAGIRLNLALKDIFGKSGRHLLAGIAEQKDLEATLATIPSPLILRRADQLREILQDSPLSPTQLHLLTTQLHLLEEIEEKIAHLDELILASLEDSQMEALPICTSVPGISITAATTILAELGDVRDFSSADRLVSWAGLAPSVYQSADTLVCGKITKQGSKSLRWILVQVAQAASRTTDTVFSRFFRRIAFRRGRNKAIVALARKILTILWHLLVNRELYVEPGVQRVRKLPARATLSKISIDDATEILLNAGYRIYSPESQKSAGKGVGAKRATHPL

SEQ ID NO: 366331 - protein, 614 aa, unidentified
MSNSTPLDRIGVGIDTARYGHRVSFLRPDHQPVAKPMTVLESRAGYQSLQQRLEYLHRQHPNAQFHVRIDAAGQYAANLEHFLRSLPLPITLSIGEPKRNKDYQKAHFPKRTTDDTESQAMARFAVVELPKATAPTSAAMTILREVAGRLQAKVKQSTQAINRLHNLVARVFPELANLTDDFAASWVLQLLDKYPTAQRIGQAHLASLQKIPYLAPELAEQVHLVAKQSVACLAGDVVEALMRDLVEQVRHTQRAEDHMRRLLKEAYDTLPASAHLQVVTVPGIGVATAAAIIAQTGDIDRFATPEHFVGYFGVFPEENTSGVDKFGKPVPPGTMRMSPKGNDLVRHYLWNAARSAVVHNPAISALFRRLRAKGKRGDTALGQCMRKMLHLVYAVWKTNRPFDEKHFTWEPSTTTTTATTATASANAAEGVAAAATTTADGRPTTGSAVAADASTVGTASVATNETAVGHKQDLPATEVVTTANPTVEPTPPVVKPPSSRSARPRVDFAFVREQVSMEQVLRHLGLFERMRGRGRQRRGVCPLHGGPDNTQPTLSVHWGKNVFQCFHADCGAQGNVLDLWATVHKLPLYEAALLLADTFHLLRNREEEPVRGTT

SEQ ID NO: 366332 - protein, 387 aa, unidentified
MQAETPATVVATTTPSDVDTLFASLELSKSKWLLTVNSPGGEKFSKHHVEGGDGGSLLGLLARLRTKAEQRCGRPVRVMAIQEAGLDGFWLHRLLIDNGVESTVVDPASIAVDRRRRRVKTDSVDGETLLRTSMAFARGERRVCSMVRAPSPEEEDRRRLTRERGTLLKERIQHTNRIKGLLNGQGVRDYDPLARDRIARLDAVRTGDGRALPQMLKAEIRRELERIEMATAQLAIVERARDAQLRTQAEGRENPAAMLLEIKGIGAEFASLVWLEALFRNFANRRQVAAYAGLAPSPWRSGVIDRDQGISKAGNRRLRRTMIELAWFWLRHQPNSALSRWFQERVGAGRGRIRRIAIVALARKLLVALWRYVTQGIVPKGAVLKAA

SEQ ID NO: 366333 - protein, 316 aa, unidentified
MNGKRVVGVDIGKHWLDVATEGSERVARSSNNAAGIAAFIEKLDPSQDVVVFERCGGWERPLEAALADRAICWAVVHSQRVKAFREAQGVKAKTDRIDARLLRDYGRDRLNAGKLRLGRREDVTLDALMARQRQLKAMLHAERCRAATAAVEAVRCSTERTIAHLEEMLAAIAAELVQHEVGHAELAFKEGVLCSQIGVAEQTARALLAELPELGRLARKATTALGGLAPRVHESGTIRRRRGLAPGRTAIKVILFNPARTAMRFDPQIKEFCSRLRAHGKPGKVIMVAVMRKMLVRLNARLRDATAQTSTAAAAG

SEQ ID NO: 366334 - protein, 371 aa, unidentified
MNSIIYVGMDVHTTNFTLSCYTVENDKSFATVQVEPDYKNILKYLKKIKENYEEPCEFLCGYEAGCLGFTLYEDLKRHNIPCVILAPTSMPVYKKSEIKTDKRDAMKIAKCLAYNTYSAVHVPTKEDLSIKEYIRMRDAHKTMLKKVKQQILAFCTRNGHKFSSGKNYWTKKHLKWLRDLKLDSLLREVLDEYLATFMQETDKIERFDKRIAELAEGDSYAKKVHMLSCFIGVRTHTALALITETGDFNRFKTAEQYAAFLGLVPGEHSSSDNQKRLSITKAGNSHLRRLLTEAAQCYGRGKVGYKSKALKARQYGNSAKIIAYADKANERLRRKFYKMVLKSNKKHNVAVTAIARELACFVWGMMTGHTA

SEQ ID NO: 366335 - protein, 346 aa, unidentified
MGYYLGKHRHTCGADLHGNNLYLCILDPDGQTLFHRRVPCDEKRLLSALAPFRDDLVIGVECMFKWYWLADFCSEHGIKFLLGHALDMKAVHGAKTGNDRIDAERIARLVLGLLFPMGYVYPREMRSTRDLLRRRAYCVRQRTGFMNHTQNTNIQYNLPPLGKIDHPTKRENLETRFSDPAVRTSIEVNLSVIDTLDAVISKLEKATLKAAKGYDRRALNLLKTVYGIGDIIAMTLLFELHDINRFDSVGDFLSYCCLVKCDKTSNGKFKGTGCSKRGNHFLKWAFSEAAALFLRANPAGQKLYSRLVKKHGKGKAMGVLAAKLGRAVFFMLQRNTVFDINCLVRN

SEQ ID NO: 366336 - protein, 387 aa, unidentified
MNTTRASTTTILAIDLGKYKSVACVYDDGSGEFRFTTFETTRAELQKLVGKERPAIVVIEACLLAGWVHDLCAELGVRCLVANTASEAWKFKHLKRKTDKDDALRLAQLHLLGQLPTVSLPPTAVRQWRSLIACRQAIVGRRIAVQNRIRALFVAQGLPAPRGAKAWAATGLAGMASWAKPLGECGPDELWRGLLELALTEYRQICALVEQAEERLDALGKQHADVILLQTTPGLGPRTAETVTAYLHDPNRFRTGKQVSAYSGLVPRQHQSGEMDRRGRITKRGPALLRKMLVECAWCMVRYNGWARALYQRLTGGGQRRKKQAIVAIARKILVRCWAMLRDKKPWRDARAAPKQRLSPSKQRRHEEALRRRQEKMQDPLVGAATP

SEQ ID NO: 366337 - protein, 353 aa, unidentified
MATTATNDIVTTIGVDLGKNIFHLIGMNPRGAVIFRERLSRARLPRRLANMTSCLIGMEACAGAHHIGRQLAALGHEVRLIPAKYVKPFLKGHKNDYRDAEAIAEAVQRPTMRFVALKSIEQLDLQSLHRVRSRLVGQRTAVINQIRGFLLEHGIAIRQGPAGLRQALPSILAQPIGELSPLLLRLLEDLVDDWRQLDRRIEAVTAEIETLAKQNDKCKRLMAMPGIGPLIASAMIAAIGDGAAFIKGRDFAAWLGLVPKQISTGDRTILGSISRRGNRYLRTLFVQGARSVLFRPNSWANYSFARWLTDATRRLHKNVLAIALANKLARIAWAVLHRGTQYEPDEPAIAAKA

SEQ ID NO: 366338 - protein, 423 aa, unidentified
MDIVHERVAGLDVHQKSILACVRVVVDGKVHREVRTFDTTTAGLEALLAWLREMRCSHVAMEATGVYWRPVWSILSDGDFELIVANAAHIKNVPGRKTDTNDATWIADLLACGLIKASFVPDERFQELRALPRARKQLTNEQTRHAQRVHKTLEAANIKLASVISDILGVSGRRMIEAMIEGQRNPWKLADLADGRIKASRKALYDALHGRLTDHHRFMLRLHLGQYDTTAAAIEAIDQEVDALVDQMDAEVEDAGATFRSLTYLLCTIPGVGRLAATVILAEIGRDMSRFPSAGHLLAWAGLCPSQNESAGRKKSSRLRKGAPWLKTMLVQCAWAAVKKKDSYYKARFNRLKARHGAKSAICAVAASMLTAIYHMLKNGTVHHDLGAGHFDRRTNAVKAKRLVDQLKHLGYKVDLQSVDQAA

SEQ ID NO: 366339 - protein, 425 aa, unidentified
MKNTQNEKISQIKDSTLVIGIDVAKETHYARAFDFRGIELTKLLKFSNTGEGFNHLSRWMQDICRQHEKAEIIVGFEPTGHYWFTMGDFLKSEGHKLAMVNPFHVKRTKELDDNSPTKNDRKDPKTIAMLVKDGRYREVYIPEDVYQELREAVAERDRLVQRLTAINNQVDRWLDIHFPEFAQVFKDWRRQAAFLTLRHFSTPEKIAAAGATKIVAIWKQHMKRTAGAKRAQELVKAASVSIGRKIGLVAAEASLQNLLDEHELYVKHYEELEQLMMELLLQVPHAGKLLQIKGVGLITAATFVGEIGDVSRFQDPRQIQKLAGLNLVESSSGKHKGKTRISRRGRKRLRHSLFMAMITILAKNTEFRMLHKRNLTRAKNPLSKMQSVIALCGKLIRVFYGILTTGRDYSAEKMLGDIERGKTAA

SEQ ID NO: 366340 - protein, 354 aa, unidentified
MIIIGVDFHPEFQEIASVDTDTGAYQEKHLAHPEEAEQFYRALASVGQMVRVGMEASGHGRWFERLLEELRIELWRGDAEVIRAKRGRKQKTDREDARHIFKLLLKDDFPRIWVPSWENRDLRQLLWHRHRMVQARTRVMNQLQAVALNEGLRCKKKLWRTHGRQQLESFRLAPWASRRRRELLELLDRLNPTIAELSRAVDEEAEKCPEAKRLMTHPGVGALTALAFVLIIGNAERFRCGKQVASYLGLVPLEESSGNRRRLGHITKQGSSIVRFLLVEAAQVTVRRLPDWRTKYVHLMMRRGRKTAKVAMARKLAVRLYWMWRKGWDYEQWKKFGSNVGQPGHRDGVQQNTE

SEQ ID NO: 366341 - protein, 406 aa, unidentified
MFYVGIDVAKDKHYVCVLNENREIACKPFWIYSDCLGLNELVKRLYDLSLSSDDFILAVESTGAFSENIYEYLSDVGFKVMLLNSYQTAKYRDFLTMKKVKNDSIDAYVIAELIATGKYKESHISSETYHTLKVLNRLKKSLDDKIKTIKREISTVMAIINPEISNILPNIFTKTAIAIIKEYPTAKDLQKATPKKLCKVFRNIKGNNFNEEKAKALIALSKDSIYLGRAKSARSLMITTNINILELIVQEKAALESEIKILIENNQDENFTNSVENLKTIPGVADKTISAILGECGDLRRFDSAKSFIGYLGLYPTQYQSGNSLTVGKLAKRGIPIAKHALYMSAVASVLHNEQLRKIFRDKVSSGKSKKEALIIIAKKIATMIYSMFKYNEPYNPNRVLVSYRK

SEQ ID NO: 366342 - protein, 360 aa, unidentified
MTKVKQLDFTGTTIFCGLDVHKVSWRVNVRDSELELKDFTQPADAGLLHRHLTKNYPGAKYKAGYEAGFCGFGIQRQLSALGIECVLLNAADIPKADKDRRQKNDKRDARSISQELCSKRNLQGIYVPTPEWEHARTLVRNRQQQISDSTRCKCRIWHFLHFSGLPAPNKEETGQYWSRKFVKKLEDMDCNGSNSLKAALQIKLLDYLHKRDLLLQSTRAIRSMYRQPSYWPFMKLILSIPGIGEINAAIILFELQNIHRFKTFDNLCSYVGLVPDTDDSGESKRNKGLTHRRNTNLREALIESSWILITKDPAMLLKYKDYCKHMHKNKAIIRIARHLLARINYVLRKQTEYVSGLLQG

SEQ ID NO: 366343 - protein, 418 aa, unidentified
MKSIKTKKVTKINDKTLIATLDIGKNIQYGYFRAPNGNDVKPFAFYNSKKSYNEFWEKLCQFKDKEGLEQIVIGFESTGPYAEPLFHFLRKKPVTLVQVNPVHTKRVKELTGNSPNKTDNKDPRVIADVICLGHALTLVVPEGPAAELRRLTQARERAITDRTAIINQLQHLIFVIFPEFLKVLKISTKTARYFIKHFTTPEKIFALGLDSVGQIVKKVSRGKLGQDRAKQLHEAAENSIGISEGKQSIVFEIEHLIGRIEAEDQFIDSLEKQMRIYLQQIPYSQNILSIKGLGEVTVAGLIGEVADFNKFDTISEVMKLAGLDLYEISSGNHRGQRRISKRGRPLMRKLLFFAAINAVKSKGIMHAKYQQMLARGKLKMKALVAISRKLLGLIFAIVRDNTKYVENYSDNYHYKLAA

SEQ ID NO: 366344 - protein, 344 aa, unidentified
MNYYAGLDVSLRTVNICVINDQGEFIAETKIDSEVTDVVAYFDGLDLDILSVGLEAGTMTQFLTYGLQSAGFEVVCMEARQVKAALSAMRNKTDKNDARGIAQLLRSGWYSPVHIKSMDSHRIRLLLSSRKAVLSKCIDLENEIRGLFKVFGIKLPPKLGHGSFDPAVRDIIETDVTLSESLLPLLDARLVLYHCFRELDNRTRHVAHADVVCQRLMSAPGVGFVTALTYKAGVDDPTRFKHSRTVAAHFGLTPRRFQSGEIDIEGHISRCGDRDVRSTLYTAANAMMTRSSKWSSLKAWGMQIAKTRGHRRAVIAVARKLAVILHRMWIDDTQFQWGSEGARS

SEQ ID NO: 366345 - protein, 361 aa, unidentified
MGSPVTSRAGELVVLGVDTHADAHVAVALDEFGRRLGSTEAPATQAGYEKLLAWAEGFGSLELVGLEGSGSFGVGLARYLHARGVEVVEVNRPNRQHRRRFGKHDTADAEAAARAVQAGAATGEPKSADGPAEMVRVLHVVRRSAVKARTQATNQLRALLVTAPEELKAELRGLSTAKLVATAARFRPSGFPDEVRTATKLAMRSVARRHQRLSEEIAELEEQIGRLVVEYVPVLASLRGVGTDTAASLLVAVGDNPERLKSEAAFARLCGVAPLEASSGKTVRHRLNRGGNRDANRALHVLALGRMSWDERTREYVARRTAEGKSRREILRCLKRYVAREVYRVLTAPPLLAPPPLPALP

SEQ ID NO: 366346 - protein, 429 aa, unidentified
MNSTRNKKIEQVKETTMIVGIDIGSEKHYFRAFNWRGIELTRKPVAFSNSMEGFNSFYNTIVELIQKSELEEALVGIEPTGHYWFDLGQFMGEKNIKFVMVNPHHVHKSKELDDNSPSKNDRKDPRVIAGLVRDGRYFYSYMPTGVYAELRNASNRRFVLVEEQTRAKNRLQKWIAVYFPEYKGIYTRIDAKGGLLVLKQAPTPEEIVRLGVEGIIKIWKDAKLRGNGHKKAMLILNAAMKSIGLKAGLTEARMEIQDLIEDYELQTKRLERVNDLIKELCQQIRYADKLLEIKGIEITTVAGFIAEVGDITRFDSAKELQKLAGLELVADSSGKHNGKTKISKRGRKRLRYLLFEAAISVVGKNKEFKKIHRYYTTREKNPLKKMQSLIAVACKLIRVFHVILTKGISYDASKMLKDIQHPGEPLKAA

SEQ ID NO: 366347 - protein, 328 aa, unidentified
MVAKMSDAIVGIDVSKEALDAYCARGQRRQGRTFANSPDGWKLVRTWLKAMGSKQAHVCMEATGRYSLGVALALHDAGHVVCVVNPAQIRDFARTKLGRNKTDKIDAALIREYGELFKPEPWTPPSPAMRRLCELQTMRAGIIRSRAEWKNRMGSGLGDSIAIELAAATIDHFTTQLEAIDRAISETIDQDAELHDRRDLLISVIGVGDTLAALLMAKMPEPGVLRRSGEIVAYAGLNPSHHRSGTSIDRPTRISKIGNAELRSALYMPALSAMRFNPAIAALVARLKSAGRLKPKQIVVAAMRKLLVLCFGVLKTGKRFDPAIAMPA

SEQ ID NO: 366348 - protein, 346 aa, unidentified
MLIVGCDYHPRWQQVAWLDTETGESGEQKLVNGDGEAERWYRQLPPPSLIGLEATGNSQWFIDLLNQLGHEVWIGDAAEIRASYVRRQKNDRRDAGHILKLLREGRFPRLWVPSAEQRDLRQLLIHRHKLVQIRSRVKNGLQHLAMNQGMQKKARLWSVPGQQAFRQLPLAGWSACRRHDLLQLLVYLDQQIAPLDRAAQQAAEQDRQARLLLTQPGVGPITALAFVLTIGDVTRFRRGKQIASYVGLIPREHSSGGRQRLGAISKQGNGFLRMLLVEAAQSVVRLDEGFRKPYAHRCHSKPKGIAKVAAARRLAVRLYWMLRSQTPYPEIVRIESSPRVPLAGKS

SEQ ID NO: 366349 - protein, 341 aa, unidentified
MGEASTIGVDLAKSVFQIHGADASGAILFRKKLRRHQVLTFFAAQPPCTVAMEACGSAHYWAREIGRLGHHVRLIPPAYVKPFVKRHKNDAADAEAICEAAQRPTMRFVAPKGEQAQAAALVFRARDLLVKQRTQVINALRGHLAEFGMVVAKGPAHVSQLVRAVEDSAGPIPELARPILQMLADTLHQLDEQIMRLDREIAQRARTDEAARRLMTVPGVGPVIATALTALAPPAETFRRGRDFAAWVGLTPLQHSTGGKQKLGATSKMGERTLRRLLILGASGVLRWAARNGVPAGSWIARMLARKPPMLVRVALANKMARVIWALMAKGGIYQAPVAAA

SEQ ID NO: 366350 - protein, 417 aa, unidentified
MTDEIRWFVGIDWASESHQIYLLDARGQCLGERSVPHGGAGLGELCDWLTTKTGASPAAIAVAIEVPHGPVVEVLLERGFPVYAINPKQLDRFRDRFSVAGAKDDRRDAHVLADALRTDRHALRGLSVDDPLVIELREWSRMTEDLQQERNRLTNRVREQLWRYYPQMLELSNDLADGWFLELWSQAPTPAKAVRLSESTVERVLKSHRIRRLDAAAVLQILRQKPLAVARGTVEAATAHIRVVAARLELVSQQITAAHRQLAKLCDKVAASEASEPGRATEQRDVTILRSMPGIGRIVIATLLAEAWQPVRRRDYHALRTLGGVAPVTLRSGKRCRVVRRYACNRRLANAIYHWARVASQRDAVSQRRYGELRRRGHSHGRALRTLGDRLLAVACTLLQRQTLFDPNYATVPAAAA

SEQ ID NO: 366351 - protein, 317 aa, unidentified
MSPELYLGIDVAKNSFQVASRPVQIQGSYPNTQPGYQDLLRALRPCQIALIVLEATGGYEKTLAVELVQAGYNVVVAHPRQVRDFARGMGRLAKTDPIDADTLAQFGEKVQPTPKTPPNAQTEALAELVTRRRQLTDLHTQETNRAQMIHHVKVRKSIRKMIKTLEFQIREIDELIQEHIQADADFQHKDQILRSTGGVGPQTSAMLLSRLPELGQLNRHQVAALVGLAPYDRKSGKQDRGAHIAGGRADIRCLLYMAALSAQRFNPAIKTFAQRLQDQGKPFKVVITACMRKLLIILNALLRDQIPWTPKKLFLKA

SEQ ID NO: 366352 - protein, 406 aa, unidentified
MFYLGIDVALNTHRLVMLDDNGERVSSGISFQNNTADFEKVLTKLKELSINLDNSISGLEATGNNWENLYCFLTGKGFKTILLNPHQTNKFREALRKKAKTDDIDAFVIAGLLRSNEFASSYVPEDKIQTLRELTKLRYEFIKDHKNYQRQVLALLNLIFPEYRQTALKNPFAIASIAIFKAFSTAKHLASTKPKHIEKIVRSIKGNNFNIKEIENLISIAKTSVYSGRCQESRALTLNILLTQVENFDKSIQQLEEQVNLILSPASNDDISSFPGSNLLTIPGVGPKTLAAILSCVGESGQAFSDGVKLIGHIGFFPQIYESGETRRANKLSNKGPAYLRHALYMASVACIKHNLQLRNLYHTKVSQGKKPKQALICVAKKLAHICLSMLHSGQDYNPARVFSCA

SEQ ID NO: 366353 - protein, 324 aa, unidentified
MIDGILGIDVCKNTLDVSISSYTKVRTKSFTNSPDGWRHLLDWLIAQKIQRVHACLESTGRYSLGIACALYEADHVVSIINPAQIRDFVRTKLGRNKTDGVDASHIREYCELFKPSPWAPPSEAHRRLGELQTIRSGIIAGLTEWKNRKNSGIVDAEAQALADATISHFTSQLGAVDKAIALTIDNDCDLQSKRDLLLSISGVGETLAGVVLAELPGPDVLRSSAEVVAYAGLNPRQHQSGTSIDRATRISKIGNAVLRAALYMPALSAMRYNSAIVALVTRLKSRGRLKPKQIVVAAMRKLLVLCFGVLKTGRPFDAAIAMGG

SEQ ID NO: 366354 - protein, 353 aa, unidentified
MKYYTSTTEFNCGIDLHARQMYVCVLDRTGKKLVHTNIRHNDFAYFLKLVAPYRHDLTVCAECMFGWYWLADACAAAGIHFVLAHALYLKAIHGGKNKNDRIDSEKICHLLRTNLIPPGYVYPAAKRPLRALLRQRLLYVWNRSELLSRIQSHQLAYNRPPTRQTLYNREPWQKHLLASEPDPVRQLALQNDLALIGHYDAQLTSLEKELLHLTKQTSCRDFTLLKTTPGIGDYLGLTILHEIGDIARFPSVKDFLSYCRLVKGTVASAGKIKGLRGAKLGNPYLRWAFGEAAIIAKRDALLGPLAQRLEARLANKFKANTVLAIKLARAVYFMLKTKTVFDPERLVAALSHN

SEQ ID NO: 366355 - protein, 312 aa, unidentified
MGTKKVYVGIDVGKDWLDFAVAGIDRITRFGNHHQGIVKLVAQMEGLQPHLIAVEASGGYEAAFVDALMLNNHRVAVVNPTRVRALANAKGLLAKTDAIDARNIASYAEIIKPEPSKPRDDLDLRIRALIIRREQLVDIRSAEGNRLGTCHESIKADIREHLDWLERQIGILDDEIKQLVKSSNEWTQQIELLETMPGVGFVTAVTMTANMPELGELNRQKIAALAGLAPYNRDSGKKRGKRRIFGGRQSVRRVLYMAALSATKHNPVIKKFYERLMKKGKPFKVAITACMRKMITIVNVMVRNATPWRCPG

SEQ ID NO: 366356 - protein, 348 aa, unidentified
MQISTIGIDLAKNVFQVHGVDAAENPVLKKQLRRNQVIEFFGKLPPCLIGMEACATSHHWARGLRKLGHDVRLMPPSYVKAYVKRGKNDAADAAAICEAVRRPSMRFVPIKNAEQQSALMLHRTRDLMIRQRTQLINAMRAHLAELGLVALKGREGLQQLIRTVTDADDERLPSDARFACQALVAQLQAVQMQITGLDKRIHQAHRANPASKRLDAIPGFGVIVSTAVVATMTDPKAFKSGREFAAWIGLVPRQNSTGGKERLGSISKQGDRYLRRLLIVGALAVIRSARARPDKYPWVMKLLGRRPAKVVAVALANKMARIAWAILAKGETYRAPARTSSAEIAVSA

SEQ ID NO: 366357 - protein, 312 aa, unidentified
MAQMVITAGIDVSKAWLDVALWPTKAELRVERNAAGYHRLGAWLSEHGVMRVGLEASGGYEVEVIDALQARGFEVARFNAQRVRLFAKAKGRLAKNDRADARTIAQATAVLLDAAPPQRRRDLEPLVEHLTYRRRLRDWIVDCTNQLEHLKDKALRRKLIARRAAWQNELAAHDRTLASLVAQHDEWHDLEQRLRTVPGVGPVLAQTLLALLPELGRLSRRAIASLSGVAPFDDDSGKRAGERHIKGGRAVVREALYMAALAAKRYNPAIAAFANRLAGKKPKVIIVACMRKLLVILNAMLRDGTDWQAKAA

SEQ ID NO: 366358 - protein, 340 aa, unidentified
MQAPRHIGIDLHRNQFTCCVRLENGRNYLTEWKLEDLPRFVKKLRPADEIAVEVTGNTRLFYEAVAPSVARVVAVDPNQFKVISHSVKKTDPNDARNLALYLEKDLLPEVRMKDKTQAQLASLTQTRDTLVKLRTALKNKVNNILSAHGINLEKEALSSEKKLNEVLAMRFDPMVKIELEVIVEEIRSLNQRVAKLEKTIADEGSKLEGHKNLTSIKGIGPLTGSILLSVIGDIHDFADEGKLAAYFGIVPRVCHSNETERSGRITKRGSKLGRTALVQCALIAQRYSPYLKRYYEKIKARRGTGKAIIALARKLLGIIYRTLKNKWVFEDFPNFVLAEA

SEQ ID NO: 366359 - protein, 307 aa, unidentified
MDYKTIGIDVSKTSLDICFLPTGEYLQISNDINGFKQLKKHIGSVKVDKILMESTGSYHRSLQKFLNIAGFKVFVINPKQIRDFAKACGILAKTDKIDAQVIAQFGERMPLQDKIKKDLFSEELKDLITRRRQIVYSLVNEKNHLEKTNNKFILKSVKSSIAFLQKQLTQIDNLIFNCIHSHDFYKKIYDKLLSVKGMGKVTASVLLAELPELGQVNKRKIAALVGVAPMNCESGTTRGQMHIRGGRMSVRNTLYMAAVASVRANDILKNYYNRLRNNGKTPKMALTAVMRKLLIFLNSLIAKEFFA

SEQ ID NO: 366360 - protein, 410 aa, unidentified
MEVLFPHCAGLDVHKDSVVACVRHMAGGKVSTQVKTFQTTTQSLMILSEWLAAEGVTHIAMEATGVYWKPAWHILADGEFELVLANAAHVKNVPGRKTDVNDAAWLADLMAHGLIRASFVPDEPTQQMRDLLRTRKQLVRERVSHVQRIQKALEDANIKLDSVVTDILGLSGRRIIEALIAGQTVPQALTSLAHRNIRASSGELEAALRGRVTRHHRFLLKLHLDQIDALAAAVARIDEEVSANAAPFRAAIELLSTIPGISRLAAEVMVSEIGIDMSRFATAGHLVSWAGLCPRNDESAGKRRSTRMRMGAPWLKTSLIQCAWAAARTKNSYLQAQYLRLRSRRGPKKAIGAVAASILTAAYHMLKNGAVYQDLGASYFDRQAQNVQAMRLANRLKKLGFDVQLTPAAA

SEQ ID NO: 366361 - protein, 337 aa, unidentified
MNITTVGLDLAKNVFHLVGVDTVGKEQVKKRLSRSQVLKYFANLPCCRIGMEACASAHYFARELTRLGHEVKLIPPQYVKAYLRGQKNDYNDARAIAEAVRVPQMRFATMKTVEQQDVQSLVRLREGTLQARTALVNRLRGLLGEYGIVIPKSVSALRRTLPEVLEDADNGLSDGFRRLLNQGRTQLQELDTHLETLTAELSTLAKRDDRVQRLQTAPGYGPIVASVFAGVVGDGHQYRRGREVAAAIGLVPRQHSSGGKNVLLGISKRGDRYLRTLLIHGARAVVNAAKNKDDALSRWINRLRETRGINKATVALANKLARIGWAILRNGTRYQPA

SEQ ID NO: 366362 - protein, 360 aa, unidentified
MLYLGIDVHRKQLTVNVRNEAGEVIERRQVSTEWKRVRAFFEEFTERARAEGGYVAIVETCGFHDWVLALLHEYGCREAVVVQPTGRTKKKTDRRDAQALSETLWINRDRLAAGQPIRGLRRIHPPERRDAENRQLTALRVRVTQLRTRTLNKIHRILLKHNLEQHCPTKGLATKRARQWLDELELPELDRLEMDLLLAQWSLWDRQLTSVDCQIRQRQAASPTATLIASLPGAGAFGSLALASRMDRVERFARPGSLANYWGLTPSVRNSGETTDRLGSITKEGSRLARFVLAQMVLHVLRRDPAMRTWYQRIKRRRGAKIARVAVMRRLATILWHMVKHNEPYQLGGVPRRPWMAAVG

SEQ ID NO: 366363 - protein, 377 aa, unidentified
MDMLHGRIAAIDIGKKELVVCVRLPPSHPDGERRQQVRTFGTTTRDLLELRDYLTDERVATVVMESTGQYWRGAFYLLEEVMEAILVNPAHVKGLPGRKTDVLDAVWLGELAECGLVKASFVPPEPVRQLRDLTRHRSVLLSERTRSAQRLEKSLEDAQIKISSVLTDLLGASGRAMIDALIGGERDPAALANLAKGRSRARIIPELTDALDGRFGEHHAFLRRQHLRLIDELTGLLEELTRRIEDAIRPWDRQIGLLQTIPGVGRATAETIVAETGVVMRQFSTAGQLASWAGCDPRALSVGRQGELQPDRSGQPVARRRPRPCRAVGRALEAHVSRGQVPPARPADRRPARERRPPARHPHRRRLAHAHQRSALP

SEQ ID NO: 366364 - protein, 411 aa, unidentified
MRRVIGIDVHRTFGEVVFWENGRLRHAGRIDMTRTALQGFGKTLLASDEVVVEATANSMAVSRVLAPFVARVIIANPLQVKAIAQAHVKTDKIDAGTLASLQAAGYLPQIWTPDAATERKRRLVARRYQVVRHRTRIKNEVHSILHAHLIPKCPHADLFNARGRTWLTTQQLPDDERAAIDRHVRELDRLAEDLALLDREIAQDAMDDPAINRLMTITGVNLAVAAGIVAAIGDIGRFNSPQKLVSYFGLNPRVRQSGLGVAHHGRISKIGRSHARAMLVEAAWAAAKAPGPLHAFFVRIRARRGHQIAAEALARKLTVLCWHLLTKGEDYLWARPALVANKTRAMQLQAGHPQQKGSRRGPAYAYNIKALRDREMLIAAQAEQSYERFVSQWKARRPKPGARAPQSGRTK

SEQ ID NO: 366365 - protein, 351 aa, unidentified
MLIIGCDFHTRFQQIAMVDTTTGELVKRRLEHSTGEAERFYAALPSPARVGIEATIATQWFEKMLTGSGHELWFGDAAEIRAAMVRKQKTDDRDALHILDLLMQNRFPRIWVPSAAERDVRQLVRHRHKLVRMRTSVMNQLHALAMGQGLCLRKKLWTTVGRQKFESLTLDPWASFRRRELLQLLDQLDPSIEELNRAVISEAESRPTAVCLMQQAGVGPVTALAFVLTVGPVSRFANSKKLVSYLGLNPSEESSAGRQRLGAISKQGNSMMRSLLVEAAQTASIYDPELRRDYQRLKFRRGHSGVAKVAIARKLAVRLYWKLREAARPVPLAPMQGSPAVAVVGENLSCF

SEQ ID NO: 366366 - protein, 347 aa, unidentified
MRFYAQQHPFYCGIDLHARSMYVCILNQEGEVVAHRNLPAEPEPFLEIIQRYRDDIVVAVECVFTWYWLADLCEREHVPFVLGHALYMKAIHGAKVKNDRVDARKIAGLLRAGMLPQAYVYPAPMRATRDLLRRRNYLTRKRADLLAHIQNTNSQCNLPEFGKKIAYKIHRESVAHQFVDPDVRRSIETDLELIDHLDRLTCNLERFILRNARDHDPNALYLLRTVHGIGPVLSLVILYEIHDIDRFPRVQDFASYARLVKCAKESAGKRHGTSGKKIGNAHLKWAFSEAAVLFLRGNPEGMKLKKRLEKKHGKFKALSILAHKLGRAVYFMLKRKQAFDMKKFLAC

SEQ ID NO: 366367 - protein, 363 aa, unidentified
MTVTSMPQPTLPAQRVPGPAEEVILGVDTHKDIHVAAVITTLGASLAHQEFHATAIGYRQLLAWGRSFGVLHRAGVECTGSFGTALTRALRRENIDVVEVNQPDRATRRKRGKTDAIDADAAARAVLSGRATTVPKSADGPAEDMRVLRLAKESAVKARTQALNQLKAVLMSIDPDLRELLTGLSNPALVATCAALDVDDRGEAVFTMRLLARRVQHLSDEVKELTRRTTRAVRACRPQMLDLVGVGPDSAAVLLIAAGDNPDRLSDEASFAALCGVSPVEQSSGKTQRRRLNRGGNRQANAALYRVVMTRIRWDERTQKYLERRTAEGMSKREIIRCLKRYVARELYRHIQPLAASQLPSAA

SEQ ID NO: 366368 - protein, 363 aa, unidentified
MLQHTTGTHVGLDVSKASISVALLRPDGHLDEERIANTPEAVRRLVRRWPEPTRVHACYEAGPTGYDLYRQLTGLGVETTVIAPSLTPRRPGDRIKTDRRDARKLAGLFRAGELTAIRVPTPAEEAVRDLLRARQDEREDILRARHRLSKFLLRHGHTYTEGSAWTGRHTAWLAKQRFDEPAAQRTLGHYRAELDMRLASLKLLDGELLTIAGRPPFAATVARLCALRGIAELSALTIAVEVGDFRRFESAPAFMAFVGLVPSERSSGERRSQGPITKAGNAHLRRVLVEAARHARRRPNIGPALAKRLAGQPPEVLAIATRAQRRLHDRYWRLVERRKPPNVAVVAVARELSGFCWALGRAA

SEQ ID NO: 366369 - protein, 345 aa, unidentified
MANLTQFRDFTFIVGIDIAKNVFQVFSCNCQTGEISNEQVSRNQLLEDFANVGKCLIGMEACGSSQYWARKLIVLGHEVRLIDAKLVKPFVFHNKSDKADAEGIFNALIQGVRTVAVKNEIERDIQTLLTMRAKLVEQRTANINHVRGLLAEYGMVMPKNVAQFDKHVDNCINALEGDAVRLVIDALRDTVRAIRAADERLFVLKQEITKLVQTTKHAKHLLSVPGVGNVIMAYMCVLLCAPSVFSSGRQFAAYLGLVPVHTGSGGKTLNTRIPGRCDKRLRDLMVQAAQSVARSRFPVPWVKTILAKKPKKVASIAIANRMARQCWAVASKGQDWRRTPIAAEA

SEQ ID NO: 366370 - protein, 393 aa, unidentified
MTTIGIDIGGRTHVVARCRDGQPRADREILRVSQSRAGFAALDAWLERQAEPVTLVTMESSGHYWMPLASHLRRREVPVAVVNPLAAKYFARSRLGRTKSDPADARSLAEMAMRDSPPVRDPLAGAELRQAARFAMTLVTEQARVCQRLIRLVELGFPELGELFDDPTCRTAREVLRIAPTARAATRRHTSTLANANAGAGHRRLGTARAERLQAAAAETIAVPELDAEVAFEVGLLLDQYDVLERQIEDADRRVASLLDGETARRLQTIPGIGPSTAATLLAEIGDIARFTDFDQLLAYAGVHPAERSSGRKGANPETAWHMSKAGNSHLRAAAYRMAVVGVQHNPIIAAHYARKRAAGKSKMNALGHCMRKALSIVWGVWRNGADFDPTWG

SEQ ID NO: 366371 - protein, 435 aa, unidentified
MEEVRDEPLYRNRVCGIDIGKAELYATIRVPSDKDPARRASETRSFATTRRGIVALADWLRCWQVPAVVMEATGDYWNGPFYRLEAEGVECVLADAKQVRHLPGRPKRDTSDSAWLAACFERGAVRSCFVATPEFRMIRLHTRYRRDLTGERTREKNRAEKLLESAAVKLSSVITDLHGVTGRDVMEHLIADQRDPRALAQLARARARRKITELEHALEGAEFFTAEHAALLKTMLARIDQLTQQITALTEVIEQLLAPYEEQLAQAESMPGWGRRSAQDALAETGPDMSRFPTGAHLASWAGRTPLDAQSGKHAGRARHKKGNKYLGAVTGETAVAAGKTATREGARYRKLARSRGKGKAQVALGNTQLRVYHKLLSNPGMRYQDLGPDYYERQAATRRKIAYHVREIQALGLEVALARIPDPEPDRPATTPAA

SEQ ID NO: 366372 - protein, 363 aa, unidentified
MTSIVLARTDVIVGVDTHKDQHVAVIVDGLGGRLADLSVPATNQGYAQLLTWGATHGRVAAYGVEGTGSYGVGLARFLRRHGHTVIEVSRPARQAERRAAGKSDDIDAEHAARQVLAGTATVTPKTADGDIETLRLVKVARDTAVKAHSQAMITLKATLVTANDELRASLEPLTDFKLITACAALEPATDLCDPDAAMRHVLGALARRWLVLHAEIKIHSHHLKQRTKAAAPALVAAFGIGPDIAAELLVAAGDNTNRIRSEAALAKLCGACPIPASSGKTNRHRLNRGGNRQANAALYRAVIVRLRWHQPTIDYVTRRTAQGLSKREIIRCLKRYLVREVYHLLPPPAADSDTPAQLPRPAA

SEQ ID NO: 366373 - protein, 344 aa, unidentified
MGEYVGFDVSKEETAFCVMDEGGRVLARGKVASDPNALFEVLREHCLCPERIVLETGTLSFWLARELRKRGLPVEVIDARQAHAVMKLQHNKTDAGDAELLAEIARTGFCRAVAVKSEAAQEVRILLKARAHLVRQRRDTENAIRGLLGSLGLRFPKGAGKLAWRVRTALEARPELKATFEPLLSCVEALKREIARLDETVVARAKAAPACRVLMSVPGVGPVTALAFAATIDDPNRFAKSRAVGAYLGLTTRRYQSGEMDYSGRISKHGDAMVRSLLYEAAHSMLTVVRKAHPLKDWARRIRKRSSHKKACVALARKLGVILHGMLITGELFRWPEKKDATTA

SEQ ID NO: 366374 - protein, 351 aa, unidentified
MLIIGCDFHPGFQQVAIFDNRTGEIEEKRLPHREEAEQFYRSLSGPVRVGMEACGHYPWFERLLEELGFELWLGDAAEVRASVVRKQKTDRRDAEHLLHLLLENRFPKIWVPSLEVRDVRQLLVHRHKQVQARTRTKNQLQAMALSQGVQKKWKLWTKLGRAELEQLPLLPYAAERRQRLLEALDGLEADLVELNRRVDEEVRKRPEAMRLRTHPGVGPVTALAMVLTLGPAERFASGKEVGSYFGLIPREDSSGGKQRLGKISKQGSSFLRFLLVEAGPTAARYDPQLKRFYRRLAMRKHRGVAKVAVARKLATRLYLMLREQWTYPQLCQAVMQVSPSHSVVEPEKPTA

SEQ ID NO: 366375 - protein, 341 aa, unidentified
MTGIYRNFVGIDIAAQSASVCWQLAEQASYQQRDIQQTLGAYRQLVKELTRQAAPAATLVVMEATSTYWLRLAHHLHAAGFVVSVINPAQARYFAKAQMQLAKTDQIDAALLVDFARRMQPDPWTPPPAVCEQLQQHLSRHEDLHKMLTQERNRLHALQQHPHADPTLIQQLQHHIGYLQHELRALRQTLQQRLTTGDHPWAAAARRLLTIQGVGLLTAAWLLVATQAFTRCQNPQQAAAFAGLAPLARDSGSSLHGHRTVGHRGHAALRRTLYMAALAAARFNPLLKTFYQRLLAQGKCKQAAHCAVARKLIHIAWALVTKQRDFDPHWRQSEPLALISA

SEQ ID NO: 366376 - protein, 339 aa, unidentified
MRLYAAFDLHSSSSYLGISDENGKRVFKKKLPNDPAKIKEALKPFKADIEGIVVESTYNWYFLVDLLKEEGYRVHLANVMKTQQYAGLKYSDDKHDAFWLTEMLRLNILPEGYIYPKQERPIRDLLRKRGHFVRLRTSLIASLQNIIARNLGGRLKANEVKVMTTDRVTPLFQGNDDLALAGKVSKEAIDFMTRQIKAIESTIGNRIYLSNPYDRLLSIPGVGKILACTIQLETGSIDRFQKVGNYVSYCRKVPSGRFSNDKKKGTGNRKNGNKYLAWAFSEASDRARQFDTESRKYYQRKLQKMNTAVAHNALAHKLARAAYYIIRDGVIFMPEKAFA

SEQ ID NO: 366377 - protein, 345 aa, unidentified
MELHTIGIDLGKTVFHLVGLNARGEVVVRKKFTRKQLLHFTANVRVELIGMEACGGAHFLGRALREQAHEVRLMPAQYVKPYVKTNKSDYIDAEAIAEAVGRPKMRFVPIKSDDQLDLQSLHRVRERWVMRRTAVINQIRGLLLERGITFCKGRRHVDAALPGILEDTSAKLSGALRMLLAQMKLELDHLQMRIDEADAVIKKTAGDNEACRRLVAIPGIGPITATAIIAAIGNGAAFKKGREFAAWLGIVPGEYTTGGKQKLLGISKRGNSYLRRLFVHGARAVLQQSAKQSSGLSAWLAQLTIRTHPNVAAVALANKLARMAWAVLAKNEAYRPPILVGATPA

SEQ ID NO: 366378 - protein, 338 aa, unidentified
MIVIGVDVHKQSLTAVAVDEAGRMLAEKRVAAANQELLEWGSGLGRERLWAIEDCRQLTRALERELIAVDEQLVRVPPKLMAPERRAGRQRGKSDPIDALAVARAALREPRLSRPRSDEQPFRELKLLVDHRDDLVDERRRAQQRLRWHLHQLDPSLLVPAKALDRPVHLDRVGRWLARRPGDVQVRVARELVVRCRQLTRTILELDCELERRTTETAPALLELPGCGTITAAKLLAEIGPVDRFQTDAQLARHGGVAPLEASSGRVQRHRLDRGGNRQRNCALYRIAITQARYHPAARAYLERKQAEGKSRREAIRCLKRQLARVIFNTLKASPALT

SEQ ID NO: 366379 - protein, 350 aa, unidentified
MQSQSIAIPKLFIGLDVHKKSWQAHLRTDISDHKGFSLPPDPEILSNYVFKHFPDHQIELSYEAGCCGFSAAREFINLGWSVTIVNPSDIPRMDKQLYQKTDKLDCRNLAKQLQLGQLKAIYIPTESQEQLRSLLRQRDQLVKQFRKVKAHIKSLLLFHGITIPPEFDNPNWSKNFQQWLFQLPWPNITGMQCLHSKLRVYNLLNKEILQTSNELRAYCRKIHHTDYYLLKSIPGIGGILSTAILAELGDIRRFNNERQFANCIGLVPGIHQSSETSNYMGITPRCKALLRTYLIEAAWVAIRLDPEIQQFYRKHVGKNQKTVIVKVAHKMCRRILSVIKSGIPYQIGHN

SEQ ID NO: 366380 - protein, 402 aa, unidentified
MEILYKICCGVDVHKKVLVACLNISGKREIKSFGATTKEIHQLCDWLKESACEMVAMESTGSYWKPVYNLLESKEIPAIVVNAAHMKALPGRKTDVKDAEWISDLLRHGLLRASFIPDREQREMRELVRYRKSIVEERAREFNRLQKILEGANIKLSSYVSEINGVSARRLLDELVLGVVHTEESVKDVVHRELHGKASEIAESMNGILTRLQVDMLRMVLSHIDDMTMRITELDKVVAEHSKKKERAIQLLDEIPGIGNRGAEVVVAEIGTDMSVFPTQAHLCSWAGLSPGNNISAGKSYSGRTTKGNVTLKATLVQAAWAAIRVKNSFFSAQYARISVRRGKKRAIVAVAHSILIAIYQVIKQDTNYKDLGSDYYDKHNKERKIAGHLKKLKQLGWQVSA

SEQ ID NO: 366381 - protein, 343 aa, unidentified
MDYFAGLDVSVKDTSVCIVDGTGKVIREAKVASEPDALLPVLKNPVYRFKRIGLEAGPLSQWLFSALGEANLPVICVETRHMRAVLKAQINKTDRNDARGIAQMMRVGLYRPVHVKTLRSQKLRMLLTHRKLLQSKAIAVENDLRGTLRNFGLKVGVVGTVKFEGRIKELIENFPDLMALVEPLLVVRRVLREQIGILHRHVVTIVRNDEVCRRLMTVPGVGPVVALTYRATVDVPARFRKSKSVGAVFGLTCSRDQSGERDRPGAISRCGDETMRAMLYEAAQSMLVHSTRWSWLKAWAMQIAKRRGMKRAIVALARRLAVILHRIWVDGTEFRWTRQAAAA

SEQ ID NO: 366382 - protein, 355 aa, unidentified
MKQEKYIGMDVHQATISVAVMDSSGKLIMECILETRAATILEFLHGLRGSLSVTFEEGTSAAWLHDLLKPHVTHLVVCDPRKNALLKDGSKSDRIDARKLAELLRGNQLHPVYHEEHGLRTLKELGRSYLTLTQDVSRVMTRIKALYRSWAIPCSGTTVYAPRYRAEWLAKIPQPGVRLRAERFYQQLDLLQPVRQEARRDLLSESRKHPAVKLLRQIPSIGPIRAAMLVALLQTPHRFRTKRQLWAYSGFAIETHDSGEYRYVRGKVQRNRERITVRGLNDNHNHDLKNLFKGAALSASTRPGPLYDFYVGLLEKGMRPTMARLTLARKIAAITLTIWKKGVSFDAKQLHRQAA

SEQ ID NO: 366383 - protein, 356 aa, unidentified
MEKITRGQAVRVGVDLAKRVIQVHAVDAGGRVMTSRALARDKFIEWCVMLPAGCVVAMEASSSAHHWARKLIGLGLDARIISAQLVSPYRSEGATGKNDANDAAAICEAASRPTMRFIPIKSIEQQSMLCVHRLREGIKEDRTACISRIRGLLAEFGLVFPKGASELQGVLGDVLEDAGNELGTLARLTLQRAQSQWRELDAHLAWCDERIAAHAKGHDAVKAAATLLGIGPVTASAVVATVGDFRQFKNGAQFGAWIGLTPRQHSSGGKSNLGGITKRGDTYLRTLLIQGAKSAVMTAHRRQDKISQWAVALRERSGWQKAVVALANKNARILWAVMTRGEAFDANHLSVKPAGA

SEQ ID NO: 366384 - protein, 356 aa, unidentified
MKTKQYRTIIGVDLGDKKHHVCITDKDGTIISEKTIRNNHTQLSTLAHEHKGALFAVEVGVHSPWVSRLITASGCSCLVANARKLRAIYQNDRKCDMLDARMLAKIARVDPELLSPIQHGSEERQLHRLSITLRDSLVRQRVNIISTVRFSLKSLGMRLPGCSTPYFANLCRKELAGSPLLEVISGSLEALDGLDEQIKKLDKRIEQIAAQFYPQTLLIQQIAGVGPITSLSFVLAVGEPDRFENPRDVGAYLGLVPRRDQSGQSDKQLPISKAGNREVRRLLVQAAQYILGHFGPDCDLRRYGLNIAASGGKAAKRKAVIAVARKLAVLMLVLWKTGQAYEPLRNTQKKEAEEAA

SEQ ID NO: 366385 - protein, 426 aa, unidentified
MKYTQNAKILQIKETTLVIGVDVASEFNYARAFDYRGIELGRLIKFSNDSIGFAEFTEWLKKLKEKHQKDHAVVGMEPTGHYWLTFAQYLKDHQIKIVLVNPFHVKRSKELDDNNPTKNDRKDPKTIAMLVKDGRYMEPYIPEGIYSEIRNVMDTRWRLVKGLNRVRNQVNRWISIYFPEFSQVFGNWEGKAAMITLKEFPTPARVLELGPESILATWRKEIRSAVGIKRARRLFEAAKATVGIRQGLRAAENELNCLLEEYTVLLRHCEKTMALVEELALQVPGIEEMLKIKGVGLTIAAGFVAEIGDITRFEHPKQVQKLAGLNLKENSSGKHKGKTTISKRGRRRLRAILFQGIMPLVARNQEFRELHWYYTTRPNPLKKKQSLILLCCKLIRIFFALMTKKTKYDPEKMVNDIKRPALQTAA

SEQ ID NO: 366386 - protein, 394 aa, unidentified
MKLVGIDVGKNSHHFCVMDKETGEFNVTPTSFSNNKEGFDFLINSLKPYSKKSILIGMEDTGHYHVALLKFLLSNGYTVALINPKTTDLTRKMEGGITKNDKLDTITICDVLDTPECKKQYRITKVDRFDLYEQRQLTRHHHNLKEELNVYCNRLQKSIDLVFPEFNTLFSSKYSIVYMNLLKTFGSAEAIASTDIRTIRKCFEIKGRGNRISLTPEKLKECAKNSIGISSEVETIQIKHLVSQITLIKEQIAEIDKKIEEFSITNNSPILSIPGISHFSGTSILAELGDIGNYSKPSQIIKFAGVAPYHYESSQYNAQHTGITKKGSKYLRKTLYQIILTVINNNPVFKKYYLLKISQGKGHRCAQGHCIRKLLRIIYHLLETGQSFDPALLR

SEQ ID NO: 366387 - protein, 317 aa, unidentified
MTESVKVNVGIDVSKDFLDVHVGDVALRRVPNRSSGLSVLKRILSRYTVSLVLLESTGGYENLAVTYLQSLGYDVCVINPRQARDFARSMGRLAKTDKIDAHMLCRLADVIDASPERSRFVKPLTDERRQRLVSMVRRRRQLCDLMIAERNRRSRTDDYGSESISTVLDFLTDEVARIDRDIAAHVGSCFSDISSLLQTFTGIGPVTASTLLGELPELGKLNRRQITALVGVAPFNRDSGYMRGRRRISGGRSGVRNVLFMAVLSAVRFNPVLKAFFARLVAAGKPKKVALVACMRRMVCILNAMLRDGSRFEVAVR

SEQ ID NO: 366388 - protein, 374 aa, unidentified
MKFIGIDLHTNRFTCCYRNEQSSVENPTKDRVIKTFELNSLGLETFFQTLTDDTYVLVEATITTFSFIMLFKDRVREAIIANTYELKQVSLARCNTDKLDADKLCRILKAQVLSGELLVSPVTIPSKEIQELRGLFTTYRLYQKQNVQLKNRIHSLLKEQLYGFTQEEIFGKSDREKIRAISPGSVLNFQINQLLDRLERDELDVETLKDQVLLHASPFIAQIDILTSMKGISVFIAIAIIADIIDVSRFKNSKAFTSYLRSAPRVANSNTSVSIRGTNKKGRKLSATLLTQSLNHVLNSSHKLSRWYNRLCEYKKTGLVRTGLRRRVLAEIFQMLKKSEYHYGREVEKHELKMAQYRRFLEKQKNNVVLKKIA

SEQ ID NO: 366389 - protein, 376 aa, unidentified
METIYIGVDFHARQQTICYLKTETGELVTCELKHQDKQKVRAFYAEFRGPVIVGLEASGYSPWFERLLEELGCEVWLGHATEIRRRARWRQKNDRRDAELILDLMLHDEFPRLHRPAVQSREVLRMLRYRQKLIKIRTMSKNSLQALAIQAGLAKRSSLFTREGQQQLRAAEMSPVMHWQREHWLQLMEPLNQQLLETMVWFKAQSQGDVSITRLRTHPGIGLLTSLCIVHTLQPVSRFRNTRKVAAYAGFDPVERSSAERKCFLGISKAGSRLLRYLVVEAAQTAVRKDEDLKRFYQRLADRRGRPKAKVAAARKLLIRAYIMLRDEIDYAEFRHRAVAARLARRGQGPSNVPEVLIGQPASAERQEQLSRTKKK

SEQ ID NO: 366390 - protein, 414 aa, unidentified
MIFMIKENYVYVGIDLHKETHTAVMIDCYNQKLGEITFPNRPADFPKLVTKVKKCNTDGKEVVYGLENAYGYGRALAVWLIDKGYLVKDVNTAISHRQAKHRGAMYRKSDSDDAKAIALATLNMLEKLPDACLNDAYWSLGQLVHRRDNIMKQRTRLVNQLHEQLCIAYPSYKSFFNDISRPTALYFWEHYPFRKYLRGKSVEDLRKELVPVSHNKCSTKTCEKILDAVASDKVKNIDYQDARDMVTLSIVSDLQHYDSQLAEVDKMLEQMYKMLGCTLTTIPGVNVITAVKILAEIGDIKRFSNANKLAQFAGIAPLHLSSSGKGKDVATKQGNRRLQAAIYFLAIQMVQLSSKGTPRNPVVRAYYEKRKAEGKTSQQALICISRRLISIIYGMLKNGTEYRMPVVENAGEKL

SEQ ID NO: 366391 - protein, 344 aa, unidentified
MEHYAGLDVSLELTSLCVVDAQGHVVREAKVASEPEALIGFLRAQELEIGRIGLEAGPLSQWLHAGLVAADFEVVLLETRHVKAALSAMTVKTDRRDARGIAQLLRLGWYRPVHAKSASAQEVRSLLTARKLIQCKLLDIESGIRGVLRGFGLKVGPISRGRFDMRVRELVAGQPILETVTGAMLAARAALATEFKRLHCELLGLVRADPVCRRLMSVPGVGAVVAITFRSGVDDPARFRRSRDVGPHFGLTPRKYQSGEIDVTGSISKVGDRMVRTALYEAASVMLTRTVRMSPLKSWAIAVAKRRGAKKARVALARKLGVILHRMWVDGTDFRWTNEKLAMA

SEQ ID NO: 366392 - protein, 314 aa, unidentified
MKAQESFAYVVGVDVSKAKLDIALPKESLSIANNAKAIQQLVDRIGSDSVMVVMEATGGYENQLVQVLHKHAIALAVVNPRRVRDFAKGIGRDAKTDPIDAGVIAYYGEIVKPAPQLAKSDDEKKLGALVERRRQLLGLIGQEKNRLQQVDDAGIKKLIQKSLEMLKKQLKIVDERLAKAIKKPAAGNQRKIEILESAKGIGPVAISTFLAELPELGELNRTEIAKLVGVAPINNDSGQKAGKRRTMGGRSYVRRVLYMATLSATRHNPTIRKFYLHLVAKGKEKKVALIAAMRKFLTILNTLIKKDELWKTSP

SEQ ID NO: 366393 - protein, 362 aa, unidentified
MSNSTTWVGMDVHKENIVTVSISGNSGTVMTRWETPNTAKGKERLAGRIAGLGKVRCVYEAGPCGYDLRRFLDGKGIPCDVIAPSLIPTKPGDRVKTDRRDAEKLARMHRMGELTAICVPTPAQEALRDLVRAREDANEDLVRCRHRLQKFLLRQGRRFEGKSWTREHWRWIRALTFDDANAGTVMTEYVLAVDQQLERVARLDARIEEEAQNPGIAPAVARLKTLRGVRTLTAMTIHSELIDLSRFASPRDLMSFIGLVPSEYSSGGKQRRGSLTRAGNAHLRRVLVEAAWHYRHPPHRTGETIRKRREGQPPDVIETARKAEVRLYRKFTRMVMRGKRTTVAAVAAARELAGFVWAIGRI

SEQ ID NO: 366394 - protein, 424 aa, unidentified
MNLTQNDRLNQVTSDTLIVGVDVGSQTHFCRAFDWRGFELSRRVFKFSNTRMGFLTFLRWTEELMKKTEMKKVIVGCEPTGCYWLTFQKFLHAHNILLVTVNPFTVNRSKELDDNSPEKSDLKDPKTIALLVKDGRFSTSYLPSGVYAEIREASVCRDQIMKQHVRLSNQIQGWLQKFFPEYFECYSGWDSTSGLLLLKEAPLPQDILKIGAGGINQIWREAKVRAAGLKRAQTLIEAAQNSVGLEAGEAARLEIWILVNDYLLKEEQLRRLDEYLEEKVKEVPNVEKLLAIKGVGMSTVIGFVAEVGDIGRFTDPKQIQKLAGLEIVKKSSGKKKGQPRISKRGRRKLRRTMYESARALMNWNPAFQDVFLYYRNRQRNPLGGMQAKIAVACKAIRVFYVVLQTGCDFDEEKFRKDIIHPEAA

SEQ ID NO: 366395 - protein, 368 aa, unidentified
MEKGTTYVGLDDSKRRIVAGILRPGDTEPELREIPNDPPHVRRLFARLIRDGEVTACYEAGVSGYDLYRRLTALGVDCKVVAPALTPRRPGQRVKTDRRDAAKLVRLFRAGELTAIHVPDETEEAGRDLLRCRDDVRRDVLRWRHRVLKLLARHGRAYLAGKNWSQAHGRWIRSQQFDQPPLQRAFEASLFALEQALARQAELDKEVEGLATLEPYREPVGWLRCFRGLDTLSAMVLLAEVVDFARFRRPRELMAYLGLVPSEYSSGESHRRGALTKAGNSHARRVLVEAAWHYRHRPTVGRALAHRSVGQPPAVVAQAWRAQQRLHRRYRHLVGHGKRPPVAVAAVARELVGFIWAAMTGRESRTAA

SEQ ID NO: 366396 - protein, 385 aa, unidentified
MRRQTLGAMMWWVYYLPMKTKTTPSVVPTPTPVVANGFTLGLDLGDRAHHVCVLDAAGQIVREESLPNTRPGLAKLLADFPCATVALEAGTHSPWISRFLTEHGAKVLVANPRKLHAISRNERKCDRRDAQMLARLARVDRALLYPIQHGSAQAQHDLLGLKLRDALVRTRVNLINTVRFTLKSLGHPVRNPSSESFHKTVLADIPADCLPVMQPLLTVLAQVTEQIKGMEHDLVQRSRKDYPVTQRLQQITGVGPLTALCFVLKIGDPQRFSRGRDVGAYLGLCPRRDQSGGTDKQLRISKCGDGLLRRLLVSAAHYVLGPFGPACALREHGQRLTGTGSAREKKRAVVAVARKLAVLLLSLWKHGTDYEPRVTAAPALIMTPA

SEQ ID NO: 366397 - protein, 386 aa, unidentified
MQKLNDLSRSLTALEPDGTLIAVIEMSLSSWLVAGIVPGVERQPLKKLAVDESALLKLLHRWREEAEKAGRRIERIAVAFEAGRDGFWLARWLKARGIEAYVIHASSVAVSREHRRAKTDRLDTELLKRSFLGWLRGERDHCKMVEIPTMKDEDAKRPNREHDSLIGERSRIVNRMKAALVRLGIRGFNPKLKRASARLDGLRTPEGEPIPPNALAELRRDMERRRLVNNQIRQIEEERLKRIEQAPCDGPHVMVRLLARVMGVGIETADMLVHEVLSRNMRDRRAVARYAGLTGSPDESGRKRREKGLARSGNVRVRRGMIQLAWRFLLHQKNSALTKWFRSRTENARGTRKPMIVALARKLLIALWRLVREGIVPDGVVLRAAQ

SEQ ID NO: 366398 - protein, 386 aa, unidentified
MERNDLSRSLVAFDQNSTLVAVVELSLKSWLVAGLVPGLTRQPLKKQGADAAVLLGLLYRWRDEAAKAGRVIKRIVVAFEAGRDGFWLARWLRARGIEAYVIHPSSIPVSREHRRAKTDRLDTGLLLRAVLGWLRGEPKHCSMVAIPTLEEEDAKRPSREHESLVGERTRLVNRMKATLMRLGIRGFNVKRRKAADGLAELRTPEGVALPPNTLAELRHDMARLRVIGEQLKEIERTRLERLRKAPREGTHPMMLMLAKVKSIGIETADMLVHEVLSRSLRDQRAVARYGGITGAPDESGSKRREKGLAKAGNARVRRGMLQLAWRWVMFQKQSVLAQWFRERTENAGGRHIRKTMIVALARKLLIALWRYVTTGEVPAGAILRAA

SEQ ID NO: 366399 - protein, 317 aa, unidentified
MTTTSETYVGIDVGKKWLDISLWGEDAVWRMTNDESGVAEVIDRMMGINPQLIAIEATGGYEQLVVQGMQLKGLSVAVVNPTRVRALSKATGKLAKTDAIDARLIAEYACKIQPIAQASKEANEIQLKALVTRREQLVEMRTAEKNRLGTAPNSMKLDIREHIEWMGIRIDELEVLIKELMDSLPELCAQAKLLDSIPEVGFITAVTVVAEIPELGQIDRQKIAALAGLAPFNRDSGKKHGKRRIFGGRKGVRRVLYMASLSAIKHNPVIQSLFERLIKNGKLFKVAITACMRKLLVIMNAMARDYVVWRSPTPFST

SEQ ID NO: 366400 - protein, 414 aa, unidentified
MDVVHNRCAGLDVSKRDAKCCVRIQSPGRARAKSTVTTWSSMTSQILALRDHLVEEQVTLVVMEATSDYWKPFFYVLEDAPFEVMLVNARHTKNMPGRKTDVNDAQWLAQLGAHGLVRGSFVPPQPIRQLRDLTRTRTAITRERSREFQRLEKLLEDAGIKLSAVASDLTGVSSRAMLEALVEGERDPAVLADMAKRRLRNKIPELTEALHGRFGDHHAFLVRLHLDLIDQHTVAIEQLTARIEDAMAPFRGARDLMVTIPGISTGVADVVIAETGADMSRFATAGHLASWAGTCPGSNESAGRVKSTNTRPGNPYLKGALGVAAMSAARSKNTYFSAKYRRIASRRGPLKAVVALEHAMLVAIWHMLSDGTLYSDPGDDFYTRRNPDRTRLRAIEQLQRMGYTVTLEPIVEVA

SEQ ID NO: 366401 - protein, 444 aa, unidentified
MAAVMIGVDPHKGSHTAVAVGVAEEQLGKLRVRASGERARQLTEWAASWPERTWAVEGASGLGHLLAQQLVAAGERVLDVQPKLGARVRLLAAGDTNKNDPNDARAVAIAALRSANCRQVQADDHTAVLKLWSKRNRDLGRSRNQVACRLHSVLCELVPGGAGKEITASGAARLLAAAEPSGPAEIARWQLASDFLEDLRRLDEQMKQAKKKLAAAVKASGTTLTEIFGVGPVVAAIVLGETEDVARFRDRDRFAAYNGTAPVEVSSGRRTVHRLSRRGNRRVNHAIHMAAITQIRYAHSEGRAYYDKKVAEGKTSKEALRALKRRISDALFRRLRADARRAATGSAKVTGPGGQAGNGTDASAAGSHPGCRLFGEATPGPEPTTPRPSRTAAKPQLTSLKKRTQSLRMDVRPQRPCSRWVLRHAHGEWRVTPEFRSSEADLGR

SEQ ID NO: 366402 - protein, 359 aa, unidentified
MLDAETTITIGMDLGDQWSRFAVLDATGNLIEEGRVRTARGALRQRFASLAPAVVALEVGPQSAWVSDLFTELGHSVIVANPREVKAVTGSTRKSDREDARVLARLARVDASLLHPVRHRCEEARAGLLAVRSRAALVEARTQLINCARGLAKTFGVRVPACGTANFAARARAVLPPALCATLSGLLVSVDALTREIVAYDEGLEGMAENLYPETQRLRDVPGVGVLTALAYVLTIDEPHRFANSRDVGCYLGLRPQRRQSGGFDPQLGITKTGDTYLRKLLVQCAHHILGRFGPDTALRRWGLKLCERGGRNGKKRAVVAVARKLAILLHRLIIVTQVKKVLTRECRLMEGIRRETCR

SEQ ID NO: 366403 - protein, 317 aa, unidentified
MTNENAKYVGMDVGKGWLDIAVWGEAKINKVSNDPAGVSELVEQMSELEPALVVVEATGGYERLVVEELFSSGFPVSVANPTRVRALAKATGKLAKTDDIDAALIAEYAAKVQPAPVDSKTESELHLRALVTRRGQLLEMRTAEKNRLKTAHRSMKVDIGEHIDWISARVQELESEMLRLIQSLPDWQKQVQLMESIPGIGFITAVTILAELPELGQLNRQKIAALAGLAPFNRDSGKKRGKRRIFGGRKGVRRVLYMACLSAIKHNPIIRKFFNRLTEKGKLFKVAITACMRKMLTIMNAMTRDQSHWKSQEMAAG

SEQ ID NO: 366404 - protein, 348 aa, unidentified
MQISTIGIDLAKNVFQVHGVDAAEKPVLKRQIRRGQMLEFFGKLPPCLIGMEACATSHQWARELRKLGHDVRLMPPSYVKAYVKRGKNDAADAAAICEAVTRPSMRFVPIKSAEQQGSLMLHRTRDLLIRQRTQLINAMRAHLAELGLVAQKGREGLQQLVRTVADAGDERLPSDAGFACQAIVAQLQAVQMQIAGLDKRIHQVHRANPASQRLEAIPGFGVIVSTAVVATMTDPKAFKTGREFAAWIGLVPRQNSTGGKERLGSISKQGDRYLRRLLIVGALAVVRSARARPDKYPWVVAMLGRRPAKVVAVALANKMARVAWAILAKGETYRAPAPTSRGAIVASA

SEQ ID NO: 366405 - protein, 402 aa, unidentified
MNAVGIDVSKGKSMVAIMRPFGEIVSAPFEIKHTTSDINSLVELINSVEGESRIVMEHTGRYYEILAHQLSEANLFVCAINPKLIKDFDNDSLRKVKSDKADAVKIARYALDKWQNLKQYNVMDELRNQLKTMNRQFGFYMKHKTAMKNNLIGILDQTYPGVNTYFDSPARSDGSQKWVDFASTYWHVDCVRKMSLNAFIDHYQNWCKRKKYNFSQSKAEEIYGKAKELVPVLPKDAITKLIIKQAVNQLDNASTTVESLRTLMNETASKLPEYPVVMAMKGVGTSLGPQLMAEIGDVSRFTHKGAITAFAGVDPGVNESGSYEQKSVPTSKRGSSDLRKTLFQVMDVLIKTHPQDDPVYQFLDKKRAQGKPYYVYMTAGANKFLRIYYGRVKEYLSSLPEA

SEQ ID NO: 366406 - protein, 372 aa, unidentified
MTSIIYVGMDVHTTNYTLCCYSMEDDRFFAEVQVEPDAKNILKYLARIEKQQSRDCRIVCGYEAGCLGYSLYHQLHAHGIDCVILAPTTMMTKPGKRIKTDRRDARLISKCLAFHTYSPVYIPTEVDDAVKEYIRMRDDANSALARVKQQIIAFCIRHGKIHDGKSYWTNKHLEWLSSLDLGNKILSEVLQEYLIRYYQLREQVDMYDMRINELAQAEPYRQKVEKLGCFRGIAAHTALSFCVEVGDFRRFATAQQFASYLGLVPGECSSGDKQQYTGITKAGNSHLRKLLVETAQVFGRSATKSGKSVALKERQAKCDSLTVAYADKANARLKKKYFKIAMRSNVNIAKTAVAREMACFIWGMMTDNISCA

SEQ ID NO: 366407 - protein, 362 aa, unidentified
MIVAEHFGFVVGIDTHAKTHTFAIIETGSGGEVANETFPATAAAGSRALSWVLRRTEASPGQVLLSMEGTGSYGAKLRQQATDAGFQVTEAPVPNQRLGRYQGKSDSIDAARAARGTLSIPMDRLREPRSGQNHMALRILSNARRTMARERTAAINALTALLRVVDLGMDARKPLTVTQTRTIAGWRERDEEFGVQTCRREAIRLAKQILTLQEQMTRNHAELEILVKQVQPCLLDVYGVGPVLAAIILTAWSHTGRVRSEAAFAALAGTCPVPASSGGTTRFRLNRSGDRQLNKAIYTIALIRMNRDPATRGYVTKRTSQGRTKKEIIRSLKRYITRQIYRTLNAAQESLPAAGCPRQGVS

SEQ ID NO: 366408 - protein, 317 aa, unidentified
MIGIDVSKESLAVCCWEPEAPAPAWEAEFPNSPEGLRALLAASDPEAAWVIEPTRPYSELPVRLGQAAGRQVLSASPYAAKRFLQSLNPRAKTDRVDARGLARYGLAAPLRPFAPKNPQLARLWGLLRVRCKLASARAALALQQQTLPEVSADIAPILAQLDTQLAALAKQIALVGKTIELFVRLDEIPGVGPLTATALTVRLLSLGFDRYDQFVAYIGLDLRVCESGSFRGHRKLSRRGDATLRWLLYLAARAALRSKDRTFRERYDRERAKGLTTTGALCAVARKLAKVAWSLAHTGECYRAARVSQALTPAIGP

SEQ ID NO: 366409 - protein, 402 aa, unidentified
MTYDDVIGMDACKYFHHACVLDIDGTQVLSKRINQNEQSLRALFSAFSAYDHKVLVVVDQPNNIGRLTVAVAQDIGIDVRYLPGLAMRQLSRIHAGNAKTDIRDAYIIAHAAKNLPESLRSVDRVEEAFLQLKVLNGIDEDLARSYTRLINQIRSALVGCYPQFEQALRGQIIHRKWVLHLLARYGGPTKIKRLGKAKAAAFARRYKARNPEPVLDAIFAAISEQTVTIAGAHYAEMGVAMSAKDALLKLEHRQQIEKEVIELINDIPHTQFLLSMPGIGPKTAAQILMTAGDMSDFPSAGHLASYAGLSPRTNQSGTSIMSNSLNRAGNKKLKNALWQSSFASIRFHERSRQFYERKRREGKRHNAAVVALARRRLNVLYAMMRNHEHYHDPAPSQEDLAA

SEQ ID NO: 366410 - protein, 338 aa, unidentified
MHVATLGIDLAKQLFQLHGVDDRGQAVLSRRVRRSQLMEVVRSLPSCVIGMEACASAHHWGRAFEQCGHTVKLMSPKYVKPYVKTNKNDCRDAEAICEAVSRPTMRFVAIKTVDQADLQAVHRSRSLLIKTRTALINQIRGLLGEYGLVIARSPERVRPALVGLLNDEQTGLTPFARDTFSELYDQLVELEQRIVRVNQRLDRVFRAHPVCRKLAAVPGIGPLTATALLAAVSRPDVFQNGRHLAAWLGLVPRQFSSGGHARLGGLSKRGNRYVRTLLIHGARAVVQRAANKTDAHGRWMWDLKRRKGTNVAAVAVANKNARVIWALLAHDDVYRRPA

SEQ ID NO: 366411 - protein, 344 aa, unidentified
MTLVGCDLHTRKQQVAALDTETGETHERQLVHEGSAVEEFYAALPCPVTVGIESTGYAIWFHALMHRLGHTVLVGDAPKIRAMVFRKTKTDQRDARHLLDLLRHDRFPTVWVPDPATRDLRARLTHRRRLVRIQTMLKNGLHAIALNQRLARGAKLLRHDGLAQLQALPLPPYTAQRRDHSLELLGTLHTKIQQLDAAIATAALAHPDAPRLLTHPGVGPLTALATVVVLGPVTRFADAKHVVSYVGLAPSLHASADKYRLGHITKQGSSLLRWVLGQAAPHAARFDADLKRTYFTLRQRRGRAKARFAVTRKLLVRLFIMLRDHIDYAEFRRRGRPPAPVSAG

SEQ ID NO: 366412 - protein, 374 aa, unidentified
MYHIGVDLHKDSMTIATANSEDGKIKITEIPCKCVGKVREFFASFSGKECRVLVETVGFYHWFWDMVNPLVSEMVLVNATEARKYSANQPKTDVRDAKKLAELSLDGSIDRNPCLRVFVPDRNLRDLREATRHRHQIARSLAHARNRFRRYLLKNNFPGPKVLDNSSIQKWLARWEENLSSLHRFALRQLEDQILILSRQERDTDEIIAKMMQEPRFKETAGRISSVPGVGKTATPTIIAEVGDFKRFADPQRLASFAGLVPRVFQSGNSCRHGRITKKGSSNLRWILQQAAWTAVREDDATQKIFARIARRSGRKKAATAIARKILCWLWAMERNGKNFREERKETALDRNERPAVTLQGFMGQHPFGTSPIA

SEQ ID NO: 366413 - protein, 338 aa, unidentified
MDAGYEGRQTVGMDLHRRRSVLVRMTETGERLETVRITNDCDRLREVMTRAGEAPEVVLEATYGWYWAADTLAEVGADVHLAHPLGVKAFSYRRVKNDERDAEDLADLLRMGRLPEAWIAPPVTRELRELVRHRAKLVALRTSVKCQIHAVLAAAGVPVTMSDLFGLAGSELLKTVALPTASRARIDSNRRLIAALDWEVDLFTNLVAGRLRTDPGYRAVQAIPGVGPTLAADDITRFQRPAQLASWAGLTPRHHESDTTVHRGRITKQGSRLVRWAAVEAAQHAGKQEQLGALKERVAARRGRNIATVAAARKLIGLVFYGLRDHHIRCLDTLSRAA

SEQ ID NO: 366414 - protein, 408 aa, unidentified
MYYVGIDLAKFKHSAAVVGDDGKRLVRGFDFPNRRDGFEALLRRLESVGATGAEARVCLEATGHYGRNLVAFLEGHGYEVFEVNPLLTANWRRATSVRKVKNDAVDAEALALWLLAGNPTARRRAKDESDDLRTLARSRTSLSHIIGDCKRRAAAILDVTFPELRGFFSDDFCAAATAILGRWQSAEALSHARLDSIRKVVREAGGRITDARIAELRGLARSSVGTASAPLAFQLRQLLAQIAFTRGQMAELDAELARMVEGSPVLTIPGVGTVLGAGILGEVGDASRFASAKKLLAFAGCDPSVFESGEFVGSRAHMSKRGSPYLRWYLWLAADMARRYDPALGAYYAKKRSEGKCHKVAVSAVVRKLVSIIYAVLRDGTPYSMPENNVPYPVVKVLRNSRSVGLAC

SEQ ID NO: 366415 - protein, 342 aa, unidentified
MDHFAGLDVSVKETSVCIVDDTGRIVREVKVVSEPEALLGVLKNPGYHFKRIGLEAGPLSQWLYSALAEAGLPVICVETRHMRAVLKAQINKTDRNDARGIAQMMRVGLYRPVHVKTLRSQKLRMLLTHRKLLQSKAIAIDNDLRGTLRNFGLKVGVVRTVKFEARIRELVENLPDLAELVEPLLVVRRVLREQFVIQHRRLLAIVRDDEVCRRLMTVPGVGPVVSLTYRATVDVPARFHKSKSVGAVFGLTCAKYQSGEVEWSGRISRCGDEMMRAMLYEAAQSMLRSKKWSWLKAWAMQIARRRGMKKAIVALARRLAVIMHRVWVDGTEFRWTREVAAA

SEQ ID NO: 366416 - protein, 432 aa, unidentified
MSRPQFTQPVVGVGIDTHRYFHQVTFLDADRQHAAPGFSFADSAEGYAQLRQTLEKIEARQPNVHFHIRLDVAGQYAANLERFLHGLPFATTLSVGEPARNKHYRQAIAPKCANDVVDSYACGRFAVVERPPATPAVPEAFHLLREIVSRLESQVRQTTRTINRLHNLMSRVFPELATVVSKFSADYLLELLAKYPTPARIAQARRKSLLAISYLTEEKADKIQAAAKRSVGSTRGEIAEELVRGLVEQVRQSQLAEKKLEKLLLKTYRALPASPHLQVETIIGIGAVTAAVLVAKIVSIDRFETKGRLVGYFGTFPEENTSGKDKYGNPLPPGTMEMSRQGSDLVRRYLWMAALSAAQHNPAIKALYARQMASGKRGDVALGHCMRKLLHLVFAVWKTNRPFDPNHYPWDKAAPGKKAQQETAGRKQDMPE

SEQ ID NO: 366417 - protein, 470 aa, unidentified
MGDRLSRGRRRGRRAAKPVTPSLLKRINLNAAGIDCGSEAHHVAVPPERDAEPVRSFKTFTANLRLLADWLESCGVKTVAMESTGVYWIPIFEILEDRGFEVVLVNARHVKNVPGRKTDVLDCQWIQELHSVGLLRGSFRPAAEIVTLRSFLRHRQKLIQCAASHIQRIQKVLVQMNLQLHNVISDVTGVTGMRILRDIIAGVTDPMALAAHRDRRCRASQEEIAASLTGNYRAEHLFVLRQELELFDTFQKQILACDAEIESVLHTLAANQRSPKAPLPAPRCRLRFCDNEPRFEIRDPLYRLTGADLTQIDSIGPYTALKLIAEIGTDMSRWPTYKHFTSWLTLAPKNKITGGRLISSRTQPSANRAATVLRMCAMVVGRTSTALGAYYRRLAYRIGKPKANTATARKLAILVYRTLKGELDYADPGASAYEEQHRERTLRNVRNRAKRLGFGLVDLETGELIEGVVT

SEQ ID NO: 366418 - protein, 379 aa, unidentified
MRRVCGLDVHKDSIYMCILYENGSKIESVFGVLTPELDKLRDLLVSHHVCEVALESTSIYWIPIWNILSVDFSLKLVNPYFIKQLPGRKSDVKDAEWIATVLQKGLIRGSYVPDCMIQCLRQYERRNHELSKNIVHAEQRMDMILQHCNIRISNYVSCISCKGYQKVVNAIISGESNPKVLVTLIHKRTLNKHGRQVVEDSLNGFVSDTDRDILRQYRDERMQMEQHKSENKAKMQAICEAHYCEELELLQTLPGIKEESAANIIAEIGVDMKMFLTASAIVGWAGLKPRNDQSAGKIKSRKITHGNKYLRKILVEAAWSAARTKDSRFMKMYQRLLARGKSKQKALIAVARKLLVLIWNMLSKKEAFNPEYKRRIQAA

SEQ ID NO: 366419 - protein, 308 aa, unidentified
MKHIGMDLHSTTTEACVRNGKGKIVLRRQIETTRAELEKFVVGIPGRKRVAVEECQMADWVTRVLKPHVDEVIRCQPQFNKLISESEDKCDKTDSESISELLYLNRLKRVHHPELAYRILRETVRAYWIASRELTRAKNRLKGFFLFNGLHEAGDKIYSAHNRSRYLKKLEKAGGHVELGQLLYERMDHCRQLKAKHIRLVRKSAKPMKDLVRLLMTMPAIGAIYASTLVAYLEAGWRIPNKRKLWNYSGLGLRNHESRGIGRRHVSLSGSRLVKHVVMSAAATIASRRGNNALSELWEKDIQNNVDP

SEQ ID NO: 366420 - protein, 340 aa, unidentified
MREEFIKHNSGIDISKDDFKVSLSALSNDFKIVKLGSKTFVNSAKGFISFIAWVKEKRHGNTNISFTMEATGVYYENLAYFLVEHGYTVHVVLPNQSKKFAESLGAKSKTDKIDAQILAQLDLERKLQAWQPLSPCFAALKQLTRERDAIVQERTSVNNQLHAYKHQGKVNPTSIARSERRLAVLNDQIKEIEKEIAGLIKQDKDLYCRIRNIQSIPGVGLITAVTIVAETNGFASINSQKQLTSFAGLDVRIAESGSWKGKSRISKKGNSHIRKALYFPAFTKIKFDDRTQQHYEKLKGKKGKPMIAAVAVQRKLLCLIYTLWKKNELFVPSFGQKAVA

SEQ ID NO: 366421 - protein, 370 aa, unidentified
MGKSVLYVGLDVHKMSVDVAVAEPGPGAEVRFYGRIGGDLEALDKVTRKLQAKGAELRFAYEAGPCGYQVYRHLTAQGHSCLVAAPALIPRRPGDRLKNDRRDALALARLLRAGELTPVKVPDADDEAMRDLTRAREDAICVERRARQRTVAFLLRHGRVYPGKTTWGRGHWAWLLQQVMDHPAQQIVLQEYLDAVREASARVLRLTGQIRDLVPQWHQAPFVAAYQALRGVSFIVAATVVAEVGDLDRFNNPKELMAYLGLVPSEHSSGASVRRGRITKTGNSHARRVLVEAAWAYRLRARVSRTLLKRQEGLPERVRQLAWKAQLRLCTRYRRLLARGKARQTIVIALARELAAFLWAIGRAVAPATA

SEQ ID NO: 366422 - protein, 370 aa, unidentified
MENRSMFVGLDVHKETIDVSIAEGSRDGEVRHYGVIASDLEPLDKVVRALRAPGRCLHFVYEAGPCGFGIHRHLTARGEACVVVSPSMIPKRSGDRVKTDRRDSQMLARLHRAGELRAIYVPDDADEAMRDLVRAREDAVVVGTQAKYRLKAFLLRQGRRYPGREGWTLPYRRWLTDLSFPTAAQHVTLQEYRDTIAETEQRIDRLTEQLRQLTPTWRWAPVVAALQALRGVSFITALALVAELGDLTRFGHPRELMAYLGLVPSEYSSGPNVRRGAITKAGNPHVRRLLAEAAWAYQGIPRIGRQHAYRQEALPKVVCDIAWKAQLRLTARFRRLVARGKAKPKVATAIARELAGFVWAIAREVSPAPR

SEQ ID NO: 366423 - protein, 365 aa, unidentified
MSSVASPAGLVHLGMDTSKKTIVIATLWPGEEIPVTERIANEEAAVRRFFGRLGDPSVLRSCYEAGPGGYDLYRLLTSMGVACDVVAPSLIPKGGSDKVKTDKRDACRQARLHRAGELTPVRVPTQAEEAVRDLVRVRAALVDDRKRAQQRLTAVLMRHGSVWTGSYWTAAHRAWIDAQRFGEPALAAAIAHYRGTLATREAELAAIEAELAPWARRDPLAGPVARLGCYRGIAELGGLTLTAEIVDWRRFPAARAFMSYTGLVPSEYSSGERTRRGSITKAGSEPVRTTLIEAAWACQHAPAIGATLRRRQAGADPGTLARSWKAQRRLNGRYRHLTSHGKARGEAITAVARELAGFVWAEMTA

SEQ ID NO: 366424 - protein, 485 aa, unidentified
MAKRKLSTFDRLRVGAALNRKERREVQQRLNSTDPGLEMVNRDAAGIDVGNESHYVAVPLGRDAQPVREFGSWTAALEEMAQWLIRCGIRTAVMQSTGVYWIAVHDVLQKHGLEVHLVDARGTKNVPGRKSDVQECQWLMKLHTYGLLRACFLPAPEIHAVRTVWRLRDQHVKDAGRCIQHMQKALIEMNVQLHIALSDISGLSGQAIIRSLLAGQRDPKALAALRDPRCQASEEEIVHSLQGNWKPDVLFELQQAVDAYDFYHQQMAKCDQQLKQYMAVLPVRKAEMPVPPAPSSPATHTSNSSHSYKPRKPKGNQPSFDLEAELERILGVNATTIDGIGVMTIQTVLAEVGPDLSAWKTEAHWASWLNLAPKRDISGGKVIRHVRQRQSNRVGNAFRMAAQSLLRSQSYLGARCRYLRARLGGLKGVKAMARVLACLYYRLLTKGQVWVDRGVEEFDRRSQQRELAALARKAHKLGMQLVAAA

SEQ ID NO: 366425 - protein, 347 aa, unidentified
MKVTTIGIDLAKNVFQVHGVDKRGTRVFNKPLKREQMAAFFANLPPCLIGMEACGGAHHWARKLQSLGHTVRLMAPQFVKPYVKTNKNDAADAEAICEAVSRPSMRFVPLKNVEQQSVLALHRVRQSFVKARTAQANQIRGLLAEFGLIIPQGLGHITSRVPELIEDACNELPGAFRLLVQRLLEHLKELGRQVQELEAQIVRWHRQSEASRTLEQIPGIGPITASALVACLGDAKNFKDGRQVAAWLGLVPRQHSSGGKQNLLGISKRGDTYLRTLLIHGARSVIHHAEKKPPHSVASAWITAVVQRRNKNVAAVALANKNARIVWALLAQGRPYQADYAAKVASA

SEQ ID NO: 366426 - protein, 345 aa, unidentified
MSAYVPIDLHRHRSVVMNMAADGEVLGWVRLANDPEALVAEVLKCGEDPQVAIEATYGWYWAVDALHPAGADVHLVAPSRLTAFEGRRVKNDQRDCQVLGDLMRAGMLPHAWISTPEAREWRELVRYRAKLVGFRTSLKAQVHGVIAKHGLTVGVSDLFGPGGRQLLAHWLETDPWFRSAFGQRIESSLVLMDAVAHEIDEVESSIRHQFRDHAGYHAIQQLPGIGPIIGAILIAEIGDVHRFASPAHLASWCGLTPRHRESDTTIKRGPITKQGSKLVRWAAIEAAQKLSKDSWLRDQRDRLAERRNSKSVAKVATARKLITLVYYGMRDGEIRCLDRPHPTAA

SEQ ID NO: 366427 - protein, 340 aa, unidentified
MQKQKKFYLGIDVSKLWFDAAILSVIDHQKQPMQCERFDNTHEGMKVFHKWLLRKSVSFDQNSFVVIENTGIYHRLIWQYCSAHNIPIYIGNATDLKWRMGMVRGKSDKVDSSRLCDYAYKNGDDLKATPALDPGLLNLKDLMTARSNVLAQINSIKTYLSELKMFKGKQIHQLMEQSHQAALQGLKQSLVELEAQIKQAIKENPQLQRNYDLLISVPGIGHLSAAYLICCTANFAGERTGKQLASYAGVVPFSERSGTSIKGRPRVHKMANKELKKMLHLGAMSAIRYYPEFSDFYNRKKTQGKHPMSILNAIRNKIALRAAAVIKNQQPYVDNYKKAA

SEQ ID NO: 366428 - protein, 321 aa, unidentified
MTEAQDKIEFAQVIERGCGIDIHKSVLVSTVQGKGIKTETRSYDAFTDSIKQLRGWLKSLGITHVAMESTGVYWKPVYNILEEDFEIVLVNARHIKNIPGDKTDKKDSRRITKLLLAGLLKGSFIPTRSVREMRDLTRYKRRIIEQIASEKNRIQKFLEDANIKLSTVVSNMSGAVATKIIDAMIEGEGNPEELAKLRHGKMKASEQELIVALTGNMTVHHKFMLKMVKQSIKDKQLLIDELDKQIDNKLKENNMVLDAELLSTIPGVDKEAAAYILSEIGNDMGHFPDEQHLASWAGLSPGNNESAGKKKAQEPRMVING

SEQ ID NO: 366429 - protein, 425 aa, unidentified
MKIQTIHSKINSDNKLVVAFDVGKDKLDAYCEYGQHCFQDSFANNTLKIEQKLITFSGIAESTGYDGLRIVAEPTGVYHLKLFRTARRLGHQTALVNPESVHKFKVVESNDSGKTDNKDSRVINLLAKYGKTLIDRNIRDEYLLLRQLNTMVIDEEKAYTATRCKIHRVLAELFCDYSFNNEYLYTNVGRIFMKKYHANPYRIIQRGYPAFFHRMKKAASRIRKTTLQRIWRDAQASVRHQLPADYVQILESRLNYLWEELVLRETRIAEIEDAMIGVTDELREKDPNIPLPVKGVVTAFRIAQVLAETGSLNDFESIEELMRYAGLNIRERQSGYYRGNNKISKKGRSNLRRVLGYIVLSLVKKKSLYGTVYHAKKDTGMVGNKAMVAMMRKFLRMFYGWYKSGLPFNKNRVFTDEVNCVQITQ

SEQ ID NO: 366430 - protein, 425 aa, unidentified
MKITQTAQKIKVNFVMDLSVDVHKDTLNFFFETKGKEYVDECSNRTTVIQKKLKEYHEVALNHGMKTLRVICEPTGEYQNKLFRTARKMGFLTCYVNAESVAKFRIVETNDNGKTDTKDPRVIRTLGQLNKTIRHRILDDDYLTLRKLNKVLDEVDEVKKGIRCRISKLLVEMFCDYSFEKDFLYIASGKALVEKFGCNPYRIVTAGYRGFCALMKKGAPRIRETTLKRLWDDAESSALNEQPEGYIEVIETQLKQLVEDYWRNEERSEAIIEKMIGILERLRSRDPNIPKAVKGVINDKHIARLLGETGPLGDFTNWRMLMRYAGLNIRMRQSGRYSGLNKITKKGRSLLRKVLQRIVFPLVRQGWLYGPYYHRKKEIDKMPGNKIITCVSRHFLKKFYGWYKSGEAFDQQRFFSCETQYRKAA

SEQ ID NO: 366431 - protein, 358 aa, unidentified
MQSNKISFKGQRIFIGIDVHAKNWEVAIAPEIGIVRRHSQKPSAKELFDFLKKNYPDGEYQAVYESGFSGFSTYYALKEVGIDCMVIHAADVPTTQYEEVMKTDRVDAVKLARSLKAGLLRGNYVPEKQSIDDRSVVRIRKTIQKQLSGYKARVKHLLHCHGVELPERFSKKQTHWSRAFITWLMKDVRLMSDTRASLDLLIRQVEVLRGSLLEATRQLRKMSQTERYKHRHDLLRTIPGIGLIVTMCILTEVSEIKRFHNENQFAAYLGLIPTSHSSGEKTVHGEKTFRGNKKLGPMIIEAAWITIGRDAGLGAQYFQYKQRMEPQEAIVRIARRLSNIIFSVLKNEKEYVPYQMGN

SEQ ID NO: 366432 - protein, 442 aa, unidentified
MRIVYKRCCGMDVHKDSVTACVLLIDEDGEFRKQTRYFPTMTRGLKEMAAWLASLEVEAVAMEATGVYWKPVWNIWEAEMKFQLLLVNAHHVKHVPGRKTDQKDSEWIAELLQHGLLKGSFVPPPSIRRLRDLTRTRAKVTQNVATFANRIQKVLEDANVKLGSVATDALGVSGRRMLKALIKGQRDPKQLAQLALGRLRKKLSQLELALEGHFTEHHAFQIKALLDLVEFGEKRLCQLEAEIQRLLRVQEPEPRRPDDSAIAEVDTSSTPPTSPLQRAVELLDTIPGVDQVAAWTLVAEIGINMHQFGSASQLAKWAGICPGNNESAGKRLSGKTPKGNIWLRRVLCEAAWAASRTKDTYLAAQYKHFIVRKGKKKTIVAVAHSILRIAYYLLTRQCPYTELGGDFFDRLNQEAVRSRLVKKLVSLGYQVTLTPVSSEATA

SEQ ID NO: 366433 - protein, 343 aa, unidentified
MKLTRVGVDLAKNIFQLHGVDRAERAVWCKRLKRNRWIKEIEQNVEPGAEIGMEACGGAHHWARLLQSKGYRVRLIAPQFVKPYVKSNKTDANDAQAVCEAMSRPSMRYVAVKTIEQQDIQAVHRVRASLISERGAKANQLRGLAYEYGLVAPREIAALRVAVPTWLEDASNGLTVRLRALLSGLYADLRALDERVGELDKEIRAIGRENEAVGRVQQLRGIGPLIASALVAMIGDARQFKNGRHVAVALGLTPRQHSSGSKERVLGISKRGDSYVRTLLIHGARSALRTAPGKNDRMSRWALALAKRSHVNVAVTALANKMARVAWAMLRHGTTYEPNGLAA

SEQ ID NO: 366434 - protein, 435 aa, unidentified
MSNNFKHDLFISVGIDVGADFSFMSIALPNQTFVGKPFKIIHSDFNSLSMSVSKIKEAEEMYSLESRIFLESTGIYHFPLFCYLRDKGFLVSIINPIITKNSTNINIRKVHNDKFDSKKAALIGLKPDLKVSIIPSDLALDLRNLSREYYDLVDNRSAYINKLQGELRMVFPQYLNIFSKITVNTSLTLLEKFICPDGFLKASKNDIITTIRSTARFGISYAEKKYNAIIKAANEAKTFGYSVNSNFKRILLYIRFIRQYNEEIEAILTDMNDIVESNEDTAFVKQIRLIESFKGAGFLSAVSLMCEIGDFSAFKSPKQLFAYFGLDPAVKQSGKFNGTDVKMSKRGSRIARRVIHTMALVSIALNRNGSANNPVLRNYYLKKCQSKPKMVALGAIMHKVCNIVFAMLRDEKEFKIITPEEHQINYLKARCDIAA

SEQ ID NO: 366435 - protein, 355 aa, unidentified
MGHDRPVNAELEEVLMSIVCGFDVHRQQITFDLVDQVSGEVQTGRVTPATREGLREWLALIDASRLRVALEATTGWRFVIEELERAGAVAVLAEPAETRALRGPKRRAKTDRADARHLRELLERDGVPCSWVPPTHLQELRVLVRLRHSLAGERRVWLQRVQAQLFHQGAPPVSGRLLGPGGAAAEAMLSPAGRELVDTADRVCAQLEREIGELDRRLAVWARRHPACRALQRLYGVGPTIAVALYAEIGDARRLSSSRRLVRLAGLDVTVSESADKRSPGRLSRQGTPILRWAAYEAALSACRRSSPDHTDYQLLRAQIGHGRATLTIARRLLRRAHHVLVAVGDDLLAPLPQP

SEQ ID NO: 366436 - protein, 361 aa, unidentified
MTGTMTWVGLDVHARSTDAAAIDSMSGELTRVRFGPGIDGPLAWLGELPGPVRACYEAGPTGFGLYRAAAAEGVGMQVIAPGKTPRGPSDRVKTDRKDAELLARLLLAGSLTRVVVPPPEVEAAREMTRAHDACRRDLMNARHRVSKMLLRHGRVYPESTTWTAGHRRWLSAQQFEEPASAMVFADLVAAVDGLASRKAAIALRLSELATDERWWATVARLRSFRGIDTLTAFSLHLELGADWKRFETAPALSAWLGLTPSLSQSGESSRQGAITKTGSMLARRLLVESAWHYSREPRLGATLANRQAGQPDHILAISNRAQQRLHRVNRRMRARGKPHNVTVVACARELACFLWAAATAD

SEQ ID NO: 366437 - protein, 345 aa, unidentified
MELHTIGIDLGKTVFHLVGLNLRGEVVVRKKFSRKQLLHFTANLQVELIGMEACGGAHFLGRALREQGHEVRLMPAQYVKPYVKTNKSDYIDAEAIAEAVGRPKMRFVPIKSDDQLDLQSLHRVRERWVMRRTAVINQIRGLLLERGITLRKGRCHVDEALPGILEDASAKLSGALRVLLAQLKLELDHLQMRIDEADAVIKKTAGENEACRRLVAIPGIGPITATAIIAAIGNGAAFKKGREFAAWLGIVPGEYTTGGKQKLLGISKRGNSYLRRLFVQGARAVLQQSAKQSSGLSAWLAQLTARTHRNVAAVALANKLARMAWAVLAKNEPYRPPMLADAATA

SEQ ID NO: 366438 - protein, 414 aa, unidentified
MFAVGVDVSNGRSTAAVLGARRKVVMKPFEVPHTADGFAFLIEKLRGLNGEARIVMEHTGRYYESFAMSMYRAGFFVSAVNPLVIKDYREGVDVRKVKTDRADALKIAQSALDKWEILPQYTPMDTIRYDLKTLHRQFQLSSKTRTALNNNLIALLEQSYPGVNRYFDSPVRPDGSQKWVDFVDTFWHVDCVASLSRSAFAERYRKWCKRHGYNFSEQKALELHADARQKFPLVPKSDTCRLLVKEAVAQLRTVSRTVEAYRAEMNRLASQLPEYETVMAMTGVGKSMGPQLIAEIGDLRRFAHQKSLVGFAGTDPIKDDSGDKVSESKPSSKRGSPYLRKTLFVVMTILLQLQPQDDPVYQFLDKKRSEGKKYYVYMTAGMTKFLRIYYGRVRDCLKAKGLWDQPMLEPGSSD

SEQ ID NO: 366439 - protein, 349 aa, unidentified
MLHVGLDLSRRRVDVCLISSDGELVEHFRAPADRDGLYGLTRRVAVYGEPVRGVVESMNGARFVHDELLRYGWEVLVADAQRVKGLAPLACKTDKVDARVLAELSFRDLVPAIWLPTPQIRAERERSRWRLHLVKHRAILKNRVHASLIAFGHQVPMADLFGVAGRRLLAELDFPEPWLGHVHASLELIDDLDRRVGEIERWLRRSGADHRYIPLLMTAPGIGWITAFTIAAEIGDIGRFSSPTKLTGYTGLCPRVSQSGEVDRRGPLSKHGPRYLRWGLMEAAIAASSHPLYKERYQRTKRRLGRQRGAKVAQIELARKLTEAIWYMLTRNQPFMPFVPAGAIIRLTA

SEQ ID NO: 366440 - protein, 344 aa, unidentified
MEYYAGLDVSLRSVAVCIVDEKGKTVLERSVPFEIADIEACLHGWPHPLKQVGFEAGAMSQHLFFGLKKAGFDVVCMEARQVNAALSAMRNKTDRTDARGIAQILRSGWFSPVHMKSREAHAIRALLTCRKAIQRKCIDLANEIRGLFRVFGLRLPPRVDQGSFDERVRAIIESDPDLSRALLPLLDARAVLYKTYRELDRRVKQAASRDEVCLRFMAIPGVGPVAALTFRAAVDDPTRFARSRTVAAHFGLTPRRYQSGEMDNPGRISKAGDPEVRTALYAAANAMMMRAVAGSGIKSWGLRLMRRKGRRRAIVAVARKLAVVMHRMWTDGTEFRRDPLEGTA

SEQ ID NO: 366441 - protein, 483 aa, unidentified
MAAKKDGKTGTDPEGAGAAPEHGGDGAEVAEDRVQVVEYAAAIDVAKGSGMVCTRVPGSRPDRRRQKVWRVEATCREVIALMDHLRCEGIQRLVLESTSDYWRIWYYLAEAAGLEAWLVNARDVKHLPGRGKSDKADCVWHCKLNERGMLRRSFVPPEPVRDLRALTRTRARLAQDQARHQARVEKILEDALLKISVVISDLFGASGRRFLDALVAGERSPKALAALGDPRLKATRRELEDALTGRFRDIHAFEISTHLRIIDAINEEITRLDDKIEEQLALVPRTAPACTACGLAGGGHAPGCADEQVPLLGLAARLDEITGVGECNARAIIAELGTDPSQFPTPGHAAAWARLTPRTRQSGETARPGRTGKGNRYIRGALGQAAMTAAKTDTRLGAMYRRIARKRGKQKAIVAVSRVICEIAWILICDPGARYQELGPDYHTPRSRARQTRDKIREIERLNPGKKVILAPIDPGPEAGAAA

SEQ ID NO: 366442 - protein, 394 aa, unidentified
MAFKIFRKNCCGLDVHKTWIYACMGITDTNGRTEYKQARFSSFTKGLQKLADWLAKYDCNDVCMESTGKFWIPVFNILEKTCWVTLAYPKYTKPQKGNKTDHKDAKWICDLYMCDMVNPSFIPPPDIRQLRDLMRYRSKLTNIMTSEKNRALNCLTVSYLKLDDVFSDVFGKSSRSIIRYILEHPGETFQVAPFIDRRCKHPVERIQAVVDGAISHQQAVKLRECLQHLDELEVHKTNVEKEILCLVQQYPYQLELLQTVPGFSGNIMTAIALISEIGADMSVFPSAKHLVSWAGCCPRNDQSSKKVKSTRISRAGVYLKPLLVQVAIQPFTANADKLSAAGALEIRCQICDGRFLSMWAALFIFLGCPLPPCPKDLHVHNGRIVILASVAWIF

SEQ ID NO: 366443 - protein, 419 aa, unidentified
MNQPDELELAACVGLDWADQLHVIYLQAADSAKAESRELEQKPDALHDWIAQLRVRFEGRKVGIAIEQSRGAVIHALMMYDFLALYPINPKALARYREAFRTSGAKDDPLDAELLMDLLRLHRSRLRAWLPDTVETRRLQLLAEYRRKLVNNRIRHTNRTTSLLKMYFPQALDWAGELGTVQSCDFLEKWPSLATIQHARPSQLRKFYLQHHGRNLDLIEERLRQISTARSLTDDPAIVDALSLAVQAEAAQLRPIIERIARFDEILAQQFASHPDHQLYESFPGAGSVYAPRLLTALGTDRSRWDSAADLQCHSGIAPVTEKSGKSCWVHRRLACSNFVRQTFHEFAAQSIRYSTWARAYYDQMRGRGLRHPAAIRALAFKWIRIIYRCWKDQKPYDEEVYLQSLRAKQSPLIKDDSQ

SEQ ID NO: 366444 - protein, 413 aa, unidentified
MDVLHPRCCGLDVHKSSISACILVQEAERVQKHQRRFGAMTQDLQELANWLRQFEVTQVAMESSGVYWKPVWNILEGQFTVVLANAQHIKNVPGRKTDQKDAEWIAQLLQHGLLRPSYVPCEIIRDLRDLTRMRTSLSQEASRISSRVQKVLEDANVKLASVATNTLGKSGRAMLEEIIAGQDDPEYLASLALGHLRAKTPQLRLALEGKIRPHHRFLLRRLLDQLRFVEHEIVLLEERLEDIGRERPELAQAVARWDTIPGIDRVAGWTLLAEVGHSMAQFPTAEQLASWASLCPGNHESAGKRLGGTTRKGSPWLRRMACQCAWAAARTKNTYLSAQFRRVAARRGSKRAIIAVAHSLVIIGYHLQKNQRNYEDLGGDYFDRIDSDGLKRYFIRRLEKLGHKVTLVPIKAA

SEQ ID NO: 366445 - protein, 421 aa, unidentified
MGTDTVANEIHFAAFVGLDWAEQKHVFTLQSAESHRVERGELEHTPEAVEVWAMGLAQRFGGRPIAVALEQVRGALVFMLTKYEHLVLFPVHPATLASYRKSFQPSGAKGDPQDASLLLDLLIHHRDRLRQIRPDTPETRTLQFLVEERRKLVNEKIRLSQRLSSHLKLYFPQALNWFCDLSSQIAGQFLECWPTLEKLQKVKPTTLRRFFVDHNSRNPDKIEQRMEEIQQAVPATHDTAVILASSTAVIALVRILQPLREAIASFDSQIENLAQAHPDFPIFDSFPGAGAALAPRLIAAFGTYRDRYRTAHEMQCYSGIAPVIESSGKQHWIHFRWACPKFLRQTFHEWALHSMATSVWARNYYQQQRAKNKSHHAAVRALAFKWIRILFRCWQDRQLYNEARYEQARQRRAQVEHRVCG

SEQ ID NO: 366446 - protein, 405 aa, unidentified
MRYYLGVDWADQTHAVWVVDESGTKIAARAVSHTAEGLGEWGRELDEWRAQGIALWAAIERPDGRVVDGLLDHGVVVYPVNPKALDRARDRFRQSGAKSDPFDARVLADFLRTDHAHLRALQPSSEAAQELKLLTEDCQRHIRQQTRLVNQLTATLKAYYPRALEVAEVTSALAREFLPAYPTPEALTALTERQWQRWARAHRLPEARAGELWAVLRQPQLPVPADVVRAKARLMQTLMEQLRPVVAAVAQYRKAIDDFFASMPAAQWARTLPIGKHGITAPTLWARLGDAPGRWESFRHLQAHAGTVPVTKRSGKQQRVVQFRFACDKALRYVVDQVAYLSLLSSAWARPYYDQQRARGHSHRQALRALGAKWLKIIFIMWQRQVPYDEQYHLATMTRQQLGRR

SEQ ID NO: 366447 - protein, 349 aa, unidentified
MTVYCGVDFHARVQTVSWLDTNDGEIHQKELHHQKDNVRGFYQQFTGEVIVGIEASGYSSWFEDMLEGLGHQVWIGDAGEIRRLARRRQKNDKRDANHILDLMSKGEFPRVHRLSRESREVLGQLRYRHRLVKMRTMATNCVKAIAIGAGLSDKRRLITGKGRGKLESVGLPSVFSEQCKRWLELTDDLTTKIKAVEQWLEEQAQCDQRVERLRTHPGIGLLTGLALVHTLEPVERFCSTRKIAAYFGLDPMEDSSAERKQYGGVSKAGSRLVRFLLVEAGQTAAKRDPELKVFYQRLRDKRKTAKAKVAVARKLAVRSFIMLRDQIDYSEFLRRGVEARSSRTTGAAK

SEQ ID NO: 366448 - protein, 350 aa, unidentified
MNTLYVGIDVSSKSNVVYLMLPNGDKHSNFSVANSHEGSTQLVKRIHSALTSHSLDTVLIGLKATSVYGDNLVYFLREDATLAPFNRKIHVLNPKQVKKFHDTYNDLPKNDYVDSFVISDCLRFGRINKEVYLGDYHYKALQNLTRARFFDVQNLVKEKQRFMNVLFKKYSTMTQEKVFSDTFSTTALAVYDEFESAEALANMDLHELTDFIMKKGKNRFPDPDAVAKAIQKAARSSYRLPKTVNDSVNQVISISITSMKALESQIKEFDKAIKAQMELLPNVLISIPGIGPVYSAGIMAEIGDINRFNRQAALAKYAGLAWKQHQSGGFEAEVTRLIPSGNRFLRYYLC

SEQ ID NO: 366449 - protein, 398 aa, unidentified
MYEQFVGIDISKDSFDLTLLESSGEIKLQDKLSMDRDGFNTFLEYLSSYSKDKLLVSMEATGIYHLPLLSFLLENSFKSAVINPILIKSFIGSTTLRKTKNDKKDATSIALFSLKSHQSLHLATFNTIESIRPLIRERESLSKDVARLKTEIKANLVQLFPELLNNSNIFTKSILNLLLQAPSRRAIRNLKKQKIQKILDSTSGNKVRITAKEILSLAKDSIAISDKYLEKVLTSKIRRLIAIQDELSILDEELQNSLEDTDINNDIELLQSIPGIGTVTSKNFMVEVSSVDKFNSVKQLCAFIGINPSVRQSGTSVNYRGKISKRGNANLRRTIWQMAIGTIRTCAKFNDYFTKKREEGKKFKQAVIAVANKLLKTIFILLKNKTKFDENLAYGVSK

SEQ ID NO: 366450 - protein, 371 aa, unidentified
MLKKQSTIYVGIDVSKDKLAVAIAGGGAPDDVLSLGTFENTPASVDRLLKKLAGRGSLISVCYEAGPTGYGLYRQVHAFGFECCVVAPSLIPVRAGDRVKTDRLDAIRLARLLRAGELTPIWVPDETHEAIRDLVRARESAAGDQRHKRQLISAFMLRHGRIYHRSKPWTMRYRRWLQRQAFDHPAHQIALQEMVVAERHTAERLDRLTRHIEELIQDWHLGPVVNALRAMRGVALISAVTFMAEIGDIRRFESPRKLMAYLGLVPSEYSTGLTTKRGGITRAGNSRVRHKLVEGAWTYRYPAKIGERKLYILQELPADVQDIAWKAQTRLTARYRKLNGRGKKKTVITTAIAREMSAFMWDIARRTMPTM

SEQ ID NO: 366451 - protein, 333 aa, unidentified
MEVVYRCCCGIDVHKKVIVACLVNGDEQELREFGTTTSEIKTLANWLTESGCEMIAMESTGVFWKPLYNLFELMDLDAMIVNAAHMKALPGRKTDVKDAEWIADLLRHGLLKASYIPNREQRELREITRYRKSLTEERCREVNRLQKILEGANIKLDSVVKDITGKSARKLLQRIIDDDIPDSDEVSKLVHGRMRPKLDQIVASIEEITTPLQRKLLAQIINHIDDLNRRIGELDKLVQEYMAEYEAAIEAIDEIPGIARRSAEVILAEIGLDMGRFPSAAHLCSWAGVCPGNYQSAGRRKHGKTTKGNKALKTILTQCAKSAKTVKSSYFFA

SEQ ID NO: 366452 - protein, 349 aa, unidentified
MKYYVGLDVAMEETAICIVDDHRRVVRESKAASEPEAIAAFLSATGLTFERIGIEAGPLAPWLCDGLAAAGLLVICIDARHMKAAVSAMSVKTDRIDARNIAFAMQVGWYRPVHLKRPEARKLRLLLSSREMLVRMRIDLDNHIRGVLKAFGLKVGKISTGRFEARVWELIDDGDEQIRWVVGTMLTTRAAVISQLALLQRAVLAVARRDQVCRRLMTVPGVGAVTALAFKTAVDEPARFPNSAALGAYFGLTPSKYASGETDYTGHITKCGDKAVRALLCEAANVLLTRVSRWSWIKRWGLEVLKRRGKMRAQIAVARRLAVIMHRMWLDGTDFRWQRESEALAGAVA

SEQ ID NO: 366453 - protein, 323 aa, unidentified
MKINRVGVDLAKNIFQLHGADYKGKTIWKRRLSRGKWLKVLFDTVEPGTEIGMEACAGAHHWARQLMQQGYPVKIIPPQFVKPFIKSNKNDANDAQAICEAMGRPDMYPIKVKTVEQQDLQAMHRIRDEIKSHRIAKANQIRGLVTEYGLVAPLQLHALRRAIPEWLEDADNGLTFLFRQLLQGLWGDLYALDQRMTELDKQIAVVAQEDPTARRLQQLRGVGPLIATALVATIGDGKQYRKGRDMAAALGLTPRQHSSGGKDRLLGISKRGDAYLRCLLVHGARSAMRTAKDKDDRLSRWIIDLQSRRHANVVAVALANKMA

SEQ ID NO: 366454 - protein, 478 aa, unidentified
MRAGRRWRTRKEKKEWARRLQSNDPGLDVIHPQAAGIDVGNASHYVAVRPDRDPEPVRQFECFTADLHRLADWLKNCGVRTVAMQSTGVYWIPLYDILEERGFEVYLVNARHTKNLPGRKSDVQECQWLLKLHTYGLLNNSFQPASQIRVVRTYWRQRAEHVQATASCIQRMQKALTQMNVQLANVISDLSGLTGQLIVRAIVAGERDPQKLAKLRDPRIQASPEEVAKSLEGNWRPELLFLVKQELDTYDTYQKRIAECDEQLQQQLASFASVAPGVAAAPVTQPQGDEPLKKAQAKRKKPAKNAPRFNLEQELQRVAGVDLTRIDGIDVMVAQTIVAEVGLDMGRWKTEAHFVSWLGLCPDNRITGDKVVGRGTRHVVNRAATSLRMAANALLRSQTYLGAQYRRLRTKLGAPKAITAMAHRLARLVYRMLKYGQRYVDKGAEYYEQRYRNQQLQFLRKKATQLGFHLTEAQAQTA

SEQ ID NO: 366455 - protein, 360 aa, unidentified
MKQAHAGMPSICPRDFDLFVGLDVDKHSLAVTVMDSESLVKCMKMPYHPNAFVQYLQKHFAEKRIALVYEAGPTGYGLYDALVEPGYTCLVTAPANVPQEAGRRVKTNRLDSVQLATALRGGTLRGIRVPSQLYRDLRHLAHLRQAHVGEATATKFRIKALLLSEGLAFPPAPPGSQWTDRVLKVLAAMSCPLTVRFTLDSLLETLALHQQQAQKVLAQMLQFCQENPEVADSIRFLRSAPGIGPVVAVVLTAHVGDWRGLTRVREMGAFIGLVPCESSTGDQVDKGAITHAGDAYLRSILIEAAWTAIRQDPELRAFYRRVCRRHPRDRAARIAIVAVARKLASRLFCLLKERRCYIYN

SEQ ID NO: 366456 - protein, 388 aa, unidentified
MLPSVHHANTEQTASDSPDLTFYASLELSRATWLVTCLLPERDRMSKYSTPGGDGGALLGLLERMRARAQQLTGRPVKIVVIQEAGLDGFWVHRLLEANGIESHVVDPASIAVPRRRRRAKTDAIDGETLLRTLLAWTRGEPRVCAMVVPPTPEEEDRRRVCRERAILLQERIRHTNRIKGLLAGQGITDFNPLHKDRRQLLDAARTGDGRPLPLQLKAEILREIELIELLLRQIADVEAAREVLAGPKTAKAPSPVVLLKQLKGIGPEIASVLYFEGLFRSFGNRRQLAAYAGLAPTPWRSGTVDQEQGISKAGNPRLRSTMIELAWLWQRHQPASTLSRWFHTRVGNERGRIRRISIVALARKLLIAVWRYVTQGEVPEGAVLKAA

SEQ ID NO: 366457 - protein, 322 aa, unidentified
MVKIAFDSHKRYSLCSVEDERGKILQEQRIEHERGAIQTFLAGFAAGTPVAVETIGNWYWIIEEIEAAGLTPRLVHARKAKLMMGCLNKTDRLDVRGLNRLQRTGTLPTVWIPPGSLRDLRDLMRTRMSSVATRTRLKNRLQATLAKYALSIKGVSDIFGKKGRLLLKQQLKQLAPQTQFAAECQLRQLEHLEEEIQLLEQRMKQVFVETEEIRLLRTLPGIGPLLGTVLALEIGDVRRFATAEKLAAYAGTTPRVHASGGRIRYGHLRPDVNRYLKWAFSEAANSIAINHELWSQRHVSCRYRYLRQKKGRATAIGGQWEC

SEQ ID NO: 366458 - protein, 337 aa, unidentified
MKVTLIGIDLAKSIFQVCGVNQAGKRVFNRQLRRAKLMEFLLQHPDATIAMEACSGSNYWGRTLQQHGFKVMLIPPQHVKPFVKGNKNDRNDAFAITEAARRPNLKCVEPRTLAQTDMIQVHRVLDRMTRQRTALINQIRGFLNEYGIVVAQGKERLLTAMPDLLEDAENGLTPSSRALFQRMLEQWRQANEAIKQIEKGLKGQAKTDDDAQRLMKMRGVAVKISTATIAHAGNGHGYKSGRHFSANLGLVPREHSSGGQQKLGGITKRGNQYLRRLLIQGAWSVVRNADKNDDRMSRWARQLVERRGKHKAVVAVANKMARIMWSMLYHQTEYRAN

SEQ ID NO: 366459 - protein, 435 aa, unidentified
MKNSDTPTILPASPSFAAFVGIDWADEKHAVVLLAADQEISEPTSLEHTPEAVSDWVAQLRQRFPEGKIAVILEQSRGSLLYALLPHDHLVLYPINPQMAAKFRKAFYPSGAKSDPLDADLLLQILLQHRDRLKAWQPDELVTRQLQLLVEARRRFVADRVRLSNRLENALKSYFPQALQLVGESLVTPMACAFLQKWATLEAVQKAGPTRLRRFYYGHHSRAEELIGQRLQLLAHAQPLTTDAAVVAAQSLLVKSVASELAALPAILAEYDEQIATLFAAHADFAIWDSFPGAGAALAPRLAAAWGTQRDRFENSDAMAAYSGIAPVKQASGRSVWIHMRWACPKFLRQTFHELARTSLSFCVWAQCYYQMQLQRGKGRHAAFRALAFKWQRIMWRCWQDRLPYDDTKYVSSLKRDNNELYTRIVALASIPGSE

SEQ ID NO: 366460 - protein, 313 aa, unidentified
MIITLRCIGIDVSKRHLDIFDEGIGVSERVANAPHAITELVARWRCDALVVFEATGVYDLGLREALRAAGIRFARINPARARDFARASGQLAKTDPIDARMLAAFARAMRPAPEQVSTPARNALARLAKRRDQLVHMRAQEKNRRSEAGDRAMVERIGRLIEVLDREIAEIEADISALIKAEPEISHDAQLIRSLPGVGPVACMQLIAQMPEIGHVGPKQAAALAGLAPFNVDSGAYRGKRKIGGGRKRVRNALYMAALNAVRRADRFKAFYARLRQAGKPAKLALIAVARKLLTILNAMMRDRKAYIPAQQT

SEQ ID NO: 366461 - protein, 438 aa, unidentified
MSNKVIFNLDDLFISVGIDIGADFSWMSIALPNQQFVGKPYKILHNSIDSLTTAVSKIKEAEELYSLESRIFLESTGIYHYPLFCYLRDKGFNCSVINPIITKNSTNINIRKVHNDRFDSKKAALVGLKPDLKVSLIPSDLALNCRNLCREYYDLMDNRSAYVNKLQGELRMAFPQYLGIFSKVTINTSLTLLETYASPSAFLEADKQEIIDIIRSTARFGLTYAQNKYNAIIQAATDANQFGYIINSNIKRIRLYISFIRKYDEEINSILESLHELVDANEDADFVKQIHLIETFKGAGFLSAVSIMGEIGDFSAFSKPKQLFAYFGLDPAVKQSGKFEGTKVQMSKRGSAIARRVIHTLTLQSISISRNGEAKNPVLREYYLKKCDSKPKLVAMGAVSHKVCNMIFAILRDNKPFEIITPQEHIKQYNASKCDMAA

SEQ ID NO: 366462 - protein, 361 aa, unidentified
MSHTSAWNNATEMPAVTIGLDLGDRTSRIYEVSAAGERLTEASLPTTPSALVKYFGKRAACRVVLEVGTHSPWVARTLSELGHEVVVANPSAVYGKGRRRKRNDRMDAEFLARQGRADVKLLHPIRHRSAAAQADLALLRARDQLVQTRTGLINHVRGAVKAIGARLTRCAAEAFPRRVRAEVPEALRPALTPLLEVIGELSQRIAGYDRQLVAAIRDRHPVALRLQQPAGVGPLTALAYVLLVEDPQRFGRSRDVGAYFGLVPRLDESSDSRPQLRISKAGDVLGRRLLVSAAHYILGPFGPPCDLRRSGEALAARGGKNAKKRAVVAVARKLAVLLHRLWVSETAYDPDYLATRPPRAA

SEQ ID NO: 366463 - protein, 494 aa, unidentified
MAKRKTHIRGSRGRRMADLLRGVDLERVLVVPIDAAKFNPKAMVANYFGDVLAYPFFFGVNREGMALLHRKIQECARRVGAQRILVGMEATGHYHEPIVAALEGYGYQVTLINPCTTAYERSSALNWAKTDDLDLATLGSILAQNKGTDSRLLGGVYSELRMAARARRGEALQCNRLKNRICRLMDGVWREFQGLLVTEPRGGARVEPVFSDMWGRAARFFMRHYPLPQQVAELGEEGIQALSRAHHLYLKRTTIAKLVEAARRAIEPDPARVKLILRELQRQLEDLDRVEERIAEWDHHLAGLLVRTPGVLLLSMPGIGVVTAAEYIGEIGPPTQYWDGRQIIKRAGTNPLVYQSGEGKVVYGPISRQGNAHLRRVLAHVGKSLGDHNPYFQAYAEALRERGLKPRQINVALGNKFAHVSLAMMKRGELFNPPAWRGQPLARSPLSRLADEGQREVALQTLRQLQQQRDGLGAKVPLPERGLGEEETVYALGL

SEQ ID NO: 366464 - protein, 484 aa, unidentified
MARRKLSTFERLQRGERLNRKERREVQQRLNLDDPGLDIIHRDAAGIDVGNESHFVSVPPDRDPQPIREFGSWTAGLEAMAQWLKDCRIRTVVMQSTGVYWIALLDVLKQHGLEVNLVDARGTKNVPGRKSDVQECQWLRKLHTYGLLRPCFLPPPEIHAVRTLWRLRMQHIRDAGRCIQQMQKAMIQMNVQLHNALSDISGVSGQAIIRAVLKGERDAKLLAKLRDPRCQASEEEIVQSLQGNWKEDVLFELQQAVDAYDFCQQQMEKCDKQLQRYMVALPARAPVPTAPASASPPPSTKEGKQGRARKPRRKSHPAFDLATELERILGANPITIDGIDVLTIQTVLAEVGPDLSAWKTERHWTSWLNLAPKRDISGGRVIRHVRQHHTNRAGNAFRMAAQSLVRSQSYLGARYRYLRAKLGGLKAVKAMARYLACLYYRLLTQGQIWVDRGTEEFNRRSQQRELSALERKARKHGMQLVPAA

SEQ ID NO: 366465 - protein, 323 aa, unidentified
MKKKDYQYLQFVGVDVSKAKLDLAFGDGGQALSIDNTQKQIVTQLIERIENPKTTIVVMEATGGYESLLVMFLHQHHIALAVVNPRRVRDFADGIGMDAKTDPIDAKLLAFYGQVVKPAAQAAKSAEEKKLKALVERRRQLLGLVNQENNRLQQTTDQEIQGYIQQSLETLKKQVKEIDERLKECVASNTANARKVEILQSVKGLGPVAVSTLLAELPELGQLNRGQIAKLVGVAPLNRDSGKSSRQRRTSGGRSYVRRVLYMATLVATQFNSKIKAFYQRLLASGKPKKVALVAAMRKLITILNTLIKNDELWNTEPNKTSV

SEQ ID NO: 366466 - protein, 316 aa, unidentified
MSEALRYAGIDVAQGWLDVAIHGMGQPWRVTTDAEGIESLMGTLREQGVHLVVLEATGGYEVPITAALGIAGIPVAVVNPRQVRDFARSLGKLAKTDRLDAQVLAHFGAATRPEPRPLLDAQAQELQALVARRRQVLQMHAAELQRRQRALPVVHQRIDRVLAVLEEELQDLDRDLHDRLRQSPLWREQEELLREVPGVGPALTFSLLANLPELGTLSSKQIAALVGVAPLNRDSGRWRGKRIVWGGRANVRAALYMPTVVAVRWNPVLRDFYQRLVATGKPKKVALVACMRKFLVILNAMLKHRTPWRTNHALTP

SEQ ID NO: 366467 - protein, 419 aa, unidentified
MKSNLGKRTGIVNDQVLIVTVDIGKITHTGYARCPDGTELCAFEFFNNGCGFTKFWAKVSAMMQAKQLREVMVGFESTGPYAEPLMHFLRKKDARLVQVNGAHTKKIKELYDNSPNKTDSKDPKVIADLLELGRFLSVVIPEGVAAELRRLSHARERHLERLKTVYNQLHDLVFLIFPEFLEVMKKLKSKSSRQLLELAPTPQAIGTLGCDELTRSLQRISHGHLGKRQAEALYAAANASVGLHVGQNGMVAELKQLLQLIASCEEFISQLEQKLSAGLQAVPYSRCLLSIKGVGVVTVAGLIGEVGEFGNFTKIDELMKYAGLNLFELSSGRRKGRRRISKRGRPLIRKLLYFAALNVIRKGGILHRHYQSYIQRGMPRLKALVAICRKLLGIMFALVRDHSEYQIEYSNFPLLKQAA

SEQ ID NO: 366468 - protein, 322 aa, unidentified
MNKYKETFGVDISKDVFDVHGNIKGHNQYKNDEYGFRKFLKELPKGVLIVMEATGYYHFRLAQFLYKNDVVVSVVNPLSVKRFIQMKLAKVKTDKSDAKAICDYALINEVPIYNALTDIQSECLQLFRLLDVYIKHRTATKNKMHGEEVLGIPSKFVYGSLRRNKKHLNAEIKVIEAKILSLVKEDQQQQLTLLTSVPGIGQKTALFLIIVTDGFSKFESASQLCSYVGITPTIRESGSSVRGKARISKVGNRKLRNLLFLCSFNACKYNKACREVYERLVNKGKSKKLALIAVANKLIKQCFAIAKSGRPYDETYVSVLPR

SEQ ID NO: 366469 - protein, 400 aa, unidentified
MRQQVWAGVDAGKSDHHCVVINVEGIQLLSQRVVNDETALLDLIGAVTALADGGDITWAIDLNAGGAALLITLLIASEQRLLYIPGRTVYHASAGYRGDGKTDAKDAAVIADQARMRRDLQPLRPGDDIAVELRILSSRRTDLVADRTRAINRLRAQLLEYFPVLERAFDYSTSKAALILLTGYQTPDGLRRAGPARLTAWLAKRKARNASAVAAKAIEAANAQHSIVPGQNLAATMIARLAKEVMALDTEIGATETMIEDRFRRHRHAEIIVSMPGFGVVLGAEFLAATGGELSAFDSVDRLAGVSGLAPVPRDSGRISGNRKRPRRYDRRLLRACYLSAQIAIRTDTPSRNYYDRKRSEGKTHTQAVLALARRRLNVLWAMLRDHRPYQPTAPNTAAA

SEQ ID NO: 366470 - protein, 377 aa, unidentified
MKKELYLGLDVHKDCIITAVAEEGRKGEVRESGALSNDLHAVEKWIGRLRKAHGKEVILRACYEAGPCGFGLARRLGQLGVECQVVAPSLTPTRSGDRVKTDKRDARKLARLLRAGELTPVYIPEATDEAIRDLCRARSDAVDDRRRSRHRLKGFLLRHGYRYHGKSSWSAAHERYLRELVLPHPAMKVILEEYLQGIGAAGERIERCEAAMGDLLEKWRLAPAVRALMAMKGFQTVAAMILVSELGEVHRFSHPRQVMAYLGLVPRENTSSERRRQGHITKCGNAHARWLLVECAQHYAAPPKVSKELSRRQEGQSAQVRAISWRAQNRLHSRYTRLLARRLQRNKAMVAIARELCGFIWELLRTQDCYQAQSTPV

SEQ ID NO: 366471 - protein, 399 aa, unidentified
MLAVGIDISKSKSVAAILNQDGSMHTSPFEFHHTQPELDAFIKYILNSNQSATILMENTGHYHYPVLKAFREAGLPVCMVNAYQIKKFGDTNLRKAKTDKKDAVRIARYALEKSYSLVPYTSMEQKYEDLRFLARQYNQRMLTLKTNKVFLLNLLDETMPGITNILPLTTRTPETSLSVLFINRFKSYDRIKKMGKSRFLDAFEKIARKSRNRQTKTYGLAIYEAALRNITTRGENEYTLAAQDQCLELVCESQKAADSIILKMQTLAETLPEYAVLRSMAGVGDRLGPLILAEIGDIRRFHSGKALNAYAGNDAPPYQSGIFESHNRHISKRGNAALRKYCFEVMQALKLTRPQDDPVYLFLLKKEQEGKPYNVAKMAGVNKFLRIYYARAMETLKQQ

SEQ ID NO: 366472 - protein, 419 aa, unidentified
MSFKILKNNCCGLDVHKTWIFACIGITDSHSRTEYKQARFSSFSKGLKELCDWLAKYNCTDVCMESTGKYWIPVFNILEKNNIWITLSHPKYTKPQKGNKTDRKDDKWICDLYMCGMVKPSFIPPADIRELRDLVRYRYKLTCMITGEKNRAQNCLTVSNLKLDDVFSDVFGKSSRSITEQILQHPGENFDVAPFVDGRCKTPIEKIQAAIDGAISTEQAVKLRQCLDHIGELEIHKTEIEREIFRLSDKYEEALTLIRTVPGFDKNPLTAIQVLSEIGGNMSVFPTAKNLVSWAGCCPRNDQSNHKIKSTRISRAGSYFKPVLVQVANALSKSKKHPEITNRYRRIKARRGHKKSIIAICRMLLTAIWHILTDLKPYTSEGFLEQRPVNESKVLTASQALNLLKQRGYIIKDEAVPVA

SEQ ID NO: 366473 - protein, 455 aa, unidentified
MPGTKPCPRSSRTLSTIHPNAAGLDVGSTFHVVAVPADRDDQPVRTFRTFTGDLQHLADWLKAVGITTIAMESTGVYWIPVFEILEARGFEVLLVNARDVKNVPGRKTDVNDAQWLQQLHQHGLLRGSFRPRDGVARLRAYLRHRERLVDYAASHIQQMQKALMQMNVQLHHVVSDITGLTGLRIIRAIVAGNHAPDQLATCRDIRCHASEETIRAALTGNYRPEHVFALRHALELYDAHQAKIAECDVEIEAVLERLNDARQVPRDPLPPLRHAKARNEPKFEARPALYTLLGADLTQIHGFGPYTVLRLVGECGDDMRRWPTEKHFTSWLSLAPGNKISGGRVLSSKTRRSANRAAALLRIAAVNVGRTDTALGAFYRRLAARIGKAKAVTATARKLAVLFYRALRFGLAYVDPGAAQYEARYRQRVIHNLRRRAREFGFSLVSNTGAGAGVS

SEQ ID NO: 366474 - protein, 421 aa, unidentified
MNATTDFAATIGLDWADQKHDLWLHPADGTKTEHVRLEQTPEAIHEWVAKLGDRFGHRRVAIGIETTRGPVLSALLAYDFIVFFPINPKALKDYRAAFAVSGAKDDRTDAMLLEEFVRLHGGKLHALAPDTQLTRQLGGLTENRRRLVDERTRLVNQMHGLLKTYYPLAETLLDGNLNTPMAADFLARWPDLAALQKAPVETVRAFFYQHNSRGAKKMEERLAAVAKARPLTEDPAIITPARHLATALAGMLKPLHRAIADLDQAIAEAFDQHPDAALFRSLPGAGPALAPRLLCAFGTQRDRFASAAEVAEFYGIAPVVKQSGKTKTTQMRYRCPKFGRQTFHENAGCACKREPWAKRYYEDQKGKAEGKHHKACRALAYKLIRIYYACWKQNVPYDGLRYLQALEKHGSPLHKKLQTPI

SEQ ID NO: 366475 - protein, 435 aa, unidentified
MEEVADEPLYRERVCGIDIGKAQMAVTIRVPSDGNPRRRMQETRVFGTTKRQVLALADLLRAWQVPAVVMEATSDYWKPVYYRLEAEGFECVLADARQVKNLPGRPKRDTSDSQWLAQNFERGAVRSCFVAAPEFRVIRLHTRYRRDLTDERSREKQRVEKLLESAGIKLSGVLADLHGVSGRDIMDHLIAGERDPRALAQLARRRARAKIPRLEEALDGTEFFTAHHAALLEAMLRRIDAHSADIDRLSTVIEELLAPWEEQLQQAESMPGWRRQSAQDVLAETGPDMSRFPTPAHLVSWAGRAPLDHQSGQRSGRGKRKKGNRYIGASAGETSVAAGRTDTREGARYRRLSRRIGKTKAQVAVSNTQLKVYHTLLSSPGTRYQDLGADYYDKRASARRKTRYHLAELHDLGYDVIITPRADAAGEAAGTPPAA

SEQ ID NO: 366476 - protein, 363 aa, unidentified
MTIVADLYDLIIGVDTHAASHTLAVVTGGPGAVLAKATFPTTPAGLSRAVGWVRRRTADRSVLLVVEGIGSYGAMLTGRLHAAGFLVAEAPTIPSVLRRGKGKTDQVDAVLIARATAGLTTGELRWPRTEDGTRVALEVLLGARDQMNNERTRHINTLTALVRTRDLGVDARRRLTTTQITTIAAWRSREEEPWVAVCRREAVRLATRIRALDAELAANYRDLTQLTTVQAPELLALPGVGPVVAAAVLIAWSHPGRVRSEAAFAALAGTCPIPASSGNTTRHRLNRGGDRQLNRALHTVVLTRMRYDPTTRAYVTRRTADGKTSREIRRILKRYATRQLYRTLTAAHPATALPAQPAAPAAA

SEQ ID NO: 366477 - protein, 425 aa, unidentified
MASMTSAIPTAQPDRVVIGGIDTHKDIDVAALLDCAGMVLGTAEFPTTRAGYRQLLGWMGSAGHLGGVGVEGTGSCGAGICRQLSAAGVEVVEVNRPDRSQRRRRGKSDALDAAAAAEAACGGQRLAIPKSRDGQVEALRVLRLTRASAVKAGTKALQLLQQLIVTAPEQLPDQVGELPRMELIGCCAAWRPHSHDAADPSVATRIALKKLARRYLQLAEEISDSDTLLDGLVTDLAPQLIAVTGIGTDTAGQFLLTAGDNPERVHSEPAFAMLCGVAPLPASSGKTQRHRLNRGGDRQANRALHVIATTRKRCDHRTQAYLKKKIAEGHTRREATRSLKRLIAREVYYLLNPAPHTGRFLHPGQPAGAQTRSRWSPHARNDLDRAEAPAHHQRRRNRHLDKQGSIVACTRSAQVAAHADRQKPR

SEQ ID NO: 366478 - protein, 376 aa, unidentified
MKDHIAAFVAFDTSKLRNAVAIAEAGRTGEVRFYGEIDNTADATAKLVKKLAAKYERLAFCYEAGPTGYGLYRQITGLGQECMVAAPSLIPKKPGNRVKTNRRDALELAKQLRAGDLTAVWVPDSHHEAMRDLTRARGAAVQDVRQKGQQVSAFLLRLGRHYDPDKKTWTKAHLGWLASQKFEHPEQRIAFEEMLLAVRQAQDRVGRLEDAIRAAVPDWSLAEVVPALMAMRGIDMVTATAFLAEIGDLSRFRTPRQLMAYLGLVPSEQSTGDTVVRGPITKAGNRRARRLLIESAWSYRHPPRIGRDKQAKVAAAPRAVAEIAWKAQNRLYRRYLALIRKGKLKTVAITAVARELAAFIWAVARAVATTARAEAQ

SEQ ID NO: 366479 - protein, 340 aa, unidentified
MSLYGGIDLHANNSVVVLINEQDEVLYRKRLSNELSTILEQLAPYQTTLKGLVIESTYNWYWLVDGLMEAGYRVHLANPAAIQQYDGLKYTDDHSDARWLAHLLRLGVLPEGYIYPKAARAVRDLLRKRAHLVRQHTANVLSVQNILVRNTGTRFSLKRIRELTKQELEGVLPETAHVLAITSSLAVLDCLSHQIKALEKSVHQRLHHTPAYEQLLTVKGIGPILAQTITLETGDIHRFPTVGHYASYCRCVASTKISNGKRKGQGNVKNGNPYLAWAYMEATQFALRFHPSAQRFYQRKLAKSHNNTPLARKSVAHKLARACYYIMRDLVPFDAMKAFG

SEQ ID NO: 366480 - protein, 343 aa, unidentified
MYYIGLDVHKKTISYCVKDASGRVHQEGKIGSTRRELDAWIRTLPQPRSIAMEATIFTGWIYDHLLPHAEAVKVAHPLMLRAIAAAKKKNDRIDAGKIADCLRCDFLPECHMAPRAIRERRRVLRYRTLVMRQAVQMKNRIAGLLMETGVSYNKLRLHRMGYFEQLLASSEEISDSIRPLLKLSREHIDRSIRMDTALLRSLEHDPLLTDRLRRLRTVPGVGPITALTWALEIGDTSRFRSIKQAISYCGLCSAEKSSADKVMRTPISKQRNKHIQQVLVEAARLAPRYSEELALLYERERQRGNSNRATLAVARKLVTFMLAVERRGTDFVAAEEFRRTAAA

SEQ ID NO: 366481 - protein, 334 aa, unidentified
MSKKVIGIDVGKKDLYLAHKYFTTTGKVKVKRKKFSNNLKGYKALIEWSKNIAKKEGDKPLHFIMEATGVYYEGIAYFLFEKGFAVSVINPSYIKSFANSSGVRTKTDQKDALVLVEYGEAMKPELWSPPAEEYRVLLNLCRAISSLKNRRDAVANRIESLKSSRVIAQAVLEEEERLFNEINKSIKRLEKQIREHVNKYPSLKKETKLLMSINGVGWNTAVLMVAIMEGGRRFKSAKEAAAYLGLSVQEYTSGTSVKKRSKLSKKGAKDIRKALYFPAITAVRCNADVKALYDRLLKRGKLKMIAIGAAMRKLVHICFGVLKNKTAFQPQTIG

SEQ ID NO: 366482 - protein, 356 aa, unidentified
MTGQRKELNFEGQNIYIGLDVHKKSWSVTILSDVLMLKKYSQDPSPDVLYTHLVRNYPGATYHSVYEAGFCGFWIHYRLTELGIHNIVVNPADVPTTAGEKIRKTDAIDSNKLARSLRSGELKAIYVPDNVSLEIRSLIRLKDSMTKDQIRQKNRIRSFLFLHGIEEPPFSTSHWSSRFITWLKEVSMKTTCGREALDIMINQLETLRKQRLELLSRLRTLYKSDRFAEPLRLIMSVPGIGQLTGMSLIAEIDDIKRFKSADKLASYIGMIPMCHASGDHEVIGDITIRKHSKLRPLLIEAAWTAARQDPAMQFAYAAYCKRMKPQMAIVKVARKLVNRIYYVMKHEQEYVNNVVA

SEQ ID NO: 366483 - protein, 424 aa, unidentified
MNDTQNKKIAQVTDKTLVVGVDVGSDKHYARAILARGFEISKKPFEFANSRDGFEKFVNWSCHLAVENHLTKIFVALEPTGHYWFNLADYLRNYDVKLVLVAPQHVKHSKEMDDNTQMKNDRKDPLVIAKLVIEGRYMFPYIPEDIYAELRAAFNRRCDLVEALNRNTNRMVRWFDIYFPEYREVYGKANAISGLMILMRAPLPSDILALGVDGICQIWREAKVRAAGTKRAKKLVAAAERSIGRKGCEAVRQELWQLMEEHDLLNRQLSNMMQIITDLLGRIPGAERLLNVPGAGVITVAGFLSEVGDISRFTNPKQIQKLAGLAVVENSSGKRKGLSGISRRGRKRLRWVLFQLARSMVKSNKEMKAYHQYYITRKDNPLKKMQSLMAIAGKITRIFFGILKNGTEYDPEIVMKDLKKAAAA

SEQ ID NO: 366484 - protein, 350 aa, unidentified
MHATTVAIDLAKEVFELAFADPAGRILERKRLTRRAFSRVMDNRPPMTVVMEACGSAHYWGRRFQAQGHVVRLLPARDVRPYVRRNKTDRADAAGLVEAARCEQIAQVPVKTPRQQGLQALHRVREQLKAQRIATINLMRGLLREYGLVIPEGAAKVPAAVRAALEDADNEVPMPLRATLAEQLDRIATLQADMGAIEKRLAEEAQHDVAVQRYLTVPGVGLLTATALRAGAGDLSRFRSGRHLAAWIGLVPREHSSGHQRRLGPITRRGDVYLRTLLIHGGRAVLRAALMRQRAGRDLDPLQAWALELAQRQGHNKAAVALANKLARRLWALDHYGAAFNAHHISHRST

SEQ ID NO: 366485 - protein, 325 aa, unidentified
MIVLGIDVSKKKLDCALRMTDGKHRHKVVENTLKGFEALLAWVEKQAKQARSDVPVRQACMEATGVYWEDVAEFLADQGWQVSVVNPARIKAFVDSQGTRSKTDKADAKGIADFCHERQPEAWLSPPMSLRTLKALVLRREALVAMKVQEENRLLVAREAEKDSLFKHIDWLEREIKAIEKAIREHIHKDPDLREKRELLNSIPGIGEVTTAAFLAVLNNFQSAKNARSIAAFVGLDPKHHESGSSVKGVSRISKAGQAFLRKTLYMPAMTALYRTEWGKTFFERLKANGKPPKLIITAMMRKLIHVAFGIIKSGKPFDQTLHVA

SEQ ID NO: 366486 - protein, 380 aa, unidentified
MVANFPPFLTASFNSSIRCNKADGTDSRPLRGDTDLTNSRENINAYAHHWSGYCKNVFQVHGVDRHGKTVLQRKLRRAEVLKFFSKLEPSLIGIEACHGSHFWARELTSLGHMVRLVPTQYVKPFLVGGKNDANDAAAICAAVTRSGIHFVAIKSAEQQSLQSVHRMRERLIQERTAKSNQIRSMFAEEGVIFPVGLPQLRKGIVALVNDPDAHITPLLRRLGLMYLEQLKALQQWLDELVAEIAEIFKSNEACQRLATVPGIGPVIATALVSSVGDPSQFRNGRQFAAWLGLTPMQRSSGGKTKLGGITKRGDTYLRTLLVQGARAVMHFVNRRDDRHSRWIKAVMQRRHTRVAAIALANKTARIAWAILTGKESFKVA

SEQ ID NO: 366487 - protein, 415 aa, unidentified
MDEANEFFAERCAGLDVHQKTVVATVRVPGRHGGRRTETSTFGTTVKRLTELSDWLASFGVTLVGMESTGVYWKPVYYLLEERFDCWLLNAQHLHNVPGRKTDVADSVWIARLLEQGLVRPSFVPPPQIRDLRDLTRYRRALTEERGREIQRLDKVLQDASIKLSSVVSTLQTKSARDMLKGLIAGQPAQTLARLGRGRLKDKQAELAEALTGRFRRDHHGLLVAHILTHVDFLDDQIDQLDARIEELFAPFGNLVELVATIPGVSDRGAQALLAETGTDMSRFPTAAHLASWAGICPGNDESAGKTRNRRTRKGSTWLRTELTTAARAAARTKGTHLAAHHAQIRGRRGYPKAIGATRHDILTALYFIVGDQVPYRELGPEWNDQRNATEHRTRRLVKQLEQLGHTVTLTPAAA

SEQ ID NO: 366488 - protein, 310 aa, unidentified
MDAIFVGIDVSKDRLDVNVCPSGEAFAVSRDGKGLEELIDRLRILAPQLIAIEATGGFETIAAAALAGAALPLAIVNPAQVRHFARAIGKRAKTDPIDAAVIARFAEAVKPEVRTLPDAQARLLGELVARRRQIVEMTVAERQREQRTAITRVRNSILRHIKMLEKELAEIDNDVGTLVRGSPAWRDKEDLLVSFPGIGNTLARTLLAEMPELGTLTRREIACLAGVAPFTRQSGVWKGKSMIAGGRAPVRTALYMAALSAITCNPPLKRFYQRLLSVGKPKMLALIAVARKILVTLNAMLRERKQWQIA

SEQ ID NO: 366489 - protein, 340 aa, unidentified
MQAIRFGVDLAKSVFQIHGVCALGEVVVQRQLRREQMLRFFAKQPPALIGMEACGSAHYWARELARLGHDVRLMPASYVKAYVRRNKNDARDAEACCEAVSRPTMRFVPVKTVEQQSARAIHRARDLLVRQRTQAANAVRAMLYEMGLIACKGREGIAVLLERIEAADPALPPALLVSLRALAAQWRALDAEVARLDQAIACQVRQDPVARRLMTVPGVGPITAHAVICAVGDGRQFSSARDFAAWVGLTRRNHDTGGKTRLTGHISKAGDRSLRKLLVLGASSHLRRVRASHNVGSTWIQGVLARRPVKVAVIAQAAKTARIIWALLRSEQTYRAPAAA

SEQ ID NO: 366490 - protein, 374 aa, unidentified
MSRRASAFPKITIGLDLGDKVSQTCEVDESGEVIKRASAATTQGALERYFGGRPRCRVVLEASTHSPWVSRKLEELGHEVIVANASEVYGPRRRKRRNDRLDAEFLARQGRADTELLHPVKHRSAQAQADLGILRARDELVGARTKLINHVRGAVKSAGGRIYKCQAEAFARQAATQLPNALRPALEPLLGIIATLTEQIRGMDREVAKLAQKYPVIEHLQQPRGVGLLTAAAYVCVVEDPKRFDRSRQVGAFLGLVPKLDESSTLSPQLRISKAGDPLVRKYLVTAAHYILGPFGVECDLRRYGEAIAARGGKNAKKRAVVAVARKLAVLLHHLWVTGAVYNADHLKRQRERGASAVEVEECAAVGLEQLVAA

SEQ ID NO: 366491 - protein, 321 aa, unidentified
MSKHSMVCAGIDTAKHKLDVALEGCPETLQVDNTADGHVTLSGWLRQRRVERVGIEASGGYEQEVVAHLRRDGFVVVVFQPAQVRAYARFLLQRAKNDKIDAGLIAACTAATKKIHAPPDPRLAPFAEHLTLVEQITDDIARLKNRRESCRDPRIRGFWKAEIARCNKLLRIELKALAAAIRQHRDLAERLDLILSVDGVGLRTAVAILVRMPEIGRITREQAASLAGLAPFDDDSAEHEGVRHIAGGRERLRGSLYAAALPAAMRWNPQLMALYQRLIAKGKPHKVALVACARKLLIFVNAVVERGTPWVEEPPARLKPS

SEQ ID NO: 366492 - protein, 346 aa, unidentified
MNQIIRIGMDTSKHFFQLHGVDAAERPVLRRKLRRNEVLAFFAKLPPTVIGMEACGAGHYWARELRKLGHEVKLIAPQHVKAYVKRNKNDGRDAEGLCEAMSRPTMQFVPVKTEEQQAALMLAGVRQQLMTRRTQLSNAIRGYAAEFGLITAKGLVKVEPLLADIAQDERLPELAREMFAVHGREYARLQVELKAVDARLMAWHRANADSWRLAKIPGIGPIGATTLVMKAPDPGLFPSGRHFAAWIGLTPKDHSTAGKTRIGKITRAGDEMLRSVLVAGATAVIQQAKKGRGRPSPWLVTLVARKSPKLAAVALANKTARIAWKLLTTGESYDGARMPVASARAA

SEQ ID NO: 366493 - protein, 468 aa, unidentified
MKEKQIPLTVINPQAAGIDVGSRTHFVAIGQEQKDVKSFGVYAEDLTALTQWLIENDITTVAMESTGSYWQNLFVELINKGLDVVLTNGKFTKNINRKKTDVLDCQWIQKMHSLGLLPSSFLPDHSTENLRTFCRHRTNMIQQRADSIHKMAKFLKYLNFRLDVVVRDVTGLTGLKIIDDICNGNLDPKSLAAHRHHNCKKSEVEIAKALVSNQRADYLFGLKQEYDRYQFYSAKILECDQEIGKFLDTTIRHKEKVVDQIPDSKYFKRQNKNAIKGIDLNIVSYQYFDEVDLLSIPGVSHSTVLTIMSEIGPDGFNKFPTAQHFASWLKLAPNNKISGGRILSNRIPQGSNRLKIALRNAANAVGNLKDADLAKFFRKIAFKKGRQTAINATARKIAVILWNMITKRQPYMPKNNYLFLDQKRRIVSRMRKQIADLGLNPNELGFSRENRDKIAAQITSDFQTISLR

SEQ ID NO: 366494 - protein, 410 aa, unidentified
MQVLYPRCFALDVHKLTVVACLRIADDSKVTSEVRTFETTTASLIGLRDWLTANKCTHVAMEATGVYWKPVWHILSDGEFELVLANAAHVKNVPGRKTDVSDAEWVVDLLAHGLIRPSFVPNSQTQELRALMRTRKQLVREAASHIQRVQKTLEDANIKLDSVISDIMGKSARAMIEAMIAGETNPAKLARLAHRSLKASPAQLREALRGRVTKQHRFLLRSHLKQIDGLEAAIAEIDQQVEADIEPFRAAVKQLSSAPGVKALSAQVIVSEIGIDMSRFPSDGHLVSWAGICPRNDESAGKRRSNRLRKGAPWLKTTLVQCAWSAVRQKDSYLRAQFYHVKARRGPKKAIIAVAASILTAVYHMLKTGKTYQDLGPNHFQRRNKDQQKHLLIKRLADLGYAAALTPLPG

SEQ ID NO: 366495 - protein, 343 aa, unidentified
MEHYAGIDVSLESASVCVVDATGRIVREAKVASEPEVLTAWFRGLGISLSRIGLEAGPLSQWLYAGMREAGLPVELLETRHVRDAFKAMPVKTDRKDARGIAQLMRLGWFRPVHCKSLPAQETRALLTARKLVQSKRHDLEMSVRGILRGFGLKVGATTPRTFEGRIRELVRGHPTLLTVMEALLTARAALGEQLQRLEKRVRSLARDDQRARLLMSAPGVGAIVALTYVAAIDDPGRFRSSKNVGAHFGLTPKKYQSGETDVTGRISKIGDAGVRTALYEAANVILTRPVRGSSLKSWAARLAVRAGMRRAKVALARKLAVVLHRMLADGTSFLATRAAAMA

SEQ ID NO: 366496 - protein, 333 aa, unidentified
MYCGIDLANKASAICILDEGKVMKEFECPTDEDGFSQGLKGFKGLFILIEASPLSEWVAQILEGLGHQAKLIDPRRASALIRTKKKTDRLDARHLARMAQTDWYHEVHRKSPQARLLRSLLQARQGVINGRKSQLLRIRGLLRAHGIKVGAVSAGRFTMRVRELVQMRCPALSMVVEPLLDALYSLRCAEAKLTKALKARVKLNASCQLLMTAPGVGVVTAACYVATVDDPHRFAESAQVPAYFGLVPRVYQTGETEYRGRITKEGDSLMRMLMVEASHVLLTRTKSDHALKRWGQGLRERKGPGKARVAVARKLSMVLHQMWLNNEPYRMVV

SEQ ID NO: 366497 - protein, 346 aa, unidentified
MMIIGCDFHPSWQQVSWLDTETGETGERKLVQASGDAERFYRQVAAPALIGMEATGNCHWLVDLLSELGHELWVGDAAQIRASYVRQQKTDKRDAAHILKLLVEGRFPRIWMPSSEVRDLRQLLLHRYKLVIMRARVKNELQHLCLNKGVQRKHKLWSQAGQQILRELPLKPWAGRRRDDLLKLMAMLDQQIEPLDQAVKAEAQRDKMALLLQTQPGVGPITALAYVLTLGDVSRFPRGKQVASYLGLIPREHSSGGRQKLGAITKQGNRMLRMLLVEAAQIAVRYDPEFRREYLHRCHQKPKAVAKVAAARKLAVRLYWMLRTQRPYPDIVRIESSPRVPLVGAS

SEQ ID NO: 366498 - protein, 375 aa, unidentified
MKEKVRFLGLDVHAETIAVAIVEPDGEVRSLGPIANREESIRKLIKKLGAPEQLRACYEAGPTGYVLYWQLTQLGVECAVVAPTLVPTKAGDRVKTDRRDALKLARSHRSGDLTAVWVPDGDSEALRDLVRTREAAKQDQLRARHRLSKFLLRTGRRPAVGMKAWTEPYMAWVRQVQFERPAQQATLQDYLHEVDHMAARIKRLEQAITEVVKLASPQVREVVRGLQALRGIAEISAVTIVAELGQISRFETAPQLMGYSGAVPSEDSSGKRKRQGSITKTGNAHLRRIAVEAAWSYRHRPAIGPRLRKRQEGVPEPIKEIAWKAQIRLHKRYMKLVAAGKDQRKIMTAVGRELLGFIWAIGVKVETPVQQQIAA

SEQ ID NO: 366499 - protein, 386 aa, unidentified
MQKLKDLSRCLTPLEPDGTLIAVIEMSRSSWLVAGIVPGVERQPLKKLAVDESVLLKLLHRWREEAEKAGYMIKRIAVAFEAGRDGFWLARWLRARDIEVHVIHTSSVAVSREHRRAKTDRLDTELLKRAFLGWLRGERDHCKMVAIPTIMDEDGKRPNRERENLVGEQSRIINRIKATLVRLGIRGFNPKLKKAAERLQGLRTPEGEPIPPNTLSELRRNMERRRLVRDQIRQIESARRDRLEHAPGEGAHAMVRLLARVMGIGIETADMLVQEVLSRNLHDRRAIARYAGLTGSPDESGRKRREKGLARCGNPRVRRGMIQLAWRFLLFQKDSALAQWFQARTQNARGTRKTMIVALARKLLIALWRLVRDGVVPDGVILRPAQ

SEQ ID NO: 366500 - protein, 352 aa, unidentified
MKRYIQREGKSKLLFVGIDLHRLRWHITIRVEDVELFSGSIPGQWEALQRLLSRYRGYKIQAVYEAGYFGFWLRDHLVRYGARCVVTPPSLLPQEYGNRVKTDRRDSRKLAHLLAKGLLKEVWVPSEEERYQRQVIRRRRQLIGDRVRTQNRIKAELRFFGIEIPEPTGKWSRVYVTNLHRLQFHDRWIQESFHRLLEQYNFLTEQIKKQTKVLEELAEIPHYKDRVAILRSVPGIGLIAAMELLLELQDVARFRRADQLAAYVGLTPSQYSSADKVRMGRITAIGKNALRGTLVEVAWRLIGKDRAMRKKYERIKVRSGSKRAIIAIARMTLLRTRRMLLDGTPYVLGRAA

SEQ ID NO: 366501 - protein, 399 aa, unidentified
MDHCTAGLDWASEAHAICIVDPQGAIGESFTVAHDAAGLAALVRRLGHYPGLHLAIERPDGLLVDTLVDAGIAVVPIHPNTVKAARERYTSSGAKSDGGDAYVLADFLRTDGHRFRELQPLSEATRALRALVRSRDDLVKARVALTNQLAAQLAVFWPGAAELFFRLDSAIALAFLTRYPIPEAAAHLGERRLGAFLKRNAYSGRKPVGELLAKLEAAAAGRVGAVESEARGECVKALVRTLGVLLPQISELEGAIAVALDEHPDGPLIKSFPRAGEVNAAQLLGEIGDVRERFPSDDVLAMEAGVVPVTKRSGKMKSVGFRWACNKRLRRALTTWADNSRRASPWAQDIYQRAVDRGADHPHAVRILARAWLRVLWRCWQDRVPYDPTRHLGAARIAA

SEQ ID NO: 366502 - protein, 427 aa, unidentified
MRFIGLDIHRDFCEVAISEGGKARRAGRVASRPAELELFAQSLGADDRVVLEATGNALAIARIIEPHVGEVVLAHARKVRAIAEAKVKTDAIDACTLAELLAADLVPGVWLGDERTRLLRRLVSRRRQLVKQSTRTKNEISAVLLRTLQGRPPVSDVFGKGGRAWLAKLELAIDERETVDAGLRQLDFLQHELAHVDRTIAEQALASPEIRRLMTIPGVDVTTAAALMAAIGDVTRFPSPRHLAGYLGLDPKLRQSGVAKPRQGRISKEGSAAARHALVEAAWSAAKAPGPLRAFAARTAARRGRHIAAVAVARKLAVLAWHLLTRGEDYAYQRPSVVRRKLRRLELKTGAPRAKRQAGAAPLWGSRAQDDLERELARQAELAYRRLVADWQQTRPKDGAGATPGRASSRPSERQAARQETAPPPAL

SEQ ID NO: 366503 - protein, 372 aa, unidentified
MKWTPPCDLIGIDVPKSFPRKETKEEPVEKHTVVAVDIAKAVFDIAVSHEPGRVAERRRLSRAAFSVFFVQLPAWTVVMEACGMAHYWGRKLEELGHSVVLLPPHQVRPYVTRNKTDRTDAKGILEAYRNADIRPVPIKTVAQQVLCSLHRFRSGWLASRTAQINTLRGLLRELGLVIPVGSEKVLPEVRMLIGDADSGIPDALRPVLATACHEIEALGANIKMTERQLEALAEQTPAVQRLESVPGIGLITATALPAFIGSIQRFPSGRQFASYIGLTPREYSSGTKRRLGRISKRGDAYIRMLFIHGARSILCHAKKAQQHDRLRTWALALQKRIGHNKAAVALANKLARIAWAVWKHDKDYVSTVEQAA

SEQ ID NO: 366504 - protein, 415 aa, unidentified
MSNSLIVGVDVHSQTNRTCVMDSQGRERGRRFSVANNRPGTQALIGHIVQAMNEGDFDNVCLAAEATNWYWLPFFHTLSQDPRLQDWPLTLYAFNPRLTARYKEIFCDQDKTDSSDAWVIAERLRNGRQLPSPFQIDAKYLSLRFLTRYRHHLVKDLVREKNYCMSILYLKASEYRQDHPFSNVFGATSQALIQEFASLEQVAAMPFEELVIWLDTKGKGRFPDPAAVARELHQVAQDSYPLEPDLQQSVNYVLTWSFQHVNFLDRQLQRVNTAIADAMRHIPHTLDTIPGFGPVFSAGIIAEIGDLARFNHDEAKVAQYAGLHWRQNQSGKFQAEDTYLTKRGNAYLRYYFCEAANAVRMRDADYAAFYQRKHDEVPKHQHKRAVVLTARKLVRLVVRLLTTNQPYRLRSAPNA

SEQ ID NO: 366505 - protein, 408 aa, unidentified
MQVLYPRCAGVDVHKDTVVAAVRCVSPPVHHEARSFSTTTLGLNALAEWLASHGCTHVAMEATGVYWKPVWHQLEGRFELVLANAQHIRNVPGRKTDVNDASWIADLLAHGLIRSSFVPPAPIQELRDLTRTRKQLVREIAQHSLRIQKVLEDANLKLGSVLSDVLGGSGRAMLEAIIRGDDDPERLADLALGTARRKKAALVEALRGHVTPHHRAMLRLHLDLVDALDAALAQIDRSVGKALEPIRARAQLLTTMPGVSDLVASVVVAEIGVDMSRFPTSGHLISWAGLCPRNDESAGKRRSTRVRKSANWLKTTLVTAAWAAVRTKESYLRAQFLRIKSRRGAKKAILAVAASMLTAAYFMLRDGLEYQDLGPDHFDRRDRSKTIRRLVRRLHDLGCDVLVTTEAA

SEQ ID NO: 366506 - protein, 377 aa, unidentified
MNRIIRIGMDVHSTNFTLCAMEPVLGGEDRIFANIQVTPDYKNIILFIEDLKMKLGISDSYDILCGYEAGCLGYSLYNQLTNVGIKCVILAPTTMLSPQGVRIKTDARDALMIAQCLAYGGYRQVYVPTEEDDSVKEYLRMRDDHKLALKKLKQQINALVLRHGFQYSGTKWTNAHWKWLRLLELSPLYREVLNEYMSSFEEYTAKIERFDKRIEELAAQQKYQLNVKKLECFLGVKTHTALSLVVEVGDFHRFAKGNVFAAYLGLAPGENSSGEHIHRGGITKAGNSHLRLLLIEAAGGICKGVIGHKSKELRGRQNGNTADVIAYADKANTRLRSRYYKFIRHGKKRNVAVAAIARELACFVWGMMTGNIEPRLA

SEQ ID NO: 366507 - protein, 326 aa, unidentified
MEHELHYIGIDTAKEKLDVDVLRPDGRHRTKKFTNTTKGHDELVSWLKGHKIDHAHICIEATGTYMEPVAECLYDAGYIVSVINPALGKAFAQSEGLRNKTDTVDARMLAEFCRQKRPAAWEAPHPLERALRALVVRHQALTDMHTQELNRTETAREVQRPSIDAHLLWLEAELKRLEKQIKDLTDDDPDMKHRRKLLESIPGIGEKTSAVLLAYIGLKDRFAHARQFAAFAGLTPRRYESGSSVRGASRMSKAGHVSLRRALYMPAMVATSKTEWGRAFRDRLAANGKKGKVILGAMMRKLAQVAYGVLKSGVPFDASRHNPVAA

SEQ ID NO: 366508 - protein, 423 aa, unidentified
MTKLCPTPAGAVLVAIDMSKNRQEVLIERPEGGRRRRMTVMANKEDYDAFAEQLAAIGRPIVVGFEATGNYHRTLAHHLLTAGFELRLISSVALARTREALHNGWDKNDSKDAQVILHMLRIGATQRYVDPLAAGINDLQELSKTHEVVSKMKTQTWHRILTHYLPLYFPEIARFAGNSRSDWFLALIERFPTPASITVLDREAFSAAAWPLIGRKVSKARLINDVYETACSSAALPVPEDSVAITMFRMVIAQGRSLIHQRDEIERLAHARLAEHVDYLLLRNIPGIGPINALTILAEAGDLRRFNHHRQFLKFCGLDLATCQSGTFRGRTKLSKYGNARLRRTFWMAAQVAARQRDNSFRDKLGRYTAGHADDADRRRKAMTALTAKMARVAHAVIKTGTEYRPFLERSDARWKDPSLQVP

SEQ ID NO: 366509 - protein, 360 aa, unidentified
MLIIGCDYHPSMQQIAWVETETGECGERRLMHRAEAEQFYRELKAKQVRIGIEATGHSRWFERLAAELKLDLWVGDPAQIRAKQVRKQKTDRRDAQHILKLMLEGNFPRIWTPTPENRDLRQLVWHRHRIVGMRTRVMNQLQAVAMNEGVRCKKGLWSKKGRQQLESLSLMPWTARRRQELLELLDQFDPSIDQLSQTIEKEAERIPEVKLLMTHPGVGPITALAFVLVLGTPERFGCGKQVASYLGLIPCEDSSADRWRLGHITKQGNSLLRYLLGQAAQSVARCEKQWQRQYAHLVMRRNKAIAKTAMARKLAVRLFWMWRKGWDYQQLNKFSSHVGKLADSIGVKQITDVMIGHPTP

SEQ ID NO: 366510 - protein, 424 aa, unidentified
MREEGLSMAEEIEWFVGIDWASQSHQVCLVDAHGECLGERAVAHGGLGIEELCDWLIARTGATPEVIGVAIEMTQGPVVEALLERGFCVYGINPKQLDRFRDRFTVAGAKDDRRDAHVLGDSLRTDRHAFRRLSNDEPVIVKLREWSRMADDLQQERARLASRMREQLWRYYPQMLELADDLAADWFLDLWNQAPTPAKAARLRQTTIERFVKAHRLRRWQAPEVLRILKQKPLSVAPGVVEAASDHIRTLTVRIRLVNQQLKAAHRKLDELCAQLVPSEEDEPGQQCEQRDVVILRSMPGLGRTILAVLLAEVWQPLRRRDYHALRSLSGVAPVTRRSGKTCVVVRRYACNKRLANALYHWARVATQHDALSRRRYAALRQRGHSHGRALRTVADRLLSVACTLLEQQTLFDPAYEVREAAGA

SEQ ID NO: 366511 - protein, 353 aa, unidentified
MHATTVGVDLAKNRFELAIRVGDDQPLRRERLSRQRFARFFGNFPPSLIVMEACGSAHFWARTLQAQGHEVRLLPAQYVRAYVRRNKTDAADAAALLEASRSPDLRPVPVKSVEQQQLQQLHRVREQLKSTRTGRINLLRGILREFGIAVPVGLARGRTAVREALEIADNGLPDLLRPMIAESLQEITALTERIARIEATLTALTRTDPVVQRLLELPGVGLLGASALRAAVGDIQRFPTGRHFASWLGLTAREHSSAETRRLGRISKQGDIYLRTLLVHGARSALCAAARAHSQGRPLDRLRLWALATEQRRGRNKATVALANKLARIIWATWRYQRPFAGDWPTRLEATPG

SEQ ID NO: 366512 - protein, 457 aa, unidentified
MAKSKTGPRSKSKSTLVPIHRNAAGLDVGATFHVVAVPPDRDPAPVRSFKSFTGDLHALADWLKSVGITTVAMESTGVYWVPVFEILEARGFEVLLVNARDAKNVPGRKTDVNDAQWLQQLHEYGLLRGSFRPRAGIARLRALLRHRERVVEYAASHIQHMQKALMLMNVQLHHVVSDITGLTGIKIIRAILDGVRDPKQLAKHRDDRCKESVETIRKALDGNYRSEHVFALRQALELYDFHHAKVDECDVEIEAALIDLNNDRATPSAPLPEARRRARNRNEPKFELRAALYTLLGADLSQIHGFGGYTVLRLVGECGDDMRKWPTVKHFTSWLSLAPGNKISGGRVLSSKTRRSANRAAVVLRIAAVNVGKTHTAIGAFYRRLAARTGKAKAVTATARKLAVLFYNALRFGMSYVDPGEDHYEENYKRRVVRQLHRRAKQMGFTLVSENTTVGVS

SEQ ID NO: 366513 - protein, 355 aa, unidentified
MSQEKYIGMDVHQATISVAVMDGDGKLIMECLLETKAATILEFIQGLRGTLSLTFEEGTSASWLHDLLKPHVSRLVVCDPRKAALLKQGNKSDRIDAHKLAELLRTNQLTPVYHGEHGIRTLKELGRSYLTVSKDVTRTMNRIKSLYRSWAIPCPGTTVYAPSHRLEWLAKIVQPGVRVRAQHLYEQLDNLQPIRQQARRELLLESHKHPAVKLLRQIPSIGPIRAALLVALLQTPHRFRSKRQLWAYSGFAVETHDSGEYRYVRGKVQRNRERITVRGLNDNHNPDLKNLFKGAAISASTRPGPLHDFYVARVAKGMRPTMARLTLARKVAAITLTMWKKGVSFDPQQLSRQSV

SEQ ID NO: 366514 - protein, 462 aa, unidentified
MQDSQKRKSSSGNRREIEGLPVIRRRIAGIDIGSERHWVCAPTIEESGREVADFGATTPELIRMAKWLKERNVESVAMESTGVYWIAPHEVLEAEGLEVMLVDTRQLARVPGRDKKTDPVDCEWIQRLHSCGLLMGSFRPQEAVCMLRTLVRDKGNLVAEAGDWLRRMQKSLDQMNVRVHRAVADLQGATGMAIVQAIVEGERDPRKLAKLRDHRCHKSEAAIAEQLSGHWREDHLFSLRQALKMYHSILERISDYEQELLKKLAAMEREECRGQEAPKVNNPQKAHAIRRRGEEPMRHALYRMSGVDLTGIDAIGVATVEVVLTEYGPDMSRFPTEKQFVSHVTLAPHRPTSGGKPVKKKKRNSASTRVAAALRMAALSLRHSDTALGAYYRNIARRKKGDVAVFATARKLATLIYRLLRWGQPYVDEGAQAYERRYQQTRVRGLMARAKELGYQLTPTTA

SEQ ID NO: 366515 - protein, 342 aa, unidentified
MDHYAGIDVSLECSSVCVVDANGKIVREGKVASEPDALISWLRSLGYELSRIGLEAGPLSQWLFAAMREAGLAVELLETRHVRKAFEAMPVKSDRNDARGIAQLMRLGWFRPVHCKSIGAQETRAVLTARKLVQSKLRDVENHLRGILRGFGLKVGKTTNPSFGIRIRELVANHANLEMIAEGLLSVHAVLLREFKVFEKQVRSMARSDAKARLLMSTPAVGPIVALTYASAIDDPARFKSSKRVGAHFGLTPKRHQSGETDYTGRISKIGDGSVRTVLYEAAHIMLTKPVKGCSALKSWAMRIARRAGMSKAKVALARKLAVILHRMLVNRTPFNAAAAAA

SEQ ID NO: 366516 - protein, 341 aa, unidentified
MDHFAGLDVSIKETSVCIVDDTGRLVRELKVASEPEALLRVLTNYRFKRIGLEAGPLSQWLFSALAEAGLPTICVETRHMRAVLKAQINKTDRNDARGIAQMMRVGLYRPVHVKTLRSQKLRMLLTHRKLLQSKAIAIENDLRATLRNFGLKVGVVGTVKFEARIKELVENLPDLVVLVEPLLIVRRVLREQIGILHRRLLAIVRDDDVCRRLMTVPGVGPVVALTYRATVDVPSRFRNSKAVGAVFGLTPSKHQSGESNRTGGISRCGDEMMRMMLYEAAHIMLVRSAKWSWLKAWAMKIARHRGLKKAIVALARRLAVIMHRIWVDGTEFRWTREVAAA

SEQ ID NO: 366517 - protein, 314 aa, unidentified
MNHSTIGVDVSKDWLDAHRLADGGARRLANDKTGRNALIKWLTAAPVKCVVFEPTGSYHRALERALDAAGLPIAKVNPRQARRFAEVAGKLVKTDRADAAMLARMGELLDLSPRPCVSQTITELKELHLARAALVKDRTAAKNRAKAITLPLLEKQNKKRLAEIDVKIKEIDAAIENLILEDAQLARRFEILLSIPGVSKITAFALLIEMPELGGLEGKQAASLAGLAPVQRQSGSWKGHAYIRGGRAFLRQALYMPALVACRFNKDSRALYQKLVAAGKPAKVAITAIMRKLVVLANALLRDDRPWAENAPCA

SEQ ID NO: 366518 - protein, 315 aa, unidentified
MSYGIFVGVDVAKEKVDVAVRPTGEKWEARNDEQGRKELVQRLRKLSPTLVVLEATGGYEVELALALTDASVAVRIVNPRQVRDFAKGKGLLAKTDSLDAGILAEYAETYRPEARSLPDEEAREMAAVLARRRQLIDMKIAEKNRLEHAKGEVRKRIVAHVDWLESEIERTERNLDDKIRRSPLYVEKNERLQSVPGVGKQTALSLILNLPELGTLDRKQIAALAGVAPFNRDSGKRRGKKSIWGGRAQVRAVLYMAAVVASRHNKVIRVFYEKLLAAGKPKKLALTACMRKLLTILNSMTRSGSSWIPSLAIAR

SEQ ID NO: 366519 - protein, 414 aa, unidentified
MDEHSTSAGIDWAKDEHALCVIEASGRMIAMEGRFAHDERGIAKLCRTLEDMGVERVAIERPEGVLVERVLECGITVLAIHPNQLKASRPRFRASGYRAKSDSFDAFCLAELARTDHHRLRALTPDSEETRALKVLTRAREDLVGTRVALANQLRAELEAFWPGAAILFSEIDSAISLAFLKRYPSPIDASRLAEKRLESFLSKNHYSGGKSAHQLLERLRKAPCGRAGKAEIEARREAVLALVGTLGALVERIKHLEERIARAVRAHPDGEIFLSLFLSPNSTLTAASLVAQIGDRRERYPTNESLAAAAGMSPVAVESGKRKVASFRRACDKHLRRAFATLAESTRHHNRWAKDIYRRARNRGCDHAHAIRILGRAWVRVIFRMWREGQPYDPARHGGLQRLRSAEGLPQGV

SEQ ID NO: 366520 - protein, 408 aa, unidentified
MQLMYARCAGLDVHARQVVACVRIVVKATVTYEHLTVPTTTRGLLELADWLSEHEVTHVVMEATGVYWKPVWHLLEGQVELLLANAQHVQNVPGRKSDVNDAQWLADLLAVGLIRGSFVPPASIQALRDLTRTRKQLVRETGRHTQRLQKILEDANIKLTETLSDIRGKSGQAILRALIAGETDPERLAGLARGLKASHGQLVDALHGRVTAHHRFMLNLHLEQIAAIETGLIAIEQRLSEALAPFRAARDLLKTMPGISDTVAAVVLAEVGDDISPFPTASHLLSWGGFAPRLDESAGKHRSTRTRPSAPWLKTTLVQAAWAAARTKDSYFHAQFVRLKSRRGPKKAILAVAASMLTAVYYMLRDGVEFHDLGAQYFAHHDKDQITKRLLRRLRDLGVEVEVKNKAA

SEQ ID NO: 366521 - protein, 323 aa, unidentified
MFYLGVDVAKKKLDCMLLDTSTGKMKSKSVANTPVGFAELVEWLKKNKAVDPHIVMEPTGMYHEAAALALADAGLVVSLINPAQLRAFAQGLGIKNKTDKEDSAVLARFGAAQNPGPWQPPSPSARRLKALLTRRDAVADDLQRERNRQEANDFSSVPEAVSDSIKESIAFLEAELKRLEKMIATHINDDPDLRNKKKLLETIPGVGPRVATHMTTLFAGRTFERAEQLAAYLGLVPVMWESGSSVRGRPHMSKAGPAYLRKVLYLPAVGARRWNPHIKALNDRLLAKGKSKMAAIGAAMRKLAHLCFGVVHSGKPYDPKFAM

SEQ ID NO: 366522 - protein, 441 aa, unidentified
MANTTVTTPEPAWAAFLALDWGSQKHAWILQPADGGKRNEGYVDNTPEAIAVWAAGLYQRFGGRPVAVALEQKRGSVVNLLLPYAHLVLFPVPASMSASYRKTFVPSGAKDDPTDAGWILDLLLRHRDRLRRLAPDDANTRLLLMLVEDRRQLVDDKTSLTLRLQDCLKQYFPQLVRWFDVDTALVADLLQQWPDLQHLQRCHDGTLRKFFRQHHGGEKLTGERIETIRAAVPATNDPSVLEAGSMKARHLTESIAALRGQITQLERRRDELVADHPDAPIFASFPGAGPATVPRLIAAFGTCRERYQCAFDVECDSGIAPVHIRSGKVDLVSMRRACQKFTRQTFHEFAGQSIPQCEWASAFYHAHCTKPEEHHAAVRALAFKWIRILFRCWKDRKPYEEQLYLTSQRRRGALLGPGLASVTSLEWHNVAGFSKLSEKNS

SEQ ID NO: 366523 - protein, 387 aa, unidentified
MEVVFPRCAGLDVHKKTVVACVLAREGRETLRAVQTFGTTTPELLTLQTWLTAHRVTHVAMESTARYWKPVYNLLESGFTTWLVNPAHIKAGPGRKTDVKDAEWIADLLQHGLLKPSFIPDRGQRELRELTRYPKSLIEERAREVNRIQKVLEGANIKLGSVVSNVLGVSGTRIVRALAAGTTDPAVLAALADDRLRATPEELQRALHGLMGAHQQFLLRQQLQHLTQLDDQIATLDAEVQTRLAPFDAARDLLESLPGVGRRTAETILVEIGPTVTAFRSPAALAKWVGLAPGNHESAGKRLSGRTIPGNRSLRAALVEAAQAAGRTKATYLGAQYRRAARTKGAKRAAVIVAHSLVVDVWYILTRQQPYADLGVDYFDRRDQCKT

SEQ ID NO: 366524 - protein, 332 aa, unidentified
MTNFVGVDLHRNNFTYCIRVNGEERKIGKCEITELKGFAAMLGPNTAMAVEATGNTFMFCSSLRAYVGRLVVVNPSQFKVISMSTKKTDKHDAKVLAEFLEKDMLPEVRMKDDLQAKISSLTQTREKLVQLRTVLKNKVNNLLAANFIVLKREELSTEKGLVKALSYRIDPITDTEMLVVVEQIRSLNKSIEKLDKAIEDHGSKMDGFSNLKSIKGIGTKGAAILLATIGNIHDFRSSKHLAAYIGIVPRVSNSNDTVCHGRITKNGSKTARTALVQCALIAKRYSPYLNAFHESVKSRRGGAKANIALARKFLDIVYKTLKTQPSHRKRKS

SEQ ID NO: 366525 - protein, 351 aa, unidentified
MPRTSTVRAVTTIGIDMGKSTLHMVGLDSLGAIVLRERVSRGRITSRLANLPPCLIGIEAGMATHYVARDLAALGHDVKQVPPGYAKPFRQGHKNDFRDAHAVAEAVQRPTTRFVPAKTNEQLDLQALHRVRSRLVGERTAVINQIRGFLLERGIIVRQGHRFLRHLLPDILAKRTDVLSPRMVRIVSDLAGDRRQLDERIETVTDEIETLAKSDDNCRRVMTVPGIGPLISSAMVAAIGNGTAFAKGRDYSAWLGLVPKQMSTGDRTILGRLSKRGNGYLRMLFMQAARVILLRPTNWPKHGFGAWLVRAAQRLHPNVLAAALANKLARIAWTVLAQQRSYEARVTKAAA

SEQ ID NO: 366526 - protein, 391 aa, unidentified
MYLVGIDISKFKHDCFIMTETGEVINNSFSFDNNDSGFTLLLDTLKSLDQSQKIKIGLEATGHYGNNLKLFLTENNYSFMELNPYLVKKFAESFTLRRTKTDKLDAMTIASVLGSPNLTYEPYQISSYHISSLKSLTRYREAFVKERSLHLVQLTNIMDQIFPEFKPFFKGKFGATAIYILKKYKTPERISKLTDEDIFKIKTVSRKISASKLVKLRELAKNTVGHSSISNQILLKSILNLYTNVDDEVTEIEKQIDSIMSEYKNHIVSIPGISKYSAAQIIGEVGDFKRFSSASKLLAFAGMEPSTVQSGTMDFKGKMVKHGSGHLRYVLMNVAMTIIANNPTFYSYYSKKHKQEGKNHRVALSHVVRKLVRIIYHLEVTNQDFNSNLLK

SEQ ID NO: 366527 - protein, 364 aa, unidentified
MKKVYYIGLDVHKETTQMAVLETRGKEPVAVKIINSEPLKVAKAILPYKKDGTVHVGYEAGCMGYTLFRVLTEMKITCKIIAPNKVFRGGNNEKIKTDKRDATAIAWMLRRDEGSGIAVPNREDEAARDLLRCREDIQDDLKRAKQRMLKFLLRHGYMYENTRYWTGKYRNWLKTLTFKMPVDKTVFEQYLYTIENIEERVGRIELQIKEIAESPRYKERVRKFRAFKGVDYIIALSLVTEIGDFNRFPTAAAFMSYIGLVPSEYSSGKKRRQGGITKAGNGHIRKLLTEAAWHYARPAQVSKRLAERRIGTSESIIAYANKALNRLHGKYVKLVFKGKSKQTAVTAVARELSGFLWGMMTATA

SEQ ID NO: 366528 - protein, 333 aa, unidentified
MQYYAGLDIHKKSCQAIICTEKGNTVKQGKIPTEKDKIQEFFSDFENITIAIEACNTWEYIYNLLELDGHKVILAHPMKTRIIAESKIKTDKIDAKILANLLRTGFLPTSYIPSKEIRELRHLVRQRIFLGRYTTKLKNKIYAELLKRGIQYETGGTIFTRKGRKWLRSLNIPFLDTYLSLLESLVDKTAEIEKNLRIQSEKYNEIDLLTTIPGIGIYSAMIILSEIGDINRFPNEEKLYSYAGVIPSVHQSGENTYYGHITKRGSKHLRWILTEVVRVHLIWTKKHTVETKISHYYYRLSKKKPKNVATIATSRKLLQIIYHMLKNKNEFRG

SEQ ID NO: 366529 - protein, 375 aa, unidentified
MKEKLRFLGMDVHAETIAAAIAEPDGGVRSLGTIPNRMESVRKLIKKLGPVEKLRVCYEAGPTGYVLYWQLAELGVQCEVIAPSLVPVKAGDRVKTDRRDAEKLARSYRSGDLTAVWVPDEGSEALRDLVRAREAAKQDQLRARHRLGKFLLRSGQRPPSGVRAWTHLHLIWVSQIRFTQAAQESTRLDYLHEVEHMRERVLRLEQAIVEAVKLASPALQEVITDLQALRGIAHISAVTIAAELGQVSRFAGARELMGYCGAVPSENSSGKRTRRGGITKTGNAHLRRIVVEAAWSYHRPPAIWAGLRKRQQSASEEAKEIAWKAQHRLHKRYARLAATGKDKRKIVTAVGRELLGFIWAIGNKAEATVMQRIAA

SEQ ID NO: 366530 - protein, 399 aa, unidentified
MKPVIGIDVSKCESEGYIFLERNKPYEKAFRFLHTHEEITKLNMKLEKVEELAGAKPAVVLESTGHYHLGLVGALQKHGYEVIVLNPLISQRARKSKLRKVKTDSEDAKQLAELYYRDELKAGLTKRSMEQEELRFLSRQHQMINHAYVQAQLHFQSILDQVFPLYTDIFGQLFSVTALEVLKMYPTPEHVLTAAQDELKEKIVARCNRSDSWASTKAAAMIQAARNSLVIDPNPSQVIAMRLMINLLMEYQSHLANLEQEIKMKASCIPGYELLCSIPGIGPKLAATILAEIGDISSFEHSKKLVAFAGIDPSVFSSGKFTATRNRITKRGSTRLRRALYLAVLCGIRGAARNQRIRLFYDQKRLEGKPHRVALIACTNKLLRIIYALLKNSVRYCPS

SEQ ID NO: 366531 - protein, 457 aa, unidentified
MTGTNKPVQSRGMSPIHPRAAAIDVGAKMHVAAVGPDRASEPVRTFGTFTDDLNRLADWFQECGIETVAMESTGVYWIPVFEILEQRGFEVLLVNARDAKHVPGRKTDVSDAQWLQRLHEFGLLRASFLPKGEIAALRAYLRQRERLVELAASHIQHMQKALMQMNVQVHHVVSDIMGVTGLRILRAIVAGERDPGVLAANRDRRCHADVETIQRALTGNWRAEHLFALEQALALYDACQEKVTDCDRKIEATLKRIEAQSAKPVGKPPPARSTKRQPNALDFDVRTALHAVLGVDLTQIHGLGPYLALKLVGECGTDLSAWPSAKHFTSWLGLAPSNKISGGKVLSSRTRRSSNRAASLLRLAAVTVGRTDTALGAFFRRLSGRVGKAKAVTATARKIAVLFYNTLRHGMDYADPGASYYEERYRQRVLTNLQRRAKSLGYVLQQADAAPAASGVS

SEQ ID NO: 366532 - protein, 370 aa, unidentified
MKVTRIGLDIAKQIFELHGVDRRGRVVVRKTLRRERVLEYFSQLPACEVALEACGGAHYWQREIGKLGHTVRLLPTNKVKPYLDGNKNNAHDAAAICEASSRPSMRWVEPKTIAQQDLQSLHRVRQVTVRQSTLLANHSRGLLLEYGIAVARGAAALQRARAELLEPDEQRLSPLLKQLIAAQWRMLKLHRQQVKVHDRRISSIARHDAGCRALLKVEGIGPITATALVAAAGNGRQFKNGRHLSAYLGLGPGHSNSGNKTVMLPITKRGNRYVRTLLVHGARATLYHARKKADPRSLWLQRLQAQRGHNVAAVALANKNARLAWALLRFGQAYRPNLAHAPTAERGATPCTARLPPIQNPAFFRPALKG

SEQ ID NO: 366533 - protein, 328 aa, unidentified
MKLSIGIDVSKKNLDVAFFNGNDYELLSVYPNDTNGCKQLINKIKTYDEKEIIVTMEATGTYNLNAAINMHSAGLTVSVVNPLVIRRYKEMKMLRAKTDPVDARAISEYGYEQKPCYFKPKPGNCQKIVYFLKLIEDLLLMKSQNKNRIEAYSVCPDAPKEMMKRFHDMNDYITSQIKETEKELKALVKDESANQYKRLMGIPGIGDRSSTAIIGYFNNFEDFENAKQVVSFIGMNPSPCESGTSVKGKGTISRQGNVYLRKLFYMASLSASKHNESCKLLYDRLLENGKDKKLALVAVANKLIRQVFAIVKYEREYISSYHMENVLT

SEQ ID NO: 366534 - protein, 407 aa, unidentified
MNQDKLYVGIDVSSKNNVCYLMYSDGSKHSSFSVPNNRNGAKIIVDRVTSVLLLQDIPKVMIGMEATSVYGDNLMRFLRESGSLGRFERSLHMLNPKQVKKFRDAYSDLPKNDYVDSFVIADHLRFGRINKEVYMDDYKYQALKMYTRARHQLVQELTREKQRLLNTVFISFSGLTQEKIFSDKFGETSMFSSLDELAYMNTDELADFIRKHGKNHFENPEEIAEAVQRAAKNSYRPPQVIADAAKQMIVISMNTIRLLQKQIKEYDKAIEKMLEMIPQTLTSIKGIGNVYAAGIIAEIGDINRFPSQASVAKYAGLVWTQHQSSDFEAEDKRMIQGGNHHLKYYLCEAANALRRCDPEFKRFYSLKYKEANKHNHKRAFALTARKLVRLVYTLLKTNRLYIPPEEY

SEQ ID NO: 366535 - protein, 343 aa, unidentified
MEHFAGIDVSLELSSVCVVDGVGKIVHEAKVASDPEALVGFFRGLETRVTRIGLEAGPLSQWLYAGLVAAGFEVVLLETRHVKAALSAMVVKTDRKDARGIAQLLRMGWFRPVHAKSPAAQEVRALLVARKLLQTKLLDVEFSIRGILRGFGLKMGEVSKGRFVARVRELAAGHAMLERVTEPMLRAREALRTEYARLHGEMLAIARPDPVCRRLMTVPGVGALVAITFKSAVDDPGRFARSRVLGAHFGLTPRKYQSGETDVTGAISRVGDAMVRMALYEAANVMLSRVTRFSSLKRWALDVAKRRGLKRAKVALARKLATVLHRMWVDGANFHWGKQAAAV

SEQ ID NO: 366536 - protein, 344 aa, unidentified
MDHFAGLDVSVKDTSVCIVEDTGRIVREVKVASEPDALLAVLTNRSYRFKRIGLEAGPLSQWLFSALAEADLPVICVETRHMRAVLKAQINKTDRNDARGIAQMIRVGLYRAVHVKTLRSQKLRMLLTHRQLLQSKAIAVDNDLRGTLRNFGLKVGMMGAARFEARIRELVQGLPDLAVLVEPLLVVRRVLREQVAILHRRLLAIVRDDEVCRRLMTTPGVGPVVALTYRATVDVPARFRKSKSVGAVFGLTCARDQSGERDRAGAISRCGDKMMRAMLYEAAQSMLVRSTRWSWLKAWAMQIARRRGKRKAIVALARRLAVILHRIWVDGTEFKWTREDASAA

SEQ ID NO: 366537 - protein, 403 aa, unidentified
MQQIIIGVDPHKLSATIEVVDKHEQRLGAGRFTTDRAGYAAMRTYVKSWPNRVWAVEGANGAGRPLAQRLLEAGEQVVDVPAKLAARVRLFDTGHNRKTDALDAHSIAIVAVRTTTLRILQVDGQLEALRMLTDRREALTRRRVQTVNRLQALLAELLPGQAKKDITPLQAKGMLASVRPRDVAGKTRRSIAAEELAELVAVDAKIKKATAELKSIVLARGSHVMDLHGVGPVVAARILADVGDISRFADRNRFASWTGTAPLDASSGEQNRHRLSRAGNRRMNHMIHIAAVTQVRLDTEGRAYYRRKRAEGKKPMEAMRCLKRRISDGIYRQLIADQQRPGAAKREAGPGGHCGASQESSAVDLPPHIDTSDQPLPGPAKTTLRPASAPRKSNRRRNLQTTG

SEQ ID NO: 366538 - protein, 341 aa, unidentified
MKNLFIGIDFSKEKLDVAVITAVGLSETAQRECYEFKNSVSGFRQLVKWVECNSNGIATSSWLFSGENTGDYSKPLCNFLYGKGYDIWLENAKSIKDASGIRRLKSDRADALMIAEYAMRNYDKAFMYEPLSASLSQLRELFLYRQMVIRHRCSFQVRRGEKRLAMEKSPVKTIISQSGRHIVSELNKEIEKIDKRIAELIDSEEELKEIYHIVTSVPGIGCQNAVCLMVYTDNFRRFNYDARKIACYYGIAPFGKNSGASVHTDPHVHYLANRQIKAMLTQAALAAINHNPVLSQYYLRLVERGKKKQVAMNNVKNKLIHLVTAMVRNRQVFSPEYKISA

SEQ ID NO: 366539 - protein, 417 aa, unidentified
METDQRKVNGVIFVGDDWAEAHHDVYVCDEAGGRLATRRLPEGVQGIGALHELLAEHAEDPGEVHLGIETDRGLWVHALVEVGYVVYAINPKAASRYRDRHTLSGAKSDSGDAKMLAELVRTDRHNHRPVAGDSDLGEGVKILARAHQNLIWDRTRATNRLRSALRESFPAALDTFDDLADRDTLAVLARAATPAEARALTPGRVRTLLRAAGRTRNIDTRAQAIVAGLRADTLTAPDAVARAFAATTRSTVAVIGELNRQIAALETELADHFEQHPDADIYLSQPGIGVILGARVLGEFGDDPNRYATTKSRKNYAGTSPITRASGNRSVALARFIRNPRLADAIDQWAFCSLRNSPGARAFYDHRRRLGDSHHKALRALGNRLVGILHGCLRTRTTYDEHTAWSHRKDDQTDIAA

SEQ ID NO: 366540 - protein, 340 aa, unidentified
MVIIGIDPHKATHTAVVVDERENVLAQLQVRATSKQREQLLEFAAPFTDRTWAVESAGGLGDLLARELVDAGERVVDVPPTLAARVRLLGSGKASKNDPNDARSTAIAALRHPRLREPRVDDHAVALRLLVDRHQDLGVLRTRTVNRLHALLCALTPGGHVRRMTADQAQRVLRSVKPATSVDTTRKQMAVDLLGDVRRLDRDIAASKKRVVDAVAASNTTLTEIFGVGPIVAATIIGHVSDVCRFPTRDHFASYNGTAPIEASSGPKKRHRLNPRGNRTLNYALHMAAVTQIRNDTPGRAYFDRKLEEGKTKKEALRALKRRISDAVYRQLVADSRAAD

SEQ ID NO: 366541 - protein, 338 aa, unidentified
MKLYGAIDLHSNNNVTVLIDEQDQVVYQKRLPNDLPLIAQQLSDYRDRLQGIVVESTYNWYWLVDGLMDQGHRIHLANTAAIQQYEGLKYTDDHSDARWLAHILRLGVLPQGYIYPKEERAVRDLLRKRSQLVHQRTANLLSIQNLVTRNTGSSIRSNRIKALDREMVDALSPNPDLALAVKANLAMIQCADGQIDILERTVTDRIKLRAAFGFLKTVPGIGQILALTIMLETGEIKRFPTVGDYASYCRCVGSQKLSNGKKKGSGNTKNGNKYLAWAFVEAANFAIRYNARIKSFYQRKKAKSHGVVAIKAVAHKLCRACYYIVKDQVPFDIAKAFA

SEQ ID NO: 366542 - protein, 428 aa, unidentified
MRRSHGPGAHEPDGLDTVRIFSEQLISKARTASSEIASRRPPDGQMSNYSSVSYSDHDACFLDQRGHVLSRLTVAHTADGLTQLDRAREQLGVTRAECQVGLETAHTPLIDFLWDQGYSRVFVIPPGAIKGARRRYRQTNAHTDQSDAFLVADVLRTDPTTLHPWRPDGLIIRQLRSKVSLLHFLTKEIRRLSNRLGAVLARYYPAALHVFHDVASPIALQFLQAYPTPQAAAGLSRQSFGQFARAHRYRQADKVLSAAYARLQAAYPMASASTVVAYHEEAVFLAQHLLAAIEHKKCEIAHLQQLFEQHEDHELFASLPGTGDFLAPALLAKFGDDRERFPSAGSLQSIAGTCPVTEQSGKGRRVLFRQACDHEFRQIAQQWAKASVTQSSWASTYWHSVHEHSHSSSHAYRCLANRWFHCRTEKLC

SEQ ID NO: 366543 - protein, 424 aa, unidentified
MKRTQNEKILQIKFETLIVGIDVGKEAHYARAFDFRGLELAKLLRFSNTRQGYESLENWMQEIMREHGKTEAIVGFEPTGHYWFTLGDHLQRQGHRLGIVNPFHVKCTKELDDNSPTKNDRKDPKTIAMLVKDGRFREVYIPEDLFQELREAVAERERLLEQLTILSNQVLRWLDIRFPEFSEVFKDWNRDAAWLTLRHHSTPQKVVTAGVAGLMKTWRQEMKRPSLKRAERLVKAASESIGRTAGSEAAEAALQNILTQYELIDRQKQETEMLMQELLLRVPNASKLLDIKGIGMVTAAVIVSEIGDIHRFHDPRQIQKMAGLSLRENSSGKHKGKTTISKRGRKRLREGLFRAIITMLATNQEFRAIHRRNLTRENNPLTKMESVIALCGKLIRVIFAILTKGNDYDAKKMMNDMNRSMKAA

SEQ ID NO: 366544 - protein, 406 aa, unidentified
MWYAGIDWADDHHDVVVLDEQGQRVASCRVTHTPEGLAQLVTFLQATVGSAPSPQELACLIETTHGLLIAALLEAGLAVYPVNPKTVDRRRKPSGAKTDAIDAYLLAKTGRSDLADLRRFAPDSPLVQELKALPRDQDGLIQSQTRLVNQLTACLKAYYPVALDLFTKLHQPLTLAFLQAYPPTLEIAQRASVEELTALLRQHHHPTPGPTAQAVWERLHQPQLQADAITTRTKSRLLLALVSQLAPLLEQIKEYDGEITRLFLSHPDSAIFASLPRAGKRLAPRLLAGWGDDRERYVSAASVQALAGTSPVAYESGKYAKAHRRYACVKPFRTVLFQFAWQSTFREPWAATYYRHKRQEGKSHSMAVRALANNWVRIIQAMWRQQRPYRADIFLAAQQAHAGQAA

SEQ ID NO: 366545 - protein, 461 aa, unidentified
MVATRVRTKRPRLDDLACVHPNAAGLDIGSEMIVAAVPADRDEQPVRAFATFTPDLHALVAWLLACGIDTVAMESTGVYWIAIYDLLEQAGITCYLVNAQHVKTVPGRKSDWNDAQWLQKLHMLGLLQASFRPDAEIRSLRVLARHRAELIRHRAPHILHMQQALKLMNIQLSEVLSDITGLTGQAIVRAIVAGERDPATLAQLRHPGCKHTEAEIVKALTGTWHPAQIFILQQNLQLYDFYTAQLAACDGEMERSYQAMESRHEKDAPLPDLPKAKPGSRSKNEPNFNVRAQLARIVGVDLVGVMGLSASSAQTIITEIGTDMTRFPTVKHFCAWLGLAPRNDISGGKVLRSRTMKVRSRANQAFRQAAESVARSQSSFGRYFRAMRARLGPEQAIVATAHKIARVVYHLLTTKEPYREECAEEADQKRQERELKQLARRAQRLGYTLNPVAEPAPAPNP

SEQ ID NO: 366546 - protein, 430 aa, unidentified
MKSNTQNAKIEAITEKTLVLGIDVGSEMHYARAFDYRGIEYSKKPFKFSNTEAGFVTFKEWILDLKERHEKDKVVPGMEPTGHYWFNLGKFLQDNEMKPVLVNPHHVKKSKELDDNNPTKNDRKDPKVIAGLVREGRYMIPYLPDGVYADLRTASNIRFQLQAELTRIQNRISRWFNIYFPEYKTVYGKPDAKSGMLILKTAPLPEDILTLGIDGVNQIWRDEKLRAVGKARAKTLIEAAEHSVGSKEGAVSARMEIRMLLEDYESRNTRLQEVMVLIEELIRKIPMAEKLLEIKGVGIRTVSGFLAEVGDISRFNNPKELQKLAGLALVENSLGKHKGETTISRRGRKRLIYLLFEVAMSLVSKNQKFRELHNYYTTRRLNPLKKMQSLMAIAAKLIRVFYAILTKGVDYDPKKMVSDIKRPAVYLQTA

SEQ ID NO: 366547 - protein, 465 aa, unidentified
MMKIPKSKSHCHQSSTNQTSDLRLINPNAAGIDIGSEFHWVSVPKDRACECVRRFGCYTADLYALADWLAECGVETVAMESTGVYWIALFQILETRGFEVKLVNAHHVKTLPGRKSDVLDCQWLQQLHSYGLLSGSFRPEDQICVLRSYIRHRDSLIKSACVHVQRMQKALTQMNVQLHKVVSDITGTTGMAIIRSIVAGEQNPQILAAKRHHRTKRSEAEISAALNGDYRSEHIFVLQQELQLYDVYQAQIAACDYQIQECLAQFSDKVNLNESPLSQPKHPRHKPQGNEPAFDLRTHLYRISGVDFTTIDGLGILTVQTIISEVGLDPTRFPTVKHFTSWLGLCPCNRITGGKVKSSQTRLVVNPATNAFRMAAQTAGKSNSALGAFYRRLRSRLGTPKAITATAHKLARIFYRLWTSGGKYQDPGMDYYEQRYQARVINNLQKKALALGFELIPQPEANTVS

SEQ ID NO: 366548 - protein, 477 aa, unidentified
MPAGQQVEVEVDEHEEIVGRVAAIDVAKASGMVCTRVPHATKAGRRVTRVWQVPSTTNQILELAEQLAGEGIERVVVESTSDYWRPFVYVLEARGLVVWLVNARDVKHLPGRPKTDKLDAVWLCKLNERGMLRPSFVPPAQIRRLRDYTRLRADLTADRTRHKQRLEKLLEDALIKLGTVATDIFGVSGRAMLEALIAGQRDPKVLAELARGRLRVKHAALVQALTGRFDDHHAELARMLLDQIDTLGGQIDQLTARIEQTITAIPAAQPPAPATGPGGDAAATLHAGIESAESVPGHPNSDGVDPETGELLAAPLPVVDRLDEVAGIGHHAAQVIIAEVGLDMGQFPTPAHLVSWARLSPRTIQSGTRHRAGATGKGNPYLKSVLGEAATAAAKTDTFLGERYRRLVRRIGKRKALVAVARSILVIVWHLLADPTARFHDLGADYHASRIDRDRKTRNLVHQLQALGHKVTLQPAA

SEQ ID NO: 366549 - protein, 453 aa, unidentified
MSDTTTCPPPVLAARIGIDWGDKKHAWALQPAGSQKIERGEMDHTPEAIQEWAVALRQRFPEGCLAVALESSRGPLVFALSKYEHLVLYPVHPNSAAEYRKVFRPSGAKSDAPDAALLLDLLSRHGDKLRPLNPDTPQTRALQLLTEHRRRLVNERTRFTNRLGADLKSYYPQLLEWFEDPYAPVALDFLKQWPTVEELQKASRATLRKFFKQHQCRNEAKNEQRIEAMSKAVAATTDFAVITAGQLATQSAVGILRELGHAIQEYDQQIEKLAQAHPDFAIFDSFPGAGAALVPRLIAAFGTQRERYQTATDMQQYSGIAPVTEASGNHHWVHWRWSCPKFLRQTFHEWAGQSIQRCDWAAAYYQAQREDKNQSHNSAIRALAYKWIRIAFRCWQDRKPYDDSHYEAILRQRAAQVKKPIQPPPFELPLQWISCGSFQKIAFKQPQEIHKTS

SEQ ID NO: 366550 - protein, 386 aa, unidentified
MVRAKLNKSKLTNNDYIKDLNMYDHYTALDWSQNNMAIARMTRSSAEPTVIDVPADVQELKIYFNNLRGKKILTIEETTSSHWLYTELRDYLDRIVICDPYRNRLLSEGPKNDKIDASKLCKLLRAGLLKEVYHSLTKPYELRKLVSAYDDLIKAGVRLQNQRSAIYRSEGKIYEDTTNTTNTTNTTNTTNTTNTTKGASKGTSKGTENDITDFILQQIEEGVEEYERKKKEFEEFINRESKKDKHIRNQTTIPGIAEKGAIKITATVVSGNRFRSAGKYLSYSGLVKHKKMSGNRNYGKKTPRYSRKLKTVYKTAANAAIGRNNPVNEYYEYLLNKGLSEDKARNQIARFIARISLGMLKNGENYDPYRWRKNKKIDGENIKNIK

SEQ ID NO: 366551 - protein, 353 aa, unidentified
MSKGTTSYTHTVGFDVSDKTAMIAVMDQAGRVCQEEQIELTLQAVRERFGRLPRSRVALEAGGQTRWLARVLGDLGHEVLVANPRNIPLLTKSHRKSDRADAVLLARMARLDPELLSPVTLRSEAAQEDLLEVRARDHAVRQRTRSIGLVRGQAKQFGARLPGCDADAFHHKAVEWLPAELLERLLPTIQLIEACTKTIKAYDRRLKQMLKRYPVAAALERQIRGVGPVTALAFVLLIDDPHRFTSRGAGAYLGLVPKKDQSGESDPQRGISKRGDALGRRLLVQCAQYMLGPFGEDSDLRRFGLRLAGSGNKAQRRRAVVAVARKLAVLMHALWVSGEVYEALRNSRVADAA

SEQ ID NO: 366552 - protein, 311 aa, unidentified
MTDDTIGIDVSKATLDVHRLTDGKMTSFSNDTVGFKQLAKFCDETTVIRVVYEATGAYHKGLERALGALLPLVKVNPLQARRFAQAQGVRAKTDAVDAKMLAVMGDAFGLLPMKPVSETQHVLKELRAFRSGLVADRTRILSRQKTQTLPITRRQSKTRLAHIDKQIAEIGAEIGRLIQADDMMAHSMKILRSIPGIGAVCAATILIEMPEIGDMDRKQVASLTGVAPMTRQSGQWRGKSFIQGGRKVVRDALYMPALVAMRFNPDLKAKYQAMIKAGKPPKVALTALMRKLIELANALIKANRLWVNKYA

SEQ ID NO: 366553 - protein, 347 aa, unidentified
MIIIGCDLHTRSEQIAMLNTETGEFEERRLEHEDGEAREFYAGLKEPALVGIESTGYTRWFADMLAELGHELVVGEAGKIRARETRKQKHDRRDAEHILNLLLRGDFPKIWLPSAEERDVRVLLEHRHQLVELRTRAQNGLQAIALSYGLRRRRRLWSERGQEELKKLPLREGMERRRADLLRLVRQLDTWVQELDRRIEQEVAQREEARRLMTHPGVGPQTALATVLVLGPVERFPDDRHLTSYLGLIPQEDSSAGRQRFGHLTKQGNRLLRWLLVEAAQTASRYDPRLARAYRRLAFRKGRPVAKVAIARKLAIRLYIMLRDKIDYPEFCRRGSHAGMPEEVALA

SEQ ID NO: 366554 - protein, 455 aa, unidentified
MVDEAIFILFVQEKKKSFLATMTLINFVAANQKYYAFNLLSVFIMVFWSVQYLLQHLLVQTQLSDQLLQPLILILQLPQTPQFRHARPGKFFLPVNGMDYLLPLRLTVRNVLTRRITMNIVFLGIDLAKNVFQLCGLNQAGKPVYTKRTGRKELLQTLANIPACLIGIEASTGAFYWQREFEKLRHKVKVISPQYVKPFVRGQKNDGNDAQAIAVALMQPTMQFVPPKSPEQQDIQALHRARQRIVNHRTATVCQIRGLLLDRGIPIGSAVSRARRAIPLIPEDAENGLSSRMRRTIAELYDLFNDLKRRIHFFDKEIETVFRQSEACQRIAKVKGIGPKTATAVAAAIGKGTEFKNGRHFAAWLGLVPRQHSSGDRQVLMNMTKKGDKHLRTLFIHGARAVVRVATNNNDGHMNQWVNQLKERRGFNKTTVAVANKNARIIWSMLRNDTGYQVV

SEQ ID NO: 366555 - protein, 418 aa, unidentified
MKWERNSRGAELRYIGLDVHKHYITVGGLNAQQEIVLRPRDVEMERFKTWAESNLRNTDEVVLEATTNTWDVYDTIAPLVGRVVVAHPAEVKQIANSRVKTDTQDVIRLVRLLIADIVPDVWVPPVEVRELRATISYRWRLVKMSTAIQNRMHSLLHRHNIQAPQGKIDTGENREWWEGLKLSELENLRLKQEIKTLRLVRENIVEVEKELGHLSNSERWGDQAVYLMQIPGVGIIVTMTILSAIGDIQRFESPKKLVGYAGLGAGIHDSGQKHREKGITKMGRKELRWALVEASWQAIRSNPIWRAEYDRLCKRKHPNQAIVAIAHKLLVTIWYLLNRKEVYKQSSEEDLAYKMLTWAWHMDKPALSGMTNQQFAKYGLLRLGKGEDITRIMKGGLPRRIASKEEVLALKPELRIPQ

SEQ ID NO: 366556 - protein, 353 aa, unidentified
MTDIAMHNDRIATIGMDLGKRSFHLIGMDARGKVIMRQQLSRGRFERHMANLQPCLVGVEACAGAHHIGRRLSAFGHNVRLIPAQYVKPFRKGQKNDYRDAEAIAEAVQRPTMRFVPIKSAEQLDLQALHRIRSRLVGHRTAVINQLRGFLLECGVIVPQGPAMLRKILPSVLAQRTDVLSPRMIRLIEELADDWRRLDDRVDAVTSEVQALARQDEGCRRLMSVPGIGALTASAVVATIGNGAAFTKGRDFGAWLGLVPKQLSTGDRTILGRLSKRGNKYVRTLFIIGARAVLAKPGSWAKFGLEGWLVGAAKRLHHNVLAAALANKLARIAWSVLYHGRSFARDFEPQSVS

SEQ ID NO: 366557 - protein, 349 aa, unidentified
MRKLMAGMDLHSNNVVAGIVDQDGKRIAHQKLDCDLGKIIAFLKPFKRDLVKIAVESTFNWYWLVDGLKAASYPVVLANPAKIDQYSGIKHADDKNDAFFLAELCRLKILPTGYIYDPELRPVRDLLRRRLSLVHQRTALMLSFESLFTRTTGEQMGLARLKKLDVPAAQKLYDHPANQLIAGVQMKHIEQLNQSIEQIEKVVIKVAKQLPYYAKLKTLPGVGIILGITVTMEVGDIKRFSDAGHFASYCRTVDSKCLSNGKKKGENNQKCGNKYLAWAFVEGANFAKRYDEDCRKWYDRKAAKKGTVIATKALACKLAKAAWYLMAQGVDYDRNRIFPELAGALSKRR

SEQ ID NO: 366558 - protein, 355 aa, unidentified
MNSVRYVGLDVHRDTISVAVLDESGRLILQSVLATRAAAILDFIGGIRGTVHVTFEEGTHSAWLYDLLVHRVAKLVVCNPRKNALLKSGSKSDAIDARKLAELLRAGMLSPVYHGESSALEVQHLMRSYAMLTEDTTRVMGRLKAVFRGQAVICTGKKLYGKRHRARYLAELGEGGLRRRAECLYRELDALQPLRRQARRELIVECGKHAAAKWLQSVPFLGPLRAAVLIGRVQTPHRFRTKRQFWTYCGLALETRDSGEYRVVNGQVERRKRPVLIRGLNWNHNHELKNLFKGAATTASACNGVFREFYHGLLNKGMQPEMARLTLARKIAAIALNIWKKGEAFDQQHVKPQAA

SEQ ID NO: 366559 - protein, 401 aa, unidentified
MVSDFRKGRYNLMKIYVGIDIAKLNHFAAAISSDGEIIIEPFKFTNDADGFQLLVSKLESFDKNSLIIGLESTAHYGDNLVRYLVTELYQVCVLNPIKTCQMRKNNVRKTKTDKVDTYVIAKTLMMQDNLRFVSFFDLDMMDLKALGRFRQKTIKQRTRLKIQLTTYVDQVFPEIQYFFKSGLHQNAVYALLKEAPSPKEIASMHMTHLANLLKVNSHGHFTKEQAKELRVLAQKSVGANDSAISIQITQTIQQIELLDSQLEKIEAEMTDIMKFNDSVIMTIPGIGYINGGMILGEIGDIHRFSNPNKLLAFAGLDPSVYQSGNFQAKTTRMSKRGSRVLRYALVNAAWNVVRNNATFKAYYDAKRAEGRSHYNALGHCAGKLVRVIWKMLTDEVEFNLE

SEQ ID NO: 366560 - protein, 336 aa, unidentified
MNIKRIGLDLAKLVFQLHGVDHHERVVLRKTLRRSQMLVFFAQLEPCLIGIEACGSSHYWARELTRLGHSVRIIPPQFVKPYLKGNKNDANDAEAICEAVSRPGMRYVAVKSEAQQSMQAEHRGRARLLRDRTALSNEIRGMLGEFGLALPVGLAALRRALPEILSQQEQWDNRFIRLLCELAEELQILDDRLARYDRRLKQLAQDDDRIRRLQEISGIGPVTASALVAAVGDARQFKNGREMAAWLGLVPRQHSSGGKNRLGHISKRGDSYLRTLLIHGARAVLNACGNKEDRRSRWLQSVAERRNRNVATVAMANKNARIAWAVLSREEEYRVM

SEQ ID NO: 366561 - protein, 343 aa, unidentified
MEAYAGKQFVGIDLHRRRTVIVRTTASGEVLEAVRIVNDVQRLASVMARAGQCPEVVLEATYGWYWAVDALQAGGANVHLAHPLGVKAFEYRRVKNDVRDAQDLADLLRMGRLPEAWIAPPPTRELRELVRHRAKLVGLRSHCKAEVHAVLAKCGVQVLMSDLFGLAGTELLDGLDLPAPYAARIASLRRVMDDLDFEITLFAGIIRGRMAHEPGYTAVQNIPGIGPTLGAVLVAEIGDVSRFASASKLTCWAGLTPKHHESDTHVRRGRITKQGSRLVRWAAIESVKTVSKTSEVGVLRERVADRRGRNIGSVAAARRQLELVFYALRDGHVRALEHLSRVA

SEQ ID NO: 366562 - protein, 340 aa, unidentified
MNSMKKFFIGIDVSKPYFDTTLMAVVDHVKQAVQTGRFDNTLSGIKDFEKWLKSHKVSTGKDTLVVIENTGIYHRLIWAFCSEKDLPIHIGNAAHIKWSFGIARGKNDKIDSIRLCNYAFKEADDLKATAALDPQLLQLKDFISARTKLLKQKFSLFVSIKELGNVNDKSHQKLIEKALKNAVDGIAKSIKNVEDQIKKIISENQNFKRNYKLLMSIPGIGHVTAVYLIGCTANFAGRPSGKELACYAGVVPFEHTSGISIKGKAKVHRMANKELKRLLHICALSLIQHNQEFKKYYDRKKDEGKHSMSIINAVRNKIALRVAAVIKNQTSYKNNYNIAA

SEQ ID NO: 366563 - protein, 433 aa, unidentified
MSTFSSPSPAVWLKGTMKGTTPKEKYRRCCGMDVHKETVVVCVLAPDGEEGKPLKKVYGTFRNDLGRMRGWLKQLKVTEIAMESTGVYWRPLWNVLEGHGFHLILANPKQVKALHGRKSDKRDSQRIAEFLQDRRIDPSFVPPPELRRLRDLLRYRVSLLEQQNETHNKIRDLFETANIKLSSVASDLLGVTGQKIVEALIAGETSPDRLSWKVKGSLRKKEKEVRQSLAGCFDEFHRQMLELLWKQYKFLSGQIEQVETKTRREMEPHGELIELLDGVPGIDEMVAWTLIAEMGTDMGVFPTTGHVASWAGMCPGTNESAGKQMSTKTRKGNRYLRRALLQAAWAATRKQDSYLRAFFYRLMYRKGWGKAIVALGHKLLEIAYGILKTRTPYYELGADYYDQLNPEKTIQRLVRRLGKLGVEIVITPKEANA

SEQ ID NO: 366564 - protein, 344 aa, unidentified
MKFTRCGLDVAKQVFQVHGVNEHGVMEGRRTLPRTKVLEYFAQLPPCLIGIEACGSAHYWARELTKLGHMVKLMASQYVMAYRKRAKNDANDAEAICEAVGRPNMRFVAIKSEEQQAVLMVHRARSLRVANRTAQVNQIRGLLGEFGLVVPRGVGRLRRELPGILEDAENGLPVLAREVLSGLLQELREADLRISAYDRQIRALAEASEPARRLMRVESIGAQTATALVATVGDPHVFRNGRGFAAWLGITPRQHSSGGREHLGSITRQGDSYLRTLLVHGARSYLRVVDKKTDAKGDWARRLKQRRHVNVAAVALAAKHARIAWAILAHGTEYRPAGSQTAVA

SEQ ID NO: 366565 - protein, 397 aa, unidentified
MIAVGIDVSKSKSTVAILNSDGTTLVKPYTMLHTQADMCALADYLRAFDEPITILMEYTGHYHYPVLKKLQQEGFPVCIINPYQMKKYGDVEIHKAKTDKKDAIRIATYALEKSYKLVPYNSLEQKYEDLKFLSRQYNQRISSVSYTKVQLINLLDQTMPGITRILPLKSRNPEQCVLLLFIKRFKSFDEINKIGKTRFLSSYATLVKKTRDRHAPSKGLAIYELAKNSITTRGEDPYIQLAQSQCVDLLSTSQNAADEIILQMQTIAETIPEYKVLRSMAGVGDRLGPIILAEIGDIRRFHSGKALNSFAGNDAPPYQSGQFESRNRHISKRGSATLRKACFEVMQSLKLTKPQDDPVYLFMLKKEQEGKPYNVAKMAGVNKFLRIYYARAMELYK

SEQ ID NO: 366566 - protein, 336 aa, unidentified
MKSWSVTIASEHAVLKRFTQSPSPEALHSFLTREYPDAEYKSVYEAGFCGFWIHERLMELGIDNIVVNPADVPTTTGEKLRKTDAIDSGKLARSLRAGELKGIYIPDKVSLEIRSLTRLRDSVTKDQTRQKNRIKSHLRYLGIEIPQEYCERGRCWNKSFVAWLRSVESACEYGKQTLDQLICQYEDLRKRRLEMIRLLRRLSRTERFSEPLGWLMSVPGIGQLTGMTFMSEIDDISRFKNADQLASYIGMIPMCHSSGEHDGTGDITLRCHSKLRSVLIEAAWVAIRQDAAMTQAYTEYCRRMKPSKAIIKIARRLVNRIYFVMKHKRKYVNNVA

SEQ ID NO: 366567 - protein, 346 aa, unidentified
MLRFVGCDVHKRTAVFTILLSDGTLFATYTVPVTREALAAFAERQLAREDRLAMEATTNTWAVAGVLRPFVKEIVIGNPLKVRAIAEAKIKTDKVDSRVLAELLRCEYLPMVWQPDQETQRLRRLTHRRAALVSDRTRLKNRLHSILHHTLVPLPDCDLFSKRGIAWLRQVPLAQEEALARESDLRLLELTELEITQMDDLLVREAWQDEKVRLVMMSIPGIDYTVAQTCLAAIGNISRFPNAKKLSAYLGLNPSTRQSGAHCYHGPITKQGNAHARWLSAVRQPPLRTSHAQRPSLGGYVQTRLPSIWIWPKKDLSGLAGAFNGSMQHQFAPRGEDIRRNAQARA

SEQ ID NO: 366568 - protein, 344 aa, unidentified
MHIASIGIDLGKTTFHLVALGERSKVLVRKKFSRTQLLAHTANLPPSLIGLETCSGAHFLGAALRQQGHEVRLIPAQFVKPYRKSNKNDFLDAEAIAEAVTKQNMRFVPIKTQEQLDVQAMHRVRDRLVQRRTALINEIRGFLLERGITFPAQPTHLRKNLPSVVEDAEQNLTPRLRWLLGGLWQEWKQTEIEIETVTDEIERISNQDERCQRLRQIPGFGPLVSTAMVAAIGNGAAFRRGRDFAAWIGVVPRQYSTGGKQKLFGISKRGNIYLRRMLIHGARAVLFRIKYDTAGLGQWVRRLSQRAPRNKVVVAIANKLARIAWAVLSSGKDYRHQPLQPAAA

SEQ ID NO: 366569 - protein, 338 aa, unidentified
MYYTGIDLHKRTSFITTIDQNGKVIFRRNFPNVEELILDYFRNLDGPTKIVIESMCSWYWLYDLLSANNFTTVISNPLKTKAIASAKIKNDKVDSHMLAQLLRADMIATVHVCNIKTRKLKELIRHRRRLVQDSARMKNRIHMLLMKNNINIPVSDLFGKRGMKLLKEVSLPAYHQQQFNSYLALLRYVAEQIEPLTEQIRDLAKKDPMARLLMSIPGIGFLTAMTIIAEIEDIGRFPSYRNLASYAGLVPSLDASADKSRTGRITTQGSPYLRAALVEAAQAIPRTKQSRLNIFFRKRIVRAGYRKAIVATAHKILQYVYYVLKNQVFYSEEYLARA

SEQ ID NO: 366570 - protein, 344 aa, unidentified
MEIRTIGIDLGKTVFHLVGVNARGEVVVRKKFSRTQLLRFTSNLPACVIGMEACGGSHFLGRALREQGHDARLMPAQYVKPYVKTNKNDYIDAEACAEAVTRPRMRFVPIKTDDQLDLQSLHRVRERWMVRRTAVINQIRGMLLERGITIAKGRRHIEQSLPGILEDPDNKLSGALRVLLSELRREMQYLHGQIEESNKLIDRVVGEFEQCKHLVTVPGIGPITATATVAAIGNGAAFQRGRGFAAWIGAVPGERSTGGKQKLTGISRRGNKYLRKLFVQGAHTVLLKRTKQDPGLSMWLAKLVSRKRPQVATVALANKMARIAWAVLSKGVPYRPELAAQAAA

SEQ ID NO: 366571 - protein, 338 aa, unidentified
MLIKTLGVDLGKLSCHVIGQDQHGKVVEKRKILISKFAEYLANLPPCAVFFEACGGAHHWCRKARSLGHRADMIPANFVKPFVKSNKNDFNDAEAICEAAQRPTMRFAHVRSEEQQAFGCLLKLREQLVEERTAVSNQAHAFLLEFGIQQKKGRAFIGTVADMTENPDINLPEALRLALFRLVERYKAVDKEISELERDITAINSQNENCKRMQSIPGVGLITSSFIESWAGSCNQFKSARDFAAWAGLVPKQHSTGGVSNLLGISKRGNSTLRKYLIHGARSVIQWKLEEDHAWSPWIKKLLSSKKKTVAVVAMANKLARIIWAVLTKEQNYAAVAA

SEQ ID NO: 366572 - protein, 379 aa, unidentified
MIVIGADTHKRTHALAAVDAGTGRGRGARQIKADEEGHLAAVRWARGLDDERVWAIEDCRHVSRRLEQALIAAGERVVRVAPHRMGASRRGERVPGKSDEIDALAIARAVVKDGVERFPAASLDEHAIEIRLLRDHREDLVRERTRAQNRLRWQLLELCPELERSIKPRSLGQTRQLDRIDRRLRRMPAGARVRIAREQVAQIRRLTRQADALERELLALVKAHRPQLLAETGCGALTAALLIGRTAGAERFRSDAGFARQAGSAPIPCSSGQRDRYRLDRGGDRQLNHALHIIAITRARHDPATKAYLERKQAEGKTHKGALRCLKRHLARRFHRLLVLPAQTAPQHNPVAVNLTRARPRHDDPSTASAAPALMPCLR

SEQ ID NO: 366573 - protein, 397 aa, unidentified
MDSNYAVYCGIDVGKGEHHAVGLTAAGKKIYDKALPNDEAKLRAVFDRLASHGSVLVVVDQPNTIGALPVTVARVGGHEVGYLPGLAMRRIADLYPGQAKTDARDAFIIADTARTMPHTLRRVDTGDEALAELEVLVGFDDDLAGEATRVSNRIRGLLTSIHPALERVLGPRITHPAVLEILSRCGGPAGIRQAGKRKLTAIAVKHAPRMGARLATDILAALDEQAVVVPGTAAAETVLPKLADSLKETLLQRKAVAADVERALDDHPLSPVLTSMPGIGVRTAARILIEVGDGSAFPSAAHLAAYAGIAPVTRKSGSSIRGEHPARSGNKKLKRALFLSAFAALHDPTSRAYYDKKRDEKKKHNAALICLARRRCDVLYAMLKNKELYRNPTPSAA

SEQ ID NO: 366574 - protein, 401 aa, unidentified
MNAVGIDVSKGKSMVSIMRPFGEIVSEPFEVKHTSSEIKALIALINSVDGESRIVMEHTGRYYEVLAHQLAEANLFVSTINAKLIKDFDNDSLRKVKSDKADSIKIARYALDKWTGLKQYSLMDEIRNQLKIMNRQFGFYVKQKTAMKNNLIGILDQTFPGANTYFDSPARNDGSQKWVDFIDTYWHVDCIRNMSLNAFTEHYKKWCKRKKYNYSQSKAVEIYEKAKEVVPVLPKDEITKLIIKQAISQLNNASATVESLRQLMNETASKLPEYPVVMSMKGVGPSLGPQLMAEIGDVTRFSHKAAITAFAGVDPGVNESGTYAQKSVPTTKRGSSELRRTLFLVMDALIKSMPQDDPVYQFLDKKRLQGKPYYVYMTAGANKFLRIYYGRVKEYLSKLEK

SEQ ID NO: 366575 - protein, 429 aa, unidentified
MTPPSSTTSPVVRVAIDVAKLTHQVLLELPTGKRRSLRVQNTRIEIERLCTLLRSLDCPCDVAFEPTGDYHRPLAYILGQAGCRLSLVSSLAVARTRDALYNSWDKNDPKDAQVILHLMKTGTTQRYLDPLVTGHQDLQELANTYQQVSLRKVRLQHSIVTHHLPLYFPEAERYLHSSRAEWFTDLLLFTPCPAAVRRYTKAAFVAAAREQIAGRKVDKARWLADFYDTAATSLGLPVSETSEAMRMFRIVLEEYRALCVLRKRLEADVVTQLAHQPDFIRLQTLPGIGPILAMIILAEARDLRRFGCARQFLKYCGFDLCTEQSGQFRGTTHLSKRGNARLRYAFWMAGTVAIRMQQNGFRRKFEDYIRPDPQNADRRRKAYTAVAAKMARVAYAVITTGIDFRRFPEAAKPGGRIPSPAAVEAHATS

SEQ ID NO: 366576 - protein, 407 aa, unidentified
MNAAGIDVSSRKSTVAVLRPFGEVVKLPFDVRHSAEDLAALAAQLKSIDGETRVVMEHTGRYYESIAKVLHEAGLYVSAVNPLLIKEYGNNSLRKVKTDKADAMKIAKYALDNWTELRDYTPMDTIRYELKTLNRQFQLASKQKTATANNLIALQEQSFPGIRKLFDSPVRSDGTQKWVDFTHDFWHVDCVRSGSQNAFAERYQFSMEKATEVYALAKSSVVLVQKTSVTKTLVQEAANQLTAISRSVETYRSEMNKLASQLPEYPVVMEMYGVGESLGPQLMAEIGDVRRFERKQSLVAFAGIDPAPSESGDYCSRSNRTTKRGSPYLRKTLFNIMKVHLQRAPADEPVFQFLDKKRAEGKPYYVYMTAAGNKFLRRYYGKVMAYFSTLEGLPPVDMDSTGLHHAE

SEQ ID NO: 366577 - protein, 370 aa, unidentified
MGNRSMFVGLDVHKETIDVSIAEGARHGEVRHYGVIASDLEPLDKVVRALRAPDRRLHFVYEAGPCGFGIYRHLTTRGEDCVVVSPSMIPKRSGDRVKTDRRDSQMLARLHRAGELRAIYIPDATDEAMRDLVRAREDAVGVGTQVKYRLKAFLLRQGRRYPGREGWTLPYRRWLTDLSFPSAAQHVALQEYRDAIAETEQRIDRLTEQLRQLAPTWRWAPLVAALQALRGVSFITAVGLVAELGDFTRFRHPRELMAYLGLVPSEHSSGPTVRRGAITKAGNPHVRRLLAEAAWAYQGIPRIGRQHAYRQEALPKVVCDIAWKAQLRLTTRFRRLVARGKAKPKVATAIARELTGFIWAIAQEVSPAPR

SEQ ID NO: 366578 - protein, 352 aa, unidentified
MQYVGVDYHKRFSYLIIMDEKGNIVKEGKINNTKESLNRFLNNPHSRKPAQAVLEAGRNWTVMYDWLEEEIDNVKLAHPYKVKAIAEAKIKTDKIDAKTLAHLLRADLIPEAYVPNKETRHIKNILRQRMFFVKLSTMVKNRIYLLLDRHPELREEFDFEDLFTKQGRRWLSIVKLPDKDRKLLNQELSLLQALEDRINLSNSWVSSIGKKNKLVRLLMTIPGIGKFFALLILAEIDDITRFRHKNKLCAYAGLIPSIFSSGNRTRTGKITKQGNKYLRWAMIEAVWPAIRKDLRLRTYYQGIKTRKDSANKAKVATARKLLTIVYQVLKTQKPYRLDYSGYPHIYLAKANN

SEQ ID NO: 366579 - protein, 387 aa, unidentified
MPQPNDLSRSLVALDQNSTIIAVVELSQSSWLVAGTLPGIERQPRKKLEPSPERLLGLLHRWRDEAVRAGRTITRIALAFEAGRDGFWLARWLAARGIEAHVIHASSLAVSREHRRAKTDRLDTELLKRGFLGWLRGERGHCSMARVPTIAEEDAKRPNRERDGLVGERTRIVNRIKSTLARLGIRNFKPTLRKAAERLATVHTPEGMPLPPNTLAELQRDMARLGFVVSQIREIEAARQKRLEQQHETGPHAMVRRLARIVGIGVETADLLVHEVLSRPMRDRRAVARYAGLTGSPDESGARRREQGLSRAGNARVRRGMIQLAWRFLTFQKESALALWYRARTADSRIGTRKTMIVALARKLIIALWRFVTTDELLDGVVLRPAS

SEQ ID NO: 366580 - protein, 427 aa, unidentified
MSYRIAAVDVHKKMLAVVVADIAGEGEFQFERRKFGATPGELHVLAQWLDQQGVEEVVMESTAQYWKPVWGMLERFWKPARQQRESAPKMAGTLHLCQAKSNHGPRGRKNDFLDSERMVKRLVAQELVLSFVPDAEQRLWRTVTRRKHQLTRAKVVYKNQLESLLEQAHLKLSSFVSDLLGVSARRMLKALAEGETDPVALAALADCRLQATPEQLRDALGACTELNRTFRRLLQMALDELQLIETHIEKLEREAMGLMKEHQDVVQRVAEVPGFGPDSALQMIAEVGPKAATFRTAKKLSSWVGVCPGNEESAGESHSTRSPKGNHHMRRLLNQAAQSAVKVKGSIFDLTFSRLLPRLGYQQAIWAIAHRLCRVLWVILHEGVRYEERGPTVSAKSKRTRAARMIRELKKLGYRVEGGPLPAVTRA

SEQ ID NO: 366581 - protein, 316 aa, unidentified
MQTFPNIGVDVAKDAVVVACAAQSFSTHRVTNQRTPLLAWLKSLPTGSRIGLESTGGYHELLADLAHAHGHVVFLLNPLDTKHYARAMGNRAKTDRVDAELIARLIAQEHTRLRPYTPPTADQRKLDRMIRRRANIVRIKSSLTLTMGNLSGFTAELKAVSNKLDALIAKIDSTMTAIAGHSPQHKEAQQRLQTIAGVGPVVGMALTNTLERVPFRNADAFVAFTGLDPRANDSGNKIGRRRLSKRGPAELRRLLFNAAMAAAKSKAWKPIYGHYRTQGWSTIAALVIIARKIARAAWSIHHYHSTFDPDRITKNV

SEQ ID NO: 366582 - protein, 409 aa, unidentified
MRLLVGDDWAEDHHDVEVLDAAGRRLARARLPEGVAGIARLHAIIGELAGQDVEDEHVEVLVGIETDRGPWVAALVAAGYQVFAVNPLQAARYRERHTVSGAKSDTGDAHVLADMVRTDAHQLRPVAGDSAQAEAVKVVARTHKTLIWERTRHTQRLRHALRDYFPAAVQAFEDLDAPDALELLAKAPDPASAARLTRAQIRAALKRARRRDIGAKTERIWAVLHAEHLGQPEVVTGAYAASVRSLVAVLGVLDQQIATLQRQVVAHFGRHPDAEVLASQPGLGQVLGARVLAEFGDDPNRYATAKARKNYAGTSPITRRSGKTRLVAARYIHNDRLIDALMTQAFAALSASPGARAYYDQLRARGAGHNAALRQLANRLVGILHGCLKTRTRYDEATAWSHHSKTLAA

SEQ ID NO: 366583 - protein, 373 aa, unidentified
MKKRSSSEKSQKRTAKTKRTQERVTIGMDLGDKTSRYCMLSNEGEILREGQVTTTKAGMVEAFGSLGRARIAIEVGTHSPWVSRLLQKLGHEMVVANPKQVKLITESSRKDDRLDAQTLARLARIDPQLLRPIQHRSDKAQGALMFIRVRAALMAARTSLVNTARGLARSMGERLPKCDADQMGVRQAVSLPPKLRQVLEPLLKEVESLTEKIKDSDREIEQIARKDYPETALLQQVGGVGPLIALTFILTIEDKDRFQKSRDIGCYVGLRPRRSDSGQSQPQLRITKEGDPYLRTMLVQGAHYIISRRGPDTDLKRWGLHLAKHGGKRGKKRAVVAVARKLGILLHRLWVTGEVYEPLRNHNARQEQKKIAA

SEQ ID NO: 366584 - protein, 483 aa, unidentified
MADYFLGCDVSKGYADFTILDSKKHVAESDFQLDDTFEGHSCLCNILERFFKAHPDSTLYAAVESTGGYENNWLNLFYRLSGLMNVKAARLNPVGVNAYNKASLNRNVNDSISAKNIAGYLISYPEKIPYSQEDTRSSLRKQWNFIAMLKKQRTQLFNQLGFHIYTANTAILKYCKNGLPRWVLYLLERYPTSLELSRARVSAVSKIPYISQERARDLILAARKSIASSGDEVTEFLIKETVKQIINLGKSIELQEKYLEKHCDIPEVNILTSFKGIGTLSAVGLSLNIVTIERFPTVKHLASYFGLHPVYKESGDGMWGFHMSKQGRIEPRAILFMAARSAINSNPLIKEIYIKHVQRGMSKMAALGVCMHKILRIVYGMLKNQKAFDPEIDRENSRKVLSTKETRESKKKDARRRYQKQDDSAPVSRRQGIKRKERKKSQSNNVTKNGIIASSPSIQEAMHLKGGKRPYQIFKERANELTH

SEQ ID NO: 366585 - protein, 411 aa, unidentified
MQVVVERCAFLDVHRDTVMACARMPDGAGGRQEEVAEFRTTTSQLLVLSDWLVERGVTLVGMEATGVYWKPVHWILEEAIEAVWVINARHMRNVPGRKTDVADACWGAQLLEHGLVRPSFIPPRPTREQRDLTRYRKSVIEERGRETQRLHRVLEDAGVKLSSVASSVLTKSGREMIDALIAGQRDPAVLAEMAKGRMRAKIPELKDALAGRFNAHHALLCRAMLARIDQADATVDELTKRIEELLHPHEAAVTLLVGIPGVSYRTAQVILAEIGTDMSRFPTPGHLASWAGMCPGNNESAGKHRSGRTRYGSKWLRIALVEAAQAAGRSKDTYLSAHYARIRGRRGPGRAAVAVGHSILVIAWHLLSTGETYTDLGGDYFDKRRTSTAHQKRLVAQLEAMGHKVTLEPAA

SEQ ID NO: 366586 - protein, 342 aa, unidentified
MDHFAGLDVSVKDTSICIVDDTGRITREVKVASEPGALLAVLMNASHRFKRIGLEAGPLSQWLFSALAEAGLPVICVETRHMRAVLKAQINKTDRNDARGIAQMMRVGLYRPVHVKTLRSQKLRMLLTHRKLLQSKAIAVENDLRATLRNFGLKVGMVGTARFEARIKELVENVADLVVLVEPLLVVRRVVREQIGILHRRLLAIVRDDEVCRRLMTVPGVGPVVALTYRATVDVPARFRKSKSVGAVFGLTCSRDQSGERDRPGAISRCGDEMMRAMLYEAAQAMLLRSAKWSWLKAWAMQIARRRGMKRAIVALARRLAVIMHRIWVDGTEFRWTRQVTA

SEQ ID NO: 366587 - protein, 429 aa, unidentified
MKKKNNSLTKSDRIGKPGKARGPVQRDAKEVMAELVTKLSQRFEPQSARTIKDEGRQQGIPGPNRDRLTVGVDLGDKWSNFCVLGLDGEKLTEGELRTGQEDFAEFFQSMAASRVVMEVGTHSAWARDVVARSGHEVLVANPRQMEGPKRRKRKNDRIDAHKLARVGRMDPQSLFPIEHRSVEVRQDLVAVRARDALVAVRKDLINTTRGLVKSMGARLPKCSTQSFAKKAEGALPAAVREVLLPLVRLAETLSSYIQEYDERIEKLATGKYAHTELLRQVKGVGPLTSLAYVLTLEDPQRFVKSRDVGPYLGLVPKQEDSGDRQPQLRITKMGDMMLRRLLVGSAHYILGPFGPDTDLRRYGLRLCERGGKNAKKRAVVAVARKLAVLLHRLWVSGEVYEPLHQALPKVTQEQAARPAPAEATEEEAA

SEQ ID NO: 366588 - protein, 344 aa, unidentified
MKVSVLGIDLGKNVCSIVGLDASGAVVLRRRVKRETLIGLVAKLPASIIAMEACCDAHYLGRLFADQGHDVRLMSPEYVRPYIKAQKNDDRDAEGIAEAATRPTMRFVELKSQEQLDMQTLHRSRDRLVAERTSLINQLRAIQLERGIVVPQGKHRLERYLISLMDEQRTEGLSSRIRALIADARAQWLELDRRIAVLTKEFGAFSKQNEDARRLATIPGVGVMIASALIAAIGKAEAFEHGRDLAAWLGLVPRQSTTGGKPKLLGISKRGNKYLRKLLIHGARAALPHIAARDTSLGRWAKQLLGRVHKNVAIVALANKLARIAWSVLRRGEGFTAKGSPLVA

SEQ ID NO: 366589 - protein, 420 aa, unidentified
MKIKPKNAKAVNQKVLIATVDGGKDKHYGYYRCPDGTDCKAFDFWNNGRGFQEFGERISSAASAHGLEEIVVGFESTGPYMEPLVQFLRSKKSIRLVQVNPMHTKRLKELSGNSPLKSDRKDPKIIADIIELGHALTVVIPEGPAAELRRLTQGRERAIASRTRLFNQLQCLLALSFPEFLQVMKDVKSASAQHLLRYYPTAQDIVTLGEPGLATILRKVSRGKLREDRARALVEAANESVGVRDGRSSMLLEIGLMLDTIGTYDGFVERIETEMALHLEQIPYSRIILSLKGIGPVTTAGLIGEVGDFTKYSTIAEVMKLAGLDLYEVSSGKHRGKLRISKRGRPLMRKLLYFAALNTVRKGGTMHEWYQRALGRGMKKTKALVAVSRKLLRVIFALVRDHSVYVENFTKQKPLYQEAA

SEQ ID NO: 366590 - protein, 410 aa, unidentified
MRPAEELLGVVVHSGLVLARGQDVVAALRRITAFPAGLNAMKRASPVAISGLSVPGAPRGGPAMLYAGLDLSRHKLDVHVMNEAGEPVQVTTAPPDADGLRGLARQTAGYGEPVAAAIESMNGARFVHDQLELAGWQVQVADAQKVKGLAPLACKTDRIDAWVLAELARRELVPAIWLPTPEVRAERERARWRLHLVRHRVALKNRVHATLLAFGRPCPTSDLFGSGGRQLLDRLRLPEPWAGTTAAAVALIDDLDEQVHGCERELRHLGADHAYVPLLMTAPGIAWVLGYTIAAELGDIARFPSPKKLCGYTGLCPRVYQSGTRDHRGPLAKNGPKYLRWALIEAATHAARHPCYHDHYQATKRRLGRQRGPAVARVEIARKLAEAIWHMLTTQAPFRPARPHAKALAA

SEQ ID NO: 366591 - protein, 436 aa, unidentified
MNTSESKRTSLTEGIAAWVGLDWADQQHVICVYEVESGKSEMLRLEQKPEAFESWLTQLRQRFGGAKVAIVLEQARGAVIYALLGVDFVVLYPVNPQALANYRKVYTSSGAKSDPADAVLLIEMVRQRPECFRPWKPDDADTRSLQLLTENRRQLVNQKTAFTNQLTSVLKSYYPQALELAGDLDSDQACDFLTRWPRLGALQQARPSQIRKLYQDYGRPRPERLEQRLEQIRQARPLTQDPAAVLSGSMMVEALVPQVRSLLRAIEQFDRQISVLFQRHPDRFLFESFPGAGAALAPRLLAAFGADRDRFQSAQEIQQLSGIAPVTEQSGRQHWVHWRWACSKFLRQSFHEFADHSRKWCRWAKAVYQQLRRRGQGHHAAVRRLAFKWIRILFHCWKTRSCYDESIYLKSLQKRNPVLWAEIEALPPRVRRQPAA

SEQ ID NO: 366592 - protein, 325 aa, unidentified
MIDQDGQVLANRNVPNGAEPILKVIGGLPLGTPAAFEACYGTSWLVELLEDYGFAPHLVHPSRCKAIASARLKNDKVDAAILGQLLRADLLPEAWIAPPPVRALRALLRHRVYLVRLRTRLRNRIHAIVADYGYDRPAGGYWTGPGRAWLASLQLPAVFRELVEDYLGLIDALQQRIDRLDWEIRQRARSDPRVTVLTQLPGVGPFTALVILAEVGDVSRFASARQLASWAGLTPTVRGSDRVAHYGHISKQGSVWLRWVLCEAAQTAKRSPQFAATFQRIATRRGKKIATTAIARKLLTHAWHLLTKTDQAAAPQPAAPQTAAR

SEQ ID NO: 366593 - protein, 308 aa, unidentified
MIMQNYVGCDISKQWLDFFDETSGRLRRIDNRADAIAAYVAGLDPSRDFVVMEATGVHDRLLRHALAKAGVPFSRHNPAHTHHYAKSTRRRAKTDPLDARMLSDYGRRYQPEAEPAPREEVEQLQSLACHRDHLVEMRATLKKHLAEAFDEIVIADLEETIAHFDTRIKALESRIAEVIRQTEDTARDYTLMVSVPGVSKVGALSLLAHLPELGQRSPKSIAALAGLAPFDNKSGKLNRRSQIQGGRSRVRRALYMAALSAIRTCDRFKAFYTNLAARSGSKKLAIIAVARKLLVVLNAIIRDKTAFA

SEQ ID NO: 366594 - protein, 350 aa, unidentified
MIIIGVDFHPGSQQIASVDTDTGEFEEKRLAHREEAEKFYRDLASRGAQIRVGMEASGYARGFERLLAELQIELWIGDASEIERKRARKQKTDREDAQHILQLMLQDDFPKIWVASWENRDLRQLLWHRHRLVHARTRIMNQLQAVALNEGLQCKKRLWRASGRQQLESFRLGPWASRRRRDLLELLDRLSPTIAELSQAIEQEAEKCPEAQRLMTHPGVGPLTALGFVLIIGPAERFQCGKQVASYLGLVPLEKSSGKRRRLGHITKQGSSIVRFLLVEAAQAAVRGDPQWRSKYLRLLMRRGRKTAKVAMARRLAIRLYWMWRERQDYQQSRSFGSHAGQPGNRDGVH

SEQ ID NO: 366595 - protein, 398 aa, unidentified
MERTAGIDLASQEHRLVVVEADGSRLEERRYSHSEEGISALVRRLDELGVCRVAIERPNGLVVDRLLDAGIAVVPVHPNQLAASRDRYRSGGGKSDGFDAYVLADLARTDMHRFRLLEPDGDETRALRALTRTREDLVEQRVALANQLRAQLEAFWPGAARVFANVDSPICLAFLERYPSPEDARGLGEKRLAGFLARNGYSGRRSPNELLARLREAPAGRVGELETEARRAVVLALVATLKPLVAQIKLLTSQIAGALNEHPDGPIFRSLFRDRKSVVTAAELLAEIGDRRERYPSSVPLEAIAGQSAIAVESGKKKVGSFRWACNKQLRSAVSSRKHNPWAQKIYADAIARGKDHPHALRILGRAWLRVIWRIWQDGTPYDPARHGSLNRLLIAQG

SEQ ID NO: 366596 - protein, 337 aa, unidentified
MTLYCGIDLHSNNSVVAVLDEQDRTVYEKRLPNDLETITEVLCIYQTELAACVVESTYNWYWLVDGLMDAGFPVRLAHTSALPEYSGLKYSNDFTDARQLAHLLRLGLLPTGYIYPKEERALRDLLRRRLLLVQQRSLHHVSLQSLIARHSGQRLNTLQIKQLRKGQLADYLQGHALLSGEITHQARCWLDGAVRLIEQELQQHIKPREDYQLLQTIPGVGSILGTTITLETGTIERFASPGNYASYARCVKSEKISNKKRKGQGNKKNGNKYLAWAFMEAGHYGAIWDPRIKSYYQRKQAKSHILVAKKAVANKLARACYHMLKRGEVFDVTRAFS

SEQ ID NO: 366597 - protein, 341 aa, unidentified
MQEKDLYCAIDLHSNNNYVAILDRSGHRVFDKRLKNDMSAVLSALAPFKERITAVAVESTFNWYWLVDGLEDAGYAVRLVNTSAVQQYEGLKYSDDRDDAFWLAHLMQLGILPTGHIHPREHSALRDLVRKRMRLVQQRTANILSIQNLQQRNEGVRMTTNQIKAQTVKTIAVSVSDPNRAMALRSTQAIILALDEQISQIERAVMRQVRPDPRWTLLQTVWGIGPILATTIRLESGDVARFGEVGNYVSYCRCVKSERTSNGKKKGEGNVKNGNQYLAWAFIEAANFAVRSYEVANRYYHRKASKTNTILARKALAHKLARASFFVMRDQKPFVPERLFG

SEQ ID NO: 366598 - protein, 420 aa, unidentified
MKAYNVDNFAVLIGIDWADKKHDICEHPTGTNKYHYTVIKHTPEALHEWAMDIKQRYPKQKIAIVCELKKEPLIYALAKYDHLTLFTVNPCAVAKYRQAFKPSGAKDDPSDAFLQVEILTLHMDKLSVIEPESAAMRSLSQLVEYRRSLVQDSVDLSNKITATLKNYYPQALEWFKEKDTYIFCDFIQKWPSLTAFKKARKQTLLDFFESHNSHYCAVNNARLDSIKNAMPLTLDEGVIVPNQMLVGVLITQFKMLLKGIEKLDKAIKSAYKTHQDKKIFDSLPGAGPQIAPRLLVAFGSNRARYNDAAELQKYAGIAPVIERSGQKMWTHWRYSCPTFLRQTFVEWAGFSIRYSFWAKAYYEQQKAKGKPHNSIIRSLAFKWIRIVFRCWKTNTPYDESTYLAALKRRGSPLLKFAINS

SEQ ID NO: 366599 - protein, 345 aa, unidentified
METMYYIGLDVHKKTIDYCVKDGSGRIYAAGSIRATRLELDMWMKTLPRPWTAAMEATIFTAWIYDHLQPHAAAVKVAHPLMLRAIAVAKKKNDRIDAKKIADCLRCDFLPECYMASTEIRERRRTLRYRNLLVRQAVQMKNKIAVLLMEAGVSYNKQKLHKVGYFRELLATNQDIDEGLKPLLRLCRETVVRLGKTESALVRSLQRDSLLVERVERLMTIPAVGPITALTWALEVGDVQRFSSIKKAISYCGLCGAERSSANITMRTPLSKQRNKHLQTVLIEAAKMAPRNSPELAMVYEQEKQKGNANRATLAVARKMVAYLIAVDRRQKGFLVVENKNRTAA

SEQ ID NO: 366600 - protein, 401 aa, unidentified
MSDTQKRYVGLDVHKNYVMVGAVNCYHEMMLPPRKVSLAEFEGWAKKHLRPTDEVVLEATTNAWYLYDLLEPLVARVVVCHPPQVKLIATALVKTDKKDTMTLAKLLAVGMIPPVWVPPVHVRELRALINHRQRLIAQQTRSKNRLRSLLQRHHLIPPDGDLFSEAHRVWWHKLDLNPSEKLRARQDLIILDQLSPLITEVEAEVERLSVTEPWAEQTPYLLQLPGIGLVTAMTILGAIGEIERFPTAKKLVGYAGLGARVHASGQTHRTGGITKQGRKELRAVLVEAAWTAVRYDQHWREQFERLADRIGRQKAIVAIARKLLVIIWHVLTAQVADRRAEPQQVARYFIHGGRQLRVKTILGIKASEFARQHLDRLKLGQALERVPYGTVTYCLPPSTMP

SEQ ID NO: 366601 - protein, 400 aa, unidentified
MKYVLVLDVAKDKSMFMLTNNDGEVLLEPTEYNHNKHDFDCIDSYINELKIKDNLTIVMEATSIYHKSPERFFKENNYHVIVFNPIIGKEITNTIRKTKTDKQDCIKLTNLFWKGSIPDRCYTEDEIYTKLNELSRQYYHLDEGLTRHKNRYKELLHLCFPEFELCFKEGKIYDLTALNFIKEFPHVYIIKEKRVDALAYNMANTNGRHINYYKKKANIIKEYAQNSYPGVNEESKDVDNLKQLTEIIIYLTKQKDEVKNQMIELAKQTKNYNNIVSIFGIADLSASLIIAELKDITRFNNIKQINAFCGLDPTIVQSGKSINYHGPISKRGNRYARKILFNCSRNIVTLSAKCNKENPIYLYYQKKKQEGKHFYACLTACSTKLIRIIYALCMNNSTQD

SEQ ID NO: 366602 - protein, 449 aa, unidentified
MGKAKPQVIDDDEQQRVFDRVAAVDVAKATGMVCVRLPRQDGSRYSKVWEVTATMGAVTELGRQLMKDRIEMVTLEATSDYWRIFYYVLEMCGLAVQLVSPSQAKNLKGRPKTDKLDSMWLARLTEWGMLRPCFVPPAPVRALRDYTRARTDLVRERTRCWQRLEKLLEGALIKLSSVASKLTTQSAQDMITAMIAGERDPRVLANMAQTRMRAKHDALVEALTGMFDSHHGELAEMELDQIAFLNKRIGKLEASIRETLAQIPAAQGVNADGTTGPDAGRGPDAAVLPAALRLAEIPGVSEQMAAAIIAETGLDMTRFPTAAHLVSWAGLCRVASQSGPRSRGGKKGHGNTYLRSSLGQAATGSARTATFLGERYGRIARRRGKAKAQVAVARSILVVIWHLLADPAARYTDLGPDYVTRRTDRDKKIRNHVRGLRAMGLEVTLTPAA

SEQ ID NO: 366603 - protein, 342 aa, unidentified
MDHFAGLDVSVKDTSICIVDDTGRITREVKVASEPGALLAVLMNASHRFKRIGLEAGPLSQWLFSALAEAGLPVICVETRHMRAVLKAQINKTDRNDARGIAQMMRVGLYRPVHVKTLRSQKLRMLLTHRKLLQSKAIAVENDLRATLRNFGLKVGMVGTARFEARIKELVENVADLVVLVEPLLVVRRTLREQIGVLHRRLLAIVRDDAACRRLMTVPGVGPVVALTYRATVDVPARFRKSKSVGAVFGLTCSRDQSGERDRPGAISRCGDEMMRAMLYEAAQAMLLRSAKWSWLKAWAMQIARRRGMKRAIVALARRLAVIMHRIWVDGTEFRWTRQVTA

SEQ ID NO: 366604 - protein, 352 aa, unidentified
MQTKTNTKAKLYIGLDIHKRSWKVHTSTELFDGKTISCPPSSDLLRDYVTKNYPNHEVSIAYEAGCFGYSAHRAFISFGWRSLVVNPADISKTGKSQFQKTDTLDARLICRELKDGRLKSIEIPCVKREQLRCLFRRRVALMKDFRAIKSRIKMQLLYLGIDIPEHFDKQAKWSKAFLRWIKAQSCTYDTATATIQSELYQYEFIDSQIKQVSNQLRAYCRKHHKEDYFLLRSVPGIGKIVACGIISELGDITRFKNFKELASFVGLCPGVYQSGDNYRSTGMSVRGNRIMRSYFVEAAWMALRYDPIMQTYWRTHQGKDPKKILIKVARKLLSRTHAVMKTKIPYQVGVVA

SEQ ID NO: 366605 - protein, 324 aa, unidentified
MTEPALGIDVSKDTLDVNIIVHTKPRGQQFANSPEGWRSLIAWLRQLKVERVHACLEATGRYSLGVALALHEAGHIVSLVNPAQIRDFSRTKLGRNKTDKVDAAIIREFTGLFAPPAWSPPPPALRRLCELRTMRAGFVASRVEWQNRAGSGVADRTASELADATIAHFEAQLAAVDKAIAQTIDDDDDLRAKRDLLLSIDGVGETLAAVILAELPGPDVLSSSAQAVAYAGLNPRQHQSGTSINHPTRISKIGNATLRTALFMPAMSAMRCNTVIAAMVARLRGRGRLKGKQIVVAAMRKLLVLCFGVRKTGKPFDPAIALPK

SEQ ID NO: 366606 - protein, 424 aa, unidentified
MKVTYQTCCGVDVHKSFLVATIVKTTGGIEPSYQKKRFSTFNNSILEFKQWLLDNHCHDVCMESTGKYWVPVFNLLEDKINVVIANPKWVKAVKGNKDDTKDSKWIGDLFRLGLVKGSYIPCKKVRILREYTRYRYKLVSCRSSEKNRYQNALTVCNVALDSIVSDIFGKSSTSIIDYLLEQSGTSINHEEIASKLLRSLKSKEDAVIESVEGYQMTDTQKYRMRLVRAHMDYITAEINDVDKMIENMISSNPDFENAVQFLCTIPGVKRDSAITIISEIGTDMSQFSGSKRLCCWAGLTPGSNESAGKKKSVWITRAGVYLKPALVQCAHAAVKSDKSPYYKKKYEALVKRRGKKRAIIAIARMILTAIYQMLSTGEEWNPSNLYKIDMPVALVEKQKAKAIKQAKKLLQREGLLPPDEPLAS

SEQ ID NO: 366607 - protein, 460 aa, unidentified
MNRKRSKSKVERTMPMVHPNAAAIDVGATMHMAAVRADRAPEPVRSFGTFTTDLHRLVDWFTECGVETVVMESTSVYWIPIFELLDARGFTVFLVNARDAKHVPGRKTDVSDAQWLQRLHSYGLLRASFRPKGQIAELRAYVRQRERLLEYAASHIQHMQKALTEMNLQLHHVVADITGSTGLRIIRAILAGERDPEALACLRHYSCHSSAETIAKALTGSYRTEHLFALEQALALYDAYHEKASACDVRIEAVLKELSIHRGRDVGPVPPASRRRHRTDQANALAFDARAALFALLGKDITRIDGLGPYLSLKLIAECGDDLSSWPSAKHFTSWLGLAPSNKISGGKMLSSRTRRSGGRAAALLRLAAVTVGRTDTALGAFYRRLSSRIGKAKAVTATARKVAVLFYNAVRHGMQYVDPGASSYETRYRTRVVNNLHRRAKAFGFVLQPLEPKADAVVS

SEQ ID NO: 366608 - protein, 258 aa, unidentified
MDIIAVGIDVSKDRLDVAVHPGGEAFVVERNDAGLEQLTARLKQLAPTIVALEATGGFETIAAAAVGGAGLPVVVVNPAQVRAFAKALGQRAKTDPIDASVIAHFAAATRPEPRPLPDEATRFLSDLVTRRRQIVDMIGAERQREKRATSQHLRKSITRLIKALEKELVSVDTDIDDAVRSSPAWREAEDLLASVPGVGPIIARTLMAELPELGRLNRKQIAALAGLAPYTRQSANGAEKASLVAGDKRCERHCSWEQ

SEQ ID NO: 366609 - protein, 415 aa, unidentified
MEIVYERVAAIDVGKKEVAVTVRVPGQISGTRAQQTRKFRTFYQVLRQMVGWLVDHGVTHVAMEATGVYWKPVFHALCEADTMEVVLVNARHVKNVPGRKTDVKDSEWLAQLLECGLLRGSFIPPKEIAAIRELTRYRKKTIQARTRELQRLSKVLEDAGIKIDSVASSITTLSARDMIEALIAGERDPRVLANLARGTMRSKIPDLTMACAGRFADHHALLARMHLDHIDHLTSMIEGLDERIEQVMAPFAEQVRLLRTIPGIGDRAAQVLISEIGIDMSRFPTAAHLASWAGLCPGNNESAGRRMSGRTRKGNAEVRDILTECAWSAGKTGSYVGAQFHRLHRRFGKTGGGKAAVAVAHTLIVIIWHVLHDQSEYRELGHDYFTRRDDPQAAKRRLIHNLEALGYRVELTATA

SEQ ID NO: 366610 - protein, 369 aa, unidentified
MKKHSTTDKSPKQERKACRGPITIGVDLGDKTSRYCMLDEQGAVLREGGFATSKNGVTQQFASLGRRRIALEVGTHSPWISRLLKSFGHEVIVANARQVKLISQSSRKDDRLDAQTLARLARVDPQLLRPIRHRSQKAQEHLMLIRVRASLVEARTKLVNAARGLTKAAGERLASCDADTMNVGRLQALPAELQEILRPLIEQVESLTEKIHASDVTIEQIARSEYPETELLRQVSGVGNLIALTFILTLEDRERFQKSRDVGCYVGLRPKRSSSGDSEPQLGISKEGDIYLRKLLVQAAQHILGWRAPDTDLRRWGLKLSARGGKNAKKRAIVAVARKLAVLLHRLWVSGEVYEPLGYSQQAGRRAAA

SEQ ID NO: 366611 - protein, 429 aa, unidentified
MKIIYPRVCGIDVHKKFIVAVICISESVEPIYLKKRFSTFHNDLIRFREWLIQNDCQNVCMESTGKYYIPVYNVLESHISNIVVANPKWVRAVKGEKDDDKDAKWIADLFKLGIVKSSFIPQKDFRILRELTRYRYKLVNMRSSEKNRFQNALTSGNCKLDMVFTDVFGKSASNIIDLILSDNPYTDEDILSKVHKKCKASPDVILDSVNGTDLTPVQKARIELVNDHIKQLSSNIQKLDKLIDLMIEPYEDYISFLCQIPGVSRNSAIIILSEIGIDMNQFTTSRRITSWAGLTPSSNQSAGKKKSVRISRAGVYLKPCLVEVAHAAVKDKSHPYYANKFNKISKRRGKKRAYIAIARKILVAAYHMLLTGEIWNPADLSEVETPVEQRLKYVKNNLKSDIKQLLDIGLTVEELTLMIQQNANNIATQ

SEQ ID NO: 366612 - protein, 417 aa, unidentified
MPYTVAGIDIHKKVLMVVVAIAGEEAVDPAGEAIEFECRRFGTGAAERNHLVGWLRERNVTEVVMESTAQYWKPVWLDLEPHFAKLHLAQAHSNRAPKGRKSDFRDGKRLTRRLLADELILSFVPDAEQRLWRTVTRGKHQLIRERVRLQSQLEALLEEARIKLSSVISDLLGVSGRRILQAMADGETVPERLAELGDDRLQCSKEELVDALNGSLEPIHRQLLRLYMERLHLLDQQIDKLDLMTAAALKQHQDAVIRVAEIPGFGVDSAQQLIAEMGVDAGAFQSAGNFTSWAGLCPGSEESAEQNHSSRSAKGNRFVRRILTQAAQAAVKKKGSYFQTLFRRFLPRLHYNGAIWAIAHRLGRLVWKILHDGVSYIEQGQETNPAAKKRRAQKMVQALRKLGYAVALTPIPDPARG

SEQ ID NO: 366613 - protein, 408 aa, unidentified
METLYERCCGLDLHKRTVVACVVIPGSDGQPQKEIRTFGTVTGELLALGDWLAAAGCTHVAMEGTGVYWKPVYNLLEDRFVLVLANAQHIKAVPGRKTDVRDCEWIADLLRHGLLRASFVPDRAQRELRELTRYRTSLVQERADEVNRLQKTLEGANIKLASVATNVLGASGRAILTALVAGETDTLVLAGLARGSLVQKTAALRQALTGRMGTHQRFLLGEQLRHIEAVEASIARVSAEIEERLRPFEEALERLDTIPGVGRRIAEIVTAEIGLDMTRFPTAQHLASWAGMCPGNNESAGKRRSGKTRRGSPWLRTALVEASHGAQRSKGTYLGAQYRRVAAHRGGKRAAVAVGHSILVSAYHILARRQDYADLGETHWQTQKTARREHRTVERLRGLGYTIVEPAA

SEQ ID NO: 366614 - protein, 345 aa, unidentified
MCQAAILDEDGKLLDEIRFANTPEEIEEFAGKLTTFHDEVRAVVESTGNLWIQIHDRLEEHGFDVALSNPSKTRLIAEAKVKTDKVDARTLAALLRADMLPTCYVPGEELRSRRELLRHRLNLVKTRTEVKNRVHGLLDKHGLRMPGTTAFSKGNIEWLRGLSLGFMDDAIVRSDLAVLEAVDGQVTLIEEKIAVLAVEDRRVRLLMTMTGVGYFTAMLVLSEVGDVGRFRGDKEFASWMGLVPSVHQSGERTRVGGVGPGNKRLRWALVESAQTAVRHDARLGGMYERVSRRRGSGCAVVAVAHEMARIMYFMLVRGEPYRGENRGLTERKLNMGKRAYDGLRN

SEQ ID NO: 366615 - protein, 320 aa, unidentified
MRNAVGLDISKLTFDATAIVGNAEYSAKFDNDSKGLDQFSDRLKSLGCQNLHICMEATGNYYEEVADYFAQYYSVYVVNPLKISKYAESRFKRTKTDKQDAKLIAQYCRSAQESELVKRQKPTDEQYRLLRMTAAYAQIKSECAAMKNRHHAAKDEEAAKAYAQIIKAMNEQLEVLKEKIKEQTEKPNCKEGVKRLETIPAIGRMTAAVLFHHLTSSKFETSNKFAAFAGLSPQQKESGTSVRGKGKLTKFGNRKLRAVLFMPAMVAYRIRAFPDFIKRLEEKKKPKKVIIAALMRKLAVIAYHVHKKGGDYDPSRYKSA

SEQ ID NO: 366616 - protein, 354 aa, unidentified
MKYFAGMDVSLEETAICVVDETGQMIKEARATSEPDALHVLLASFNLPFERVGLEACSLTAWLHGELTSAGWPAICIESRHAKAAMGAMPNKTDRNDARAIAQIMRTGWFKAVHVKTPTCRSWRSLLVARRAVLNQMRTIENVVRAIFRETGLKLGTPARKDFIVRAREFVAGEKGLAMMIDPLLEILATMLREFTRLTKQVLVIVRDEPVCRRLMSTPGVGPMTALAFRATIDRPERFKKSRDVGAHLGLTPRRYQSGETDIQGRISRCGDELARTALYEAAHSLLIRSKKWSALRAWGMKIAKHRGMARARVAVARKLATILHRMWVDNTEFRFGREQAANPTIKAITVVAA

SEQ ID NO: 366617 - protein, 361 aa, unidentified
MRKSTNAELSFKDIDVFVGLDVHKKSWKVTIRSMGLEIETYSMSPSAERLAQHLKTIYPGGIYHSAYEAGFCGFWIHAALLKRQINNMVIHAADVPTTNKEKVTKTDKIDSRKIAKCLENGSLNPLYVPSIDEQQLRSLVRLRSRMMSHQTRLKNRIKGHLHFYGIELDDERAAQYWSGAFIAELETLAEAPNAAGTYMRLCLNELKDQRCRLAEITRELRLSCRNPAYADTMHYLLSVPGVGFVTAVTLLTELIDIDRFKGLDELCAYVGMVPSEHSSGDKTRRGGLSPRKNRHLKHLIIESAWVAMRRDPELTQAFARLTTRMKKTDAIIRICKKLLNRIRYVWKNQTPYQIQASSQVA

SEQ ID NO: 366618 - protein, 368 aa, unidentified
MEKFITYVGLDVHKKTIAVAFADQGGEEVRSYGTIDSDLSSLDKIVRKLVSRGGEPRFVYEAGPCGYGIYRHLKQQRIECMVAATSLIPKKSGDRIKNDRRDAMMLARLYRAGELTAVHVPNSEDEAMRDLTRAREDAKNAERKTRQQLGGFLLRHGLKYSGKSNWTLAHWRWISDIKMEHQAQQFTLQEYVDTARSCSERIDRITEKIRLLVGQWRFGPVVEALQSLRGVSLVVAATVIAEMGDLSRFDNPRKLMAFLGMIPSQHTSGEITKRGPITKTGNSHARRMLIEAAWSYRMPARVSRRLRDRQQNLPEKVWQIAWKAQVRLCARYQRLIARGKPSQKVITAIARELAAFMWAIFQTVEVGA

SEQ ID NO: 366619 - protein, 319 aa, unidentified
MMARNGLVVAGIDVAKDKVDVCIRSPLLRRTFASNHEGRRQLTSWLRRHKVSTAVMEASGGYEGDWARALRKADIAVRIVDPKRVRSFAQSAGRLAKNDQIDAEMIAWFADIFQEAPGQDHDEEREQLRQMVTARQTLLDLQTALQNKGEHSVPGAVQRMQARLLKKMAAEIAALEVAIEAKVRTTRHFAELAEIIESVPGLAGTTSAGLIATMPELGQVNDKIAAALLGAAPYDDDSGKRRGSRHIKGGRRRIRNIFYMACLGAATRHNPVLKAFYRRLLAKGKQKKVALVACMRKLIVILNVMIERRQKWDPTLHAM

SEQ ID NO: 366620 - protein, 482 aa, unidentified
MKSKPEEKTKKAANHSTPHHWDEMNRKQRREMMRKIQSADLRLEVVHPNAGGIDIGNESHYVAVPPDRDSQPVQRFGCTTAELKAMADWLKQCGICTVAMQSTGVYWIAVFDILESAGLEVYLVNSRDTKNLPGRKSDVQESQWLMKLHTYGLLRNSFRPSQQIRTMRTYWRQRNDLVQSAGRHIQRMQKALTQMNIQLANVLSDISGVTGQAIITAILAGERNPRKLAELRDPRVQASQDEIARYLEGNWQEDLLFVLKQEQEGYEFCQKQMAACDEQLKQYLQQREDCSQGASLPEETRKGRLSMKKGNRPQFDLRADLFRMTGTDLTQIDSIDVMTAMTILSEAGWDMSKWATEDHFVSWLRLCPDNRISGEKIIGKRRLPTNNRITIALKMAASSLRKSKTYLGAQFRRLRTKLGAPIAIKAMAAKLARLVYRMLRYGMKYVDQGTEFYEAQHRKLQIKQLKWKAAKLGFRVVDAPAA

SEQ ID NO: 366621 - protein, 427 aa, unidentified
MVFAESQDDEQIIERVAALDIGKAEIVCCVRLPAPDGGKRRVQEVTTHTTMVGALSDLAERLVDLRVERVVMEATSDYWRPPFYLFQAHGLDPWLVNAKDVKHLPGRPKTDVLDAVWLCKVAERQMLRASFVPPPPIRRLRDLTRYRVDLVGVRGAEKNRVEKLLEDACIKLSVVASDIHGVSGRDMMAAMIAGERDPKKLADLARTRMRPKIGLFEEAFAGLKVGTFDEHHRFLLARMLARIDAVDADITALDAQIEDHLAPFGDAVARLDQIPGIGPTAAAIIIAEIGTDMTRFPTPGHLASWAKFAPGIKSSAGKNKGNGSTGKGNRYLARVLGEAAVAAGRTDTFLGARYRRIVRRRGKKKAIVAVGRSILVIIWHLQSDTDARFHDLGPDHYDRHVSTTAKRRSHVRGLQALGYHVTLQPAA

SEQ ID NO: 366622 - protein, 315 aa, unidentified
MTKQRPSVNVGIDVGKATLDVYLLERDRMFSVPNEERSIAALLSRLSRYRLERIVIEATGRLEQPFVRAAIAKGLPVVVVSPLKIRRFAGAIGQLAKTDEIDARLIARFAATLKPVAHPTPDAKTQLIKDLVVRRRQLTSLRTMEKNRRQIMPDDLTPSIDRIIALLDDELSGLQQLIDRAVEQHAAWRHKRDLLVSMPGIGLSVASTLIGDLPELGSLNRRQIAALTGVAPYNRDSGSLRGKRRIRGGRAHSRTALFLSAMAAIRFNPHIKRFYERLLSAGKHKKVALIACIRKIVTALNAMLRDNTPWNAATT

SEQ ID NO: 366623 - protein, 316 aa, unidentified
MAMHVEPSLIGVDVSKAELVIRQSWSSNLVKLGNERKAIDSYLKALTGPVCLAVEATNIFHVLLIERAHALGHAVYVIDGLRLKRYRESIGGRAKTDASDAALLLRYLTHEKNDLRPWTPPPAGYATVQRLLRRRSVLVQTQTTLRQSLQCLPELKASVRAMLARMKHMQHLIDQRLAQTLKRQGWKGDVRRCQGIEGIGPITAAALTLIFHRGAFKSADAYIAFIGLDVRVRESGTFSGRRKLTKKGDPELRRLLYMAAMTACRSSTWKPFYERALARGLSCIQALVALGRKLARIAFALLKTQSDYVPKVVQVA

SEQ ID NO: 366624 - protein, 331 aa, unidentified
MSEKLNTAVAVMGIDIGKNSFHVIGLDARGAIALRQKWSRGQVETRLANMPPCLIGMEACVGAHHLSRRLKTLGHDARLMPAKYVRPYSKGQKNDFRDGEAIAEAVQRPTMKFVATKTAEQLDLQALHRVRERLVSQRTGIINQIRAFLLERGVAVRQGLRFLRAGLPQILATRTDVLSPRMVHVIEALAGDWRRLDERIEGLSADIETLVQHDPACQRLMTVPGIGPIISSAMVAAIGRGEVFSKGRDFGAWLGLVPKQTSTGDRTILGRISKRGNRYLRVLFVQAAWVVLIRPKSWERYGLKPWIEAAKKRLHRNVLAIALANKLAVPR

SEQ ID NO: 366625 - protein, 368 aa, unidentified
MLKQSHYKVGCDAHKHYSLFAVFDRQGKPVKRTRVNHTPGAIRAFLSGFPPGTPVALETVGNWYWIVDEIEAADCLPQMAHAAKAKMMMGHVHKTDKLDADGLATLLHNGTLPSIWIAPGSLRDERELPRTRMAFSKMRTALKNRMHSTLAKYALSLDTQSDIYAPKWLPQLLQLICSLPDETRRCMEQELELLGLVQDQIDQLEARILERVRLTRTIQLIQSVPGPAKILAIVIDREVGSIDRFPSPACFASYAGLVPRVRASGGKVHYGRMIKQANNYLKWAFIEAANVVVRQRHHPAWQSKHVVQIYERTRQRKGHSVAVGAVARYLAEATYWILKKDEPYREPISRQPAGTTSAASSKQGQAPA

SEQ ID NO: 366626 - protein, 445 aa, unidentified
MSHRRHVPSRGVVRRNAKLKALRKLVSRDRAILAVDLASNKQAAVVLDHDSVVLARRMFTGSAWCISQILAWAGPIAAKAGFAGLVLACEPTGHRWKPLVVTARAAAIPVVCVQPLLVHRSREGEDFTRNRSDFDDAVIIGRLTAELRCYVPYLPEGPWARLRHLGARRAELLERATAARQGLRDLLECAWPALLAAAAEPLDSVTWRAALAVSFDPAVIASMSLQGFTTALRGQVRALGGQRVCHRVARSVHAAAAEPGGIAAERAAALERAAFAYGDWMTALAAIAEVEARMMGVLDELHLTHLVTTIPGLSPVGAAAILAETGDPARYDSPRTWVKHAGLAPRANESGTYRGQTRTSGRGRPGLRTAAWRAIWGALRNNPVWSARHAYLTSRDRNQLNDGQARTAVAAALLRQLFVVITRRVPWDPAMAGAPASPEVTTAAA

SEQ ID NO: 366627 - protein, 413 aa, unidentified
MEVVYHNCCGIDVHAKFLVACLLQDGKKHIRRFSTMTDDLINLRDWLISEGCEIVAIESTGVYWKPVFNILESALPVMLVNPEHVKALRGRKTDRKDCIRLAEFLSVGLLEPSFIPPPHIRRLRELTRYRESLVRTRAAIANRIQKVIESGNIKLGQVASDVLGASGKKMLQKLAAGETDPVVISELAQGSLRKKLGELKLALRGELNEAQRFVLGELLQRLKELETADYNVSRQIHQAICDPEHPELFHAWELLQTIPGIGEQVAEVVIAEIGANLREVFPTAGHLASWGGMCPGNKATGGKRISGKMRKGNHYFGCAMVQAAWAATHTKKTFLSAKYHRLARRLGKKKALIAVAHALTVIIYNVLVRNEPYNELGADYFDRNHSDKQRKYLVKRLQALGYTVTLEQNVHAA

SEQ ID NO: 366628 - protein, 338 aa, unidentified
MRYYAGLDLHSNNTYLGILDEKGTKVYKAKVQNHLQMILSVLRPYQKSIVGAVVESTFNWYWLVDGLMEESYKVHLANPAAIKQYEGLKHTNDYYDAFYLADLLRLGLLKEGYIYPKKERAIRDLFRKRMMLVQQRTSHILSFQGLYNREKGSKFSSNEIKRLREENIETLFSDEYVGLSAQANISLIRFLTEKIKELETAVLGCMKVLPEFVKLKTVTGVGDILALTITLETGDIRRFPKVGNYASYCRCVSSQRLSNEKKKGENNRKNGNKYLGWAFVEAANFAKRYCPYAKSFYNRKLAKTNKIVAIKALAHKLARASYFVIRDRVDYNPKKAFG

SEQ ID NO: 366629 - protein, 362 aa, unidentified
MITQGTSVGLDVHARSVVGHAVDEESGRIVRDRLTPDFATVIAWLAALTAPVRVAYEAGPTGFGLARAITAAGMECIVAAPSKLQRPAGDRVKTDAKDAAHLAKLLRLGEVSAVAVPDASTEAARDLVRARDDARADLMRARHRLSKLLLRQGIVYSEGKAWTGRHELWLRRQSFQLPTSQAAFDNDFDAVLSVQSRRDRLDEKIAEMAATDPWAPVVTRLQCLRGVSTLTAFGLTVEIGDWSRFTGSTIGAYTGLVPSEYSSGDSRSQGPITKTGNRHVRRLLVEAAWHHRRPYDSPGRIMRTRWEDAGPAAKARGHAGNRRLNQRWGTFDARRKNACVANVAVARELAGWCWSLATLDAP

SEQ ID NO: 366630 - protein, 420 aa, unidentified
MEVLYPHCAGLDVRKGTVVACVRHMVNGTVTREVKTFRTTTKDLLALSEWLASQGCTHVAMEATGVYWKPVWHILSDGDVTLVLANAAHVKNVPGRKTDVNDATWLADLLAHGLIRGSFVPDAQTQELRGLLRTRKQFVRERSSHVQRLQKTLEDANIKLDGAISDIIGLSGRRMIEALIPTGQARGLKAHGESDPEALAGLAHRRIKAPPAALREALRGRVTDHHRFLLQLHLQHIDALDAAITAIDREVNVQVEPFHTQVLLLTTIPGVSDLSAYVIRAEIGGDMGRFPSVGHLISWAGFCPRNDESAGKRRSNRMRKGAPWLKTTLIQCAWAAARKNGSYLQAQFPRLRARRGAKKAIGAVAASILTAAYHMLKNGTLYHDLGPDHFDRRAKTVQTKRLLTRLQRLGYAVQITPLAA

SEQ ID NO: 366631 - protein, 316 aa, unidentified
MSDPQVLVGIEVSKAQLDVALRPTDGGGPVNHDEAGIAGLLERLRTVQPTLVVLEATGGLAVPVTGALAAAGRPVVVVHPRQARDVAQATGRVAQTEALDARGLAPVAEAVRPTPRPLPAAQAHAVRAWLTRRRQVVPRRTAERRRLQTAPQPIRADIEAHLTWWTRRLARPEDDVAAAISSRPRWRATDARLQRTPGVGPSRSRTLVAAVPEVGGLNRQEVAALMGVSPLNRDRGTWRGTRAVWGGRAHVRAVRSRSTWAAGRHHPGLTAFYARRRAVGKAPKVARTACMPTLLTILNARLKPRTPWHENDATHA

SEQ ID NO: 366632 - protein, 349 aa, unidentified
MIAEGLDLVVGVDTHLDEHVLAIIAAPSGALVAQRSMPAGARGYAAALRFAANRGSGARVWAVEGTGSYGAGLARFLADRGEVVLEISRTPRAERRLRGKDDSLDASRIARAALASETLALPRSGERREALRLLLVARRSAVDVRREALGQLRGVIVTAPDELREQLRGLPVGRLLERCSRLRRSRAASADELATRLVLRSLARRIEAATLEAAELKRELLGHVRILAPALLDEPGVGPIVAAQLIVAWSHPGRLRSEAAFARLAGVAPVPASSGKTTRHRLSRGGDRQLNRALHTVVLHRRQHDAGTKDYIARRIAEGKTRRDATRLLKRYLARHLYRVLEQQTPLVT

SEQ ID NO: 366633 - protein, 462 aa, unidentified
MAEWREDESRFDRVRPIEGLPVVREKVAGIDLGSQQHWVCAPGLEGKGRERVDFGATTPELLRLLAWLKARQVESVAMESTGVYWIAPQEVLEAGGIEVLLVDTRQLARVPGRSKKTDPSDCEWIQRLHSCGLLTGAFRPPEQVSMLRTLVRDKANLVAEAGDWVRRMQKSLDQMNVRVHRAVSDLDGVTGLAIVRAIVAGERDARKLARLRDRRCHKSEEEIAEQLSGHWREDHLFSLRQSLKMYEATQERISAYEQEILRKLGEMTPQERAGQTAPPLKNPHKANSIRKRGEEPRRQAWYRMSGVDATQIDALGVETVEVVLSEYGPDLRRFPTEKQFASHVTLAPHVPKSGGRAVKKKKRYSASTRVAAALRMAALALRHSPSALGAYYRSLARRLGGDVAVFATARKLATLIYRLLRWGQPYVDEGAQAFEERYHQQRIRSLTARATELGYQLVPATT

SEQ ID NO: 366634 - protein, 452 aa, unidentified
MEVIYERCAGLDVHKKTVVACRVHSKGRGRKTQETRTFGTTTAKLLELLDWLSEWECSHVAMESTGEYWKPVYNILEGQVEILLVNARDIKMVPGRKTDVSDAEWIAELLRHGLLRASFVPPQPQRELRDLTRQRSNLVRERTAVVNRLQKVLEGANIKVASVTKATGVSVREMVEAMVQGEDDPAVLAEMAHGRLRSKREELEEALTGRVSGHHRFLLDSHLRHVDFLNEQIERFSQEITARMSQLELVSGGSGELPSAFSGPSDGSSSPQFFGGSVQPRLTADRALVLLDTIPGIDRWQAEVILAEIGLDMGRFPSAAHLAAWAGLAPGNNESAGKRRSGKTRPGSPTLRRTLTLVAHAAARTKNTYLAAQYHRLAARRGAKRAIIAVAHSIVVIIYHLLTRQEPYRELGGNYFDERKRDSVTNRLVRRLEKLGYQVALDTKPGGVSLAA

SEQ ID NO: 366635 - protein, 339 aa, unidentified
MVLYGGMDLHGDNVFCTLMDRDYKPVYEQRLPNDLPTVLAALAPYRAQVAGVAVESTYNWYWLVDGLQANQYSTRLANPARMQENIGLKSANDKTDARFLAKQMVMGVLPEGYIYPKEERPVRDLLRRRMCLVHMRTGEWLRLEGHVARHSGKDLGIQALQNLEARELNELLCNDTLTMAAAQISYRHIAFLDQEIRQIEKAVEGHVKLADGYERLIGVPGIGRILAMTIILETGPIGRFPGPGNYASYCRAVKAEHTSNNRKKGKGNGKSGNRYLAWAYVEAANFAVRYSPELRAWYQRKAARTKRVVALKALANKLAKACYFILRDGVEFDVKKLVG

SEQ ID NO: 366636 - protein, 354 aa, unidentified
MPRKINQLEAVATLGIDIGKNSFHLVGFDRKGAIVLRQRLSRSQVEARLANMPPCLIGMEACVGAHHLSRQLKAHGHDARLMPGRYVRPYSKGPKNDFRDAEAIAEAVLRPTMKFVAIKSVEQLDLQGLHRVRERLVCQRTSVINQIRSFLLERGIAVRQGLRALRTEMPIILAMTDKLSPRMIHMLEDLCSDWRYLDERIETVSNEIETLSGQDDGARRLMTVPGIGPIISTATVAAIGSGDVFAKGRDFGAWLGLVPRQMSTGGRTVLGPISKRGNRYLRMLFVQAARAVLLRPQSWEKHGLKSWIEAAARRLNRFKLAIALANKLARIAWGVLHGGRNFEIRSTKPVPQAA

SEQ ID NO: 366637 - protein, 343 aa, unidentified
MQTITTIGLDLAKSVFQVHGVDAGGQVIVRRQLKRRYVLTFFQKLSPCLVGIEACGSAHHWSRELQALGHTVRLMPPAYVKPYVKRQKNDATDAEAICEAVTRANMRFVPTKTSGQQSGLLVHRARHLFIRQQTSVINAIRAHLAEFGIVAPVGRHGVEELLNVVADSNDKRVPEIARACLSAFGAQLRMIKEQILGFDRLIRVWHRSNELSMRLDEAPGVGPVLATALVAAVADPTSFRSGRNFSAWIGLVPKQHSSGGKNRLGNISKQGDRYLRGLFVAGALAVIRYAKIHGTTHRPWLTALLARRPTKVAAIALANKIARMVWAMMARGERYKEPFALAR

SEQ ID NO: 366638 - protein, 378 aa, unidentified
MNKSIRKSATVKKANHTSTPAKSAKRSKSSTRTIGLDVGDRYTHCCVLDHDGNIESEGRVRTTPEAMSQYLSTTRPARMALESGTHSGWISRLGTQCGHHMIVANPRELRKIHQSNRKNDRADAQMLARMARFDPQLLCPVRHRSADMQADVATLRARDSVVTARTKLINATRGLVKAMGGRIPRCDAGSFARKALEHIPTELHEALTPLLATIGTMTQQIHAYDHSIETLAERKYPKTTTLRQIAGVGPLVSLAFILTIAEPGRFARNRDVGAYLGLVPRQDDSGDRVSQLPITKAGDAYLRRLLVGSAHYILGPFGPDCTLRRYGERLAQRGGKNAKKRAVVAVARKLAVLLLHLWSSGEVYDPLRLPQSTIRPAA

SEQ ID NO: 366639 - protein, 327 aa, unidentified
MAKRTTICAGIDTGKWKLDIALDGSSKQLQIGNTPEGYKTLLDWLRRHRVNRIGIEASGGYEQPVVAELRRKQFVVVVFQPAQVRAYAKFRLQRAKNDKIDAALIATCTAVVKTIHAPPDPRFLPFAEHLTMIEQIREDIRRLKNRIETCRDPRIRQNWKDEVARLSKQEKIEFKALVAAIRQHRDLAERLDLISSVDGIGPPTAVTILVRLPEIGRITREQAAALAGLAPYDDDSGDRAGTRHIAGGRDRLRGAVYTAALPAAFRWNPQIMALYRRLIAAGKGHKRALIACARKLLIFANTVVARGTPWNYQRPAIASITAVPQGA

SEQ ID NO: 366640 - protein, 342 aa, unidentified
MNATTVAVDLAKSVFEIAVADQNWRVTERPRLSRPQFERWFHNRSVGLVVMEACGSAHFWARRLKGMGIEVKLLPPKYVRAYVKRNKTDAADAAALLEAVRCADIVPVRVKSVEQQSLQSLHRIRSSWMATRTSRINGLRGFCWEFGICIAAGSRLGVEQISRVLVDATSAVPAMLRDTLKLLIDEIRLLEARIAQLERELTTLAKASAPCETLLSIPGIGLLTATAMVAATGGDVTHFKDARHFASWFGLTPKEHSSGKLGRSVMLVNGVVQVINALTADSNGISDHRRHLSRLLTTKRAGKRAQLCLVERPRLLETHGGLDPFAINSVIRALGGNLGHVD

SEQ ID NO: 366641 - protein, 359 aa, unidentified
MQTQSNKIDFNGQNIYVGFDVHLKSWTVTIMTEKLTHKTFSQPPKPEALHHYLVKTFPDGTYYSAYEAGFCGYWIHNKLLELGINSIVVNPADIPTTGKEKVMKTDPRDSIKIARSLRNGDLKPIFVPSIKTLEDRGLVRTRATLVKDLTRYKNRIKSFLYFHGIEFPEAFSKPQTHWSNRFNQWLENIEMTELCGKSSLNILLDQSKHLRTSVLQVTRQIRNLAKTDCYKIQQELLRSIPGIGFLSAMIILTEIETIDRFATLDQLCGFVGLVPSTNTSGEHEVIGGITPRGHSVLRGAIIESAWIAARYDPVLNICYHNYCRRMEPNKAIVRIARKLISRIRYVLKYNCPYECSVVK

SEQ ID NO: 366642 - protein, 349 aa, unidentified
MKKLSKRTTPVGETVGIDLGDQYSRYAIVDQDGEVVEEGRFRNQASSIAKHFAGPRRRIALEAGAQSAWISRELAALGQEVIVANARQLKWITASDTKNDPNDARKLALLARADARLLQPVEHRTAAQQAELGVIRARDAVVRARTLLINCARGIAKGFGLRLPASITSTFGARALAGLSEALRPALGALLEQIDALSQSVAGYDREVDRVASTHPETERLSSIPGVGTLTAVTFSLTLGRPERFAHSRDVAGFLGLRPKQRQSGARDPELGISKSGDPYLRKLLVQCAHHILGPFGRDSALRQWGLAKGEGGKRATLRAIVAVARKLSVLLHRLWVSGEFFKPFPKMG

SEQ ID NO: 366643 - protein, 338 aa, unidentified
MHVATLGIDLAKQVFQLHGVDVRGHAVLSRRVKRSQLVAAVASLPPCVIGMEACASAHHWGRAFEQLGHTVKLMSPQYVKPYVKTNKNDARDAEAICEAVSRPTMRFVAIKTVDQADLQAIHRSRTLLIKTRTALTNQIRGLLAEYGLVIAQSPEKVRPALVRFLDDAESGLTAFARETFAELYEQLVELEQRITKVNQRLDRLFNTHPVCRKLAAVPGIGPLTATALLAAISRPHVFQNGRHLAAWLGLVPRQFSSGGHARLGGLSKRGNRYVRTLLIHGARAVVQRAAHKTDARARWMWALKCRKGTNVAAVAVANKNARVIWALLAHDDVYRPSV

SEQ ID NO: 366644 - protein, 341 aa, unidentified
MSEVRVVGLDIAKSVFQVHGVDDAGATVLQKRLTRARLLPFFEKLPPCLIGIEACATSHFWARELTKLGHEVRLMPPQYVKPYLKRQKNDMADAEAIAEAVTRPSMRYVASKSPDEQSAMMLHKVRLMLTRQLVMITNATRAHMAEFGIIAPVGRGGIDRLLAIIDDETDARIPAEARRCLQMLVAQLRLVKLQILENDRQVLALARSTELGRRLMEIPGIGPLVASALVACVPDPSTFRCGRNMAAWMGLVPKQNSSGGKERLGSVTKAGNRYLRQMLFAGAMAVIRRAMQGTRRTWLIRLLERRKPKVAAMALANKNARIAWAMMMSGEGYREPVTVAE

SEQ ID NO: 366645 - protein, 431 aa, unidentified
MNKRNYRATPVKQVKWEKVIEETAGKALVLAIDVAKEEQFAMLMDDESQAHLMVKWTHPVETPVLLKHLARLSSQQLEVAMEPTGIYGDTLRRQLALAGYRTYQVSAKRVFDAKEIYDGVPSLHDAKAAYLIGRLYWSGVAQPWRESSTQEREMKALCNRYELHNECYGRNRNRLEAMLQRHWPEVTTYLALDSVTLEYLLIRYRCPQALARDSAAAAALMRKVSRGKLAEAKIQGLLKASHNSIGIPCVEEERRYLQHLGEELRRSRLQQKAVHKQLQALIDADEQLKAMRAMVGPLATAMLLSNRLDPRHYGNACAYRKGMGLNLKEKSSGKFKGQLKLTKRGPSQVRKYLYFSALRMIHNDPIARSWYRAKVKANGDRDKIKYVVALMRKLACGLWHVGHGEAYDARKLFVSVWASTGLTLPIQVFHF

SEQ ID NO: 366646 - protein, 342 aa, unidentified
MEVDILGIDLAKRVFQLHGADVRGRAVYRNKVSRAALIETVRVLHPRMIAMEACGSAHHWARRFQEAGVEVRLISPHYVSPFVKTNKNDRNDAEAIVEAASRPSMNFVAVKSVEQQDMQAAHRVRELLVQQRTAIINQARGLLGERGIAIAQSPAAFRRAIPEILIQSEGELTSFCQSLIMTLVQHLRALEEEIAVADGWIRSFMNRSALCQKIAAVPGIGPITATAIVAAVGRADGFRNGRQLAAWLGLVPRQHSSGGKSQLYGISKRGDKYLRTLLIHGARSVLIRVSAKLDARSRWLQKLIERRGFNRACVALANKNARIIQVLLSTEATYQPVALVDA

SEQ ID NO: 366647 - protein, 391 aa, unidentified
MVCVGIDVAKDKHDCCILDSDGTIRADCITIPNNMDGFKQLLQTIRDCTKKSDKIKVGLEATGHYSYNILGFLLDNGLPTYVINPLHTNLYRKSLSLRKTKTDRVDARTIATMLLSDVDLKSYTDIAYHNEELKSLTRYRFDKVQECAKLKQSVSRLATILFPELEGLVSSIHGTSIYALLGEYPGAKQISEVHLTKLTNLLTTASKGRYGKEKAIQIREAARASIGSVMPAKSLELKHTIKLIQELASEINEIEDSIQKIIDELNPPILSIPGMGVNSAAVILAEIGDFSNFSSPDKILAYAGCSPSTYQSGKLTNCYAHMEKRGSRYLRHALYNATKYVCYWNPVFAEYLAKKRAEGKHYNVALSHAMKKLVRLIYALQKSGKAYLAAA

SEQ ID NO: 366648 - protein, 345 aa, unidentified
MELHAIGIDLGKTVFHLVGLNRSGEVVVRKKFSRIQLLRFTANLHVDLIGMEACAGSHFLGKALREQSHEVRLIPAQYVKPFVKTNKSDYIDAEAIAEAVGRPTMRFVPVKTDEQLDMQSLHRVRERWIMRRTAVVNQIRGLLLERGITLRKGRCHLDAALPGILEDATTTLSGAVRFLLVELKLELAQLAMHLEQAEALIQKAAEESEACQRLDAIPGIGPLTATALIAAIGNGAAFKKGREFAAWVGLVPREHSTGGKQKLLGISKRGNPYLRKLFVQGARAVLQFREKQSSGLRTWLAQLTSRTHYNVVGVALANKLARMAWAVLAKGEVYRPPILADAAAA

SEQ ID NO: 366649 - protein, 413 aa, unidentified
MNTTASERWAAVDWGDSSHAVCIVDAEGKQIASFTVEHKADQLDQMVLDLKQHGPIAGVAVETNHGLLIAKLLDANLTVYPINPKLSDQWRSSRSVAGAKSDAADSLTLADGLRVHHAVLHPLVPDDPLTRELRGFCLHELHLTEERTAEVQKLKAALKEYYPEALDWFDTWTCPAAWDFIATFPTPEDLRQAKPGTFIALARHHRMKYTLSWQQKVADRGKQAPWPSDPAVTHVQSHVALDAVAKLKAIDRSMKQCRKHIEELYAKHPDADIFRSLPGAGKKLGPRLLADFGSQRDRYGSHHVVQQLAGTAPVTWSSGQSRKVKIRWACRKPFRHNAYWLASCSRKKAAWAQAFYDQARARGDSHALALRKLGYKLIKIIFRLWQDRQLYNDQRYVLSLQQHGSPLAAAVAP

SEQ ID NO: 366650 - protein, 431 aa, unidentified
MQTVAALIAAAVDYERTLVLAIEVSNESWVLAAQVPGLPHTKAKRTINPDAESLMAAIAGYRARATATGHSVERVITVYEAGWSGFWLARWIMRHGMEAYVIQPSSVPVDRRMRRAKSDGIDAELLLRTLLAWLRGEPRVCSMVPIPDEADEDARRCVRERTELISERVGLTNRIGAVLATLGVSDYNPLLRSRHRRLTELRTGRGEPLPRNAQAKIERLLARLELVLAQIAELERERDAVVEAEASDKASKMIQQLTNLRGIGVQSATVLVREAFVRRFTNGKALGSYAGLACSPYSSGGIDREQGIGKAGNRRVRTVMVELAWLWTRYQPGAAQVRWFRERVGSTGRRARKIMVVALARKLLIALWRFVIDGVVPEGAILKPAASPPIQGNVAVVRHGATAPFTQSGAVLLELSRPECGTVVGINSRRM

SEQ ID NO: 366651 - protein, 414 aa, unidentified
MDVIYERCAGIDVHKKMIVVALRIGRKTQIRQFGTLTHELREMTAWLMENGCEMVAMESTGSYWKPLYNIFEIEGLPAMVVNAHHLKAVPGRKTDVKDAEWIARLLSQGLLRPSFIPGREQRELRDLTRFRKSQIEERARNLNRLQKMLEGANIKLGDFVSDIDGKSATEFLELIIGKPDFTIEDVAKSRRKWMKASAEELFKSLEGIITPLQREMFSHVMSIINEQTKQIKHTNSLIDSHLIEVYSTAAKVLETIPGIGKVSAQQIIAEIGHDMGRFPTAAHLCNWAGICPGNNESAGKRKSGRTNHANKVLKTTLIQCATTAKRIKTSFFNAQYQRLVVRRGKNRATVAIAHSMLIAIYHVLQGAAFHDLGSDYYTRFNREKKINSHVKQLAKLGLDIPDELLRQAISANVA

SEQ ID NO: 366652 - protein, 321 aa, unidentified
MTYVGIDVSKVTFVVAYSSVKTNKTRTFKNTVNGVHEFVQTISASEHNCVLEATGNYSALLVYLLSEAGITISLENPLKIKNFARVMLTVTKTDEIDARLIALYGEKMQPAPYKLRSDAILVLKQKRTVLRQLKKQLVATRNLKGSMEVLPFFDPKCKKTIEKTITFLEKQIKEMEEELASLAQGEYKKQMDLLTSIKGIGVTLAAALIVATGRFSYFDNAKQLTRYLGLSPTYQQSGTSVNVKGHINRNGDSSLRSQLYVAAFASLRCNTECKACFDRLRSKGKPGKVALIAVANKLIRQAFAIVTQEKLYVDGFKPEKP

SEQ ID NO: 366653 - protein, 358 aa, unidentified
MQRNKISFKGQKIFIGIDVHGKNWEVAIAPEVGIVRRHSQKPSAKELFDFLKKNYPDGEYRAVYESGFSGFSTYYALKEVGIECMVIHAADVPTTQYEEVTKTDRVDAAKLARSLKADLLRGNYILSKQSIDDRSVVRIRKTIQKQLAGYKSRVKHMLHCHAVEYPERFSKKQTHWSRPFINWLKKDVRLLSDTRASLDLLIRQVEVIRGSLLGATRELRKMSQTERYKHRHNLLRTVPGIGLITAMCILTEICDVNRFHNENEFAAYLGLIPTSHSSGEKTVHGEKTFRGNKQLGPMIIEAAWIAIGRDTGLGAQYNQYKKRMEPQEAIVRIARKLSNIIFSVLKNEKEYVPYQTGN

SEQ ID NO: 366654 - protein, 326 aa, unidentified
MRFTRMDVHRDACQICVLDADGNEHQQRIPSRPDELAQFAASLGPDDVVAIEATGPAAAIARILEPHAGQVVVINPRRLGQIAARAKTDRIDAHTLSRLLGAGVLTGVWTPDEQARALRRLVSRRAAVVRARTRAKNEVHAVLARNLCPSVPVTDAFGKAGRRWLSGLALPEEEAITLTGCLRQIDTLEAEITQLEDVLVRRVATSPEVRRLLSVPGVNVIVATTFLAYVGDIGRFAGPRQLVGYLGLDPRVRQSGEVAARGGHISKQGAACVRHVLGQAAWRSSRVAGPLRAFYERICARRGPQVAITALARKLATLFWYLLYPR

SEQ ID NO: 366655 - protein, 335 aa, unidentified
MEFEFFIGIDVSKNELDFAVQQGNCFLFHREIANEPLAINNFLKELIKLPGFKLSKALFCMEHTGIYNNHALTCLYKKKAHVCLEAATQIRSCLGNIRGKNDKVDAIRIAVYAYEKQHKLRLWQPRREVVSQLAHLSTTRSRLISVKKQLKVPLGEQACFSTGKISRQSLQVCSHTLKALDQDIARTDKAIEQLIACDAELSRLFALTTSVSGVGKVTAAQIIIATNEFRDINDPKKFACYSGVAPFTDESGKVIKKARVSHMANKKVKTLLHLSAIVAIQYNPDLKLFYQRKVEQEKKNKMSVINAVRNKLILRIFACVNQNRPYEKYYQKALA

SEQ ID NO: 366656 - protein, 372 aa, unidentified
MRFYTRQHRFYCGVDLHARTMHVCVLDPAADIVFDHNLPANPKALLDALAPFRDGLVVGVECMFAWYWLADLCQRQGIAFVLGHALYMKAIHGGKAKNDRIDATKIARLLRGGTFPLAYAYPQGMRETRDLLRRRTYLVRKRAELLTHLQILNSQYNHAPFGKQLTLAGNRARLQIAERFSDASVRHSVAIDLALAERLDELIDDVESYLTRTAQVDDVQTYQRLQTIPGVGKILALMLLYEMHDVGRFDTAGQFLSYARLVRCSHESAGKKLGSGGAKIGNPHLRWAFAEAVCLFLRYSAGGKRFQEKLAARHRPGKVLAILAARLGRAVYHMLRKKEAFDEQRFWHGGGRQARTGSSSLFRPEEPHHAGN

SEQ ID NO: 366657 - protein, 344 aa, unidentified
MKVITIGLDIAKRVFQAHGVDAAGRAVVRRKLGRSEVRDFFRALPPCLVGIEACGTAHHWAREIRALGHEVRLIPAAYVKPYVKRGKTDAADAEAICEAVTRPTMRFVPIKTPEQQAVLVLHRTRDLLVRQRTMLVNAVRGHMAEFGIVARQGVGGVSELLAALRAEDVAGLPPLAKQALLGLAGEIEALECRAEEIEAAILAWHKGNEASRRLATVPGIGPITASALVATVGEVSNFASARHFAAWIGLVPKQNSSGGKLRQGGISKAGDRYLRRLLVLGASTVIRHSHTKAGEGWLASLIARRPTMVAAVAQANKAARIVWALLARGGTYDPQRSAPRPAAA

SEQ ID NO: 366658 - protein, 342 aa, unidentified
MNSTYHYIGLDVHKRTVAFCEKRADGKTVASGSFSTRREALKQWVEQRTIPWVGAMEATLFSGYLYDALTPHAVEIQVGHPARIKAITAAKHKSDTIDAETLANLLRADLFPQCHMAPPLVRELRRVLRYRNFLVRQAVTMKNKTTGLLMEVGAAYDAKRVHQRGYFHELLEDLEEVPPSVVQLLRTTRGGMEMFQGAQKQLVDALVRHDQLRERVERLRSIKGVGEVTALTWALEIDDPARFSNLKKAHSYCGLCSGQHESAGKNRRAPLSKQRNPHLQTVLIEAAKLAPRWNPQLREVHEKALEQDKNRNRATCVVARKLVAYLMAVDRSGQPFQTPDEE

SEQ ID NO: 366659 - protein, 453 aa, unidentified
MCLEDRPVLEPNAAGIDVGAREMFVAVPPGRDEKPVRVFATFTEDLERLTDWLEQCGVTTVALESTGVYWIPLFEILEQRGIRPCLVNARHMKNVPGRRTDWHECQWLQFLHSVGLLRAAFRPGQDVCAVRTILRHRNELVAAASQHVQHMHKALTQMNLQIHHVISDITGSTGRAIVDAILAGQRDGAELSKLRDPHIKADTETIRKSLEGNWRPEHLFTLGQSRDLYRIYQQQIVNCDLEIEKMLQGFAPRIDPGERPLPPDQKRNRAGSKRRRKNGHPHPEFDLRTEAYKLFGVDVSQIPGLEENALPLFSEVGRDLSRWPSAAHFVSWLALCPDNDISGGKLLWRGARRVKNRAGHLFRMAAYALHRSLTPLGNYLRRMKAKLGPQAATMATAHKIAVIFYTMIKNQVEYDETIWNARDAEREKKLQAKLKRQAKQLGYELVPIEPQAA

SEQ ID NO: 366660 - protein, 357 aa, unidentified
MYVAGIDAHATYLVVAIVSKTGELEQAPVRIANRDGSRLLELLERFRPLEAVVETSPAWPWLHDLLVGHGFGFVLAHARRLRAIAESNYKRDELDAELLARMRLAGLIPTVYAKSVEQRQQAVLVRHRTSLVRLRTGVLSRIHAQLHSVGLRLARGRLITRAGRRWVRECAWPLLGVEQRRLVRTHFAVVDSLKPMIQALDRRIRRVAGEIPAVGLLQTIPGVGEYWGLLIATEVLPIERFAAPKYLVSYAGLAPRSSKSGLAPIRHGPIPAGVNRWLRGAFVRAVVSHLQQTGESWLTRYYQEQKERLGWQVARIAAARRLARAVHAMLRTGEAWRSELGTGERGEFHEGHVAPTT

SEQ ID NO: 366661 - protein, 350 aa, unidentified
MDTYVGIDIHRSCSQIHVQSQEGTCMHQGGLYHEELEQLRDFFSELPGQVHAAVEATVGWMWLADELQALGADVHLAHQKKAKAISEARLKTDSVDAKTLCQLLRTGFLPESYLAPAEMRDLRMNLCYRLALVHMRIRVKNAIHAIPIRYNIQHTVSDLFGKKGRQFWARLKLPPTAKGCLQGWMELLEFLEDQSTEAENALYEQCDQDHEIELLTTIPGIGQFTAHPIMVEIGDVANFRRPKKLVSYAGLAPRVKQSAGRYCTGHTGGGRKYLKWALSKPPAPPAGKIAWLAGSYRRLKRRKGAAKATVAVARKLATIVWDVLTEDCPYRSGNVRLPGSARSFRGGQRS

SEQ ID NO: 366662 - protein, 421 aa, unidentified
MPNIEIGVDSMVKENFIYVGIDLHKETHTAVMIDCYNQKLGEITFPNRPAAFPKLVTKVKKCNTDGKEVVYGLENAYGYGRALAVWLIDKGYLVKDVNTAISHRQAKHRGAMYRKSDSDDAEAIALATLNMLDKLPDAYPNDAYWSLGQLVHRRDNIMKQRTRLVNQLHEQLCIAYPSYKQFFNDISRPTALYFWEHYPSRKYLKGKSVEDLRAELVPVSHNKCSTKTCEKILDAVASDKVKNNAYQDARDMVTLSIVSDLQYYDKQLAEVDKMLEQMYKMLGCTLTTIPDVNVITAVKILAEIGDIKRFSNANKLAQFAGIAPLHLSSSGKGKDVATKQGNRRLQATIYFLAIQMVQVSSKGTPRNSVVRAYYEKRKAEGKTSQQALICISRRLISIIYGMLKHGTEYRMPVVESAGENR

SEQ ID NO: 366663 - protein, 407 aa, unidentified
MEVLYPRCAGLDVHAGSLTACARIAVGAQVTYHHCTVSTMTRGLLELDEWLARHGCTHVAMEATGVYWKPVWHVLEPHFTLVLANAMHIRNVPGRKSDMNDATWIANLLAHGLIRSSFVPPAPIQELRDLTRTRRQLVHEIARYVLRIQKTLEDANLKLTQVMTDIVGVSGRAILNALMAGERDPARLADLTRGRLKASRADLLDALHGRVTDHHRFMIRLHLTQIDALEVAVTTIEARIGDALGPFRAAVTRLITMPGLSETSARVLIAEIGADMSRFPSVGHLISWAGMCPRLDESAGKRRSTRTRRTTPWLKPTLINAAWGAARKKDSYLRAQFLRIKSRRGAKKAILAVASSMLTAAYVMLRDGVDYHDLGPHHFAQRDKEKLAKRLVERLRDLGLTVEVKAA

SEQ ID NO: 366664 - protein, 349 aa, unidentified
MGEVSTIGVDIAKSVFQVHGVDADGTVVIRKRIGRAKVLEFFAKLPRCLVGMEACATAHQWARELKKLGHDTRLMPPTYVKAYVKRGKNDAADAAAICEGVTRPSMRFVPIKSVEQQSALMLHRTRDLLIRQRTQLINALRAHLAELGLVAAKGHEGLQQLVIAVTESSDERLPNNARFACQTIIAQLHAVQIQINGLDKRVTQAHRANADSKRLEAIPGFGVILSTAVVATMTDPKAFRTGREFAAWIGLVPRQNSTGGKERLGSISKQGDRYLRRLFVLGAISIVRTARTRPDKYPWVTELLGRRPTKVVAVALANKMARVAWAVLARGEAYRAPTHSSRAVIAAAA

SEQ ID NO: 366665 - protein, 324 aa, unidentified
MEVEAVYVGIDVSKARLDVAVWPGAERFSVGNDPRGIAELVEKVAARTPQAVVLEATGGLETLAASELHAAELTVAVVNPRQVREFARSLGRMGKTDRLDALVLAQFAQSAHSNERLPKLRLRDEAEAELKALVTRRRQLVAMLTAESNRRERAPKVIRRSIVASIRALKRSIAEIEQQVREVMSDSPVQQAKAVLLAAVPGVGPQLTATLLAELPELGNLGRRKIASLVGVAPHPHESGKFYGRRRCWGGRATVRTTLYMAALSGVRFNPALRACYQGLLGRGKSRKLALVACMRKLLLILNAILRDSASWNPHHQLDFQHSR

SEQ ID NO: 366666 - protein, 345 aa, unidentified
MIGVDLAKNVFQVHGVDAAGKVVVRRRLQRRQVEKFFAALPPGVVVGMEACGGAHHWGRVVQKLGHEARLMPAAYVKPYVKRNKNDGRDAEGVCEAMGRPTMRFVPVKSLESQAVLVLHRTRRLLVRQRTMSSNAFRSALSEFGIVAAQGLKGLRSLMEALEDPVSAIPDTARMALRVLAQHWERLNADICKLETQIVGAAKTDAVARRLMAIPGLGPIGATAILAAAAVPDARVFKTGRDFAAWLGLTPRQFGSGGKQRSGGISKQGDRTLRTLLVVGATAYLRYERARARDPWLRDLLARRPFKVAAVAYAAKMARIIWAMLVTGEHYRAADKRRRVPIEAAA

SEQ ID NO: 366667 - protein, 315 aa, unidentified
MTPPPVFVGIDVSKQFLDIAQWPDDRTWRVAQDEAAIRTLVEALRTLAPARVVLEATGGLEAPVTAALAAAGLPVAVVNPRQARDFARATGKLAKTDAIDARLLARLGEALAPRVATLKDEETRELEALLTRRRQIVEMLTMEKNRLNAAAKRVHKDIAAHITWLEKRLRDVDGELRGAIAGCEALRVKDALLRSAPGAGKVLATTLLASLPELGCLNRRQISALVGVAPLNCDSGTMQGTRRIWGGRAAVRTVLYMATLSAIRCNPDIRAFHARLVASGKKPKVAITACMRKFLTILNAMVRSNTPWQARTVVD

SEQ ID NO: 366668 - protein, 419 aa, unidentified
MDQAKAPSSPVDASSFAYVVGIDIGSEQCSFCTLKPDKSQVIKPTEFANAIAGFSLLQEQLERLGVAPGQVLIGLEATSRYGENLYRFLEQQGYQLCLLHPRQTHQFAQQRGLRAKTDRLDATTIARVLLSGEARPGYVPTELIATYRELVRLHSQLSDDIARYKNEIHALLSVLFPEFTQVFLDPCRPTALALLKRYPSAQALASAGVEAVAALLHELAPRHYGLKTAQQLVQLAQHSVSSGIAASARAITLKVLCDQLEHTQTNLAQLEQEVDKLLDTDQGAKGVQSVPEFGRKMVAVLRAELGDVTRFERADQVVAYAGLDIAVRQSGKWRGEAKLSKRGSGRLRRILYMTAVRCIRLKDSAFGLYYHRLLARGMKPRAALVAVMRKMLLVSYRLLRTEEAYDPTKVCARPGARLA

SEQ ID NO: 366669 - protein, 487 aa, unidentified
MHPRTTNIPTPTSDVRRFSFESAGVLALDNEYSGFAVLPAHYIAFAERKRARPWTSIYHFGRYDVKPLATQLFSAYVGIDWADTKHDVCLQAPGAEAREFDRIRHQMTDIDRWAQSLHQRFGGPIAVALEFAKGPIVYALQKYDFFVLFPINPLTLAKYREAFAPSRAKDDPTDAELALDLLMRHPQRFTALRPQSVEMRTLLSLTEHRRELVGDKTRFTNRLTNTLKQYYPHALDWFEQHDTLLFCDFLTRWPTFSQVKRARRASLQAFFYAHNGRRPNVISARLDAIKAAIPLTEDMGVIAPCRLQVLVLIEQLSTTLQAIDRFDREIAELAPRLPDYSLFQDLPGAGPHLAPRLLVAFGEDRQRYQHVDELEQYAGIAPVTERSGKKSWVHWRWQCPTFVRQTFVEWAGQTINKSFWAGAYYRQQRAKGSSYQAAVRSLAFKWIRILYRCWQTRTPYDESTYLNALRKRGSPLLKNLELIAKNP

SEQ ID NO: 366670 - protein, 346 aa, unidentified
MDHFIGLDVSLASTAICVLNAHGKVARETTAASEPEELVTALRALSGKVVAVGLEAGPLSQWLHKHLTEAGFETVLMETRQVKGALKAMPIKTDRRDAEGIARLLQMGWFRPVHCKSVSAQEMRAVLTARKSIQQAAINLELSMRGVLRNFGLKMGRIPKGRFEERVRELTDGNSMLEAAAGPILTARAALRFELAKLEKLARDHAKSDPVCRLMMTMPGVGAIVALTAKSAIDDPNRFRSSKDVGPWAGLTPRREQSGERDVIGQITRAGDEGLRTALYQAATVMLNRGRSNWLTAWALRVAGRQGKKRATVALARRIGVVLHRMWRDGTDFRFTRAEAMAKSTM

SEQ ID NO: 366671 - protein, 335 aa, unidentified
MKTLYFLGIDIGKEKFHAAITIDGITFHDQEVENTPGSIKAYFQQLKANFSFTPKQLVVCMEHTGIYSYPLLDYLVKKNILVYVEPALRIKQSQGMQRGKNDKIDATRIAKYVFKNHHELNLWKPKREVIQKLQALLVVRERLVRARMQFEVPIKESGEFIEKSISQLAIVNCRATINAIKKDIQRVDIEIATLIKQDSKLCAQVELATSVTGVGVIIATNMIIASNEFQDITNHKKFACYSGVAPFPNQSGKSLRGKNKVSHMANKRIKSLLHLGARSAVRHSPELKQYYNRKIAEGKKPFSVLNAVCNKLISRVFVCIKNQRMYQKIYSPALV

SEQ ID NO: 366672 - protein, 370 aa, unidentified
MKNSTESRVPRKRAVSRRRRELTIGIDLGDRVSRYCVLDDEGNVLFERSAATSKKGLAQAFASVAASRIALEVGTHSPWVKRLLESWNHEVIVANARRVKLITESTRKDDRLDARTLARLARADPQLLSPIRHRSETAQAHLVMIRARAALVEARTKLVNSARGLTKSFGERLPSCDTDRVSVGLLVDLPPSLQAALQPLMTVARSLTEQIHIYDQKIAQIARSEYPETARLRQVTGVGELIALSYVLTLDDPQRFRRSRDVGGFLGLRPKRRDSGNSRPQLRITKEGDGYLRKLLVQGAQYILGWRGPDTDLRRWGLTLAARGGKNAKKRAVVAVARKLAVLLHRLWVTGDRYQPLRPSQAAPNSSAAA

SEQ ID NO: 366673 - protein, 412 aa, unidentified
MDTIYANVAGLDVHQKTIVACVRCLQQKGDVVEEVRTFGTVTRDLLHMSDWLAGHGVTHVAMESTAVLWKPVWNVLEGHFQLLLVNPRELKQVPGRKSDVRDCQWIAHLLQCGLLRSSFVPPQPQRELRDLTRQRAQLLSEQTRAVNRIHKTLEDANIKLGAVASDIMGKSGRAMLAALLAGERDTNKLADLAEGRMRAKIPDLIEALRGHFTEHHVFLLRSLLDHFDYLDRQIEAFSDRIEVCLRPFVTEEQRQRLDAIPGVNRRTIENLVAEIGSDMSRFADADHLSSWAGMCPGHEESAGKRSRSRTTKGNRWLRRALNEAAWAASRSKNSYLSAQYRRLATRRGKKRAVIAVGHSILVIVYQLLKHDIDYQDLGPDFFDTLNPEKYRRYLVKRLEGLGYEVALKPKAA

SEQ ID NO: 366674 - protein, 417 aa, unidentified
MNESAKLLPQKYMEGDKVHVLGIDVSRGKSNCALLHDHTVIKEFQIIHNKSGLAKLKSIITSDLPVMAVFETTGIYSRVLTRFFIDEGMNYLEINPLESSIRMAGLRRQKTDRSDAVKLALLGIDQKSLIHGRRPYSRPYEQLHLMAHRYLEITKERSRIINHLHAALDQTFPELNDIFNPIRSVLGLTFVSLFPHPDFLTGYIPGTMAKQIIGLVSPKIHSDLIVRRCNEVWQAGQLSYPAQPANSFLTNQIHSYCEEIQRYNQAHDLLKRQLITYAKTFPEFKLIASIPGAGEISTALLLGFTGKIARFPSYKQLNAYVGIDLRRTQSGGLKEADRINRRGQSSARYIMFEMIRSMLRNKARIDNHIVDYYYKLKKGPHPKPDMVAMIACVNRLDRTIMNLVRTNQIYNYARTSH

SEQ ID NO: 366675 - protein, 350 aa, unidentified
MNVNQYIGFDVHKKSVSYCVKIADGIIVEEGKLRATHEALRQWAEKRQESWRGAMEATLFSGWIYDALKPFAAELQVGHPAMMKAIGASKKKNDKLDARKIADLVRCDLLPACYVAPAEIRELRRLLRYRNLVVRQAVRMKNRMSGLLMEVGAEYNKQQLHGKQYFMELLDTLAEAPDSVKDLLQLSRGAMEMFETTQQQLLVRLKRDQLLSKRVTLLESIRGVGEVTALTWALEVGDPHRFSSVAHAVSYCGLTSALVSSADKQQRGPISKQRNAHLQTVLIEAEKLAPRWNPQLAAVHARELERGNRNRATLAVARKLVAYLLAVDKSGQAFQVRNQPAAAMAEGKVA

SEQ ID NO: 366676 - protein, 368 aa, unidentified
MSRKERLLVNTIDVEQEYKVIGLDLAKNDTSCVCIAESGEIIAIDRLRYEDLIEAAEQLSPTIFAMEPCNGMHWLVNQLHDFGHECRVISGGAVQQYVESHFGKQKTDLNDAQAIAYLALDEMLRFIRAKTPSEMSIQALQAIRTQLTKQKIASIVCFKSMCQGYGISISKGKSSVAAFIALLKETDRIPEEVKEALRMLIANYRVLRTRISKIDKVLEKIVVTNPIGKRLKDIPSFGVQCAARLLTVAPNIKDFKGPKDLVAYCGLVPRNITTGHIQKTAGITKRGDKLMRRNVVQAANVLYCKNKHGQLQSCKLKRWMDKKLKILPYPKFIIQLAAKLLRIAYAVMRDGTEFDYARAGVARSALIS

SEQ ID NO: 366677 - protein, 315 aa, unidentified
MTDIIVQNVGVDICKATLDVHLHPAGNARQFTNDAKGIRGLLAWLGDHAIARVVFEPTGPYHHGFERRLGEAGLPLAKVNPLQARRFAQAAGAHAKTDAIDAAMLARMGALLTPPVRPINSQVIDEMKELHIARLALVKDRTAAKNREHACRSPLLKRHAAQRLAQIDRQIKTIDSALQAFLESDADLMGRFRIIASIPGIGTLTAVTMLIAMPELGSLDNKQVASLAGLAPQARDSGQHRGKRHIRGGRAILRQALYMPALVATRYNADMKAKYQAMTAAGKPAKVAITTIMRKLIILANALLRANRPWTQKMA

SEQ ID NO: 366678 - protein, 270 aa, unidentified
MEQVIGIDLAKRVFQLHIASPLGKMMKNTVVSRDKLTAFIAQQPPSKIVMEACGSANYWSRQFKRFGHEVKQISPQYVAPFRMGSKNDKNDAVAIVEADRRPGMRYVPEKTQEQPDIQCLHRVRQRLMKNRTALINQIRGLGLEYGIAIPESAHKVEQCLPDYLENAENDLTPLSRELFQELLRELKEQQQRLNVLDKRLDQLNAQQEDIRRLLTLPGIGPLGASALMVALGDSKDFKNGRHFASYLGLVPREHSSGGKVRLLGITKRGG

SEQ ID NO: 366679 - protein, 350 aa, unidentified
MLAELVDHVIGVDPDRDRITAVIIDAATKGEIDQIQAAATPAGYAAVLEWADAWSIPEGRVWSIEGAGSYGAGLCITLQAEGEWVVEFDHPEARADKDGAKSDGLDAARAARELLGRSRYSTPRSRGRREALRVLMVARRGAQHARVSAINELKALIVTAPVQLREELRGLTVAALIERCSRLRVGAGSDVELAGTKQAMRLLARRVLNLSDEVKTIDVELERIVTDMAPQLLDEFGVGPVTAAQVIISWSHPGRCRNEAAFARLAGTAPLPANSGQSQDRHRLSRGGDRHLNRALYTIVLTRTRSHAPTRAYIARRTSQGKTTREARRCLKRYLARRLYRLLENPPQTT

SEQ ID NO: 366680 - protein, 387 aa, unidentified
MPQRNDLSRSLITLDQNSTVIAVIEMSRSSWLVAGVIPGVDRYPLKKLEPDAESLLRLLRRWQDEATRAGRTINRTAVAFEAGRDGFWLARWLRARGIEAHVIHPASIPVSREHRRAKTDRLDTELLKRAFLGWLRGEPDHCSMAAVPTLEQEDAKRPNREREVLVGERTRIVNRMKGTLARLGIRGFNPALRRAPERLETLRTPEGATLPPNTRAELRRDMARLGFVKDQIREIEATRTERLEQAPGEGQNAMIRLLARVVGVGIETADMLVQEVLSRNLRDRRAVARYAGLTGAPDESGAKRREKGLAKAGNARVRRGMIQLAWRFLLFQKDSALSQWYRARTTDTRGATRKILIVALARKLLIALWRFGATGEVPQGVVLRPAA

SEQ ID NO: 366681 - protein, 448 aa, unidentified
MKKSFVLGIDPGKSFFAATLLDAAGEKVWKARQFDMSRDGLESLTSGLPEGDLTIGVEASGRIDDNLMGWLKQWSLANRQRKVKMIRVNPGQSSRFGGPKPRRTQTDASDSEHVAEFTRVYAERLEVFDADPKALSMARLIGERQRLIEDVAATKNRIHEQMLVCFPEFIQVFTDPFAKLALAVLREAPTARCAARRRASSLARVKADRQGRSLGVERAQKLIALAGRSIACAFEDEDGKALVFLLDQIEFLQKRVANIDRTLASYVRQAQDETPGDGHVSAGRQIELLDSIPGMALVAASVLVLGTRGVGRFYSGKALSAQWASCPERIQTGTSLDKTRLTNRGDHKRRTMLYLSTQIACLYDPAFAFHKWRMIQRGLCPQQAVCACMNRISRVAWALVAHNEAYDVNRMLDQIRLHHNDLWKTFVRLNQNNRMLWKKIDSRHLKIA

SEQ ID NO: 366682 - protein, 355 aa, unidentified
MKIVGCDLHAKQQAIAMVDTETGEFTEKTLAHEGNQVREFYAALEGRVVVGIEATGAMQWFLQLLEELGIECRVGHPAKIRAKETRKQKHDRRDARLELELLIEDRFPTIWMPSTEQRDLRTLLRDRHQWVKMRTRVQNTLQAIALNHALRYGRALWSPAGQKALQALALSRYTSQRRDELLHLYVQLQKRIQELDRQVEEEAKQRPQTLRLLTHPGVGPITALATEVFLGDPSRFANGKNVASYIGMIPCEHTSGKRQRLGKLTKEGNSLLRYLWTEATIHAVRKDPELKRFYRRKLIQIAAATNWVSACGSCCATRLTTKSSAAADSSGSAGKPMRECQITTVVLHCSDRVTE

SEQ ID NO: 366683 - protein, 342 aa, unidentified
MKELKQVVGIDVAQKELVVTIGRLLEDLSVDLFSYKVFKNNDKGFLSLVEWVTKLVENPQEVHYVMEATGVYHQKIAYFLDTNQLKVSIVLPNKISNYFRTLEVKTITDKTCSQVIARFGLERKLDLWKRPKTVYKKLQQLTRERDQIVAERVIVKNQLHAEKIEAEPNLMTLKRISERIKLLNKQENEIKNDISKILKNNTELIEEVNRMMTIPGIGELTAIIILAETNGFELIRNKKQLTSYAGLDVKEKQSGTSIKGKPKISKKGNRSIRKAMHFPSLVAVKWDENFKELYARLVSKHGIKMKALVSIQRKLLEMSYVLYKNQTIYDKEHKNSVQTQMA

SEQ ID NO: 366684 - protein, 402 aa, unidentified
MYFVGIDWSDLHHDVAVIDEKGKELKYFTVPHNRKGMELLKEKLLSIDPNQESFACLVETKNGLLVQFLLEAGFPVYPLNPKVVDYRRKPSGVKSDPIDARLLANIGRSDLMQLKRLKPDTELISELRLLTRDQDGLIQESTRLTNKLIACLKEYYPVALEFFSRPTLPVALEFFKCCPTLELLREATVPEIAAFLKKHKHPRPNQTAISIWQKVQEPQLKASAPTVRAKCRLMLALVRQLELVREQIDAYDEEINRLFCQHSDSRIFASLPGAAERLAPRLLAEWGDDRERFENAAVVQALAGTSPVLFQSGKYRFARQRKSCVKPFRRAVHLFSFQSIRQVSWARDYYDAKRNQGKTHHEALRALANIWVRIIFAMWKNRSCYNETEFTTARARHVNKAA

SEQ ID NO: 366685 - protein, 454 aa, unidentified
MKSTDLSSPAFDLLRPNAAGIDIASQMHYVAVPSDRDEQSVRKFGGFTEDLHEMARWLKSCNIDTVAMESTGVYWIQPFLVLEEYGFDVFLVNARHIKNVSGCKSDVKDCQWIQQLHSYGLLNKSFQPDDLIRELRTYVRQRKNLTQGYSTQVQLMQKAFDQMNIKLHNVISDITGKSGLLMIDAILNGERDANVLAQLGDSRIKAPQEDIVKSLQGIWRQDNLFELKQAYEIYQVFRDKIADCDKQIEFVLAKIAKTTISTEQKPKDNQKGNSKRKANGKNKFTFNATSYLNDISGVDLTDIFGISELTVTEIISEIGTDMSKWATEKNFTSWLNLAPNTRTSGGKRLKSKPMKKKNKAGQAFILAASTLKASNNWLGEFYRRIKAKSGSPAAIKATARKLAIIFYKMMKDKVDFNPLPLEEYNQYFKERKIKYINKQATNYGFKLVPVDFVS

SEQ ID NO: 366686 - protein, 564 aa, unidentified
MSKYLGQGTMVPGRIEEDLVDSRWKTWSIGCDVHLRTVFAAVLIPDYVKGEIQRFVVKYATDYQSLQAMRNWLLTCKHEYGDTEFVIESTATYHRPVVHALHDEFAAIVINPTLAGQTKKKADTYDAALLAYHGLTGIWETSFVPSGIQHDVTCVSRRLIKATREMTKATNAIGTHVLDANLLLPREIQMKSVSARAIVRAIADGETNPVKAVNHASYYAQHRDIPDRQATYQRLIEALTALPDVSISVRHILAALLKDYGHFERQCLIYHTWMNELLNALSISYPDGRRLNGLECVELLASIPGVGSRYGEVFVAEAGIEAVTRFGSPEALEAFAGFDPSKTYSADKVLSTRSRKGNVYLHSTTIQIAQGLLQHGKRDNPLAKWGRNYKIRMGNTIDAHNQAVTGVGKRVIRMSFHILRTGKPYDGSRYHIHAHQTKMLKQLKSVVNRVHDLADEMHASEIDDTARAVATEAIHAFRSLTGTEEGFTLCATTTDESVNQLGFNTRTCRVLEKADIHTLSMLWFRLIQGTLRNVKHFGKKSYEEVISVLVHSGRILKNNHSIVS

SEQ ID NO: 366687 - protein, 386 aa, unidentified
MHLATTLPIPEQTGIPGDRATLFVSLELSRSTWVATSLAPGSKKMSKHTLVGGNGRELLELLARLKTRAEQRIAAPVKVMTIHEVGLDGFWIHRLLDANGVDSHVVDPASVAVPRRHRRAKTDAIDGETLLRTLMAWQRGEPRVCAMTVPPSPSEEDCRRISRERAALLRERIRHTNRIRGLLFGQGIANYNPLNKNRRERLKELRTGDGRSVPVRLEAEILREIDRLELVLRQISEVEAERDEMLRPAEASSPAALLMRLKGIGAEFATVLYLEGLFRRFENRRQLAAYAGLAPSPWKSGSIDHEQGISKAGNPRLRTTMIELAWMWVRYQPDSALSCWFRQRVGSERGRTRRISIVALARKLLIALSRYVTHGEIPAGAVMKAV

SEQ ID NO: 366688 - protein, 309 aa, unidentified
MTANQKFSRFIGIDVSKAKLDIYDDATGEFLTVENTAKAIEKYVSALSPDPELLIVVDLTGGYEALCVNTFYNRGFTVHRAEGRRVKAFMRSYGEHAKTDRIDAYALALFGRKLHETLRMYTPLPLNLKPVTERISDLKTMLLQEKNRSTAPSLPADMKKEIVRHIAYLEKEIERLYQKCLDIIKNDPPLAEAFYKIIAIKGIAEKSAVLLLTTLPELGCANRRQIAAIAGVAPYAKDSGTLSGYRHICHGRATAKCALFIVPLVAIRHNAQIKEFYERLLKKGKSKMTAIIACARKLLIIVNATLKTC

SEQ ID NO: 366689 - protein, 449 aa, unidentified
MLEPQEIEDEEYEQVLERVAAVDVAKASGMVCTRVPHSSRPGKRRTMVREVAAATGAVLELAEQLAGERIEMVTLEATSDYWRIWFYVLEAAGLRVQLVNARDVKNAPGRPKTDKLDAVWLAKLTERGMLRPSFVPPAEIRRLRDYTRLRAGLTRERTRHWSRLEKLLEDALIKVTAVASKTGSKSVRAMVEALIAGQRDPQVLAGLARGKMRARHDRLAGALAGRFDAHHGELARMMLDQIDALTTHIGTITSRVGELIEAIPGAWGVDADGVTGPGAGLGPGAPVLPAVARLDEVTGIGAAAAQVIIAGVGLNMGVFPTPGHLVSWAKLSPRTIQSGPKNRSGPAGDGNPYLKGVLGEAAASAARTATFLGERYRRIARRRGKLRALVAVARSILVIVWHLLSDPAARFGELGAGYYASRIDTGRKTRNHVRQLEALGYTVTLAQVA

SEQ ID NO: 366690 - protein, 320 aa, unidentified
MAMHTRPQWIGIDVSKATLSVAVYGAAHAQTLANEPGAIRAWLRRLPANATLAVEATNTYHFTVLELAERRGLRCYVLDGYRLNRYRESLGIRAKTDPGDAALIARFLAHEHRDLRPWQRPPKGYRSLQRLLHRRATLVRAQVALRQSLAELPELQPQITALFEQLQHLDRALSRRLRQCARESGWGADLARCEAIEGIGPLTACALVNAFHRGTFQRSDAFIAFLGLDVRVRDSGTQRGKRRLTKHGDSELRRLLHNAAMAARRSPVWAPVYERYRQRGLASTQVLVILARKLARIAFALMKNQSQYHSPLTAGSCTAT

SEQ ID NO: 366691 - protein, 421 aa, unidentified
MNQETKSVERVVGLDGHPDSFTAALLRGPTPAAAIAEKVFNKVPLGQLESWAQKHTTEQDLFVLEASGNSFQIARTLSKIGRQSKVLESCQLGKLKEAHANNDKISAVRIAKAYLAGTAKEVWVPDPLTQERRDWFHAHRKAVKRATQVRNRLKSFLSDNGVRLATGMRLAKDSAQVQEQLRQTRQWSPRQWQVIELLLLELHHADEQRQHWRSLITQEVLSDSLLLSMVRLCGVREMVAFAMGAFIGDIKRFSSPAKLVKYVGLNPAFDDSGEGKWSGGIGGHGRADLRSLLVEGAQAILRTSQSPLAKWGRKLLGRKGEIKLVVAAVARKLTVAIWYLLMGRWTPLEQIDERLAMKLSKMITAVGTEKLDQLGRKRTAYREETYQLLKTGRVYVLDPDKKFVPRSMGQPVQAAPPAASA

SEQ ID NO: 366692 - protein, 323 aa, unidentified
MEQVIRIGMDTSKSVFQLHGVDALERPVLIRKLQRRAVVPFFARLAPVKVGLEACGGSHHWARTLSALGHDPVLMAAQHVKAYLRRGKHDAADAEANCEAMSRPRTRFVAVKSIEQQAGQMLFGVREQMVRRRTQLSNAIRGHAAEFGLVAAKGLAHVEPLLARVAADDGVPALAQELFDMLGEEYRATCTRLAALEKKLVAHYRQDETARRLAAMPGVGPIGATLLGIKVGDATAFNSGRDFAAWLGLTPKNHSTAGKTRLGVITRAGDEMLRQVLVVGATAHRCGAAASRPRRGWPRCLHASRQSWRRWRWQTKTPASPGR

SEQ ID NO: 366693 - protein, 342 aa, unidentified
MAIAILGIDLGKNSCSLVGQDASGRVVLRRRMRRETVMTFGATLPACIIAMEACCGAHHMGRALAAQGHTIRLMSPEYVRPYVKAQKNDDRDAEAIAEAATRPTMRFVALKSEAQLDMQTLHRVRDQLVGERTALMNQIRAVLLERGHIVPQGRAKLAASLESLLDTEAVSDLTPRMRSLVADVRERWQSLDGRIAALDAEFAEQARTDDSARRLTTIPGIGALNATALVAAIGDVATFARGRDLAAWLGLVPRQVTTGGRPKLVGITKRGSKYLRKMLIQGARAAMPTLRKSDTRIGQWLRGLLARAHANTAVVALAAKMARTVWALLRHERVYEPAAVAA

SEQ ID NO: 366694 - protein, 348 aa, unidentified
MLADQLDYVVGVDPHRDVHALAIVEVRTGGVVFETSVAASSGGYARALQLADEHAPGRRAFAIEGTGSFGAGLTRFLSGEGERVLEVGRLRRERRSGGKSDALDAIRAARSVLGQKRAAEPRAGGEREALRALMAAREGAVNARRAGLCQLRDLLITTPEPLRSELRPLTRAQLLHRLRAMRPQRQRDVELRGALQALRTVAGRVQHLTAEERELAGEIETLTRKLAPQLLEQPGVGPLAAAQILISWSHQGRIRSEAAFARLAGCAPIPASSGQTIRYRLDRSGDRRLNRALHMILVTRRRAHPPTIAYIDRRLQEGKSGREASRCLKRYLARNLYRLLEHGAPLAT

SEQ ID NO: 366695 - protein, 386 aa, unidentified
MQIATRAEAPSAIRTDLGAIFVSLELSRSTWLITSLSPGSGEKMSKHSVRGGDIAALLERFTQLQEKTQARTGKRFEIIVIQEAGLDGFWIHRVLQSKGIDSHIVDPASIATSRRRRRAKTDRIDGEALVRALLAYKRGEPRVCAMVKVLTPEEEDRRRLCRERKVLIAEQIEHVNRLKGLLFSQGISGYEPRRRDRWTRLEELQTGDGRLLPKHLKAQIRRELNRLELLLEQIKAVEVERDALLAAEETSAPAPAALLLNIRGIGPEFAAVLWSEGLFRHFDNRRQVAAYAGLAPTPWQSGVVDREQGVSKSGNPRLRTTLIQLAWLWVRHQPRSALTLWFEARVKRNGGRLKKTTIVALARKLLVALWKYVTAGVLIEGAAMKV

SEQ ID NO: 366696 - protein, 331 aa, unidentified
METRKEPDMITSGVDAHKGVHAASAAHPRQWDIEGAGNYGRGLAQHLVAADETVYDINPRWTAGERRQARRPGKSDRLDARAVALVVRREAATLHPLQAEDETAVLDLLVTEREAALAEAPRLRNQLHALLLQLDPQYKEVLPPLDTEAGVAALVAYHGPERTPLHQAQAASVRRLAHRLRLAVEQAADVRRQIEARAEAGFPPLTRLKGVSLLTAGALAGILGPGRRFMSEAQLAAYAGAAPLEASSAGRVRHRLNCGGNRRLNAILYRIALTQLRCWPPAQDYVARRVSEGKTKREAIRALKRYLIRAIWRLWQECVSHQASSSVVQAA

SEQ ID NO: 366697 - protein, 405 aa, unidentified
MERVFVGHDWAETHHDVHVADADGKRLAKARLPEGVEGVSGFHELVAPFVEEPDEVVIATETDRGLFVGALVAAGYQVLAVNPMSTSRYRERFSTSGAKSDPGDAFVLAELARNDRHNHRPVAGDSEEAQAIKALARAHQSMIWTRQRQVNQLRSTLREFYPGFLGAFDDLDAGDALAVLEVAPTPALGRALSRSKIASALRRGGRQRRIEERTVEIQTALRADDLEAPAPVAEAMGASVRALGAVISELVVQIHGLEGELTARFEQHPDAKVIQSLPGLGMILGARVLGEFGDDPNRYCDAKSRKNYAGTSPITRASGKHRVVLARYARNKHLADAAYLWAFCAITASPGAQAFCKERRCHGDTHNRALRALSNRLVGILHGCLRYGTLYDEHTAWGHRITAAA

SEQ ID NO: 366698 - protein, 342 aa, unidentified
MNILKQTVGIDISFKTFDARYGTIDNKQNTIISQAKSFNNSPAGFNLLLRWLKTVILAQNIPLFFVMEATGIYYELLAHFLFEHGFLVAVILPNKIRNYAKSLESKSKTDPIDAAVITRFGLERQLSLWSPPSQTIKTLRDLCREYQALKTISTEIKNQCHALKYSFKPYRESLKRKLQLLCFLKRQIALIQKEISALVKSDPQLTQHLINIKTVKGLGDITILTVLAETRCFQLVSNQKQLTSYAGLDIVFNDSGMKKGKSSISKKGNKFVRKALFMPALSACRANPHLKSFYQRLLEKGKNKKLAIIAVARKLLLLIYTLWKSNSVFVPNYYGTSQKMVS

SEQ ID NO: 366699 - protein, 485 aa, unidentified
MAVAERRVLGIDLGITSAHTAAILDQAGQVLGRRRCRPTVASLEAVEAAALAGTPAGTRLEVVVEPTGPAWLPVAVFFAGRGHAVYRVPVAKAADLRRFLSRHAKSNAIDAETLARLPLVDPGGVQPLELPDGPRASLDRRVRTCQWLTEQATAHKVRIRDLARQLFPTLNDAVDSELRSADLAVLERYGDPRKLLAAGPEPVAGLLRAGSTGRMAAAKVESRARAWVGVAQAAVELYGDSGAMPYADVAAELATEVRLLRAVLAEQKPHQQARERAYLKVEPDELARTLPGIAEVGAPLLVAAIGRPQRFASAAKFKAFTGLTPKASETGETDRKGQAITKAGAARLRKQLVCSANTARQVDPQLAAVYYAQMVERGAHHIKALCIVAAKLAERFWAVQASGKPYVLRDVDGREVTVEEARRIIAERYTVPEEVRRRRRSTKPRTGKAPQHVLSGHAQRGTSRAEPRRPSPRPILGPGHGTVNR

SEQ ID NO: 366700 - protein, 347 aa, unidentified
MKKVMAGIDLHSNNLVIGIVDSEGKRLLHRKLECELNKVLEFLRPYKEQLQSVAVESTYNWYWLVDGLRAAGYPAVLANPARINQYSGLKHADDQNDAFFLAQLARLKILPTGYIYDPQLRPVRDLLRRRLSLVHQRTALMLSFKSLFTRTTGQEMKLSRLKSLSAQEAKSLYEHPANQLIAQVQQRHIEALNESIGQIEQVVLKVARHLPSYARLQTLPGVGIILGLTITMETGDIHRFASPGDFASYSRTVDAQRTSNGKKKADNNQKCGNKYLAWAWVEAANFAKRYDPQCRRWFDRKAAKTSTVIATKALACKLAKAAWYLMAQNSDYDARRMFAELAVKTTK

SEQ ID NO: 366701 - protein, 402 aa, unidentified
MNAVGIDVSKGKSMVAIMRPFGEIVSTPFEIKHTSSDINSLVKLIKSIEGESRIVMEHTGRYYEVLAHQLSEANLFVSAINPKLIKDFDNDSLRKVKTDKADSVKIARYALDKWQNLKQYSVMDELRNQLKTMNRQFGFYMKHKTAMKNNLIGILDQTYPGVNTYFDSPARSDGSQKWVDFASTYWHVDCVRKMSINAFIDHYENWCKRKKYNFSKSKAEEIYGKAKELVPVLPKDDITKLIIKQAVDQLNSASITVESLHTLMNETASKLPEYPVVMAMKGVGTSLGPQLMAEIGDVSRFTHKGAITAFAGVDPGVNESGSYEQKSVPTSKRGSSDLRKTLFQVMDVLIKTHPQDDPVYQFLDKKRAQKKPYYVYMTAGANKFLRIYYGRVKEYLASLPES

SEQ ID NO: 366702 - protein, 402 aa, unidentified
MNAVGIDVSKGKSMVAIMRPFGEIVSTPFEIKHTTSDINSLVELINSVEGESRIVMEHTGRYYEVLAHQLLEANLFVSAINPKLIKDFDNDSLRKVKSDKADAVKIARYALDKWQNLKQYNVMDELRNQLKTMNRQFGFYMKHKTAMKNNLIGILDQTYPGVNTYFDSPARNDGSQKWVDFASTYWHVDCVRKMSLNAFIDHYQNWCKRKKYNFSQSKAEEIYGKAKELVPVLPKDAITKLIIKQAVDQLNSASTTVESLRTLMNETASKLPEYPVVMAMKGVGTSLGPQLMAEIGDVSRFTHKSAITAFAGVDPGVNESGTYERKSVPTSKRGSADLRKALFQVMDILIKTHPQDDPVYQFLDKKRTQGKPYYVYMTAGANKFLRIYYGRVKEYLSSLSES

SEQ ID NO: 366703 - protein, 346 aa, unidentified
MHYIGMDCHISTLDFAVVNEVGRLVKANSVATSINGFMEFVKTVPPPRTIYMEEGTLAAWALETCVRFREKLVITDAKKNHWIGSSGQKGDAIDALKLAQLARGGYIKEIHHPVGQRRRFRELMIAYHDAVRSTTRIKNKIKAKFRQNGIRCTGVTVYSETHREGWKGKLPQESTLLLILDGLWRQLEQSEQTEKELLAAARVQAKHYPEIKHFEALPGIGFISAATISAMLEIPYRFADKRKVWMYAGLGIMTRSSGGKIYSEKLSTDYNRLLKYTLKQAAEVAIQAKENPFRQKYLDMTLLHGIAPHRAKLTIARDMLATMWAMWRKGEKYSPEIKEKATCKQG

SEQ ID NO: 366704 - protein, 448 aa, unidentified
MGKSTKKTDVVKKISQLQIINPTAAGIDVSDNEMMVAFPINSEQIEVRAYECFTRDLHTLAKTLKSFGITSVAMESTGVYWIPLFLMLQDYGFEVYLVNAKHVKNVTGRKDDESDAEWIQKLHRCGLLSASFQPDNMIRTLRSIVRHRKNLVRMSAGYINRMQKALELMNIKLHTIISDIDGKTGRLIIEAILNGERNPEVLADLRDSRIKASRENIIKSLEGNWTTEHLFELKQCYQLYCYHHQMIDECDKEIENQLIEQLASKNGGLIPDLPKVKRKTVKKNRVDFELTSYLKEIIGVDVTEVVGLSEITVLSIMAEVGVDLSKWKTEHHFTSWLGLAPNTKISGGKIISSRIQKKKHHAGQAFRMAANGLHNSKSPLGDFYRRIRSKSGAAKAVVATARKIAIIYYKMVSNKEAYNPKAMEDHQQKYKEKKISQLKRKIEQLEAA

SEQ ID NO: 366705 - protein, 348 aa, unidentified
MKHYAGLDVSVKETSVCIVDESGRLCRERKVASHPEDLVAILSDPAFSLERVGVEAGPLSQWLFEGLAKAGLPVFCIETRHAKAFLDALQQNKSDRNDARGIAHMMRVGLFKDVHVKTLTSQKRRALLTARSLLQEKAIDLENEMRGLLRNFGLKVGQASGGMFERRILELAENDADLKEIIEPLLAGRRKLREGLAKLEKRVLTEARQDEVCRRLMTVPGVGPIVSLAYVSTIDIPSRFRHSRSVGAILGLTPVLKQSGEMSRVGHVSLRGDAMMRRLLYEAAQSMMTRVVKWCWLKAWAMNIAKRHGSKKAKVALARRLAVVMHRMWMDGSEFRWTREGDVSTVAA

SEQ ID NO: 366706 - protein, 320 aa, unidentified
MMAQNDLVVVGIDVAKDKVDACIRALSLRQTCPSNAQGYRKLVAWLRKHQVSNAVMEASGGYEREWRKVLTKAGIVVRIVDPKRVRSFALSAGRLAKNDAIDAEMIAWFAETFNDAPSQTQDAAHEELAALVKARIGLIELKIRLQNQNAHAVPGTVQKAQARVLKSLAIEIEKLEAAIAAKVAATADFAERAEIIKSVPGFAETTAANLIAGMPELGRVSDAIAAALAGVAPYDDDSGKRRGERHIKGGRRWVRNAIFMPCVGAATQNNPVLKAYYQRLIAKGKQAKVALVACMRKLIVILNTLIARRQKWDPSRYALN

SEQ ID NO: 366707 - protein, 367 aa, unidentified
MKKVSTAAMTQGRNISRQKLTIGLDLGDRNSWYCVLDETGGIQLEQRVRTNAKALQEVFGAMPRSRIALEIGTHSPWISRVLSELGHEVIVANARKVRLIGESRKKDDRLDAQTLARLARIDPELLYPVKHRSAQAQADLMMIRARASLVRARTGLVNTARGLAKSYGERLRGCNVRDMDPEKAEGLSPELQRALEPLLATIEELSERIVEYNDRIEALAEASYPQVELLKQIKGVGTLIALTFLLTLEDPHRFGKSRDVGGYLGLQPGRRNSGDSEPQLHISKEGDPYLRTLLVQGAQHILGPFGIDCDLRRWGLKLAERGGRNGKKRAIVATARKLAVLLHHLWVSGEVYEPLRNSSRITVAAAA

SEQ ID NO: 366708 - protein, 351 aa, unidentified
MTISSLAHEVIVGVDTHKDVHVAVAIDIHGRRLGERMVPTTELGCTELHRWALGFASRACYGVEGTGSYGAGLSRYLQAQGSQVTEIRGPNRKLRRDRGKSDTIDAEAAARAVLAGTSTISPKAGNDWVEQLRILRVARRSAVQARTQAINQMHAVVVGAPQELRDLLQPLPGHELIKRAARFRVADASDAQTTVRWTLRLLALRHQALTDEVAAIDQAIAPLLEQHAARLLELPGVGPEVAGALLVVAGDNPQRLHSEASFAALCGVTPLPASSGKTSRHRLNRGGDRQANCALWRIAMSRLSFDKRTQLYARRRTTEGLSKREILRCLKRYIAREVFTALPMSSTLDMA

SEQ ID NO: 366709 - protein, 322 aa, unidentified
MNKYKEIFGVDISKDVFDVYGSKSGHNQFKNNASGFKFFLKSLPKESLVVMEATGYYHYRLAQFLFKQSVLVSVVNPLSVKRFIQMKLAKVKTDKSDAKAICEYGQINEVPLYTALTDVQSECLQLFRLMDSCLKKRTATKNKIHGEAVLGIPSKYVYRSLIRIKKYLDKEISGIEAKLLSLVKQEQQVQLTLLTSIPGIGLKTALFMIVITDGFEKFENSKQLCSYVGITPTIRESGSSVRGRSRISKVGNRKLRNLLFLCSFTACKHNKGCRDVYERIVNKGKSKKLALIAVSNKLIKQSFAIAKSGLPYDEKHVSVLLK

SEQ ID NO: 366710 - protein, 355 aa, unidentified
MKYLGMDVHSKSTVWCLLDAGGEIIREGAVETTEAGLTALVKELASEEEIVAGQEVGTMSYFVHDVLMAAGTKLLSFNAAQLRMIAASRKKTDRRDAYWIAKALGSGMYPHPVYIPTGEIRELRALLSRRQMLQAERNRWQYRARAALRGCGRRVRAGEHHLRRSLKAYLEVDCGLAGDLRELLALCQRQEASLSLELRRLEVSLRERERAIEAIGRLKTIPGVGDLVATTIYAWVGEIGRFRDAKSLTAYAGLVPSVYQSAANQRSGGITKQGSKALRSVLVQAAHTLMNCCRGAEARPLQEIGARVRTSRGRRKIATVALARHLLRIAYYVLRDGTTYAPERLGGAGKRRQAA

SEQ ID NO: 366711 - protein, 354 aa, unidentified
MNQSSTITAGLDLGDRYSHFCLLDTESGEVVEEGRISTNPKAFQRRFSGCEPMRVAIEAGTHSPWVSRLLKRCGHEVLVANARKLRLIYGEGRKNDRLDAENLARLARLDPRLLSPIEHRGEASQAHLAIIRSREALIEARAKLINHVRGTVKSFGSRLPRCSSPTFHKKVGAHVPESLRPALEPLLKTVASMTARIQEYDRELEVLAEESYPQTKLLRRVHAIGTLTALTFVLTLEDPSRFGTSRAVGAYVGLVPSKDQSGERDPQKRISKQGNGLLRKLLVGSAQRILGPFGEDSDLRRHGLKICERGGKNAKKRAAVAVARKLSVLLHRLWVTGEVYEPLYKSNRFEVKAA

SEQ ID NO: 366712 - protein, 410 aa, unidentified
MAYKVAGIDVHKKVLMVVILEADDPAGEPQRRRFGTTTSELQNLSSWLRQQGVQQAVMESTAQYWRPVWYELEPYMKLSLAQASSNRAPRGRKHDFRDAERLVRRLLAGELTLSFVPEPEQRTWRMMTRARVQLTEDKSRLHSQLECLLEEMRIKLSSVVSDLLGVSGYRILRALAGGETDPRKLAALADDRLQCSEKQLIDALSGTFQPVHRQVLTLYLDRHQMMVEQIAKFDRLIAEALKAHQEAVARLAQAPGLGVDSAQQIIAEVGVDAGTFPTAGHLSAWVGTCPGLEKSAEENHSSRSAKGNKYLRRVLNQAAHAAVKKKGSHFQTVFRRLLPRLGYNSAIWAVAHRLCRLVWKMLHEAVPYIERGSEPDARTKRQRARQLVKRLRQLGYEVDLRTINHTPAPA

SEQ ID NO: 366713 - protein, 355 aa, unidentified
MDEQRVVVGGVDTHKDLHFAAVVDDQDHVLGNQCFPSTRHGYKQMLAWLRSFGELARIGVECTGTYGAGLLRYLQQAGVTVLEVTAPDKHDRRKRGKDDTIDAENAAHAALAQVRTVTPKTRDGMVESLRVLKACRKTAIAARRVALQLIQNTIISAPDELRESLRTLTRMQLIRTLAAWRPDLSDYRNLSSAYRIALKSLGRRYLELHDEIADLHTMIAALVNELAPELIAQNSIGYESASQLLLTAGDNSGRLQSESSFAALCGVSPVPASSGKVSRHRLNRGGDRAANSALHIIAIGRLRTDPRTQAYVAKRLNEGHSKLEAIRCLKRYIAREVFYIIQRRQREINATKITA

SEQ ID NO: 366714 - protein, 370 aa, unidentified
MDENIKFFVGLDVHKDTIAVAVAEAGREPARLVGSIAHDVVKLRKRLTRYGEPARVLVVYEAGPTGYGLQRELARRGYQCQVIAPSLIPKRAGDRIKTDGRDGVRLAELSRAGELRAVWIPDPADEAIRDLARAREDVVNARTQARQQLKGFLLRHDVRYTGKTSWSKTYYRWLGTLNFGLSGAQTAFTEYWQAVTAADERVARLTGALANSIEGWRFEAVVNALQALRGIDVISAIGLVAEVGDIRRFAHPRQLMAYLGLVPSEHSSGERVARGSITKTGNTHARRLLVEAAWNYRFQPRIGRRAQQRAEDLPQAIRDVAWKGQLRLSGRFARLRARGVQINKVCVAVARELAGFVWAIASAQAKLTPQ

SEQ ID NO: 366715 - protein, 479 aa, unidentified
MTKQQRPTSPAVRSGTRKERKLLARQIWSDKPGLDVVHKDAAGIDVGSKEHYAAVPPNRDPQPVRCFGCFTSDLHRMADWLIQCGVKTVVLQSTGVYWIPVYDVLEQRGLEVWLVNARETKNLPGRKSDVQESQWLLKLHTYGLLRRSFRPTPEIRAIRTAWRERAEYVQQAGVCIQRMQKALTEMNIQLSTVLSDLNGVTGMKILRAIVAGERDGNRLAEFRDKAVKASKETIAKSLEGTWLPEQLAILKRQLADFDHVHAQMAQCDRDLEAMLKQMPSADRVPQAAPPATALPGKTKKRKGTRKQPSANHPKFDLEKELARMTGVNLTRIDGVYSMTIQTVISEAGLDMSKWETEHHFVSWIGLAPRNEISGGKVLKKKTRKVKSRLATALRMAASTLLKSDSYLGAQYRRLRGRLGAPKAITAMAAKLARLIYRMLKYGEEFVDKGVEHYEQARCQRKIKALAKQAAQQGFQLVPA

SEQ ID NO: 366716 - protein, 496 aa, unidentified
MSAFLRRSGQNPHRWATKGMKSKKELLAKKKHIKRKSAKAKHNRVLGIHNPHAAGADIGATEIYIAVPPDRLEMNVRCFGTFTQDLRAIVQWLREYKVTSVAMESTGVYWIPLYELLEQEGFEIYLVNARHVKNVPGRKSDVQDCQWLQYLHSVGLLRGSYRPAQDICAMRAISRYRDNLLHFGAQHLQHMQAALDQMNLRLHHVIADLSGLTGMAIIEAILAGERDPRQLAKLRDPRIKASQETIAKALEGNWRVEHLFVLGQALQSWKQVQQQLGQCDQKLGELSSQLEGKIDLANSPLPPSAKYCGREPRSKNQPNGPWREELYRHFGVDLTEVPGLSLGVVLTLFVELGADLSAFPTPRHFAAWMGLCPDNAITGGKVIRRGTRRNRQRIRLALRLAATSLHHNKTQLGECFRRLRARLGAPKAITAMAHKLARIIWHLVTHRVGYDESIFAEREEQLLRRKQRQLRNLAHSLGFTLVPNPQPAATSNAEVS

SEQ ID NO: 366717 - protein, 393 aa, unidentified
MIYVGIDVAKYKHDCVILDSDGCCLATGFTIPNNRDGFEKLLQSIKACNNNSDEIKIGLEATGHYSYNILGFLLESGLTTYLINPLYTNSYRKYLSLRKTKTDRIDARTIATMLISGINQKPYTDIAYHNEELKSLTRYRFKKVEERAKLKQSVSRLVNILFPELEQLISTIHLASVYALLSEFPSAQQIAGSHLTRLTHLLHNVSKGRYGKDKATEIREAAKRSIGTNMPVRSLELRHTIHLIQELDKEIVEIEAAIKEIMDSIKSPITTIPGMGYRMGAAILAEVGDFSKFDSPNKLLAYAGLSPSIHDSGKSSHAGPYSHMEKRGSRYLRYAIFNAAKFVCKWEPKFSEYLAKKRAEGKHYNVAISHAAKKLIRVIYALHKSKKPYGAAV

SEQ ID NO: 366718 - protein, 421 aa, unidentified
MGINKVNVKTSKHIGRENMKHVIAFDISMGKSYMVVYNALKKCQLEKEIAHNRPGFMDLKKLIDDLIEGYDEQPHIVFESTGVYSRTLERFMQENNYSYCLLNPLEAKLQCDSLRIHKTDRSDAHRLALTHFTHERRIETDSNDVYRQLKRLSRHYSELDDELSVTRSRLHKVVQETFPELENIFTTKSELFLNVVQLYPHPDLVLNHSKTIIKNRILANTNKRMAVNKAEEKAVELMEAAKQSYPAASSTDVVCDQVRVYAKRFQELLLQKEQCISKMELIAERLEEYSIIRSIPAIGANTAVRIIAEIGSIQRFDNNRQLNAYTGIDIRRYQSGKFIAKDKINKRGNKHLRKIMYLTVQNMIRQRRFGGNHIVEYYDKLKRQPYNKCHKVASIACVNKLLKTIFFLVTHNQNYDYRLAP

SEQ ID NO: 366719 - protein, 368 aa, unidentified
MGWTPPDGIAVPEWRCCNHWREASVPEITTIGLDIAKNVFHAHGADERGRAVFSKRLSRGKVLDFFVGQPTCIVALEACGGAHHWARELMAMGHTVRLIPPAYVKPFVKRHKNDAVDAEAICEAAQRPNMRFVAVKSEEQQAAALVFRTRDLLVRQRTRLINAIRGHLTEYGWVAPKGPSYVVMLADLLDEEEMASSLPPAALAMFRVMLDLLADLDDRIADLDREIARRAREDEVSRRLMTIPGIGPITATALAALAPPAETFAKGRDFAAWLGLAPLQKSTGGKQKLGAISKMGERTLRRLLVIGSAAVVKQAARRGAPKGSWLEQMLARKPRMLVIVALANKTARIVWALLMKQESYRAPTAVTA

SEQ ID NO: 366720 - protein, 394 aa, unidentified
MVYVGIDVAKDKHDCFIVNSDGEVLHDVFTIQNNMAGFKDLLFKIKSAEPNPDKVKVGLEATGHYSCNILGFLKRMGLPTIEINPLYTSLSRKSISLRKTKTDKVDARTIANMIMSDVSLKPYSDKLYHNEDLKSLTRYRFDKVAQRAKLKQSVSRLINILFPELETLVSTLHGKAVYTLLSEFPSAQHIASANLKHLTHLLDNASKGRFKRATADQIRETARQSIGSYLPAKSLELKHTIKLINELSDEIAEIEVEIKKIMDIIDSPILSIPGIGINLGAIIIAEIGDFSRFDNPDKILAFAGCSPSTYQSGQLYSSHAKMEKRGSKYLRWALMNAATYVCKWEPTFANYLSKKRSEGKHYYVALSHAAKKLVRLVFHLETTGEKYIFQKLSS

SEQ ID NO: 366721 - protein, 413 aa, unidentified
MDVLHPRCCGLDVHKSSISACILVQEAGRVQKHQRRFGAMTKDLQELANWLRQFEVTQVAMESSGVYWKPVWNILEGQFTVVLVNAQHIKNVPGRKTDQKDAEWIAQLLQHGLLRPSYVPCEIIRDLRDLTRMRVSLSQEASRISSRVQKVLEDANVKLASVATNTLGKSGRAMLEEIIARKDDPEHLASLALGHLRAKTPQLRLALEGKIRPHHRFLLRRLLDQWHFVEHEIVLLDERLEDIGREQPELSQAVARWDTIPGIDRVAGWTLLAEVGHTMAQFPTAEQLASWACLCPGNHESAGKRLGGTMRKGSPWLRRMACQCAWAAARTKNTYLSAQFRRVAARRGSKRAIIAVAHSLVIIGYYLQKNQRNYEDLGGDYFDRIQSDGLKRYFVRRLEKLGHKVTLVPITAA

SEQ ID NO: 366722 - protein, 328 aa, unidentified
MKEAVYVGVDVSKDSLDVAVSNSQGTNRFANDPEGITQAVRHIASLQPEGIILEATGNLEMPLAAELQAKGLPAVIVNPRQVRDFARATGALAKTDAIDARVLALFGLRVKPEVRPLPDKQAREMTGLLTRRRQLVEMIIAESNRLSRADEDIQPNIKDHIKWLEAALSGINTDLEHRIRSSPSWHDQDNLLRSVPGIGKIVSSTLLIELPELGKLNRRKIAALVGVAPLNRDSGTMRGKRTVWGGRAKLRAVLYMAALVATKCNPIIAAFYRRLLDAGKVRKVALVACMRKLLTMVNAMMRTMTVWNPEMSRKYVLRRHDEDSCCLQ

SEQ ID NO: 366723 - protein, 349 aa, unidentified
MITLGIDAHKRTHTVVAVDEVGRQLGVKTTRSTTSADHLALLVWAERFGSERTWAVEDCRHLSRRLEADFLGAGERIVRVPPKLMAHARDAARTYGKSDPIDALAVARAALRQPDLPTAQLDGPSRELKLLVDHRDDLVAERTRMINRLRWHLHELDPTWDPPPRSLIRYRNLDALAARLAGHSSVVARIASELVEQIRHLSVRERALQKEIADRVAELAPHLLTLVGVGVLTAAKVVAETADVRRFRNKDAFARHNGTAPLPVWSGNRERYRLNRTGNRQLNAAIHRVAITQARFHEPAKTYLKHRTELGNTPTEARRALKRRLSDVIYRTLLLDTHTDQPTRLEHAA

SEQ ID NO: 366724 - protein, 335 aa, unidentified
MSVYVGIDVHRKRSQVAVINEGGEVLANRNVPNGVKPVLSVIGGLPAGTPAAYEAAFGWGWLLELLEGYGFEPHMVHPLQCKAIASARLKNDKVDAATLAQLLRTDLLPEAWIAPPEVRQLRAMLRHRAQLVRLRTLLRNRIHAVLADHGYGRPAGCWSGPGRAWLASLELPAVSREVTGDALALTDALQQPIGRLDEEVRQRARADPRVKVLTQLPGVGMFTALVLLAEIGDITRFRSARKLASWAGLTPTVRGSDRTVHHGHISKQGPTWVRWVLCQAAQTAKRHPDFAPGYEALARRRGRKIATTAVARKLITRACHLLTDLADASAGGAPS

SEQ ID NO: 366725 - protein, 314 aa, unidentified
MAARVRKIILGVDVGKQTLDVWCRDGTGHQQIANERRAIARFLKGLSGPAQLAIEPTSSYHLEPAEQAHRLGHEVFLVNPRQLAHYRQAVGQRNKSDVSDAALLARYLEREGSELRRFKPLCRDQQHLWGLVKRRALVVNMGQQLRQSLRPVKLSAQGTERSLKALIGQIDRRIAALLCKLGWSEHAGRLRTIPGVGPVNAAALVAAYHRGEFRNADRFIAFLGMDVRIRQSGQYTGKCKLTKCGEPTLRRSLWCATQPARSYPPFDDYLKTQLAKGLSKTAAKVILARKLARIAFALLRNGTTFHQQEASQAP

SEQ ID NO: 366726 - protein, 342 aa, unidentified
MKSIYYIGLDVHKKTIAYCIKTISGKTVDQGVVRAERKALLEWLAGLPGPWMGAMEATLFTGWIYDFLKSHAVELKVAHPEMLKAITAAKKKNDRADAEKLVDLLRVNLLPECTMMSEELRELRRILRYRNMVVRTAVQMKNKMAGLMMEVGATYDKKRLYGRKYFNQLMERVEEVPDSVKELLQLSRSNLELFTAIQKKLIKALREKPLIRDRVQCLMSIDGVGEIMALTWVLEIGDPTRFSSSREAISYCGLCSAQRESAGKNHRGPLSKKRNKHLQTMLIEAAKLAPKWNPHLAALHEKELAKGNRNRATLAVARKLVEYLLAVDRRGTPFEEKQPQVA

SEQ ID NO: 366727 - protein, 418 aa, unidentified
MIDDVHWFVGIDWATQSHRVCLLDIAGRHVNERDFAHGGAGLTELRDWLLEKTKAAPGQIAVAIEVPHGPVVEVLLDHGFLVFAINPKQLDRFRDRFTVAGAKDDSRDAHVLGGALRTDRQAFRRLVVDDPVIIELREWSRMADELQQEHTRLANRVRQQLWRYYPQALELTDDVADDWFLALWQQVPTPATAAKASAGTITRILKDHRIRRLDAATVLQTLRQKPLFVAPGTTEAACAHIRTVAARLRLINQQIKEAHRALDGLCAKLEARTESPSGQNREQRDVTILRSWPGIGRIVLATLLTEAAEPLRARDYHALRALAGTAPVTRRSGKQCFVIRRLACNKRLQNAVHHWSRVAIQHDAAARRRYDALRRRGHGHARALRSVGDRLLYALCTTLTRQTPYNPNCQTAQITASL

SEQ ID NO: 366728 - protein, 430 aa, unidentified
MTKRNPTLADAVLVAIDMSKHRQEVLIERPEGGRRRRKTVMATKADYDRLASDLADIGRPITVGFEATGNYHRTLAHRLLSAGFELRLISSVALARTREALHNGWDKNDSKDAQVILHMLRIGATQRYVDPLAAGINDIQEMSKTHEAISKAKTQTWHRILTHYLPLYFPEIERFAGNSRSDWFLALLERFPTPGSMTVLGQEAFTHEAWSLVGRKVSKARLLNDIYETACASIALPVDEDSVAITMFRMVIAQARSLIRQRDEIERTAHALLSDNRDYQLLRMIPGIGPINALTILAEAGDLRRFAHHRQFLKFCGLDLATCQSGTFRGRTKLSKYGNARLRRTFWMAAQVAARQRDNSFRDKLGRYMEGHANDPDRRRKAMTALTAKMARVAHAVIKTGTEYRPFLERADTRWKDPSLLCREGATATL

SEQ ID NO: 366729 - protein, 420 aa, unidentified
MRNAGIHANSLLEVRRMYNAVGIDVPKGKSTVAVLQPGGTVIRKPFDVSHTSQNLNELADYLSSLDGTTKIVMECTGRYHEPMVKALSEAGLFVSIVNPHLIKNFGNNSLRKVKSDPADARKIARYTLDNWTELRQYSGMDNTRTQLKTLNSQFSFFMKQKVAAKANLIALLDNTYPGVNKLFDSPTREDGSEKWVDYAYSFWHADCVRKIGLKAFTERYKSFCKKHHYIFQQDKPEKLFNASKELVAVFPKEKTYKLLIQQSIQQLNLASEHVERLRREMNELASTLPEYSTVMGIYGVGKTYGPQLIAEIGDVSRFTHREALTAFAGVDPGVDESGQHKSKSNRASKVGSARLRKTLFQIMTTLLQNAPEADPVYRFLDKKRSQGKPYYVYMTAGANKFLRIYYGKVKECLRNLEQTE

SEQ ID NO: 366730 - protein, 395 aa, unidentified
MKHILSFDIAKGKSVYCFIDELRNVIIDASLIEHKKDEFDNLFNLIKDYPNLIVIMESTSVYHLPVETYFRSKGIDTVVINPKLVKQFKDTLNKSKTDKLDCFKIARCFLGTIDNFYQKQDEYFMYSPLARQYWSLIEGQTRLKNRYRQLIDIVFPEFVLIFNDLYDDLALNFIHDFPHPVLFVNRRIDYLMNYLKEKNGTTQAYRFKNKVLKMKEFASNSLCFVAFDSYQVQNLVQVIEMIQYHKSEINKIKKQLINDMKDKELFKIINSIPGFGEFSTALFLAEVGDITRFDDKYQFISFIGIDSVTSQSGVSAYHGPISKTGCKFGRTILFNIVTTILQISAHTDKTNPIYLFFRKKQSEGKHHYKCIIACETKLCKIIYKLCSSNCLYENK

SEQ ID NO: 366731 - protein, 438 aa, unidentified
MPTSNADLAEPSALPCSSVLPPGEYAALLGLDWGDQRHALALRPRGLKAPPEELLLEHSAENLHQWLEGLGERFGHQPVAVAVEASKGAVVAALLEHPWLVIYPIHPATSRRFSTAFTPSRAKDDAPDARTLLELLEHHRARLRALEPQEQETRRVALLVEARRKMVDRRTLLTNQLKSLLKNYYPQALTLAGENLSAPMALGFLERWPQLSTLQQSRPQTLRSFYFKHHVRSEELIHARLLLLQSARALCTDRALCEVSILQLRVLVAEVRTLNIHIAGIEKEIASAFAAHPDANIFGNLPGAGKAMAPRLCVLFGVDRRRWASAAELQKYYGIAPVSEKSGKQHRVHWRWNAPVFARQTLVEWAGLSVKACPWAKAYYLQQKQRQKGHSAILRSLAFKWLRILWRCWMERKPYDDALYLRQLQRRNAPLLTFLSVS

SEQ ID NO: 366732 - protein, 373 aa, unidentified
MPKYSTAFGMDVHLRSTTVCALDADTGEAVTRRFPGNPWGEIAGWMDGFPGPSLAAYESGYLGFAPQRELAGLGVECVVAAVSKIPRSAADSASKNDRNDAARMAKAILAHDISPVWVPSPEVEGIRDLAGAYDGATARLATAKQRLLAFLARRGFVYGGTTPAGNPRKYWTYDFLRWLDKVRPEDDGGVRTLAALRNEVEAAAEARSDLLSEYRAAVDASPIAAEVAALQSIKGCAFALAAAFSAEVGDFTRFRSGRQVTAYFGLAPSQRSSGDSVRLGGISGAGNALVRKLAVEGSWCYAAARHQPKLMPRDTGVPLEIRVHGRKGSERLLRRREEMLARGMPAAKANAATAAELVRWLWALGMMCREGAE

SEQ ID NO: 366733 - protein, 471 aa, unidentified
MPRRKSPSLPPDPATAALLQTLHPHAAGIDVGATELWVCVPPSAVAAPAAPSVLAVLPPYVRRFGAFTADLHAIAAWLRQCQVTTVAMESTGVYWIPLYDLLESAGFQVLLVDPRQVQRAPNRPKTDVHDCQWIQRLHSLGLLTAAFRPEEPIRVWRAYQRHRATLIEDAGRHLQRIEKALEQMNVKLPEVVSDITGVTGMGIVRAIVRGERDPKALARLRDHRCKASAAMIARALQGTWQPEHLFALQQSLALYDYYHEQIQACDRVIEAHLQELALPEVPPLEPTRRVRRRRDNEVTFDARQRLHHMAGVDLTAIEGIEESTALVVLSEIGTDMSRWPSEKHFGSWLGLAPNPKKSGGKVKSSATRPGVNRAAQALRLAAKNLQRSKSALGAFFRRIAARRGLAKAITATAYKLARIVYALLKHGTAYVAQGLAAYETAYRERVVRQVKRKAAELGLVVVEPDAVGQPS

SEQ ID NO: 366734 - protein, 337 aa, unidentified
MIVMGLDQHRGQITAEWIETETGEVSRARVSPAHREPVRRFLSRFRGRELEVALEATTGWRFVVEELRAIGAGVHLAEPAETAARRGSKKRAKSDRTDARHLRELLMVARLPESWIPPDHLLDLRARVRLRHTLADQRGEWQQRIQAVLYHHGCPQRRRLMTRDGREWLAEQALPETAREQVTVAIAMIDALDFQLAPIEKELRAYARRQPGCRAIMGHYAIGELTAVTILAELGDCRRFSSSRHAVRYSGLDITVHQSDQRRAPGHLSRQGPPALRWALFEAAQVARRTGSPDRDYYTQAAERLGSNRACLAIARKLLKRSYHTLRELGEEALQPA

SEQ ID NO: 366735 - protein, 409 aa, unidentified
MYDKTKYIYVGLDLHKEQHTAVIMDCFNEKLGEITFQNKPSEFGKLITKCKKYCTDGKGIVFALENSYGYGRALAAWLIERGHIVKDVNPALSYAYRKSVPQYKKNDSYDAQCVARVAINELNKLPDAMPEDMYWTLSQLVNRRANLKTHHIRLKNQLHEQVCVAYPSYKQFFQDIGRPTALYFWEHYPSPRLLRGKTVEELAEELIPVSHNQFSTRKCQKILDAVKSDGDTTRDYQPERDEITRGLVRDVRHYVNQLEEVDKAIANFLPRFGCTLNTIPGVSNTTVAKLLSEIGDIRRFPNANKLANFAGIAPVNFSSSGKGDDKPSKQGNRRLQGTIYFLAIQMIQLSSKGLPRNPAFYAYYQRQLARGKTKPQALILISRRLISIIYGMLKNKTEYRMPKVPENLN

SEQ ID NO: 366736 - protein, 321 aa, unidentified
MSRILVGVDVCKDFLDAYARPAALHQRFANTPAGIEQLVAWVRTVAPERVVFESTGPYQKAAVGALLAAGLPAVVVNARQVRDFAKGTGQLAKTDTIDAAILAHFGEVVATVVRPLPSKDVLEFRDLCDRRGQLVRMLAAEKNHRHAARGAAAKVLKNIDKHIAFLERQIEDLEERMDGIVSASEAFKAKDELLQSIVGIGPQVSRTLLVHLPELGQGSRQTIAALVGLAPFADDSGTSSRIRHIRGGRAKVRIALYQAAVAAIRYCATMKAFYAALKARGKATKVALIAVARKLLVLANALLRDGTRYQPRTNSVCPKIA

SEQ ID NO: 366737 - protein, 391 aa, unidentified
MTYFIGLDIAKHKHDCFIMNEYGEVIRDSFSFTNDAIGFGSLLDVLKALDPVQEKRIGLEATGHYGTNLKIFLEENEYSFMEINPILIARFSKATTLRRTKTDKIDARLIALFLSTCNYKPYPLKSYHVRTMKSLCRMRESLVKERSLHLVKITNVLDLLFPEFKPFFKGSLKSSTALYLLDNYGVPSKIARMNCDSYNKMSSVLRKTISYARFLELKQLAKETVGNEDGILTFELELYLELFKELDSKISEVESKILEEYGNMNCHIHTIPGIGMISAAGIFSEVGNFDKFNNADQLLAFAGLDPSRCQSGESDYNGHMVKHGSSYLRQYLMNCAEMQLVHNPKMYEYYLKKKNEGKAHRVALSHVARRLVRIIFSLEKNDADFDMNKMR

SEQ ID NO: 366738 - protein, 361 aa, unidentified
MHATTVAVDLAKSVFQLAVADEHWRIVETQRLTRTQFERWFANRDVSLVIMEACGSAHHWGRWLNGLGIEVRLLPAQYIRAYVKRNKTDAADAAALLEAARASDIRPVRVKSVEQQALQGMHRIRSLWMGTRTSRINALRGFCREFGIAIPVGARNGIEAISRVLADPGTAVPDLIRGTAKLLIEEIRLLEARIAQLERELAALARLSPACTTLLSIPGIGLLTATALVAATSGDVSHFKDARHFSSWFGLTPKEYSSGNNRYLGHISKKGDRYLRMLLTHGARSVLRAAKVAEGAGKPVCGVRRWALDVQNRSNHNKAACALANKLARICYATLRDKEPFGEQTVRLSKKIKRESFVMPA

SEQ ID NO: 366739 - protein, 400 aa, unidentified
MDDIDDVGVFLGLDVGKSAHHGHGLTPAGKKVLDKQLPNSEPKLRAVFDKLAAKFGTVLVVVDQPASIGALPLTVARAAGCKVAYLPGLSMRRIADLYPGEAKTDAKDAAVIADAARSMPHTLRSLQLTDEITAELTVLVGFDQDLAAEATRTSNRIRGLLTQFHPSLERVLGPRLDHPAVTWMLERYGSPAALRKAGRRRLVEVIRPKAPRMAQRLIDEVFDALDEQTVVVPGTGTLDLVIPSLARSLTAVHEQRRALEAQIGQLLEAHPLSAVLTSIPGVAVRTAATLLVTVGDATSFPTAAHLASYAGLAPTTKSSGTSIHGEHAPRGGNRQLKRAMFLSAFAALHDPASRTYYDRCRARGKTHTQALLRLARQRINVLFAMLRDGTFYEPRTPRLA

SEQ ID NO: 366740 - protein, 412 aa, unidentified
MDVIYPRCCGLDVHKKTVVACCILSTEGRKPVKETRTFRTMTSALLAMADWLQEKGCTHVAMESTGVYWRPVFNLLEGQFELLVVNAQHIKAVPGRKTDIKDAAWIAELLRHGLLRGSFIPSKPQRELRELTRYRSTLVQERARTLNRLQAVLEDANLKLASVVTDIYGVSARAMLEAILAGERDVETLADLARGRLRTKRDQLKEALEGRVTAHHSFLLTEHLSMLEYLDEAIARVSDEIDQRLTADHEAIALLDTIPGVGQRAAEILIAEIGTDMSRFPSAKHLASWAGMCPGNHESGGKRLSGKTRKGSRWLRQILVEIAHVASKTKNTYLAAQYRRIAARRGKKRALIAVGHTILTIVYTMLTRKQPYQDLGAAYFDQREQHRVERRLVQRLERLGYEVALHPRALAS

SEQ ID NO: 366741 - protein, 369 aa, unidentified
MEKYSEVFVAFDVAKKKHAVAIAEGGRSGEVRFLGEVENNPLPIERTIKRLADRYDRLHVCFEAGPTGYGLYRQIEALGHDCMVVAPALVPKRAGERVKTNRRDGVTLARLDRAGELTGVWTPDVAHEAVRDLVRAREAAGDDLRRKRQQALSFLLRHSRIYRGGGHWTLAHRRWLAGQKFEHAAQQIVFQEGIDAIEDAIQRLRRIEKQLAVIVPDWSMAPVVAAYQAMGGASFLVAVTFAAEIGDVRRFDTPRQLMSFLGLVPAESSTGDTVRRKGLTLAGNRRARRALVEAAWTYRYPARVSETLRARLEGLPKPVRDIAWKAQVRLCARYRRLSATGKKAPVVVAAIAREMAAFLWAIGREVAPA

SEQ ID NO: 366742 - protein, 362 aa, unidentified
MTINVGVDLHKTQFTVFVRRGDGTHGQYATTEEGFQEFFSELRAIRKRNDHVKIGVESTGNTRYFKNRMEKEGFEVRVINTLKFKVVNESVKKTDRHDAATIAEFLEKDMLPESRLCSETSEQLRRLLKVRTTLVRTIVTVKNQIHGLLTGMGMQDSKASLQSKRGRQRILDALAGADNGLVVQPLFETIDRLEENVKIIERELEVLTANDRAVELLQTIPGCGPVTAWTIRAFTDDIRRFDSFKKYSAYAGLVPWVQCSNLTEHYGRITKRGPEELRTALVQLVLGMRRSKKTLSWRIMERYSSMKREKGSGKSIIATARKLSRIIWCMLTEDVPFDSSLMVDKRLNRTAMSMKAKLQETA

SEQ ID NO: 366743 - protein, 387 aa, unidentified
MTLPNDLSRCLADFDPHTTLIAVVELSLSSWLIAGLVPGIERNPLKKMEPDPAGLQRLLEKWREEAIKAGSAITRVAIAFEAGRDGFWLARWLGARGIEAHVIHSSSVAVSREHRRAQTDRLDTAMLMRVFVGWLRGERGHCSMVAVPSMEEEDARRPNRERENLVGERTRIINRMKGALARLGIRGFKPELRKAPKRLDSLLTPEGTAIPPNTLEEIRRDLARLVLVREQIDVIEKARLAHLASAPESGPHAMVRRLASILGLGIETADKLVNEVLSRNLRDRRAVARYAGLTGSPDESGKKRREKGLAKAGNARVRRGLIQLAWRFLLFQKESALVLWFRARTEGPAAGRKTKFIVAFARKLLIALWRMVTIGEIPAGVVLRPAT

SEQ ID NO: 366744 - protein, 311 aa, unidentified
MNTYVGIDVAKRFFDLYDLATEKHQRFDHTPVGISACITSLTACTPALIVMESTGGYETNLAVALSEAGLPVAVVNPKRVRDFARATGRLAKTDKIDARIIALYAAMLQPPARGVWDEHTRTIKALVARRRQLVDMQTAERNRLEHLGDRAVAQSIAAVSKTLARELATVERKLREQIARTPELKQKAEQLTSVPGIGETTALMLIAEVPELGSLNRRKIAALIGVAPINRDSGTFRGKRMTGGGRREVRARLFMPTIVATRHNPVIREFYQRLLASGKKKMTALVAAMRKLITMLNAMLAKNQLWNPKYA

SEQ ID NO: 366745 - protein, 372 aa, unidentified
MQTVNRRETLFVGVDVHKDTHTAVGLSPFGEKVFEMTIGNETEDFISLVEKTKVEAEKAGLVPSFGMEDVHSWGERLSSFLVEEQLPVRAVAPILVDHRRQKTTHPEKNDSLDAQGVAEVMIQRIDTLPVYKLTEEAQKAKQIRELSLEREWLVKERSRLKNQLHILLHRIHNTGYRMKFKDTFTKKALRYWSRSIPKNTDTILAQRTKRALRRILDLREEIQEIEKELTAMMKENQQTLPTASGCGTVIAAEIIGEIGNINRFHSPGALAKYAGCAPREHSSGKTIRWRKTRSGNRRLNRAFHRMALSQISRSGNDAARAYFKRKVSEGKTKAQALVCLRRQLVNVVWMMMKHKTEYRLPVGEAGYPQKND

SEQ ID NO: 366746 - protein, 340 aa, unidentified
MTITTVGIDLAKNVFAVHGVDQNGRTVLVKPKVSRAALPELIASLPPCVIGMEACSGAHYWARLFRQYGHEPRLMAAKFVSPYRMAGKSGKNDAADAQAICEAVRRPHMRFVPVKDESQQAMQCLHRTRQGFIEEKTATYNRLRGLISEFGVIAPQSADALRHMVSVQKSSLPLQVQQCVDDLMEHVDRIEANITEYDRILSHIAKTDHRSQRLMELKGVGPTTACALVASIGNAHDFKNGRQLAAWLGLTPSQYSSGGKSKLGRITKTGDSYLRTLLVQGARSVLIGAGKRTDSFSRWVCMLVERRGYWRAVVAIAAKNARLCWASLHYGDDFRLYSVN

SEQ ID NO: 366747 - protein, 337 aa, unidentified
MKNKKYFIGLDVHKKKTTYVVLDKIGNIILEGETATIYQDLFERLQPYLKSSMIGLEACTSYYTLYQNFLKNNYNIKVANTIQLRQLIAKNDKLDAKRLAEMLRLGTFPCSFIPDEKIQRMRSLVQVRHSLMEEKVRCNTRIQAFLDRNGIVMPPHKAFSKKWRQKLMQYMGSGEVSMELRHEYDHFVFLEKKTEQLDQELQGYACKNWTKEYHNLQSITGIGPVIACYAIAHILPIERFSSNRKLRRYAGVVPTCKQSGNKISRGRIPKTSSRKLLRWALIQAANTIGKTDTNLGRYYRRKKKQKKNAGIAKVAVASSLIDILYKVLTTKQPYNPN

SEQ ID NO: 366748 - protein, 401 aa, unidentified
MEGPIVSIDVSNGNSHYMCFIKNNKRFGKVKKIDHDIEGFKRLLEDIQKLEAETNEKVCAVFEATGVYTKPLERFLSKNSIKTYMINPLESARKRKEEIHNKKTDKLDPISISKVYYDKEEMMELKKKDETYNWLRKKNRLYEDQLNHLRKYKVTFQNQLSICFPGYLDLFKDGYSDIPMTILKKYPHPDLLKNKKAETVARYLEKNTCHTHKVSLEYALKIIEFAKKTYPGCEKDDVEVEIFKILLDKVIETQRECEKTLNEMITVASTLEEYRYISSIDGIGPNLAARIIAEIGDIEEFKSREALVAYAGLDPHIYQSGDQDGKHLKISKKGNKYLRCLLFLAVGCSIRGAKDNPVNRFYQKKKQQSNPLNSKAAKTACTAKLLKIIYGICKNKTTYER

SEQ ID NO: 366749 - protein, 344 aa, unidentified
MEKHTVVAVDIAKSVFDAAVSHEPGRVAERRRLSRKVFLLFFAQMPAATVVMEACGSAHFWARKLQELGHRVVLLPPHQVRPYVVRNKTDRTDAKGILEAYRNADIRPVPVKSVPQQVLVSLHRFRSGWLAARTAHINTLRGLLRELGLVIPLGAEKVLPEVMALIGDADSGIPDALRPVLAAACEEIQTLSQRIKMTERQIEAIAEQTPVVERLWSIPGIGLLIATALVAFVGDIQRFPSGRHFASYLGLTPREYSSGLRRRLGRISKRGDAYLRMLLIHGARSVLCHAKKGKEHDRLRTWVLDLERRVGHNKAAVALANKLARIAWAVWKNDRAFESLPKAA

SEQ ID NO: 366750 - protein, 465 aa, unidentified
MTKRGQRQARAQRSSKVSRNLTMLNPNAAGIDVGASEHYVAVPAERDEQPVRCFGAFTEDLHRLAQWLRQCGVRTVAMESTGVYWIPLYQILEDYGFAVKLVNARHVKHVPGRKSDVQDCQWLQQLESFGLLSGSFRPEAKICILRSYMRQRQMLISNASRHIQQMQKALTQMNLKLHQVISDLSGQTGMRIVRAILQGERDRLKLAALKDPHIKSSLSTIAKSLEGDYRAEHLFALRQAVELYDFHQQKIAECDQEILKEMQSLESRAAPGSVPPPPLKRKGRSRHNLIPYDSRAELYRIMGVDLTRIDGLNEGTVQLILSELGLDVCKKWPTEGQFSSWLGLSPNNEISGGKVLRRGTRKVVNRVANALRMCAESLLNSKSALGAYARRMRAKRGSQIAIGATANKLARLIYRTLTYGQEYTDIGQEKYETKYRENVIKSLQKRARHLGFQLVDLHPVSVRVP

SEQ ID NO: 366751 - protein, 364 aa, unidentified
MVASRPHPPEKEVRVITIGIDPHTRTHSAAALDEGGRVLAEITVGSDPPELDRLVRWVEGIGPERIVAVEGARGFGLALCRRLLAAGETVLDVAPALTASERRSGRKAGKDDRGDAVAVARIAMREPGLPRVSAHVIGSELKLLVDARDQLVAEATRTRNRLHALLLAIAPGYHQHVRDLTSSSALLIARRLAARARADDRVRSTLACAAITRLRSLAGEIDALEREITAALDQAAPANLLSICGVGPLMAAKILGEVRDVGRFSSVSAFASYSGTAPIPASSGTVIRHRLHRGGNRQLNRALHTVALTQARRDDRAKVFLTRKRTEGKTPREARRALKRHLASAVYRALLLDAEEARSAAILT

SEQ ID NO: 366752 - protein, 418 aa, unidentified
MNEEGNTRGTKRYLALDIHKHYCVIAGVDREGRIVLQAVRVEHADLEGWLKKNLLPTDHVVIESTTNAWHVYDLLVPLVEQVVVANPIKVKQIACARVKTDVRDTLILARLLAANLVPEVWVPPAHVREMRQLLSQRRQLVETHTQTVNRMHSVAHRHHLDHARGKRFNEKTTVWQKDKRLSKVEQFQLELEMENRAYIEKQISRIGKEVARMSHQKPWAQSMTYIMQLPGFGVITAMTVMAAIGEIQRFDSARHLTSYSGLTPGLEQSGTKYNEKGITKEGRKELRWALVEVAQRAVKSDPLWTRRFQELQKRMHRNQAIVAIARRLLELVWHVLTRRQPYRYFSQERIAYKYLTWAWQMDDETRDGLTRQQFTRYYLMHLGIGHDLTRIALDPKHPRKISSETELLALRPELDHIE

SEQ ID NO: 366753 - protein, 284 aa, unidentified
MGNVTTIGLDIAKNVFQVHGVDADGAAVVRQRLTRGRMLKFFAKLPPCLVGIEACATSHYWARELVTLGHDVKLMPAQYVKPYVKRGKNDAADAETICEAVTWPTMRFVGIKSPEQQSAMMLHRVRLILNRQGTQLSNAMRAHLAEFGITAPIGRNGIEQLLDVIADPTDERVPADARFCLEMLAAQLRIVKEQILENDRRILASARETELGRRLMEIPGVGPLLASAIVATVPDPAIFRSGRNLAAWIGVVPRQNSSGGKERLGGIYTWVLLSGLSGISCGRP

SEQ ID NO: 366754 - protein, 323 aa, unidentified
MTKVAIYVGVDVSKKTLDIAIKQPEGHYLHKKIGNDQQGFKNVFALLPPDCCVVMEATGSYYMPFACFLYRNNIFVSIVNPLAVNHFCKMRMSRAKTDKKDAAMIAEYGKSEMPRLWVPKEPHLIELQQLEGIVDNLTKQKTSITNQKEAFASSGQLTERVSEILERQLAYLASEIKSIENSMCEIGEQYHAELLTNLRTIPSIGKRTAIMLLIITDGFTRFENAKELVSYVGLCPRLYESGSSIKGKSRICKMGMSRMRQLLYLCAMSAIKVNGQCKAMFERLKQRGKNGKLALVAVASKLLRQAFAVGVGNIPYNTQIQSI

SEQ ID NO: 366755 - protein, 442 aa, unidentified
MSALAVLDARAAFVDVGSEKMHVSIGGGPPRVFGTVTSQLEALRDFLIEHQVRSVAMEATGVYWLPLYSVVEAAGLDVRMVDGRQTRHLPGRKSDMQDCQWGATLHAHGLLRAGFVPPAHIRRLQDYLRLRGDHVAAAGGHVQHMQKALERMNIKLHDVISSLTGASGLAVVRAILGGERDPAALLELCDVRIRKAKAERVVESLRGNWADEHLFALGQAVQSWDHYQAQIVDCDRRIAEVLARMPGGDAPAAGAEQPAKRRTQPGVNAPQIDNLRDLLERMCDGKDATTLPAHSEYTVLQLVGEVGTDLARWPTEKHFASWTGLAPGSAQSGKRRAAVKRRRNRAGQIFCVMARALARSKYIALGAYYRRMAARRGGLVANKALAHKLAILFWRVMVKGMDYVEQGLAHYEAQVLETRQRLLRKLAKQFGQQLVPIQANPA

SEQ ID NO: 366756 - protein, 360 aa, unidentified
MNKTNVEKLLGRLLETKSEKIKLGCDIHARDLAVAVQVDDARALRPQTMTAAQLLVLVRGLIAGGRQVHACYETGPCGYGLHDQLRAAGADAYVIVAEALADGRKQKTDKLDAAALCDKLDRYLRGNARAMTPVRVPSAEERQRRSESRLREPLKRSRHQWQARGRSLLLFNSHHVTGRWWSQARWSELVAILPAWLVEQLSVMREALLQLDQQERTLRTKLEAEAPRTRPKAIGALTWVLLLREICDWQRFKNRRQVSSYTGLCPGVQQSGRRKRDGSINRYGNPRVRALLIELVWRLARWQPDYPPVRALVTGIARGAARRKCAVAAARRLAVDLWRLATGQTTPQKLKLIVPAEVLG

SEQ ID NO: 366757 - protein, 339 aa, unidentified
MVVLIGIDPHKATHTAVAVDREETTLGKLTVKADRHQVERLLTWAVVFPDRQWAVESANGLGFLVAQQLVAAGEVVVDVPPTLAARVRVLGSGKTQKNDPNDALSTAIAALRAKRLRPVAAENHTAVLRLLADHHRDLVSLRTQAVCRLHALVRCVIPGGTGLRLSASRAAAVLRTVRPTNAVDVERKRLALGFVADIRRLDADMVTSKARIVDAVASSGTRLTELYGVGPVVAALVIGHSGDMKRFANRDHGASYNATAPIEASSGPRVRHRLNPQGNRRLNHAIHMIAIAQISHPSVGRTYFDRKVSEGKTTKEALRALKRHVSNAVYRQLLLDSER

SEQ ID NO: 366758 - protein, 422 aa, unidentified
MADSTLCVGGDIHQDELHLRATDKTDGQEVGQPLTVKNNRPGADQAIAHLVQLLTQHGYTHLEFGLEATGLFWLPFYVYLQQSPALMPFHPTWVCFNPKLVAKFKEGVTLSEIKDDDHDALAVAERLRFGHLPVSYVPSSEWLALRMLTRYRYRLSRQITQEKLRALTRVFLKASEWHRGQPFSDVWGATSATLLTEFTIAEIAAMSLPQLTDLIQEYGRKHFDDPQATARQVQRTLQNSFPVTPDLDVALTVVLQVAWTHIRDLEKLMRRLDREIAQRMEHIANPLLSVQGLGPVITAGILAEIADIHRFPDEPQLAKFVGLVWRKHASGQFVAEETRLAKTGNVYLRYYVIEGANLMRQHNLEYQAYYRRKFAEVPKHQHKRALVLTARKLVRLVFALLTKNQTYVRPQAMQSQEAAPVQ

SEQ ID NO: 366759 - protein, 325 aa, unidentified
MDKYSNYFGIDISKDVFDVMDDNGNHKQYPNNPTGFKQFTKQLPANSCCVMEATGVYHTCLADHLSKIGVFVSVVNPLVIKRYIQMNLRRIKTDKADAEMICKYAMQNELKAYQPESAYIRQSRIIQENINLLLKSRTMFKNRLHALEHKTGSSRGVLIQPLKMTVISLSRQVKKLEEELIRLIEVNEPELYARLQTIPGIGKSTATHLIVMSDGFRKFESAKQFSCFIGLSPVEKRSGSSVRGSSRISKQGNGTLRNLLFLCSFNACKSNKSCRELYERITAKGKSKKLALIAVANKLLKQSFAMARSGLDYDPAYRSVKPVMK

SEQ ID NO: 366760 - protein, 365 aa, unidentified
MYDATTTEGTKVTVGLDLGDRFCQVCVLDESGEVTEEGRVATKPEALHRRFSGQEPLRIVLEAGTHSPWVSRLLAECGHEVIVANPRKLRLIYQNDSKSDRVDAQYLARVGRLDPTLLAPLTHRGAETQADLALVRSRNALVRARTRLISHARGTCKSLGSRLPACASDVFARKAGSHVPEELTPALSRVLAVIAQLSEDIRALDHKIEEMARERYPETALLAQVPGVGTLTATVYVLTVEDPERFPRSRAVGSYLGLRPRQADSGTLSPQLRITTAGDEHLRWLLVGAAHYILGPFGLDSDLRRWGLKLAEQGGRRGKKRAVVAVARKLSVLLLRLWVTGEVYEPLRNARRRGELMTAPDLVQG

SEQ ID NO: 366761 - protein, 408 aa, unidentified
MNAVGIDVSKGKSMVAALRPMGEVALLPQEFLHTEVGLEQMAYAIVALGEDTRVIMEATGRYHEPIAAALHEYGIYVCVLNPLFIKQSGGGSIRKVKTDKADAMKIAKYGLDNWVELREYTPMDTVRQQLKLCSRQYNLYMKTVVSLQNNLISLTDKTFPGVNELFSSPERADGHQKWVDFVMTFYHCDCICRVSENAFAERYQKWCKRKGYHFSAEKAQDVYLGSCGHFTTLPKNDNTKLLITTAAQQLLAGKMTLAALRTEMTRLAKQLPEYDIVRAMYGVGETTAVQLMAEIGDVRRFPRRSSIVGFAGVDPAVDQSGKHSAKSVPTTKRGSPHLRKTLYQIVCTYLKKSPVDEPVYQFLDKKRSEGKPYFVYMTAAQNKFLRIYYARVKECLEAFDAQQDTSQR

SEQ ID NO: 366762 - protein, 338 aa, unidentified
MYYTGIDLHKKTSYITTVDEQGQVRARRNLPNQLPVILNYFSALAHPTQVVIESMGSWYWLYDALSEAGHAVVISNPCKTKAIASAKIKNDKIDSHMLAQLLRAELIAPVHVSRLETRQLKELLRHRNKLVNDARRMKNRIHILLMKNNIQQPFSDLFGARGIEYLRQLLLPEAYQAQLNVYLSIYLQLGQQIEPLTKQVQQLATQHPMAKLLMSIPSIGPIVAMTFVAEIEDITRFASYRKLSAYAGLVPSLDSSAGKDRRGRITKQGSKYLRTALVEAAQCVARLRNCRLNAYFRKRIVRSGYAKAVTATAHKILQIAYYVLKNQQPYQEQYAARA

SEQ ID NO: 366763 - protein, 394 aa, unidentified
MKLIGIDIGKNKHFFCVMDQQTGEIISQPVSFSNDKEGFDFLVQKIKSYPKDSILIGMEDTGHYHFALLKYLLDLQYTVALINPKTTDFNRKMQGGITKNDKLDTINICDVLDTPERKKQYRITKVNSFDLYEQKQLTRHHHNLKEEENVYKNRLQKCIDIVFPEFNKLFNSKYGIVYMNILKMFGSAENIANTDIRTIRKCFEIEGRGNRISLTPERLKECARSSIGISSSAEVIQIKHLTAQIELIEEQLTEIDKKIEEFSIQNNSPILSIPGISHSSGTSILAELGDISNYSKPSQIIKFAGVAPLHYESSQFNAQHTAITKKGSKYLRKTLYQIILPVIRHNPVFNKYYQLKISQGKGHRCAQGHCVRKLLRIIYHLLKTNQQFDPQLLR

SEQ ID NO: 366764 - protein, 349 aa, unidentified
MPEPRLSYTGERVYVGIDVHKATYAVVCVCQQRIVKTATVPADPAQFAASVLRWFPGATLASAYEAGFSGFVLHRVLAAAGITNIVVNPASVAVAANDRVKTDRRDAKKLAVDLADGRLRGISIPTEAEELARLLPRTRAQIVEHRATIARQIKAKLYQFGLIPPASRRRISSRYLRELAACSLPAELHASLALLADQWRFATRQLLEVRRLLRDQATAQAELETVYRSAPGIGAVVARTLATELGDMSRFANERALFSYTGLTPSEYSSGASIRRGHISRQGASRLRHVLVETAWRALPRDPILQAIFDRIAATRGKQRAIVAIARRLIGRIRACFRHGTTYAVGTAG

SEQ ID NO: 366765 - protein, 443 aa, unidentified
MHVVHMRCAGLDVHKKSVVAAVRLLSTDAILTTHVRTFGTTTKALLDLVAWLLTFEVTHVAMESTGEFWKPIYNLLEGSLEVLVVNAAHIKHVPGRKTDVKDAEWIAELLAHGLLRPSFVPPAPQRALRDLTRQRTHLIQERASVVNRMQKVLEWANIKLASVVTDITGVSARAMLQALVEGQTDVTALAELAKGRLRTKQAELEQALRGSLQPHHAFMLAQHLALIDVFDEQIAAFDARIDQAIEHTRPSPPPPDGRGEPDQEHSGSEAASAPEGSWAASVIVDAIPGIGERIAEVIVAELGTDMNRFPSQAHVSSWAGLAPGQHESAGKRKSTRIRDGNRYLRSALVQAAWAAVKKSESSLAGFYRGVAARRGKKKAIIALAHKILVIIYTLLKTGQVYQERGATALDDRQKERLLARMQRRLEKLGYKVMLEPIAATATT

SEQ ID NO: 366766 - protein, 406 aa, unidentified
MELVPIHQRVIGLDIHQAQITACAIIEESGGETRIEQRQFGAFKRDRRELAVWAAALAPDEVVMESTGIYWKSPYAALEAVGIRATVVNARHVKQVPGRKTDVGDAQWLATLARAGLLRGSFVPPAKLRELRLIARQRQKLVGLLSSEKNRMHKVLTDAGIRLGVVVSDIQGQSARAMIKGILRGQAPHEVLQLASRRLKASREELHDALQGELTASHVFVLDELLRHIEELEARIARFDARLLHELAREHHALALLQTLPGVDTIGAAMLLVEIGSDMSVFGNPDRLASWVGLCPGNNESAGKRKSGRVRKGNPYVRRLLCEFAHAASRTKSAFQAKFQSLIVRRGYKRAIVALAHKMLRTIFFMLKRGDYYRDSATHYEQLSVQRNASRWIKALTRFGFIPAAA

SEQ ID NO: 366767 - protein, 340 aa, unidentified
MRMIGCDLHAAQERIAMLDDDTGEVVERTLKHEGDQVREFYAALPAPVVVGIEATGSMGWFLRLMEELAIECRVGHPTAIRKAETRRQKHDRRDAALLLQLLAEDRFPAIWMPSTEYRDLRSLLLHRHQWVRMRTRVQNALHAIVLAHGVRRGHTLWNRDGQALLASLPLPPHTADRRSELQALYQHLQAHIDRLDDRVEHVANERARATLLMTHPGVGPVTALATEIFIGDPARFLDGKALASYVGMIPREYSSGKRQRLGALSKQGNPFLRFLWCEAAAHAVRRDPDLQRFYRRKVVQKGFAKARVAAARKLGIRLWIMLRDQIDYTEFCRRGLARQS

SEQ ID NO: 366768 - protein, 388 aa, unidentified
MSYYIGLDISDKTTFICVVDQEGEIVYETNTLTDLKYINLEFQKLEFKIEAIGIETGGLSNWLVGSLRKLGWNVLCLDAFKMSKLISMNINKTDKNDARMIAEAVRINCFSNIQMKVHIRSEDARSLRCLIKAREYFVQSRTGLYHHIRGMLRDFGVLMPSAKPEAFCNEVKKVLKEIPSCVKVSVFSFLKTYETLTKEINDLTKTLEAIAKQNEDVQRLTDIPGVGKITALYFLTIIDDPKRFENSKDVGAYLGLTPLQYSSGQSEKQCGISKRGDKTMRYLLYECSTALLFRTNKTCNLKKWGLKKFKKKGVKKVVAAVARKLAIRMHRIFLTKQPYIEKAPELKHRPKRVFTTQDLEKLVERSKATGHLDVKSINQFEELLRKEA

SEQ ID NO: 366769 - protein, 399 aa, unidentified
MIYVGIDVAKNKHDCCILDSEGKVVSTFTFENSKSGFEKLISSITRFSKSKNYVDVKIGLESTGCYSLNITNYLNQKRLSVKVFNPLLVNLRRKAESLRKTKTDKSDCRFLASMLFSEESEPYLQPLLPISELKILTRNRSRLIHMRSKLKQGITRLIDILFPELPSLVYSLHQKSTYAMLLEYPMARAISQAHIVKLTNLLLDNSKGKYGREKALQLRELASNSIGFDSIATGFELKQTIRLIQNIDEEIAMLDAEIKSIMDDIDSPILSIPGIGYTLGAIILSEIGDIRNFSNPAKLLKFAGLEPSVYESGKYRASDTPMVKRGSSYLRWALLQAARLIAMHNPTFRAYQTKKRAEGKHFYVVQSHMAKKLMRIIHKLLITNTAFDSEVIAVKNVAA

SEQ ID NO: 366770 - protein, 339 aa, unidentified
MTEISRVGIDLAKNVFEVHAVNAEEHVVVRRPLRRNQVLTWFARLPPCLIGMEACGTANHWARELAALGHTVRLIPPSYAKAYVRRNKNDAADAAAICEAVSRPSMRFVPVKTVAQQAEALTHKACELLMKQRTMAMNSLRSLMAEFGVVVPQGPQHVGKLGLILADPEDTRIPDLARPALNTLANILAALEQQIETLDKAVKVQARHNATARRLDTIPGFGPILSSAIAAIVTDPRHFDSGRDFAASLGLVPRQDSSGGKLNLGPISKRGNGYLRRLLVNGATAVLNGKNARNDPWRAKLLDSKPRKLAAVALANKMARIAWAVMTRQEDFRPRVTAA

SEQ ID NO: 366771 - protein, 429 aa, unidentified
MQIVYRRCGGMDVHKKSVVVCLLLIDESTGEERKQRRSFGTTTRALLELAAWLKRWGVEMVAMESTGVYWKPVWNVLEEELGAECQLMLVNARHFKQVPGRKTDQKDAEWLAELAQHGLVRSSFVPPKATRELRDLTRARATLTEDHTAVANRLQKLLEEANIKLSSVASNTLGVSGRRILKELAKGNRDAGELAELALRRLREKIPQLREALEGRMSAHQQQMLNDYLTQLEFLEQQVEELDGRIEAHLIATGQIKQVELLDTIPGVNLVVGATMVAELGVDMKQFPDADHACSWAGMCPGNHISAGKRYSGRTNKGNVWLRRALCQASWAAGKSKKTYLSEQYRRWKGRRGKKRGIVALGHQILEIAYTMLKTGTAYHEWKPAERQTKERRSAKSRGRNWQADINRSIEVLHSLGYQVTAPSATPPI

SEQ ID NO: 366772 - protein, 422 aa, unidentified
MVQVGTTNQKKEVNKMISIGIDIAKEKFTVCALEQGSKIIRKPFDINLKKTKVEEFLKKLDSLNEEVKIVMEATGKYHLPILYELKDNGYFVTVVNPLKMKQFCRALNFRKSKNDNIDSIQIAEYGLMYWKELQEYKVDAESFRVLKELNRSYQHYMDLRINQMNFIDQTISQTFPGIKKLILHASGDFSKDKLLDFLEKWWHKNLVLEKPEDKFIEDFKNWAKEKRYHPNADKAKSIYKLAEESISTQPSNSSYIKTSIQEGIELIKHINQILHTILSQMIEIAEPLEEYQEAKKFSGISDKLAVQITAEFGDLSKFKNKKSLISFVGIDSPPYESGNFKADQRKITKRGNAILRKVGYQAMKCMMSVKDPENDIYLYMLKKENDGKAKKVCKFAGLNKFLRIYYAKVIASKQEKMLLKTA

SEQ ID NO: 366773 - protein, 415 aa, unidentified
MKVVFPTCCGVDVHKTFVVATIITTPADSLQPHYQKKRFSTFNSDLNRFADWLLEHNCLDVCMESTGKYWVPVFNILEKRGIRVVIANPKWVKAVKGNKDDTKDSKWIGDLFRIGLVKSSFIPDLNIRILREFTRYRYKLVSMKSSEKNRFQNAFTVCNVALDSVVSDMFGKSATAITDYLTSDESFDPEHCVSLLQRSLKKKAEQVLESIEGFSIASEQKTRIKIVREHYDFIEKLIAKVDTCVNEMVAKYEGEINLLCTIPGIDRRSAITIISEIGTDMSQFGSSKRLCCWAGLTPGNNESAGKKKSVRISRAGVYLKPALVQVAHAAVKDNSHPYYKLKYERIAKRRGKKRAIIAIARMILTAIYSMFCTGEVWNPVDLFKVDMPEHLKEQQLAKAIKQATRFLEKQGLSVA

SEQ ID NO: 366774 - protein, 340 aa, unidentified
MSLHGGIDLHANNSVIVLINEQDEVIYRKRLPNALPTILEQLAPYHMQIKGLVVESTYNWYWLVDGLMEADYRVHLANPAAIQQYSGLKYTDDHSDARWLAHLLRLGVLPEGYIYPKAERAVRDLLRKRAHLVRQHTANVLSVQTILVRNTGARFSVKRLQELTKQELKSLLAEEPQVLAVTSSLAVLDCLRHQIKTLEKTVHKRLHHTPAYEQLLTVDGIGTILAQTITLETGAISRFPTVGNSASYCRCVDSTKISNGKRKGTGNVKNGHPYLAWASMEAAQFAMRFQPAAQRFYQRKLAQSRNNTVLARKAVAHKLARACYYMMRDLVPYEATKAFG

SEQ ID NO: 366775 - protein, 318 aa, unidentified
MGGVNAAIEVGKQQLVVQLGSQGEQFSEANEPRAIKRIAKRLFQAGCERVLIEGGSYQSVLIAGLRAAELPVVIVNPRRVREFARSIGQLAKTDKIDARILALYGEQTQPPLRELPDEQSQALRALWVRREQLIEMLVMEKNRLEHTAEKAKAVRHNLCSHIDYLRKQVKQADNDLDREVRNSALWDEYEMLNSVPGVGPVLSVALLSDLPELGRLNRGEIAALAGVAPFNCDSGTLRGQRRIDGGRSRLRRVLYIATVAAVRCNPVLKLFYLRLRAAGKPPKVALVAVARKLLTILNAMLKTKTAWRPPCPARPELT

SEQ ID NO: 366776 - protein, 356 aa, unidentified
MNAVGIDVSKGKSMVAALRPMGEVALLPREFLHTEVGLEQMAYAITTLGEDTRVIIEATGRYHEPVAAALHKYGIYVCVLNPLYIKQSGGGSIRKVKTDKADAMKIAKYGLDNWVDLREYTPMDTVRQQLKLCSRQYNLYMKTVVSLQNNLISLTDKTFPGVNELFSSPERADGHQKWVDFVMTFWHCDCICRVSEKAFTERYQKWCKRKGYHFSTEKALDLYAGSCGHFTTLPKNDNTKLLITTAAQQLLAGKMTLAALRAEMTRLAMQLPEYNTVRAMYGVGETTAAQLMAEIGDVRRFPRRSSIVGFAGVDPGVDDSGKHSAKSVPTTKTWLTASAENAVPDRLHLPEKSPSK

SEQ ID NO: 366777 - protein, 416 aa, unidentified
MHYQKVLKMPESIPYLSAGFDVGADFTWMSIMLPNGILIGKPFKIIHSDPQSRELAISKIKEAQEMYSLESRCFLESTGIYHIPLLCFLRDKGFDCAVINPIITKNSTNMNVRKLHNDKFDSKKAAKVGLDASLKASIVPDDAIIDLRNLVRDYYYFKDLQSAIVLKLHAELKVSFPAYLNVFSKVTTQTSLKLLEAYPLAADMLAAPKDELVEIIRSTARFGETYALARYDAICTAAKDAAVFGRALPSNALRIRLYIKMYREYQAHLDSILEELHQAVGKLKGTPDYDRISFIQTLHGVGFLSAVVLIAEMGAFDLFSSPKKLYAYFGLDPGVNDSGKFHGDRVHMSKRGSSLARRILHMVAINNLKVDKATKTPVNPVIYDYYTRKCASKKKERCCRGRHAQNLQHHFRYAPG

SEQ ID NO: 366778 - protein, 461 aa, unidentified
MTNKNKGQRTKKQKKKVHIAQHWQLINPNAAGVDVGSREHWAAIPPDREGVKVRRFGASTPDLEAMAEWLRSAGITSVAMEATGVYWIAVFQVLERHGFKVILVNAKQTKNVSGRKSDLLDCQWIQRLHTYGLLGGSFRPADPICVVRSLLRYQDELVTARGVQIQHMQKALLQMNLQLGHVISDISGESGLAIIGAILQGERNPLQLAALANKRIKSSRAAITKALIGDYRSEHLFVLKTAFELYHVYEGKIEGCFKELERELARLPDRVDVQAKPLPPKAKGKKIDESVRAVLYQKMGVDVTAIESIGASVGLTMLCEVGPDLSAFKTEKHFTSWLGLCPDNRISGGKVLSSRTRRVINRLSDALRLAATSLEHSQSALGGFYRRMKAKLGAAEAVTATAHKLARIIYRLIKHGEDYVRRGLEDYEKQFHERRLKSLKKQAQSFGFQLIKKQDLAVAVS

SEQ ID NO: 366779 - protein, 357 aa, unidentified
MCQSGVAKQPLEERRPQMNATTYGLDVAKRVFQMYWIDAQTGEIANRRFGRDELIAFLAQRPPGRVALEACGSAHWWARKIRALGHEVVLLHAQFIRPFVQTNKTDAADARAIWTAVQQPGMRTVAAKSEDQQTMLSLHRMRSLLVKFRTMQVNQLRGLLYEFGATFRAGRVAGLAEIRERMAELEDTLPRPIILNLQDQLRRVNAFEEDIDQLERRIGAWQKQEAACRAISEVPGIGRLTATALVATIGDARTFKSGREFAAFLGLVPRQHGTGGKVRLGSISKRGDPYLRTLLIHGARSVLCHAKVPTVWQKGIQERRPGNVVAVALANKMARIAWAILAHESAYEKNHVSVRPV

SEQ ID NO: 366780 - protein, 409 aa, unidentified
MLFVGDDWAEDHHDVEIVDETGRTLARRRFPEGLAGITRLHALIAEHLPEPAGPADPAPQVVVGIETERGPWAAALVAAGYRVFAINPMSTARYRERHSTSGAKSDAADAHLLAEIVRLDRAHHRQVAGDSALAEAVKLAARTHQSLVWDRTRQILRLRSALRESFPAALKAYNDLDAADTLQLLRLAPDPDQAARLTKRQVLAALARANRRNPEVVAEQIMAVLRAGELRQAPPVQAAFAAIVAAQVEVITTLNNQIDTLGEVVADHFGRHPDAELITSLPGLGVILAARVLGEFGDDPSRYVDAKARKAYAGTAPITRASGTKKVVMARYARNKRLGDALQQWAFCSMRGSSGAKAYYKELRTRKIGHQAALRQLANRWVGILHGCLKTGQPYNETLAWNHHTSAAA

SEQ ID NO: 366781 - protein, 352 aa, unidentified
MDKGNKLDFSGQHIYVGMDVHKKSWSVSIQTEQFEHKTFTQPPEVEKLTNYLQRTFPGATYHTVYEAGFSGFWLHDQLKEKGIDCMVVNPADVPTKDKERAGKTDRVDCRKLARGLRNGEIKGIYVPSRVKVEDRSLVRTRQSMVRKQTRCKNQIKSILFFYGITIPEESHWSRQFINWIESIRMERASGDFALKAHLEELKHLRQIIANLNRAILSLSRTEEYRADVLLLKSVPGISTLTAMIFLTELADISRFSSLDKLASYAGLVPDIKSSGETEYSTGITFRRNAALRGLLIESSWVAVRKDPALIMAFNKLSMRMKKTQAIVHIARKLLNRIRFVLKNRQKYVPAVV

SEQ ID NO: 366782 - protein, 430 aa, unidentified
MKSNTQNAKIEAITEKTLVLGIDVGSEMHYARAFDYRGIEYSKKPFKFSNTEAGFVTFKEWILDLKERHEKDKVVPGMEPTGHYWFNLGKFLQDNEMKPVLVNPHHVKKSKELDDNNPTKNDRKDPKVIAGLVREGRYMIPYLPEGVYADLRTASNIRFQLQAELTRIQNRISRWFNIYFPEYKTVYGKPDAKSGMLILKAAPLPEDILTLGIDGVNQIWRDAKLRAVGKARAKTLIEAAEHSVGSKEGAVSARMEIRMLLEDYESRNIRLQEVMALIEGLVKQIPMAEKLLEIKGVGIRTVSGFLAEVGDISRFNNPKELQKLAGLALVENSSGKHKGETTISRRGRKRLRYLLFEVAMSLVAKNPEFRELHNYYTTRRLNPLKKMQSLMAIAAKLIRVFYAMLTKGVDYDPKKMVSDIKRPAVYLQAA

SEQ ID NO: 366783 - protein, 340 aa, unidentified
MNKSLDFDPCGIEVSARTLVVRRRRPGSPDAVREFANTAAGHQALLRWLQSAGRALRVCLEATGLYGLDLALTLEAAGVALMVANPRAVRHFAQALMERSKTDRLDAEVLTEYAARLPFQPWRPPSPAALKLLAVARRLEDLTEMHAAEKNRLHAASISAALPSILRRDVQRSLQTLERAAQRLTRAAQEFIAADPLLTERYQLLLSIPGLGPTSALHVLAELLLLAPDLEVRQWVAYAGLDPRHYTSGSSVHKPARISKAGNKHLRRALYMPALVASQHDPHLGAFYQRLLARGKTKMQALVAVMRKLLHAIFGIFKHQLPYDGSKLFAPPIPQEVIAT

SEQ ID NO: 366784 - protein, 347 aa, unidentified
MKHSAGLDVSVKDTAICIVDEVGKVVRETKVVTEPEAIIALLTSAGLEYARVGLEAGPLSQWLVNELAEAGLPVICVETRHMKAVLTAQQVNKSDRNDARGIAQMMRVGLYKPVHVKTLASQQERMLLTTRKLLRDKLQDMENELRGTLRNFGLKVGVVSPGCFEARIRELVAGRLRLEMIVAPLLAVRRVLREQLAKLHKMVLDQVRRDPLCRRLMTVPGVGPIVALTFRATVDQAQRFARSKTVGAHFGLTPRRFQSGEMDYDGRVSKCGDAMMRTALYEAAQVLLTRTQRWSWLKAWAMQVARRRGAKKAIVALARRLAVVMHRMWIDGTEFHWRKETDAAAAA

SEQ ID NO: 366785 - protein, 355 aa, unidentified
MNQEKYIGMDVHQATISVAVMDSSGKLIMECILETKAATILEFIAGLRGTLSVTFEEGTSAAWLHDLLKPHVSHLVVCDPRRNALLKDGNKSDRIDARKLAELLHCNKLHAVYHGEHGVRTLKELGRSYLTITKDLTRVMSRIKALYRSWAIPCGGATVYSPRHRAEWLAKIPQAGVRLRAERLYQQLDLLQPVRQEARRELLVESHKHHAVKLLRQIPSIGPIRGALLVALLQTPHRFRTKRQLWAYSGFAVEIHDSGEYRYVRGKLQRNRERITVRGLNHNHNHDLKNLFKGAALSASTRPGPLCDFYGALLEKGVRPTMARLTLARKMAAITLTIWKKGVEFDAQQLNRQAA

SEQ ID NO: 366786 - protein, 320 aa, unidentified
MNSEQFVGIDVCKSHLDVAVYPSGQQERWDNNDSGIEQLIKFVKSLPVVLIVLEATGGYESVAASMLSAKALPVVVVNPRLVRNFAKATGKLAKTDQIDAHSIAHFASAVRPEQRQLKSEHMELLAALNTRRRQIISMLVAEKNRLHTAPKANQKNIGHHIKWLEKNLEQIDKDTQKHIRNSPIWCKDDDILRSYKGIGPVSSSSLLSDLPELGKLDSKKITALVGLAPFNCDSGQYRGRRRIWGGRSHVRKTLYMATQSAKRFNPQIKVFYDRLRDAGKPHKVAMTACMRKMLITLNAMLKNKTYWSQGYKSLDFEHGC

SEQ ID NO: 366787 - protein, 346 aa, unidentified
MENIALDVHKHYTWARVENSEGRELYASRLAHSRGCIKNFVQRWTPGSAVAVETVGNWYWVVDEIEAGGGKPQLVNARLAKLMMGSVNKSDKLDAKGLNRLQRTGTLPTVWIASSTVRDARELPRTRMVFSRQRTQLKNRVHATLGKYGYVVDEVSDAFGKRGREMIQELSTKLPLHTGRSLQRVLDQLDDVIENLRPIEADMIKVFAPCPQITLLQSLPGVGQILAVVIWTEIGSIERFGRAEQLASYSGLVAREHSSGGKFRYGPIRRDVNVYLKWAFVEAANSALLNAERCGYKHISQLYQRVKARRGHNRAKVAVARHLSEATFWMLKKGESYREPLLSTQP

SEQ ID NO: 366788 - protein, 313 aa, unidentified
MHKPSYIGLDISKSYIDLHQLPQERAARFEYAPEGIAKLLAFLKRRKPALIVIEATGGYESNVAAELSSAGLKVAVVNPRQVRNFARALGRLAKTDSIDAEVLARFAQDVRPEVRKLPDPEEITLKAFVARRRQLVAMLVAEKNRLSRVTSNSVIDSLKRTINFIQKQIDDLDTEIKSTIQNSPVWREKDDLLKSVPGIGDKTSCALLAQLPELGRLNRRQIASLVGVAPMNRDSGTLRGKRMITGGRKPVRNALFMAATAARRFNPTIKAFYLRLRAAGKNYKVALTACMRKLLVILNTMLKNQISFKQSFA

SEQ ID NO: 366789 - protein, 343 aa, unidentified
MEYYVGLDVSLKQTSICVVNQTGSIVQEGVVDSDREAIASFVRSRAPGTVRIGIETGPTTTWLWTELNRLGLPVICIDARHAKAVLKMQINKSDRNDAAGIARIMQTGWFKEVRVKDLDSHAIKALLASRALLVKIKRDLENQVRGLLKNLGLVIGRAKFNVFAVRAEALIEGRPELVAAVRPLLDARKAIERQVGDLDRKVHKLARHDAQVRRFMTAPGVGPITALCFKATIDDPTRFKRSRSVGAYIGLTTRRHASGEIDWSGRISKCGDAMLRMYLFEAAGVLLTRVPKWSGLKAWGAKLTKRNGLRKAKVAVARKLAVILHRMWIDGTEFNWSTKKAAA

SEQ ID NO: 366790 - protein, 431 aa, unidentified
MYPFDFISVGIDVGADFSWISILTPDHKTVVKPFKISHNDIKSLEKAVSTIKKVEELYSLEAHTFLESTGIYHLPLFYYLKESGFEVFILNPLITDSNKNSGIRKVKNDKSDAIRIAKTAYTENLKVSLVPSDLVLNLRTLVREYYYLVDHKTSYVNKLHKELRVCFPGYSKVFYDIAGKTSLAILKIYKTPQNIMNAPKDEIISLIANTSRRGTQYANEKYELLLKSACLSKSFGKYLSSAFEIIELNIDIIEIYKQKIECVLSSIKEYTVKHQNDTFIKQIHIVESINGVGFISAVTLMCEIGDFSAFKRPKQLYAYFGLDPSVKQSGKFIGTRVSMSKRGSRLARRVLFTVAKSSISSSSKGKAVNPILKEYYEKKKLSKPKLVALGAIMHKITNIIFAVLRDNKPFVIKTLDDHHNDYKNSKLSLVA

SEQ ID NO: 366791 - protein, 352 aa, unidentified
MRTSQKPAGIITTIGIDLGKNTFHLVGFDQRGVIILQQKVSRAQLERRLANIPRCLIGMEACSGSHHIGRQLAALGHDVRLIPAQYVKPFLKGHKNDYRDAEAIAEAVQRPTMHFVAIKTPEQMDLLALHRVRSRFVGQRTGVTNQIRGFLIERGITVRQGVAPLRKALPDILSSQTGALSPRMVSLIVDLVQDWRRLDERIAAVSAEIEALAQQDDSCQRLMTVPGIGPIISSAVVAAIGNGAGFQQGRDFGAWLGLVPRQESTGDRTILGKISKRGNKYLRTLFVQAAHVVLERRPSAARQGLWPWIERSSKRLHRNMLAIALANKLARIAWAVLARGRAYQPRIAANAA

SEQ ID NO: 366792 - protein, 412 aa, unidentified
MQVVHPVCCGIDVHAKMLVACLILANGEKKKRTFSTMTAELLQLRDWLVAVQCTHVAIESTGVYWKPVFNILEDALTVILINPEHVHALRGRKTDVKDAEWLADLLRHGLLQPSFIPPPVIRELRELTRYRESVVREQSAVANRIQKLLESGNLKLGQVASDALGVSGRMILQALAKGESDPRKLAALARGKLKEKSLALEQALDGRLTRNQRFVLGELLSRWEQLEAADARVTSKIDKYLQVNPKLARARELLDSIPGIGPRVAEVIMAEIGIEMASVFADAAHLASWAGICPGNKATGGKRLSGRTRKGNTYLRSALVQAAWGASLKKHCYLSSQFQRLLKRLGRKKALVAVGHSLLVIIFHVLQNDQTYTELGGDYFDRRHVEQQRDYYVRRLQMLGLKVTLEELPQAA

SEQ ID NO: 366793 - protein, 384 aa, unidentified
MDVHTSNYTLCSLDPGYGVEKDNYFAEVQFTNDFIKNVVNYVSNLKKKLKDCEFVCGYEAGCLGYSTYKDLTKVGIKCVIMAPSTMAVQKGGKKVKNDRRDARVIAQCLAYQTYKEVYVLSEHDEAVRGYLRMRDSHNKALKRIKQQIIAFCTGHGLFSPTKSNWTVAHLKWLKDLKFNDPVEQEILNEYLSSLTFLSDKIKAMDVRIEELASEKQYCENVKKLRCIKGIETNVALTLLAEIGDFNRFSKPTDFASYLGLIPGEQSSGDKVRGTGITKAGNSTLRRKLTESAKGYWRGRIGIKSATFKKLEKELPKEVTEYALKANTRLQRKFFNMTHVKGKNMNVAASACAREMACFVWGLITNHYDKAPAVPKTDEELLDLN

SEQ ID NO: 366794 - protein, 425 aa, unidentified
MNDDVMIAVDPHKASNTAAVLDPVTKTVIEAARFANTFDGYAQLTAFAARWSQRRWAVEGCYGAGRSLAQRLAADGEAVLDVPAKLAARVRVYSRGHGRKTDKDDAVSVGLAALDGTGVFPVTPDDATVSLRLLCDRREELTAQRTQAVCRLHRLLAELTPGGMRRELSANKAQALLARIRPADDVAAVRVRIARDHLADIRALDARIKYLGGQIAGLVDASGTGLTGLFGVGPVIAGRILAEVGEVARFATKDAFASYNGTAPIDASSGEQVRHRLSRAGNRRINHALHMMAVVQIRYPDTPGRRYYERKRREGKTPKEALRCLKRRLSDLVYHQLLADRHGTIGTCGSPTTQRPTRSTSTSPASRSHQAAPPCRPPRRPAPADSSRWTGKTAASSASRSSTPAPASTPTSSTKPKTTAKTAPS

SEQ ID NO: 366795 - protein, 387 aa, unidentified
MTKNKGRVVGLDVHPDSFAGAVVEGSDPAQARVLSSSTRVELEQLEQWALRHTSTEDRLVLEASGNVFAVAARLRTIGRKVEILDSHRAGKVGKVYCANDRVDAVKIARIYLSALSPIVWQPDAKTLERREIFSAYQAVVKESTRAKQQLRSMLNEHCVRLEKGFRLCHPNAIRRLVALREWTPARTMLLQQLHGTLVAARARRTLLRRHMAQEIVAEEALLRLTRLCGINLVTLYGVVAAVGDVRRFSHSKKLVAYFGLNPTVSQSGNFQGSGALKRHGRGALRALLIQSGKKLLEVNNPLQKWGLAVAARRGRNKAAVAVARKLCVALWHVLMGHTIGALERLDTLETKLSKFATELGPVALAAFGYNNKAEFVEKKLYVLRSYP

SEQ ID NO: 366796 - protein, 370 aa, unidentified
MGVCSTAFVGIDVSKARNAVAIADEGRQGEIRYLGEFPNTKDATRKLVKKLVSRNARLHFCYEAGPTGYGLYRWLRELEQDCIVVAPSMIPQRSGDRVKTNRRDAEGLARLLRAGELTSVWVPRETHEAIRDLVRVRHATSRDIISKRRQVSALLLKYGVSYPGKTTWGARHARWLSNINLDLPARNIAFGEMVNAVRDAEARLKRLEAVIEELMVDWELHDLVTALQALRGFQLIAAITIVSELGDLARFENPRQLMAFVGLVPSERSTGCVASRGGITKTGNSIVRKTLVESAWCYRHAPRVGAGKLAIQKHLSQPIIDLGWKAQVRLCGRYRKLTAAGKRNTVVVTAIARELAGFIWAIAQEVRADT

SEQ ID NO: 366797 - protein, 452 aa, unidentified
MLNTNCTHDLVIGLDRSDRKADLHFINTTTGETRSESLASSPENLRQWLLKLRQQHPKASVGICLEQPAGHLIPFLETYDWITLYPINPISLQKYRETFITSRARDDGKDAQYLAELLANHRDKLKAWQPQDSQTRLLQQLVAHRRAVVDERTALTNRLQALLKAYFPQALQLCGEDLWRPLATAFFLKWPTLMVLQKAKAADLKEFYYLNGSRSQKLIEQRLKLVEQAVPVSDEPALNQSFSLRVKLICRQLQDVVTTVKEFEKQIAQCFQQHPDREIFASLPGAGPVLAPRLLAAMGAERERFDSALSLQRYTGVAPVTKQSGKMCYIHRRYLCPKFDRQSFHEFAKESVLWSRWAAAYYLSQRSKSKPHHTAVRALAFKWQRIIWRCWQSHTPYKEEVYEAALRKSASKLLALFDQVDLGKNPVKNPAKPPSKSFLKRPKKILAPSPQR

SEQ ID NO: 366798 - protein, 348 aa, unidentified
MLYAGIDLHRKYLVVVVLDRGGAVVDERRLPNDAEVVRAYFGGQSEPVQAVVEAMGSWHWLYDVLTDAGIPITLAHPWKLRAIATAKLKNDQVDARMLAHLLRTGLIPAAYVAPPSVRTLRELLRHRAALVRIGTQLKNRVRALLAKRNVSLLGRSLMAKRTQQELAAVPLDAVARQEVTHCLALLDMVAQQVGELDAEIRRRASDDLQATLLMTVPGIGYYLALLIVAEVGEVERFHSTRKLASYAGLVPTTRSSGGHTYHGRITKQGSSWLRWAMIESAMYVARRPGPLRRFYERHRRRKGAKVARVALARKLLTQIYWMLRNEESYDAMVRRLEATGVRSNCNMA

SEQ ID NO: 366799 - protein, 345 aa, unidentified
MELHTIGIDLGKTVFHLVGLDLRGEVVVRKKFSRTQLLRFTANVHVGLIGMEACGGSHFLGRALREQRHEVRLIPAQYVKPYVKTNKSDYIDAEAIAEAVARPTMRFVPIKTDDQLDMQSLHRVRERWVMRRTAVINQIRGLLLERGITLRKGRHHVDAALPLILEDADANLSGAVRLLLTQLKLDLDQLSVRIDEADAVIQKTAHENEACRRLVAIPGIGPVTATALIAAIGNGGAFHKGREFAAWMGVVPREHSTGGQQKLLGISKRGNSYLRRLFVQGARAVLQQRTKQSSGLSAWLAQLTSRTHRNVAAVALANKLARIAWAVLAKNEQYRPSVVADVAAA

SEQ ID NO: 366800 - protein, 414 aa, unidentified
MKFAKDTSGIERYLAIDIHKEYSLVGGQNVRQEWVLQPRRIGMEKFREWAVVNLRAGDAVVLETTTNVWDIYDIVAPLVKYVVVAHAGGVRQIAEARVKTDKKDIERLLRLLIADIVPEVWVPPAHVRELRGMISYRNRLVKTSTMIRNRLQSLIHRHNLILPKGALTDQAWWEAQKISGLEKIQIRQELAMLEELARHKAEVDAELGRQSLGETWSKQAVRLLQLSGFGVVLSMTVLSAIGDVSRFESAKKLVGYAGLGAGVHDSGQEHHTKSITKEGRKELRWALVEAAWRAIRISPYWKEQFEKYLRRMRKPNQAIVVIARKLLVAIWHVLTKEETDIHVSEEDLAYKMLVLSWDLDEDVRMGLTYKQFAKYALMKLGVETDITRFVRKNVPRRLAPRDEVLARMKELGLA

SEQ ID NO: 366801 - protein, 405 aa, unidentified
MEIIIEKGCGLDVHKETVVACIMGTGIKKEIRTYTTVANDLLRLKEWIQEAGITHVAMESTGVYWKPVFNILEDHFEVILVNARHVKNVPGRKTDVQDSEWLCRLLRSGLVSGSFIPPRDIRELRDLTRHKRKLIQAMVAEKQRVEKVLEDANIKLSSIVSDTFGASGKRIVEELIKGELQAEEMAELSKGRLRQKREELKEALVGELREHHKFMIKVSLKHIRAMEKILSDIERKIQEKIGRHYKEEYALLQTIPGVKGEASTLIAEMGVDMERFPSEEHLSSWAGMSPGNNESGGKKKPGSTTYGNKCLKTMLTEFAWVASKTKDTYLRSKYHSLVGRRGKKKALVALGHKILIMCYHILKYRRPYKELGVDYLDKRRKDKIARSYIRRLHHLGYEVTLKEAA

SEQ ID NO: 366802 - protein, 340 aa, unidentified
MDNFIGLDAHSKSCTFVAINKDSEIIKEGKFATNERNLIDLVTRMEGKTSLIFEETNIAQWIYCVLNDKVDKLIVCHPAYLPRKSGPKNDYRDAAHLAIQLRAGNYTNVFHEDSPLMYLRTVINHYESAAVRLGLLKNNFKALLRSEGIAGDSSFLTSRNKSKLEEIKNPSRRLVAERIFDEMNQLEDNKKIWSDEFKANRLKLPLVENLSSIPGVGPVRAHTIAAYISTGSRFENKHKLWSYAKLIRHRDESDGYILRRRTPHGRSELKSAFMGAAQHVVISPKLTGLKEYYNHLLEVKGLDKRKANKALARKIAAISLVIMKKGTKYDDQLIRTTFNK

SEQ ID NO: 366803 - protein, 358 aa, unidentified
MDVSSEQARMTAGVDLGDRYSHLCLMDTQSGEITEEGRLCTSPEAFRRRFSSERPPMRIAIEAGTHSPWASRVLEECGHEVLVANARKLRLIYANKRKTDEIDAENLARLARLDPKLLYPLKHRGEDSQAHMAIIRSREALVSCRTQLVNHVRGAVKSFGARLPKCPARSFHKKAAEHIPEALWPALGPILEQIGSLTERIHQYDRKLETISKEHYPETDLLRQVEGIGPLTALTFVLTLEDPYRFEKSRSVGAYLGLVPARDQSGDRDPQKRISKEGDEMLRKLLVGSAHYILGPFGSDSDLRRHGQKIASRGGKNAKKRAAVAVARKLSVLLHSLWINAEVYEPLRNARTSAVRAA

SEQ ID NO: 366804 - protein, 448 aa, unidentified
MAPPFIKDGSNMAMRTRDEVFPNAAGIDVGASSHWVAVPPYLDDRPVRQFGVMTTDLHKLADWLIACGVDTVALESTGVFWIPIYDVLEQRGLSVSLVDARQVRNVPGRKSDVLDCQWLQKLMSFGLLRAAFRPSSQVCVMRAISRQREVLLTEQASWVQRMQKALVEMNIQLTEVLSDVMGTTGQAIIRAIVAGERDPQALARHRNSHVKASREAIAAALTGNWREEHLFVLSQALAVYDDHARHLQECDAKLQALLNARSSHNVDIGKKPRAGTKARAEFELRQMLANWAGVDLTRIPGIGVTTVMTLLSEVGPDLSRFETVKQFCAWLGLAPGTKISGGKVLSARTKFSANRVRQALKMAAQALSHSYSALGAFYKRLCARMDAPRANTAVAHKLARLVYFTLTRGSEFVEQGQARYEQQQRERSVAALRRRAAAMGFTIQSTAA

SEQ ID NO: 366805 - protein, 455 aa, unidentified
MPRRRPSTRPVTMPVLLPHAGGIDVGATDLYVCVPLDCDPQPIRRFGTFTEDLHTLADWLTQCGVTSVAMESTGVYWIPLYQILESRGFAVCLVNARHVKNVPGRKTDVQDCQWLQYLHSVGLLRASFRPPETVCAVRSLLRHRETLVQLAATHTQHMQKALNQMNLQLHHVLSDVTGVTGLAILEAILAGERDPQVLAQHRDGRIKASRETIAKALVGDYRPEHLFTLRQALASYRHYQRLIAECDGEVQRLLGAVASQVDLARQPLPPAPAGRRKPHRKSPSFDLRAELYRVLGTDLTQVPGLQTPTVHTLFAELGADLSAFPSDAHFASWLGLCPDNRISGGRILSVTTRPVKHRVAQALRLAAQSLCRSQSVLGDFFRRMRAKFGTPKAITATAHKLARIVYHLITTRQPYDERRLAAADAAHRRHSESRLRAQARALGFELVPAPEQAVS

SEQ ID NO: 366806 - protein, 400 aa, unidentified
MSTRLIVGVDPGRYGHGVVARTAGDTEVVRERVDNDAAAIDEVVTRVVGFAGGPGRALWVIEADGGDGAVLIGELMARGELVATLTPTEVAIRRKGRRQAHKSDLIDAEVCARIGREEQASLRQLVAIPEKVAEMRVLARYQDGLIRDRTRLINRLRFLLSQYWPEFLAARAFAAFDGDAVTALLVAFPTPSALRTQDPVELASFLARQRYRRRPLERAQQLLAAAQVGVRPQETVYGRLVAEVAGELAALKGRIGALDAEIRDRFLSRPEALIVLSLPGMSHRTGPRFLAEVGTLERFGSPDALAAYAGLTPTLWQSGRSSGTHFLSRRCNLHLRQALWSAALGSLKTPASRRFYDRKRAEGKSHHQAIIALARTKLRVLWAMLKSGTLFIPERALEAA

SEQ ID NO: 366807 - protein, 355 aa, unidentified
MKKYMGCDAHARYSVFVSVDEAGRASPPVRVNHGSRELRDYLATLEPETPIAVEASGGWYWFMDELEAAGMDARLVNPLEAKRRMGGKNKTDKLDAKGLAILCRNGTLPEVWIPPAELRDLRGLMRGRLALRSHTTVLKNRVHAALRRYGTLAGEPPSDLFSKKNRLRLSLAISGTPPETRLATLHEWELLDFVERHIGEMEARIRERIGKLGWIRLLKTMPGVGEILGATIHLEIGDVGRFPTAAHLASYAGLVPTVHASGGKSHHGPTSPQANHYLRWAFVEAAGCILMHRHRLADQYALHLYDRLKARKCHGKAAGAVARHLAESSWWILTRRKPYQQPHAHAAAMSSSKNG

SEQ ID NO: 366808 - protein, 379 aa, unidentified
MEGQKKDPPSVRHRRARVEMFSNHSQDRGSRMQVTTYGVDLAKRVFQVHWVELDSGEVKRKMLTRGEFGAFFARRAAGLVAMETCGSAHHWGRTLCALGHQVRLIPTQFVRPFVKSNKTDAADAQAIWEAAQRPEMRFVALKSELQQAVLGLHRQRQLLVKIRTMQANQARGLLYEFGVVVPRSWRALLMQAGPILADDSRREVPELIRGELRHQLEGLRDLTRRIEQLERSIGSYRQQDEQCRRIEAIPGVGPLSSTAVLASVGDARAFRSGRQFAAFLGLVPRQSGTGGRVRLLGISKRGDPYLRTLLIHGARAVVNHSSRPGRTAPPWLQGLLSRRPKNVAIVALANKMARTIWALLAHGREFDHRWGRALPVSVA

SEQ ID NO: 366809 - protein, 340 aa, unidentified
MTEITTIGLDLAKKVIQVHGADETGAAVLRKRLRRSEVLAFFTSLPRCLIGMEACATAHHWARELIVVGHEVRLMPPQYVKAYVKRNKNDRADAEAICEAVKRPSMRFVPVKTSEQQSALMMHRARDLLVRQRTMLVNALRGHLAELGLIQAQGLHRVAGLTAIVMDDTDERVPGMARQVLKVIAGQIGELQGRIAALEAQILAWHKSNPVSQRLATIPGIGPIIATAIVATVTDPSMFHSGREFAAWLGLVPRQNSTGGRAKLGGISKRGDGYLRRLLVSGAHTVLLRSKTAQADPWLISLLGRKPRLVAAVAVANKTARVAWAIMNRGDTYRRVAAAA

SEQ ID NO: 366810 - protein, 396 aa, unidentified
MAVYSKFVGMDVHKETIAVSVAEAFGGEVRYVGEIRNTPEAVGKLIRQLQKGGAELLCCYEAGPCGYVLHRQLLSMGVANQVVAPSLIPKKPGDRIKTDRRDSQTLARLLRAGELTAVWVPDEAQEALRDLTRGREDLKHLERQAKQRLQAFLLRHGKVYDHEKKWTQMHFHWLEQVKFDQPIQQIVFQDYLDTLQMLTRRVEALEKQLESAGAASGFGPVIEGLMALRGISRIAATTTMAEIGDLHRFPTAPQLMAYLGMVPSEHSSGATRSRGGITKTGNGHVRRVLVEAAWTYHHPARKTQHLQQKAKRAPEGVQEIAWKAQVRLCARYRLLESKGKLKVKVCTAVARELVGFIWAIGRAFPTPGAGALGDAANPQCIGSRTGNGGRILEVPM

SEQ ID NO: 366811 - protein, 364 aa, unidentified
MKRKVYVGMDVHKETIRIANLTNNTKEIVKEQQIKHNEVQIKKFVNKLKSEWNEIHSCYEAGVTGYPLYRYLKSLGVNCILVAPGKIPRQSSDKIKTDKRDAIKLAKLLRSGELESIHVPSEEDEAVRDYLRSRDSLRLDLGRNRQRLMKFLLRKGITYSATKYWTVSHNKWLHNLQFNNEILQETFNDYYSRVRVQEENLKAMDKRIQEIAESEPYREKVGILRCFRGVDYLTAMFLLCEVCDFKRFKTAGSFMSFLGLVPGEYSSGSKRKPTGITKTGSPRLRRILTEAAWQHRFPGTGSKIVTARRSGQPALVVALAEKASLRLHKKFRNLQQRGKTPQVIITAVSRELSGFLWAAMNLVA

SEQ ID NO: 366812 - protein, 387 aa, unidentified
MIAHYIDEKFQKEFTIQNNKNGYNYLLNYLNRVNQPKLIFESTGIYSRAMVRFCRVNQINYIELNPLEAKFKTSSLRSWKTDQSDAHKLAQIAPFLNDSDSLNNTNDDIYFELRERARFHLEFENEQNRLKVEIIEILHQTFPGLEKLFKNRYSMIALNIAEIFTHPDFVQQNDMESIISTILKSTDKGLSQRKAESYGETLFKLANDSYPNVNSSSFLVKKAQLLIQKLKKSIGQLSQLDKEMIQLAQELDCFEIIYSIPGIGDLTAAMIIGELGDISRFKSNKQLNAFVGIDIKRYQSGGTHYRDTINKRGNKKARRLLFLVIMNIIRGQHRYNNHIVDYYYKLRKQPNEKSHKTAVVACINRLLKTFHYLIMKHKLYDYKMSPH

SEQ ID NO: 366813 - protein, 421 aa, unidentified
MHCTWVSTGEVSSISCACSTTSDRWCASVPCPTARRLRQLVDWLRELTAGDLRRVAVAIETPRGAVVEALVDAGAHVYHLNPKQLDRFRDRHSVAGAKDDRRDAFVLACSLRTDLPCFRRIDPEDPLIVELREASRLDSRLLAQHTALANQLGAQLHRYWPQLLELAPGADEPWLWDLLARAAHPYSARRLTRAKLAKLLREHRIRRFDAEQLVAVLRQPPLPVAAGTLEAATMNIELLVPQLQLICRQRRQTAARLKRLLAQLSAAATADPEQPPQHRDAEILLSMPGVGKLVAATVLGEAAGPIARRDYQLLRALTGIAPVTRASGKSRHVAMRRACNQRLRNAVYHWALNSLQNDDASHLRYQALRHRGKTHGHALRMLADGHLRTLTAMLRDGTLHRSRNLVAPPSPNATQDEHVAA

SEQ ID NO: 366814 - protein, 371 aa, unidentified
MKNNSIFIGMDVHKNSIDIATAQKGRKGQVLHYGKIDGTLEALDKVVRKLVSKGDRLHFVYEAGPCGYQIYRHLTAQGFDCSVVAPSKVPKQSGDQIKNDRRDALRLARLHRAGELTAVYVPLAEDEAIRDLTRAREDAKSDEKKSKLRLLAFLLRSGQRYTGPSLWSQAHMRWLADIKMAHRSQQIVLQEYIDTLNQCSARVQRLTEQIRQLLPSWQLFAVVQALQSLRGVSLIVAATTIAELGDLKRFQSPVELMSYLGLVPAEHSSGQRIRRGSITKAGNGHVRRMLVEAAWAYRLRARVSRPLLKRQEELPQHIRDLAWKAQLRLCARYRHLWARGKAKQLIVTAIARELCAFMWAIAKQTQVPTAI

SEQ ID NO: 366815 - protein, 344 aa, unidentified
MDHFAGLDVSVNETSVCIVDDAGRIVREVKVASEPDALLPVLANAAYRFKRIGLEAGPLSQWLFSALAEAELPVICVETRHMQAVLKAQINKTDRNDARGIAQMMRVGLYRPVHVKTLRSQKLRMLLTHRKLLQSKAIAIENDLRATLRNFGLKVGVVGKVRFEARIRELVENLPDLAALVEPLLVVRRVLREQIVILHRRLLAIVREDEVCRRLMTTPGVGPVVALTYRATVDIPARFRKSKAVGAVFGLTCSKYQSGEIDRSGRISRCGDEMMRVMLYEAAQSMLRSKKWSWLKAWAMQIARRRGMKKAIVALARRLAVILHRIWVDGTEFRWTREQVTAAA

SEQ ID NO: 366816 - protein, 350 aa, unidentified
MTTMTSVDVVVTGGVDNHQDLHVAAALDQLGRVLATESFPTTITGYRELLAWLRRHGQLDKVGVEGTGSYGAALARHLSENGVRVLEVARPNRQVRRRFGKTDVIDAIAAARAVLSGEATGVPKSHDGPVEALRTLKAVQRSGNKARTQALNQIHQLLVTAPENLRARLRPLSRADLLTTCADFRIKADDDSLQSMTRLALRELAQRVLHLDEQLKLVSTRLRRITAAVAPRLVATKGVGPEVASTLLMAAGDNPQRMHSEAAFAALCGSNPIPASSGKTNRHRLNRAGDRQANSALWRIVIVRLSCDQRTRDYLDKRIKEGKSKTEAIRCLKRYVAREIYNAMPPTAAA

SEQ ID NO: 366817 - protein, 352 aa, unidentified
MNRLKYIGMDVHKATTVIAVLNFEGRIVAESIIETTALSILEFLKSQRGTLQVAFEEGTQAAWLYDLIRPHVANVVVCNPRKITKEGNKGDKPDARRIAKLLREGALTPVYHGEQSTRALKELVQNYTAVVQDGTRIKNRLKALFRGRGIACNGNGVYDPSERNDWLAKLDTDAVQIRALTLWEELDCVELICKVAKEEMVDEARKHGAIKVLRSVPGIGLVRAAVILGVAGTPHRFRTKRQFWTYCGMGVVIETSAEYVMINGRVSRSKRRPLIRGLNRNYNHALKLVFKSAAMTAASGVWKPYFGAIVSKGTPESLAMLTLARKIAAITLAVWKKGERYDQKRLKMLHAA

SEQ ID NO: 366818 - protein, 402 aa, unidentified
MFYCPPRDIRVSVDVGCKQHQVAVGLPDGQILDEFSISHQPDGFATFFDRLSKLEQQYQCPIRVAMEGYNGYARPLDQMVMARGWQLYNINNLKLARFKEIFPGAAKTDVLDARKGLELFQLQQHLPIAKDVLQAVAEPPRENQILKRLSRRRKRLVNERVRVKNLLQSDLQAVCPSLLALTSNVGCVWFLHFLTSTNDLTELARMRQKTVSRISGVGSKYANVIQGWQRHAQFSAEVEWVGEMIQQDAMRILELRRHIKSLEAKMAALIGESSLATIIHSIPGFGPVSTAELAGELGHEDRFLQESSLALYLGMAPLSKESGQYKGSKTPRQVNRRAKAAMMVAVDRHRKQVPASQKYYEKKRAEGKGHNQAIRSLGRQLSRVIFKMFKEQKDYVPPVSGI

SEQ ID NO: 366819 - protein, 485 aa, unidentified
MAKRKMSTFERLQRGKWSREQRKELAQKLEAADLTIVHPDAAGIDVGNESHFVAVPAGRDPQPVQEFGSWTADLQRMAAWLKACGIRTVAMQSTGVYWIAVQEVLEQAGLKVFLVNARGTKNLPGRKSDVQECQWLMKLHTYGLLANSFRPPEEIRAVRTIWRQRDRLVQDAGRAIQQIQKALTTMNIRLANAISDVSGVTGLAIIRAILKGERDPRELAKLRHPCIQASEEEVVRSLEGHWRDDVLFELKQVVEGYDFYQRQMGACDEELQKYLAVLPDRRRESAAVGADPGPTKGTKQRHRSKAERKGKTRRKNQPGFDLQAELHRTFGVDLTRIDGIDVMTGQVILSEVGPDLSDFPDEDHFASWLELAPRRNITGGKVISQKSRESRNRVANALRLAAESLSRSDSYLGARYRRLRGRKEGKKAVKAMARHLACLVYRLLTKGQDYVDRGAAYFEKKRTEREMIGLHRKAAEHGMRLVPMA

SEQ ID NO: 366820 - protein, 483 aa, unidentified
MKPKQQEKTKKATDHSTHRHWHEMNRKQRRETTRKIQSEDLSLEVIHPDAAGIDIGNESHYVAVPPSRDSQPVRRFGCTTAELKAMTDWLKQCGIRTIAMQSTSVYWVAVYDILEQAGLEVYLVNARDTKNLPGRKSDVQESQWLMKLHTYGLLRNSFRPSQEIRTMRTYWRQRNDLVQSAGRHIQRMQKALTQMNIQLANVLSDLSGVTGQAIIKAILAGERNAYKLAEFRDPRVKASQEQIAQSLEGNWQPDLLFVLKQEQDGYEFCQKQMAECDRQFTHYLQQREDRSQGASLPEEKRKERLRKKKKGNAPRFDLREGLFRLTGTDLTRIDGIDVMTATTVISEAGYDMSKWQTENHFVSWLRLCPDNRISGGKVIGKGRLPTNNPISIALKMAATTLRQSKTYLGAQFRRLRTRLGAPIAIKAMAAKLARLVYRMLRYGMKYVDQGAAFYEAQHRQVQIKQLKWKAAKLGFQIVQAPAA

SEQ ID NO: 366821 - protein, 348 aa, unidentified
METIVRIGLDTSKSVFQLHGVDRLEQPVLRRKLKRSQVLAFFGRLPPVFVAMEACGASHYWARELRSLGHEVAMIPPQYVKPYVQRGKSDAADAEAICEAASRPKLRKNFVAVKSPEQQGAQMLTRVRTQFIGRRTQLANSIRGYAAEFGFTAPKGLSRLQQLLIDIRADATVPELAMELVEALATELARVDDQIATLDKKLMQLHRGNEMSRRLAAIPGIGPIGATLLSIKVIDARGFKSARNFAAWLGLTPKNHSTAGKNRLGVITRAGDEMLRSVLVAGATAVIGDLRRSGSRMWPWLKALIARKPPKLVAVALANKMARIAWKLMMSGERYRPIGNAVPMATPI

SEQ ID NO: 366822 - protein, 342 aa, unidentified
MTMIGIDPHKATHTAVAIDDNEDVVDEFTLRASSRQVQRLRDWADGFERREWAVESANGLGYLVAQQLVAAGETVFDVPPMLASRVRVLGSGRSQKNDPNDARSIAIAALRSDRLAVVRPDDHARVLRLLVKRHRDMARLRAKHASRLHALLGELRPGGVVSPISAGKVNRLVDRITVDDEVTRHRVLIARELADDIARLDATLAASKRRVAAAVEASRTTLTDIAGIGPICAAIIIGYGGDVTRFPTKGHFATYNGTAPIDASSGDNTRHRLNTRGNRRLNHAIHIAAVTQLRYDTPGRVYYDKKIAEGKTTKEAIRALKRRISDVVYRRLIADTHRTRID

SEQ ID NO: 366823 - protein, 453 aa, unidentified
MPRRQKTRGRAAGELSTIHPDAAGLDVGATFHVVAVAADRDEQPVRTFRTFSGDLHRLADWLQAVGITTVAMESTGVYWIPVFEILEARGFEVLLVNARDVKHVPGRKSDVNDAQWLQQLHQYGLLRGSFRPRDAVARLRAYLRHRERLVEYAASHIQHMQKALMQMNVQLQHVVTDITGVTGMRILRAIVSGIQEPEALAEFRDARCAASPETIRAALTGNYRPEHVFALRHALELYDVHQTKITECDTEIETVLHTLNAERATPETPLPVVRHAKARNEPKFDARPALYTLLGADLTQIHGFGPYTVLRLVAECGDDMSKWPTAKHFTSWLSLAPGNKVSGGRLLSSKTRRSTNRAAALLRIAAVNLGRTQTALGAFYRRLAARIGKAKAVTATARKLAILFYNALRFGLAYADPGATYYEQRYRQRVLDNLRRRAQQMGFTLVADTASNG

SEQ ID NO: 366824 - protein, 340 aa, unidentified
MKQIKRIGIDLAKSVFQLHGVDAHGHGVLRRQVKRAQLSAFFAQCPPCHIGMEACGSAHYWARELGKLGHTVRLIAPQFVSPYRKNDKNDGNDAEAICEALGRPTMRFVPIKDEEQQAVLCVHRARSLLVEERTALVNQLRGLLAEYGLVIPRGVARLRAALPGILEDAENGLPLLAREVFADLYERLRGLDTHIAAYDRRITHLARTMAAAKRLMQVEGVGPLTATAVVASVGDARLFKNGRQFAAWLGLVPRQHSTGGKSRLGRITKRGDVYLRTLLVHGARSVLMRRTERTDAKSRWGAALQARRGFNKAAVALAAKHARILWALLAHEADYKPATT

SEQ ID NO: 366825 - protein, 446 aa, unidentified
MKILALDLGKFNTMCCFFDTKTRKHSFLNAPTDRDYLTTVFKKHKIDLVVMEACGPSGWITDLAKGLELETVVCSTNEDAWKWANVKRKTDKDDALKLARMASMDELKAVHMPSEAHREFRSLVKYRKTLDCRICKMKCTIRAWFVNHGISIDTGEKAWHTGRERINSFRKPLAECKPNELWKGELDLELTQLDALTIQLQCVVKKLEELGKNDPRIVRLRTIPGIGPRTAEILVACIDDPHRFENGRQVAAYFGLVPRQFQSGETDRNGRITKRGNPLARTILVECAWASLKYNPWAKGIYDRICGKQKTRKKKAAVALARKIAVLAWAMLRDEKDWDPKTMIDITETYGRISPSLKESLQSMTDVAFKTGIEKHAVDGKTVSVYSREKTLADCFSRRNEVGLDVAIEALKFYMAQGNVKVDLIMEYATKLRVAKTMRPYLEALL

SEQ ID NO: 366826 - protein, 402 aa, unidentified
MNCVGIDVSKGKSMIAVMRPFGEVVISPFEVQHTASELSELAKLLKSLDGETRVVMESTGNYHTPVAWLLHDAGLYVSVVNAMLVHDYGNNSLRRAKTDKKDAVKLANYGLDHWLTLPRYVPEEDTRLLLKTCYRQYQQYSKVQTMLKNNLISLLDAVFPEVNRLFNSSPRADGSEKWVDFVSTFWHCQCVSTLSLKSFSARYLKWCRKHGYYFSQEKAFEIHSKAQSCIGVMPRNETTKLLVQQAIAQLKETSAALAALKQEMQSLAASLPEYPVVMEMFGVGSTLGPQLMAEIGDVRRFHSKKALVAFAGIDAPPCQSGQMDIHSRSISKRGSAALRRTLFLVMGIYLQSAPLDEPVYQFMDKKRSEGKPYKVYMMASANKFLRIYYASVTAYLNTLARI

SEQ ID NO: 366827 - protein, 451 aa, unidentified
MAKPKKRKHRKLERSLPVMRPNAGGIDIGATEIFVAVPADRDSESVRSFPTFTQDLHALADWLQRCRVETVAMESTGVYWIPLFQILEARNIEVHLVNAQHVHHVPGRKSDVLDCQWLQYLHSVGLLRASFRPEQAVCEIRSLMRHRENLVQMACVHVQHMHKSLDQMNLQIHHVISDITGVTGLAIVDAIVAGITNPKVLAKLRDHRIKASIDTVKKSLVGDYRPEHIFTLKQSVTAYRQYQQFIADCDQEIQQRVQTFQTKDDDPSVAADSSSTTTSSASSFNLTNHLERIFGVDLTLIPGFDSLRVQTIFSELGADLSSKFPSDDSFCSWLNLCPKDGTSAGRRIRGPKVKTKNRVTQALRMAALCLHNNKSYLGDYYRSQRARYGALKAIKNAAHKLARIFFHLVTTRQPYDETVFAKLEARNQKRRLHNLQARARQMGYTLVEAHA

SEQ ID NO: 366828 - protein, 310 aa, unidentified
MTLHPVCLGIDVSKHHLDIGFGSQGPVRRIANAADAIAAVLAELDRPPDLVVFEATGRYDRELRLALARRELRFARVPPGRARAFAGALGLRAKTDAIDARLLAAMGEHLTLPLARPAEAARDALARLHRRRDQLVAMRQQERLRLGEAESDEGEDLRHHIAFLDAQISAVEERSRQLLARCDDLGHSERLLRSIPGIGPVAAAILIALMPELGSISGKAAAALAGLAPFNHDSGRKRGQRTIAGGRKRVRDALYMAAVAAARSTSRFATYASAMRDRNKPFKLVMIALARKILVTANAIISTQKPFAPH

SEQ ID NO: 366829 - protein, 412 aa, unidentified
MEGETVIAGVDTHKDVHVLCLLDGLGRKIWSGSFGADPEGYDRLAEAIGDPGSCMVVGVEGTASYGAGLTRRLVELGYNVVEVLRPKRDKARPGEGKSDPLDAERAARKAASGKGCSVPKSQDGWVEAVRQLYVARRLAVATSTSCVACAKSMLTTAPSALRERFRGRERPKDLMPLLARGRKAGDALEESVLASLRSVAAVWKEACSQVESLDERIRALLEANAPALLGVEGCGTTTAAALVVAAGDNPGRLKGEAAFSMMCGASPIPASSGKTDRHRLNRGGNRQANWALYEIAIKRMAYDERTKRYVAKRTSEGKSRREAVRCLKRYIAREVYRVLMDPNPDGAAPEGPELAKMRKAMRVTQKQAAAGLGMSAASLGHLEHGRRRSTKLERRYYELLCELKGALPQTAS

SEQ ID NO: 366830 - protein, 428 aa, unidentified
MKAKEINFIQVVKVGCGIDVHRDIIVATIRKSNDEYETREFSSYTGSLISLRDWCKAEGVTHVAMESTGVYWKPVFNILEEDFEIILVNARHVKNVPGHKTDKKDSIWISKLLLSGLLKGSFIPPKEIRELRDLVRYKRKIVAQVASEKNRIIKILEDANIKLSSVLSNVDGAVGTKIIHCLIEGQTDVNELAKFYHGKMKVSKDEFKKALDGRITKHHRFMLQLLKDSIAEKEHQIERIEAQIDEATKACQIEIDLLQTIPGVGKDSAISIISEIGTDMSRFPDEHHLSSWAGMSPGNNESGGKKKVAKTVHGDKYLQSTLVECAWGATRKKDSFLKRKYESLVGRRGKKKALVAVGHKIIVAAYHVIKNKEAYKEPELHNNPQKKNKQIRNYLNRLKELGLEIPMEPLQEIINGRFFTEQQTVSRR

SEQ ID NO: 366831 - protein, 355 aa, unidentified
MSSEKYIGLDVHQATISVAVMDSQGKVVMESIVETKASTLLEFFAGLRGSLFVTFEEGTWAAWLYDLLKPHVTEVLVCNPRKIPLLKQGNKSDKIDARQLAERLRLHDLKPVYHGETGIRMLRELARSYLTVVKDLSRVMNRLKALYRSWAIPCAGRDVYYRRHRSAWLDKIPEAGTRRRAEQLYQQLDLLQHLRQPARRELLAESRKHAITAKLRKIPSLGPIRSALAVALIQTPHRFRSKRQLWTYSGLGLETRDSGEYHFLKGQVRRRKKQATIRGLNKDYNHDLKGLFKGAATRASVKPGPFQEFYQRSLAKGIQPTMVRLTLARKIAAITLTRWKKGEDFDINKLNSQAA

SEQ ID NO: 366832 - protein, 342 aa, unidentified
MEKRHMGIDLHRNRFTCCVRLENGRNYLSTWQLEALPRFVKKLRRSDEVAVEVTGNTRFFYNAVAPHVARVVAVDPNQFRVISHSVKKTDPNDARNLALYLAKGLLPEVRMKEKTQAQIASLTQTRDTLVKLRTALKNKVNNILSAHGINLEKEALSSEKKLQEVVTMRFDPMIRIELKVIVEQIRSLNQSIAELEKTITEEGQKLPGHPNLTSIKGIGPLSGSILLSVIGDIHDFADEGKLAAYFGIVPRVSNSNETERSGRITKRGSKLGRTALVQCALIAQRYSPYLKRFYEKTKARRGTGKAIIALARKLLGIVYRTLKNNWVFEDFPNFVLAEEAAA

SEQ ID NO: 366833 - protein, 327 aa, unidentified
MEHYVGLDVSLKLTAICIVDRTGKIVREGVVTSDPETIAAFIKSHAPHVARVGLEAGATSTWLWTELNKIGLPVICIDARHAKAVLKMQINKSDRNDAVGIARIMQCGWYKEVHVKDLDSHATKALLVSRALLVKIKRDLENQIRGLLKNLGLVIGRAKMNVFAARAAELAEARPELAAAVEPLLKAREAVGRQIADLDRKVMRLARNDAQVRRFMTAPGVGPITALCFLATIDDPTRFKRSRSVGAYVGLTTRRYASGEIDWTGRISKCGDAMLRTYLYEAANVLLTRIAAAAKAHWCRSPRNVVWAVRDPDHQDAFTRRGNGTEP

SEQ ID NO: 366834 - protein, 331 aa, unidentified
MKTNEIIGIDVSKLLIDVCIYSKQIVKQFENNKSGFKSMLKWVFKNSSFSKEETMFIFEHTGMYSHLLSVFLTEQKTSFFIASGLEIKRSIGIARGKDDQIDAKRIAQYGYRLKEELKPSNLPNSNILQLKSLLSLRTKLNKQRAGFKVTLKEQKRIYKAKEYKIIFDVQQKMIVELTKQINKINTQMQSIIDQDISLKETYKLVTSVKGIGMQTAIMIIVFTDNFSKFENWRKFASYCGIAPFPYQSGTSIKGRTKVSHLANKKLKAIINMCAISAIQHNPEMKVYYQKRVEQGKSKMSTVNIIRNKLIARVFAVVKRQTPYVDILKYAA

SEQ ID NO: 366835 - protein, 412 aa, unidentified
MDVIVDRCAGLDVHSKTVVACVRMPGTGRRKRDSEVRTFDTFTDGLVEMREWLIASRVSEVAMEATGVYWKPVWDVLEGHGLTVLLANPAHIKNVPGRKTDVNDATWIGQLLECGLLRGSFVPPVQIRQLREITRYRRQLVEERSREVQRLQKLLEDAGVKLSAVASHILGVTGRAILEALIDGERDPAVMAAMAKGRLKVKTDLLARCVPGGFNDFHAAMARELLDHIDYLELAVARLDDEVDALMVPFVDARDRLDTIPGIAKRCAEIVIAEIGVDMGQFPTPGHLASWAGLCPGNNESAGKHRSTTTRSGNPWLTSALVEAAWAAVRTKDCYLAVRFQRIRKRRGEQRALIAVAHTILVICWHLLSENTDYDELGTDYLAGRDQPERRRRHLVAQLEQLGYSVELAPVA

SEQ ID NO: 366836 - protein, 380 aa, unidentified
MTNATATTGLVCTVAVELARSRWVVGILPPKSSKVAIQAVAGGNAQGLLGLLQRIRNQLERQHAAQVELRICYECGYDGFWLARFLKNHGIDVYVLDPSSFLVSRRGRRAKTDRIDAEAMAFKLRAYLNGDESVFRMVAIPTPEAEDARRISRERTRLVSERTRHVNRIRALLALHGIRGIKGLFGGAWREQLDASRTGDGRPLGRFLKAEIAREFERLALVREQMQALDAERTETLADPATPFPQREKVELLKQLSGVGELSATLMVSEVFHRSFANRRHLASFLGLAPTPYASGDDMRDQGISKAGNKHARTLLVEIAWSWLRHQPNSDLAAWYRRRFAQTGARGRKVGIVALARKLAIALWRFVEHGLVPSGARLKA

SEQ ID NO: 366837 - protein, 416 aa, unidentified
MKKGQNTRGYERYMALDIHREYLLVGAWNEEKEWVLTPRRVGLEKFPEWAKKNIRAGDLVVLETTTNVWTIYDIVAPLASRVLVANAAEVSEIANARVKTDKEDIKRLLKLLVGGIVPEVWVPPMHVRELRAFTSYRARLVKTSTMIRNRLQSLLHKHNLMLSEAGLLDQTWWESQKNISSLEKLQIRQELTLLQEVEKLKAAVDEELQRQSTSAMWGKPALQLMQLPGVGYIVAMTVLAAVGDISRFENASKLVGYAGLGAGVHDSGKTHKEKKITKKGRRELRWAMVEAAWRAVGMSPFWKAEYEKYLDRMRKPNQAIVVIARKLLIAIWHVLSKEETDIHATEEDLAYKMLLLSWSLSEDVRLGLTYKQFAKYALMKLGVETDITRFVRRNVPRRLAPREEVLARMTELGLNA

SEQ ID NO: 366838 - protein, 379 aa, unidentified
MKDYKEFIDYLSSFNKPCFIAFEATSNYHRPIAYHLQKAGFTVHLVSSFAAAKTREALHNSWDKNDPKDAQVILHLLKTGIVQTYYDPLINQYNDIQEIAKTYHQISLRKVRVQHSIMNHYLPLYFPEAEMFFHSSRALWFSHFISHFPTPSTILKHTQEEFINAAWDVVGRKVDKRNWLINFYQTAKESIGLPTEPDSQAIRMFCIILQEHQDLCKQLKTLEETAESFLEGNNDYKHLLSIPGIGPIIALTILAEAGDLKRFKHYRQFLKFCGFDLSTQQSGFFRGQTKLSKFGNARLRYVFWLAATVAIRMRENTFRKKYEDYIKQDPQNDDLKRKGYTAVAAKIARVAYGIIKNETNYRCYHESVIPSGRIPSARP

SEQ ID NO: 366839 - protein, 402 aa, unidentified
MNAVGIDVSKGKSMVAIMRPFGEIVSTPFEIKHTASDIHSLVELINSVEGESRIAMEHTGRYYEVLAHQLSQANLFVSAINPKLIKDFDNDSLRKVKSDKADAVKIARYALDKWQNLKQYNVMDELRYQLKTMNRQFSFYIKHKTAMKNNLIGILDQTYPGVNTYFDSPARSDGSQKWVDFASTYWHVDCVRKMSLNAFIDHYQNWCKRKKYNFSQSKAEEIYGKAKELVPVLPKDTITKLIIKQAVDQLNSVSTTVESLRTLMNETASKLPEYPVVMAMKGVGTSLGPQLMAEIGNVSRFTHKSAITAFAGVDPGVNESGTYEQKSVPTSKRGSSDLRKTLFQVMDVLIKTHPQDDPVYQFLDKKRAQGKPYYVYMTAGANKFLRIYYGRVKEYLASLPEV

SEQ ID NO: 366840 - protein, 404 aa, unidentified
MIFVGIDWAEAHHEVCILDQEGGVLAKGRIPDGIEGIGRLHEMVATHAEEPSEAAIGIEIDRGLLVGALVETGYRVYAVNPFAVSRYRDRHAISRAKSDPGDAKVLADLVRTDRHNHREVAGDSELAEAIKVLARAHQSLVWTRQRQVSQLRSTLREFYPGALEALKGDLSSHEACSILGMAPTPESGRRLSRSRIHRCLAASGRTRNLDRRTSEIYDALHAPQLQAPPMVAEAYGQVVGSLVVLIDGLTHQIGQMEHQLAERFEGHPDAEILRSLPGLGLILGARVLAEFGDDPTRYADARARRSYSGSAPITRASGTRLVVLARLARNRRLADACYLWAFSALNTSPGARRYYDARRSRGATHHQALRALSNRLVGVLHGCLRHRQLYREDIAWPGSVEAVA

SEQ ID NO: 366841 - protein, 396 aa, unidentified
MHKTFVVAVIAITNNQGITEYHRKRFSTFTNELTQLRDWLEYYSCFDVCMESTGKYWIPGFNILEEQTNVCLAHPKYVKAIRGKKTDKKDAQWIADLFKHDLVASSFIPQLKIRQLRDLFRYRMKLTQLQVGEKNRYQNCLTWSNLQIASVVSDFFGKSAQAIIKSILDNPQDKPSIEQLVHKRMKNKVQDLEIAMEGALPPEQAEKIKVIKAHYDALAICKEDLEQMIRELGQDYQHQVKLIQTVPGFKEDLSAFRIISEIGCDMTVFDSAAKLCSWAGLVPANNESAGKKFSTRISKGGKYLKPFLVQVANAVVKSDKHPELRNKYLKLKKRRGHRKAIIAICRRLLVSVYQVLRKQEDYNPVLLGLTEIRNPDKTMFVQDAVRFAQQHGFNVA

SEQ ID NO: 366842 - protein, 311 aa, unidentified
MQEECVGVDVSKRHLDWVLGENGSAKRVNNTAAGIRGLIANLRRCGGELIVVESTGGYERALIEALSKANLPVVLVNPWRVRRFGEGLGVLAKTDPIDARILALFGERARPDRRPLPGPTQRQMADLIRRRRQLIAMVTAEKNRRDTATAVIRRDINTLVKILERRVAKIDERIDAAIAADPEKAENWELLQSAPSVGPGVARALIIDLPELGALGRKQITSLVGLAPFAKDSGRKTGQRRIRAGRSAPRTALYLAAMNGARFNPVLKAMYSRLIEAGKPPKVALIALARKLLTILNAMVRDQTSWKQATR

SEQ ID NO: 366843 - protein, 425 aa, unidentified
MPNRIAGIDVHKKMLAVVIADIAVEGEYKFTRRRVGTRPSELRALAAWLVSEEVEEVVMESTAQYWRPVWEALERGWSPLRRARPDAGAQSGSLHLAQAKSNRGARGRKRDFPDAERLVKRLVAQELTLSFVPEPEQRLWRTVMRRKYQLTRNRVQLQNRLESLLEEAHLKLSSLVSDLLGLSARRMLQALADGETEPARLAELADRRLRATSEQLCDALGACADLNPVYRKLVQMTLEELRLLEEQSAQLDEEMAYLLGEHQAAVQRLAEVPGFGVDSAQQIIAEVGASAETFPSAKHLASWVGVCPGEHESAGKSYSHRSPKGSRPMRRLLNQAANAAVKTKGSFFQLVYRRLVPRLGHAQAIWAVAHRLCRLIWKILHQGVDYEERGPDVSRERSQRRIAKMIRDLRKLGYQVEPSLQGDPA

SEQ ID NO: 366844 - protein, 408 aa, unidentified
MIMRTIIGIDVSKNKANIAVATDLVVVKELAISLDALGFNELKHVVLQFGGNPEIVFEATGVYSRRLEYFLQQDGLNYHILNPLAAKNRITTGSRLRKNDERDARRLAITEFTEQLEPYLLAYKQDPIYRELTDMNRYYDQLNEDKKRARNRAHRVLQLVFASFGASKDGFDLDTKLSWELLTLFPHAQIIREIGDLNELETRILAAHFKGIGPKRAHDAARKLWKLAAKNGDAVSLSSDNTRQMKVLAEQVLALETAQDQQVLRMTALGKSLPEYELLQTIPGIGSSTAIRLISELGDIRRFNTRQQLNSYVGIDMTEVDSGDHQSARHITKHGNPHARRILYWTVILMINPKMGNNHIRDAYEKRREASSSKKKLIVRQMDRLIKTILYLIKTNQPYSYELAPQSK

SEQ ID NO: 366845 - protein, 460 aa, unidentified
MNRKRSKSRVDRTMPMMHPNAAAIDVGATLHMAAVRADRATEPVRSFGTFTTDLHRLVDWFTECGVETVVMESTSVYWIPIFELLDARGFTVFLVNARDAKHVPGRKTDVSDAQWLQRLHSYGLLRASFRPKGQIAELRAYVRQRERLLEYAASHIQHMQKALTEMNLQLHHIVADITGSTGLRIIRAILAGERDPEVLACLRHYSCHSSAETIAKALTGSYRTEHLFALEQALAFYDAYHEKASACDVRIEAVLKELCIHRGRGIGSVAPAPRRRHRTDQANALAFDVRAALFALLGKDITTIDGLGPYLSLKLVAECGDDLSSWPSAKHFTSWLGLAPSNKVSGGKMLSSRTRRSGGRAAALLRLAAVTVGRTDTALGAFYRRLSSRIGKAKAVTATARKVAVLFYNAVRHGMEYVDPGASSYETRYRTRVVNNLHRRAKAFGFVLQPLEPKAGAVVS

SEQ ID NO: 366846 - protein, 366 aa, unidentified
MPSMPQPAQHDQDDNSPGEVILGVDTHKDTHVGAVLTAVGVLLGSATFPTTASGYRDLVAWARTFGTPKRAGVECTGSYGAALSRHLRAEGVEVIEVNQPDKATRRRRGKTDSIDAEAAARAVLSGRATATPKTGDGPVEMIRMFKLAKASAIKARTQTINQLKAVLVAADPALRESLSGLSNPVLIRRCATLDGANHNDVLTATTYTLRLLARRIIHLNGEVQDLGKRITEAVASHTPKLLQRRGIGPDSAAALLITAGDNPARLHSEASFAAVCGTSPVEASSGKTSRRRVNRGGDRQANAALYRITLSRLRWDQPTRDYLQRRINEGKTRREAIRCIKRYIARETYQIITEATSDTAPTPPPA

SEQ ID NO: 366847 - protein, 321 aa, unidentified
MKTVLGIDQAKKKFDVALLRNGKYKSKVFENNPAGFSALLDWLTKNNVESVHACMEATGTYGEALARVLHEAGYSISVTNPARIKAFSQSELLRTKNDKIDAKLIARFCEKMEPTLWQPLPIEVEYLRGLGRRRDALISMRTQELNRQETSNETVNSSVQTVLECLEKEIEQISKLIKDHISKHPVLKHKHDLLNSIPGVGPATIEAILSEINAFEGFETIEQVVAYMGLSPKEHTSGTSVKGKSAICKIGNARLRKALYMPALSAIIHNPIVMALYDRMKAKSKNGMVIACACMKKLVHLIYGVIKTNKPFDPAYTLKTA

SEQ ID NO: 366848 - protein, 359 aa, unidentified
MKIVGCDLHARQQSIAMLDTETGEFTEKVIRHEGNAVREFYAALEGPTVVGIEATGSMQWFLELLEELGIQYRVGHPAKIRAAETRKQKHDRRDARLILDLLVMEDRFPEIWMPSMEQRDLRTLLRDRHQWVKMRARLQHTMQSMALNHGLRRGAGLWSTAGQSTLKALPLARYTSQRRNALLSLYGQLQKRIQELDKVVEGEAQSRPQACRLLTHPGVGPVTALATEVFLGDPRRFRTGKQVASYIGMIPGEHSSGQRQRLGKLSKEGNSLLRYLWCEATLHAVVKDPELKRFYRRKLIQKGMGKARVAAARKLGIRLWIMLRDQIDYQQFCRRGKLRRQEGEAHVGMPDFNSGPASQ

SEQ ID NO: 366849 - protein, 347 aa, unidentified
MNITQVGLDLAKTVFQVHGIDERSKAALRKQLKRKQVVAFFTQLSPCLIGMESCGGAHFWARKLTSLGHTVKLIAPQFVKPFVKTNKNDAADAEAICEAVGRPNMRFVPIKNTEQQALLGLHRARQGFVVARTAQGNQIRGLLAEFGIVMPKGIRYLESQMPGILEDAENGLSSASRALFARLFEHFRVLDRQVDELEREINAWHREDTASQRLQAIPGIGPLTASALVASIGNATAFKNGRQLAAWIGLVPRQDSSGGKTKLLGISKRGDAYLRTLLIHGARAVLRQLKRHANQAEGWLARLASRRNANIAAVALANKNARIVWALLAHGRHYQPGYVSARIAAAA

SEQ ID NO: 366850 - protein, 382 aa, unidentified
MKENSIARLQVTKGQIRRMAAKQRLTVGLDLGDRSSRYCILDEAGNKASEEVLPTTKAGLESMFAKMAPCRIAVEVGTHSPWVSRHLAGMGHEVIVANPRKVRLITHSVKKNDRMDAEQLARLARVDPKLLSPIRHRGPEAQADLAVIRARAGLVDVRTELINTARGLTKPMGERLKKCDADAVKESLADGLGEATQKVIRPLLKSVEGISQQIAVYDKQIQEIEKRYPETKLLKQVYGVGTLIALTYILTLEDGERFLHSREVGPYLGLTRKLRDSGESQPELGISKAGDELLRRLLVQAAHCILRQGAPDSDLRVWGLTKAQAAGGGKKSSKKRKKKAAVAVARKLAVLLHKLWVTGEVYDPHYNRKAVETAKEKAKVAA

SEQ ID NO: 366851 - protein, 300 aa, unidentified
MEQSTRFIGMDVHKDTIVVAVTATGEVGKATAYGTFPNSAAALEKLVRRFRQAGDGPLKFCYEAGPCGYGVHRTLTRLGEDCMVVAPSMIPRKSGDRQKNDKRDAASLAVLHRGGLLTAVWVPDAAHEAMRDLIRTRLAAVRAVRTARQQLSAFLLRHERIYRSGGKAWTKAHRGWLADQSFAQPAQQIVLEESIEAVRLGEQRRDRVDDYLRAQIPTWSLFPLVRNLGAVRGLDIIASAGLAAAMGDPSRFASAPDFMAYLGLVPSEHSSGPKRRIGAITKSGDIHPSSGIPTATPPEP

SEQ ID NO: 366852 - protein, 354 aa, unidentified
MNYVGVDIHKRYSVLVAVDERGRELARGRISGNSVHAFAQFFEALQGPGKVVLEACWNWGRIYDVLSEIEQVEEVVLAHPLKTRLIAEAQIKTDSLDALALATLLRGNLIARAHVPSKATRARKELLRQRLDWARLRTRVRNRVHAVLDRQRELEMPQCSDLFGRKGLNALSKLRLAEPDATLLSEELDLLKLIDGQIKAQEGRIVAFNANEQATQYLQSLPGMGKILAAVAAAEIDAIERFDGAAKLCAYAGLVPTTYGSGGKVHQGHLLKSRNKWLQWAFIEAAWVAVGCSSYFGGIYRYQRARGKKANIAITIVARRMCRIAFTLLKERRNFQEQHRTFPGRSAVRLTAAA

SEQ ID NO: 366853 - protein, 349 aa, unidentified
MSHKSAPPTVSTIGIDLGKNSFHLVGLDQRGAIVWQLKCSRAQLERRLANIPCCLIGMEACCGAHYIARQLAALGHDVRLLPAQYVKPFLKGHKNDYRDAEAIAEAVQRPTMHFVAIKTPEQMDLLALHRVRSRLVSQRTGVTNQIRGFLMERGIIVRQGVVPLRRALPDILSANTGALSPKIVNLIAELVQDWRRLDERIAAVSADIESLVEQDEACQRVMTVPGIGPIISSAVVAAIGNGAGFTQGRDFGAWLGLVPKQESTGDRTILGKISKRGNKYLRTLFVQAAHVVLARRPNAAMRGLWPWIEQASRRLHRNMLAIALANKLARIAWAVLARGRAYQPSIVAI

SEQ ID NO: 366854 - protein, 412 aa, unidentified
MQTLIERGCGLDVHQATVVACLLMVRRDGKVQKQMRTFGTTTRELVGLREWLLSEGCTHVAMESTGVYWKPIYAILEGALEIVVANAQHIKKVPGRKTDVKDAEWIADLLCHGLLRSSFVPPKPIRELRDLMRYRRKLVESQAAERNRLLKVLETANIKLANVATDVFGMSGRLMLRALIAGKATPQEMAELAKGLLRKKIPELELALEGKLEQHHRFLLELQLQRLEAAEKDLAVLEQRIRQMLEPYAAQLSLLDEIPGVDWTLAAVIIAELGVDMSVFGNVSQLASWAGVCPGNNESAGKRKSSRIPSGNVYLKSGLVEAANAAARSKGTYLRDKFFRLKARRGYKRAVVAIAHKILVAIYHMLSQQVSYNDLGDLYLDKLNKNHLTRNLVHRLERLGYAVTLTLQQKAA

SEQ ID NO: 366855 - protein, 343 aa, unidentified
MEESQRLVVGVDTHKETHSAALLDQLGGVIASTDVAANQRGHIWLLEWARCRSSRRTWVVEGTGSYGAGLASFLARSGEVVYEGDRPQRRKRGAGGKSDQLDAIKVAREALAREHHALPRQRGNREAIRVLLSTREGAVSAYRQALNQLYALVVTAPETIHERLIRLKGDQLVNACVRLRSTSGDIETSVTTKVLRQVARRIRTLQAEAADQEAQLEQLVAESVPALLAEPGVGAITAAQLLVSWSHAGRIRDENAFAAMAGVSPVPASSGQVVRHRLNRQGDRRLNRALHVVAISRSNFHAPTKSYIARRTAEGKSTREIRRCLKRYLARRFFRLLQGLDRT

SEQ ID NO: 366856 - protein, 343 aa, unidentified
MYYIGLDVHKKTISYCVKDAAGKIHQEGKIGSTRRELDAWIKTLPQPRTIAMEATIFTGWIYDHLLPHAEKVKVAHPLMLRAIAAAKRKNDKIDASKIADCLRCDFLPECHMASTEIRDRRRTLRYRGLLVKQMVQMKNRISGLLLEKGVTHTKRRLHKVGYFAELMAGNEEIDQSIRPLLKLSREHIVRAQKLDYALVSSLERDPLLVERLKRLRTVPGVGPITALSWALEIGDVARFRSIKQAISYCGLCGAEKSSADKMLRTPISKQRNKHIQHVLVEAAKLAPRQCHELALIYEKEMQRGNRNRATLAVARKIVAYLLAVERRQQDFVPTEERGGTAAA

SEQ ID NO: 366857 - protein, 339 aa, unidentified
MRQITTLGIDTAKQVFQLHGVDAQGHVVLHKRVSRKQLLPLLAQLPPCLVGLEACGGSHYWAREITQLGHTVKLMAPQAVKPYVQGNKTDGRDAEGICEAASRPRVRAVAINSAAEQDMQTLHRVREHCVKMRTALANQLRGVLGEYGFVVPQGISRIRKAIPLIVEDADNGLSPLCRELLWDVYQRLCTLDAEITRYNARIAQLADQSEVCQRLTRVEGVGPLTVTAFIAAMHDPGAFKNGRHCAAWLGLVPTQHGTGGKIMLGGMSKRGNQYLRRLLLQGAMAVIRRVDGKTDARSGWLQQLRARRGTQVAAVALANKNARILWALLATGDVYRQAA

SEQ ID NO: 366858 - protein, 343 aa, unidentified
MTVIIGIDPHKASHTAVAIGGDENELGSIKVRSTRRQVPQLLAWAEPFETRMWAIESAGGLGYLLAQQLVDAGESVVDVPATLASRVRVLASGQSNKNDPNDALSVAVAALRAPALRSVAAADHGEVLRLLAKRNLDIGNHRTRVVCRLHAALAALAPGGIAKELNASDAVELLDRIQPATAVEQARHDLAVELLDDVRRLDTHLKESHRRIRVAVKASGTSLTELFGVGPIIACMLIGYTGDVRRFATRDQFAAYNGTAPIELSSGGRVVHRLSQRGNRRLNHALHLAAISQIRQPHSEGRAYFDRKVAEGKTKKEALRALKRQVSNAVYRQLLIDTERAGS

SEQ ID NO: 366859 - protein, 356 aa, unidentified
MVKINKLDFSGQTIYVGLDVHKKSFSVSIFSEQCEHKKFTQPPEADKLVHYLERNFPGAAYQAVYEAGFSGFWLHDQLRDRGVNCIVAHPADVPTTDKERIHKRDKVDCRKLARHLRAGALKGIYVPTRPQLEDRSLVRTRESLVRKQTRCKNQIRAFLFFYGIYLDQEFVDSPWSQKFLRYLEGLSMMRPSGQVALQAHLEELKHLQHNILSVNRAIILLSREPGYRDRVKRLKTVPGISTLSAMILLTELCALARFASLDKMASYVGLIPNIQASGETEHVGHLTYRRNAQLRHVLIESAWTASRKDPVLLLAFNQYCRRMKKTRAIVKIARKLLNRIRYVLKNDQDYVPGVVQ

SEQ ID NO: 366860 - protein, 350 aa, unidentified
MEHHAGLDVSLEETSICIVDGAGKIIRETQVASEPEALVGYFSALEIKVVCIGLEAGPLSQWLHAALTEAGFEVVLLETRHVKAALSAMTVKTDRRDARGIAQLLRMGWYRPVHCKTLPSQEVRAIITARKTLLGKLIDIELSMRGILRGFGLKVGAVTRKSFEIRVRELMEGQLTLTAIMEGMLNSRATLITEVSKLHKAILRIARADGVCVRLMTAPGVGALTALIFKTAIDDPTRIAKSRDVGPLFGLTPGRYQSGETDIIGRITKVGDVMVRTALFEAATVMLTRSTKKSQLKSWALDVVKRRGIKRAIVALARKLGVVLHRMWVDLTEFRFAKEEAAVPALITAK

SEQ ID NO: 366861 - protein, 507 aa, unidentified
MKAKKQLKAKSNHKTGSSASKKRSVASKAQQREEQMRRVNPHAGGIDCGAREHYVAVPPESVEPGEPCVRCFSAFTEGLDILVEWLKACGVTTAAMESTGVYWIPLYQKLEAAGIEVYLVNARHVRHVPGRKSDVQDCQWLQQLHSWGLLSASFRPEDMICRLRSLQRHRANMISVAASEIQHMQKALQQMNLHLHHVVSDINGVSGLRIIDAILAGERDPKILAKLRDYRIRKSTPARMEAALVGDYRAEHLFVLGQGLQAYRFYQAQMEVCDREIETVLNQLTQRFESACDAEAGAPQPEQAVQDPQREHAVEAQTQRRVKEKRKRKPRANEPKIDLCAYLERICGVDLTQVVGLNVMSVLLIVSEIGVDMSKWRSAKAFCSWLGLCPGNKISGGKVLDSRTRKVINRVATALRLAAQAVGRSNNTCLGIFYRRKKAHLGPAKATTATARKLACIVYHLLKYKDQYREPDPATYQLKLHNATLNKLQKQAAIIGYQLVPSPLVAR

SEQ ID NO: 366862 - protein, 415 aa, unidentified
MKKHNNSRKKSEPTSKRAKSRGPVQRETKEVLAELVGKLREKLDPRAVAASAGEEHQRGELRPNLDRLTVGVDLGDQWSHYCILGLEGETLAEGQVRTTQHDVAEFFQALSAARVVFEVGTHSPWVQEVICGCGHEVLVANPRLMEGSKRRKRKNDRIDANKLARLGRVDPESLHPMRHRSKEVRQDLVMLRARDALVAARTELINATRGLVKSMGARLPKCSSPSFAQKVEEAVPAEIREALQPLVRMASALSDCIQGYDEKIEKLGREKYGHTALLRQVKGVGPITALAYVLTLENPERFVKSRDVGPYLGLVPKQEDSGDSQPQLGISKAGDTMVRRLLVGSAQYILGPFGPDTDLRRYGLRLCARGGKNAKKRAAVAVARKLAVLLHRLWVSGEVYEPLRHAMSVPIAAVA

SEQ ID NO: 366863 - protein, 380 aa, unidentified
MASMHDSVRFKTTVYAAIELSKKSWVVAIARPDRDRPSIHRIAGGNLADLIGRLRKAAGEKQRIVVCYEAGYDGFWLARSLAKIGIDCRVLDPASIQVNRRARRVKTDRIDSLALLRALIAIDRGERHVCAVVRVPTVEEEDARRSHRERQRLVRERTGHINRIKGLLFAQGIRGIEPKRRRTRIDFGKLTTAEGRPLAERLRRELEREYQRLELVQSQLRIVEKERDTADAQDPAIERKRELLCALQGVGGASAAILAREVFARPFASRRQLGSYLGLTPSAYDSGSTTRCQGISKAGNSWARRVLIEVAWLWRKYQPGSPLSHWYARKTADQSPRIRRIMLIALARKLAISLWRYVETGLVPDGAVMAKTTPHMAAAT

SEQ ID NO: 366864 - protein, 362 aa, unidentified
MSKSITIIAFDQHAATTVAAVLLPGQRTSALHSLTSDVPTILRLVQRVRRSGAVQCCYEAGPCGFDLQRALTAHQIPCDVIAPSLIPRRPGDRVKTDRRDAGQLAILYRAGALTAIHIPTEQEEAARDLLRCREDIRADLLRARHRLSHFLLRHGRRFTATKKAWTKRHAAWLQAQRWSLPALAQTHRAYVRAVDEAVGRLHAVDTELRDLLSLDPLRARVERLRCFRGIDDLTALTIAAELGDARRFPTAPSLMAFTGLIPSEHSSGTKQARGAITKTGNAHLRRVLVEAAWQYRHHAFLGPSLQQRQRGAPPTAIDIAWHAQRRLHRRYRCLAARGKTKHVIVTAVARELTGFLWAALTR

SEQ ID NO: 366865 - protein, 337 aa, unidentified
MSEVIRVGLDTSKHVFQVHGVDAAERAVLRRTLRRGEVERFFGALPPTVVGLEACGAGHHWARVLRELGHEARLLPPQYVRPYVKRGKNDAADAEAICEAMSRPSMRFVAVRTRENQAELMLHGARGLLIKQRTMLMNAIRGHAAEFGVIGAKGVGRTASLMTRILSDPGVPALAREIFAALAAQIEALEQRLRGVERRLLAWHRASERSRRLATIPGVGPIGATALAMKVPDPSLFKSGRHFAAWLGLTPKDHSTAGRQKLGGITRAGDETLRHLLVSGAMAVVRQARPGRASPWLLELLARKPKKLAAVALANKTARIAWVLMMRGEAYRRPIGA

SEQ ID NO: 366866 - protein, 316 aa, unidentified
MTSSAFVGIDIAKADFVVACRPDGASWTATNDPEGIAAAVGRMRALAPPLIVLEATGGYETALVAALAAATLPVAVANPRQVRDFAKATGQLAKTDRVDAHLLALFAERVHPTPRPLPDAALQHLEALMTRRRQLLDMVTAERNRLEHAAAPIRREITQHLRWLERRVAAVDRDLDDTIQKSPVWRAKEDLLRTAPGVGPVVSRTLLADLPELGQLNRKQIAALVGVAPFARDSGTLRGKRVVWGGRAPVRAVLYMGALVATRRNPVLRAFYLRLVAAGKPKKVALVACMRKLLTILNAMMRTNTTWQQISQPETA

SEQ ID NO: 366867 - protein, 408 aa, unidentified
MELKPMHRRVIALDVHQAKITACAVVEHDDGRVEVTKRDFGAFRRDRRALAEWALQIGPEVVVMESTGVYWKSPFAALEAVGIIAWVVNARHVKAVPGRKTDMADAQWLATLARAGLLRASFIPPARMRELRLVARQRQKLVGMCSAEKNRLHKVLVDAGIRINVLVNDIHGQSARAMVKALLQDRPLHEVLDLKGRLRASRAELFEALSTERLSATHRFVANEILQHIEQIEQRIALMDQYLLQGLQPWQAQLKLLQTIPGIDEQGAAMLLVEIGADMDAFGSAERLASWVGICPGNNESAGKRKSGRIRRGNAWVRRLLCEFAQAAARTRCAFKDKFQALAIRKGHKKSIVALAHKILRTVYAMLANGAHYQDRAVDYEALNVQRNAPRWIKMLRKHGFIATPAAA

SEQ ID NO: 366868 - protein, 375 aa, unidentified
MSTAMTRTNQDTKTLYVAFELGEKEWKLAMSPDLHTRPRLRTLRSRSTRRLLEILEKERLQLGAAQIVSCYEAGRDGFWLDRFLHSHGIDNRIVDSASIEVRRRARRVKTDRLDSQKLLTMLHREALGEKGLWSVVNVPCVADEDARSLQREYRTLVKERSRSSNRIKGLLASQGAVAPRIDRGFLDWLASAKLWDGSALPSGIRTRIEREFDRWRFTHDQVLALEKERRDRTNDETDHSLDKVRALFALKGIGLGAAWTWGLEFFTWRNFRNGKQVGALSGLAPSPYQSGESQHELGISRAGNRWVRGLAIEIAWGWLRHQPDSALTHWYNERFARGGPRARKIGIVALARKLLVALWRYVETGALPEGAVVKS

SEQ ID NO: 366869 - protein, 397 aa, unidentified
MYIVGIDIAKRKHEAAVIDGDGAVVIKPFSFTNNCSGYNRLLAMLAKAKLPLDEVSFAMEATGHYWLALFTRLQKEGFRVQVINPVQTNSIRSFYIRQAKTDPRDALLIAEVIRFGHFSESTLHPENIYELRELCRGRHAIVSMQADVKRKVVALLDQVFPEYETAFTNMFGDTSMAILQTCPTPKELSEMPFEELCHLIEVSSHKRFRMAKAQELQALARNSFGFAMAGDVFSTMIRLYAKHLVFLKQQVREMDRKIAEIMDTLDTPITTITGIGPTLGAYILSEIGDINRFSSAAKLAAYAGIDPTMRQSGEYNGVRNRMSKRGSPYLRHAIWLAASSAVLHDPALKLYFQKKRDEGKPYMASVGHACRKMVSIIYAVMRDNKAYVPCIPSEISA

SEQ ID NO: 366870 - protein, 424 aa, unidentified
MKVTYQTCCGVDVHKSFLVATIIKTTAGIEPSYQKKRFSTFNNSILDFKSWLLENECHDVCMESTGKYWVPVFNLLEDQINVTIANPKWVKAVKGNKDDTKDSKWIGDLFRLGLVKSSYIPCRLIRILREYTRYRYKLVSCRSSEKNRYQNALTVCNIALDSVVSDIFGKSSSSIIDYLLEQSGTTINHEEIASKLLKSLKSKEDAVIESIEGYQMTDAQKYRMRLIRAHMDYITAEINDVDKQIESLISSDPDYDKAIQLLTTIPGVKRDSAITIISEIGIDMSQFCNSKRLCCWAGLTPGNNESAGKKKSVRITRAGVYLKPALVQCAHAAVKSDKSPYYKTKYESLVKRRGKKRAVIAIARMILTAIYRMLSTGEVWNPSDLYKIDMPAPLAEKQKAKAIKQAKKLLQKEGLLPPDEPLAS

SEQ ID NO: 366871 - protein, 389 aa, unidentified
MTQADDLSRSLAAFDQNSTLIVVVEMSAANWLVAAMIPGVDRQPMKKLEPDPNALLQLLERWRAEAAKMGRTIGRVVLAHEAGRDGFWLARWLRARGVEAHVIHSTSVAVSREHRRAKTDRLDTGMLMRVFLGWLRGERGHCGMVAIPTLDDEDAKRPSRERENLVAECTRISNRLKSALARLGIRGFKPLLRRAPQRLAALRTPEDLPIPPNMLAEMERDMARLAVVRAQIKQIERTRLQALQQAPEGGPHAMVRLLARIVGVGIETADMLVREVLSRNLRDRRAVARYAGLTGSPDESGSKRHEKGLAKSGNGRVRRGLIQLAWRFLMFQKGSALAHWYRARTEGPKGARKTKMIVALARKLLIALWRMVTTGIVPAGVELRQAAAA

SEQ ID NO: 366872 - protein, 344 aa, unidentified
MKIVGCDFHPSFQQVAILDVSTGEVGEMKLMHATGEAERFYRELEAPVLVGMESMGNTLWFERLMGQLGHELWIGDAAQIRASYVRKQKTDKRDAGHILQLLIEQRFPRIWVPSHVERDQRQLLLHRHRLVQMRTKVKTELQHLALNQGLQKQRHLWSVRGRADLEKLPLEGWTARRRLDLLKVLDLVEGQVAELDEAVGKVAFANASARLLMTQPGVGPITALAFVVTIGDVGRFKRGKQVASYLGLIPSERSSGQKRRLGAISKQGNVFLRTMLVEAAQSAVRHDEEFKKEYAHRCHQKPKGVAKVAAARKLAVRLYWMLRTQTPYTHAVHNEGSPSHPVVG

SEQ ID NO: 366873 - protein, 346 aa, unidentified
MEHPTTIAVDLAKSVFEVAVSSEPGRVCLRKRLTRGQMAAFFASRPPSTVLMEACGTAHFWGRRLSGLGHRVLLLPAQHVCRYRLRDKTDAADTLALLEAHRNEKIVPVPVKDAWQQAMAGLHRIRSGWIATRTARLNTVRGLLRELGINIPLGARLVLPRLCQALSEPETPIPESLHPVLLAAAGEIRTLEQNIQQVDRQLESLSRGLPAAVSLRSVPGIGLLSATALIASVGDPSRFRSGRRLASSLGLVPKEHSSGSSRHLGSITKRGDSYLRTLLTHGARAVLWAAKHDQNPDALRRWALATEKRRGHNRAAIALANKLARIAWAVWSNNTLYQEKTVEAVR

SEQ ID NO: 366874 - protein, 392 aa, unidentified
MYIVGIDIGKNHHEASIVSPEGKQIGRSLRFATTHKGADSLMSFIFKNIGNSPCVFGMEATGHYWYPIYSFLKAKGYTIYVINPIQSDSLRKMYIRQTKNDSIDSFLIAEVIRFGQFGTTSMADENILAMRQLCRYRDSVISSRTEIKLRIGTIMEQIFPEYEKQFSSLWVSTSMGILEKYLTPENIENAPIDELFEIIKDKSHNRLTKAKAISIKEAAADTFGIKIAQDAFSFQLKQLIDRMNFLDKQIEALDIEIMKYYEQFDCYLHTIPGIGMIATATILAEIGDIHRFKSSSALVAFAGIDPTVRQSGEFNSTHNHMSKRGSPYLRHAIFLAATTCSFHNSPLNAYYKKKRDQGKHHLTATGAVARKLTTVIYAVLRDSKPYEPKKFC

SEQ ID NO: 366875 - protein, 337 aa, unidentified
MHTKEEREGILWEFHRSDLSAPAACRSLPLFPNKDNLHAWLKLEEAGALVVVDQLRNIGSLVLSRTKLAGMPHTYLPGLAAHGASKLFAGDAKTDERGAMVIVKTALGIPDTLLAVADRPPEIEAARSPAVQRDFLTCENTRSKNRLRSILLESCPEFEAQADLSGAATLKLMVAVGGPWSISEASSQAVGTLTRGCRRAKVAALVESVESSSRPHPAAVACEDRAVRLLARRISENAAETGSPTSEISALLAANEMYRCLLAVPGIGPRTASERVMSIDIADIAGRDRLASRCGLAPRNRRSGTSITSVSASRQGNKRLKNLLVFSSNCFARSRNR

SEQ ID NO: 366876 - protein, 391 aa, unidentified
MIFVGIDVAKDKHDCFILNSEGTVLADVFTIANNRIGFETLLSRIQSCSQGESKIKVGLEATGHYSYNLLGFLLDSGLATYVINPLHTNLYRKSLSLRRTKTDRIDARTIAMMLMSDVDLKSYSNTAYHNEELKSLTRYRFDKVKERAKLKSSVARLVNILFPELEKLVSSLHIAVVYALLSNYPGASYIANANTEELAETLCTASKGRYTKSKTAKIQVAAGVSIGSKMPAKSIELKHTIALIRELDKEISEVESAIDKITSQMDSPIFTIPGIGRHMGAMILAEVGDFSNFASADKLLAYAGLSPSTYQSGQLQNCYAHMEKRGSRYLRYALFNAAKYVCLWCPTFSAYLEKKRSEGKHYNVAISHAAKKLVRLIFAMQRSGKAFLADY

SEQ ID NO: 366877 - protein, 375 aa, unidentified
MSDHSEAFIGLDTSKLRNAVAIAEGVRGGEVRFLGEFENSATATAKLVKKLAAKYQRLTFCYEAGPTGYGLYRQIKKLGHECMVVAPSLIPKKPGDRVKTNRRDALNLAKLLRAGELTAVWVPDRSHEAMRDLTRARETAMMDLRSKRQQVSAFLLRRGLHYSERKKTWTKTHLNWLASQKLEYAEQRLVFEEMMLAVRQAQERLERLEQAIRVAVPDWSLAEAVTALMAMRGIDLISAATFLAEIGDLSRFQHPSELMGYLGLVPSEDSTGDKIKRGPITKAGNQRARRMLVECAWSYQHPPRVGQEKQEKVAAAPRAVREIAWKAQCRLHGRYRALVRRGKLKTVAVTAVARELAGFIWAVSRAITTARVVAK

SEQ ID NO: 366878 - protein, 340 aa, unidentified
MNATTYGLDIAKRVFQMYWVDAQTGEIANRRFGREELIEFLARRPAGRVVLEACGSAHWWARKIRALGHEVVLLHAKFIRPFVQTNKTDAADARAIWTAVQQPEMRTVAAKTEDQQAMLALHRMRSLLVKFRTMQVNQLRGLLYEFGATFRAGRVAGLAEVRARMAELAEVLPGTMACGLQDQLQRIDALEQDIDRLERQIGSWQKQEAACRAIAEVPGIGKLTATALVATMGDAKAFKSGREFASFLGLVPRQSGTGGKIRLGSISKRGDPYLRTLLIHGARSVLCPAKAPTTWQREIQARRPANVAAVALAHKMARTAWAILARGQAYQRSYVSVKPA

SEQ ID NO: 366879 - protein, 392 aa, unidentified
MSQHFRFDASRSLTALEQDSTIVAVIEMSQTKWLVAALVPGVERQPLKKFDAQEEMLLKLLHRWHCEAGQAGRNIKRIVVAFEAGRDGFWLARWLRARDVEAYVIHPTSIAVSREHRRAKTDRLDTELLMRVFLGWLRGEKRHCSMVAIPTIEEEDARRPNRERQNLVTEQTRIINQIKAIFARFGLRTLRPTMRKLAEGLEDLRTAEGTPLPQNTLSELRRHLARLRFVRDQIHAVEQERLRKLAVAPAAETKSPDATVRLIARVFGAGIETADMLVNEIFSRHWRDRKAVARYAGLTGSPDESGSRRRERGLARAGNVRVRCGMIQLAWRFVRFQKNSALAQWFAARTADGRASTRKTMIVALARKLLIALWRLVTRGEVPQGIVLRPAS

SEQ ID NO: 366880 - protein, 319 aa, unidentified
MEGSITSFVGIDVSKASLDIHRLPEERWQKVSNDKPGIQELLGTLPAVGSCLIVVEATGVYHRRLVTDLVDAGHQVAVVNPRQARDFAHGLGIVAKTDPIDARCLAHFAKHVRPRAVAQNSQKQAELQELVTRRRQLVDLRRVELNHKESASSKIVRKNVQRMVDVLRKQIAQLDKEILRLIEEDDDWNQKAKLLDTAPGIGRINIVTLLGQVPELGQLNRQKISALVGVAPFNRDSGRFHGKRSIWGGRASVRSVLYMAAITARTHNPVIRNFAKRLEAAGKPFKVVITACMRKLLVILNAMLKNKTKWSPKNCLANA

SEQ ID NO: 366881 - protein, 356 aa, unidentified
MNYVGIDYHKRYSVVTAVDEKGKVIRTQRLDNRPDPFQAFFSSLDGPSEAVLEATRTWGVLYDLLEEIDGVESVTLAHSLKVRAIAEAKIKTDKIDSHTLAQLLRVDLIPAAYIPGKETRSFKDMMRQRIFLVRMRTRLKNRIHVLLDRRHIPPPPVTDIFGKGGSAYLKKLALPGIDGEILRENLELLEVFDTLIKDAELEIQQLIGNDPRVKLLRTIPGLGPILAAVVALEIDDVTRFGAAPKLAAYAGLVPSTYASGGKIFHGHLIHMSNKWLRWALVEAAWVAMRNSPYCRAYFESRKRHKGPHVAIIALARRLSEIVWHVLNEKRAYEERPSRVYKRTPSKETSPAALTIT

SEQ ID NO: 366882 - protein, 364 aa, unidentified
MKKVSTTPRKKSRNLSQSDLTIGLDLGDRSSCYCVLDETGRVVMEQKVSTTTKALQTALGGMPRSRIALETGTHSPWVSRVLSALGHEVIVAHARNVRLIGESRRKDDRLDAQTLARLARIDPKLLCPVKHRSAQAQADLTVIRARAGLVRARTALVNTARGLAKSYGERLRGCNVRNMNAEKAEGLSPELQAALEPLLVALESLSQQIREYNERIEKLAQERYPQVARLKQIKGVGTLIALTFLLTLEDPHRFRKSRDVGCYLGLQPGRRNSGQSEPQMHISKEGDPYLRTLLVQGAQHILGPFGIDCDLRRWGLKLAERGGKKRAIIATARKLAVLLHHLWVSGEVYQPLHNSSRLALPAAA

SEQ ID NO: 366883 - protein, 300 aa, unidentified
MNQYVGIDVSKAMLDVAVLSGDSQGFLNTESGWAELSQMLANLKPTCIVLEATGGYEKGIFLELLELGLPIVRVNPRRVRDFAKATGVLAKTDQLDAQVLARYAQAINPAIRQIKGDEKLRALVSRRRQFLEIQTQEKNRAQQKQEPEIQQDIQETLIWVKEKLSKLNKQIEAILLLSPVAECLRSVTGVGRVAAATLMSELPELGQVSGKEIAALAGLAPYNCDSGQYRGKRKIFGGRRTVRTCLYMSAMSAKRYYPAIKEFYERLRQAGKPFKVAITACMRKLLVILNAKVKEHLSLT

SEQ ID NO: 366884 - protein, 345 aa, unidentified
MTIVETRAVTGGVDTHADVHVAAALDPVGGLLGVREFPATAAGYASLLSWLAAFGTLALAGIEGTGSYGAGLARHMAAAGIQVVEVDRSDRQDRRRNGKSDPLDAVSAARAAQSGRARGAPKGRDGAVEAIRALMVAKRSARNERTQAINQARSLIVTGPDDLRTRFARHSAAQLVTGLAALRPRPGDVPGFATRIALRELGRRAQFLDTQIGRLDELIIPLVTARAPSLLALYGVGADTAALLLIAAGDHPERLRSEAAWAHMCAVAPIPASSGKVRRHRLNPGGNREANHALWRIVITRMSAHPATRAYVDRRTKEGLSKTEIIRCLKRYVAREVYHHLRAGG

SEQ ID NO: 366885 - protein, 454 aa, unidentified
MQKQDSYDYYVGIDCAQNKHDFAMKNNQDKFLIKKGHFSNTLQGYEKFLNTVLSKCLDKDKILFGMEVTGIYGTNLYERLKSDGYHVVMIFPDSVKNCRDYKRLNKTDKIDSACIAELLLNGDAQIVHAEKNGYTDLKAYIRRRNALKVTCTQETNRFLAKVCLYFPDLLKVFPSGRATLKAIFSIYPTPYSIIEADFNELVSVLQKASKNKFGVDKANELIHAARNSIVVRKSISDGELYNIHSLIDSIDSLESEIRHLEKIIDSKAEEFPAYHVLLTLTGCGKITAATIVAEIGDISRFHKASQIVSLAGLYGDNSKSGSSVNKRGKISKKGSRYLRHAIYMVAEFARRNNPIFKAYFTKKKNGDRTKHILAVNAVANKLCKVIYSLMKNQSTYIIQYRDLAKLSESTQNEFFQNAETDFSAKTRRKKYLYEDEYGELHEFVFKSIKTALIE

SEQ ID NO: 366886 - protein, 336 aa, unidentified
MNIKTLGIDLSKHIFQLHGVDTAGKPVLKKKLSREKLPEFMATLSPCKVVMEACGGANFWAREFKKAGHEVSLISPQFVKPFVKGNKNDRNDSEAIVEAASRPTMRYVSPKTTEEQDMQTLLRLRESCIKTRTQMSNQIRGLLSEYGIVIPQSIARLHKAVPDLYDRAQDNGLSEFFKSLLEMQFELFKKLEEQIETYDQKLKALVKASEACQKVMAIEGVGPVTALALIIAIGNATEFKNGRHFAAFIGLVPRQHSSGGRDRLLGISKRGDNYLRQLLIHDARAALINSGKKTDSRSLWMNKLKERRGHNCTVVALANKTARTALAILKKVKIIR

SEQ ID NO: 366887 - protein, 341 aa, unidentified
MMIIGCDFHPRFQQIAYVDQETGEYGERRLGHPAEAEGFYRSLAGKQVRIGAEATGNFRWFRRLMQELGQEFLLGDASAIRASYPRKQKTDKRDARHILSLLVEDRFPVVWQPPMENEDLRQLLLHRCRLVRMRTRIKNQLDSMAKNEGLLSSRVWSPSRRQQIEALPLPGWYAERRTDLLGLLDQLYQRIEPLDKAVRAAAAADRQAGLLMTHPGVGPVVSLAYVLIIGDWQRFPRGGQVASYLGLIPAEESSGNRRRLGGVSKQGNSMLRWLLVEAATIAQRHDPSWHRQYLRLSIHKHHGVAKVAIAHKLAVRLYWMLRSGQDYAEVKERGSHAGQSV

SEQ ID NO: 366888 - protein, 307 aa, unidentified
MFIGIDVAKDRLDVHVRPAGESFVVARDGEGIEELANRLSAMTPTLVVLEATGGFETVVAAGLAAAGLPVAVVNPRQIRDFARATARLAKTDSLDAAVIAHFAEAVNPPVRALADPQQRLLGELMARRRQLIDMMVAESNRRRLLTARRTLKSVDRVLATLKAQLQEIDHDIDIAVRGTPAWREAEDLLISVPGIGPKIARTLLAEMPELGRLDRRQIAALTGVAPFNRDSGTRRGRRTIAGGRPMVRSALYMSILVSIRRKLPLADTYHRLRASGKPPKVAIVACMRKLVTILNAILRDKKPWATA

SEQ ID NO: 366889 - protein, 367 aa, unidentified
MKKVSTAAAKQMRNLSEPKLTIGLDLGDRSSWYCVLDETGEVRLEQKLGTTPKAMKEVFGAMLRSRIALETGMHSPWVSRALSELGHEVIVAHARNVRLIGESRKKDDRLDAQTLARLARIDPQLLSPVKHRSAKAQADLTVIRARAGLVRARTALVNTARGLAKSYGERLRGCNVRNMNPEKAEGLSPELQTALGPLLAAIESLSERIRECNQRIEGLAQESYPQVALLKQVKGVGTLIALTFLLTLEDAHRFRKSRDVGCYLGLQPGRRNSGQSEPQMHISKEGDPYLRTLLVQGAHHILGPFGADSDLRRWGLKLAERGGRNGKKRAIIATARKLAVLLHRLWVSAEVYEPLRNNSRATMPAAA

SEQ ID NO: 366890 - protein, 344 aa, unidentified
MQIRSIGIDLGKTTFHLVALGSHCQVVVRKRFSRSQLLVYTANLPSTLIGMEAGVGSHFLGRALREQGHEVRLIPAQFVRPFVKSNKNDYRDAEAIAEAVERENMRFVPIKTEDQLDLQALHRVRDRLVARRTSVINQIRAFLLERGISFRKGPASLRRQLPEILENADEKLSPRMRSLLDFLWQEWKGLQSQIESLNEDLEQIASSDPACVRLQQIPGVGPLIATAVVSAIGNGAAFRKGREFSAWLGLVPRQWSTGGKTKLLGISKRGNPYLRKMFIHGARAAVLRVKREGSNLGKWMGQLETRTARNAVIVATANKLARISWAVLASGNNYHPLYKAAFSS

SEQ ID NO: 366891 - protein, 354 aa, unidentified
MVVVGADVHKRSHTFVGVDDAARELGHKTFPATTEGHRAAVRWARATFGRELRWAVEDCRNLSARLERDLLTDGQQVVRVPPKMMAEQRRIARTRGKSDPIDAAAVARAALREPDLPVASHDDTSRELKLLVDRREDLVRTRTATINRLLWRVHELDSGWAPPARSLDTVKHQQALKTHLDSVPEGGVPGLVAELARDELAEVVALTSKINALAARIERRVRAAAPTLLAMPGVGGLTAAKIVGEAAGVSRFKSEATFARHTGIAPIPVWSGNTAGRVRLTRSGNRQLNAAVHRIALTQIRLDGLGQAYYRKKKREGMSNREALRCLKRRLVRVVYGHLHDDQETARQLLPAAA

SEQ ID NO: 366892 - protein, 366 aa, unidentified
MKKTSTVRVNGNMIFKGHKLTIGLDLGDRWSFYCVLDEAGEVLLEQKVPTTPEAMKQTFSRIPQSRIALETGTHSPWVSRLLTELGHEVIVAHAQKVQLITKSNRKDDRHDARTLARLARIDPELLGPVRHRSVQAQIHLTVIRARAELVSARTALVNAARGLVKSYGERLPKCGTYQVSRELAAELSTELRDVLEPLLKEIESLNERIKEYDERMEKIAKEVHPEVSLLKQVKGVGTQIALTYVLTIEDPYRFLKSREVGCFLGLRPGRRNSGESEPQKRISKEGDRYLRTMMVQGAHYILGPFGEDSDLRRWGLKLAERGGKNAKKRAVVAVARKLAVLLHRLWVSGEVYEPLRNSQKAMRAVA

SEQ ID NO: 366893 - protein, 343 aa, unidentified
MQTVTTIGLDIAKSVFQVHGVDAAGLVVIRRKLKRRYVLAFFQKLPPCLVGIEACASSHYWARELQALGHTVRLMPPAYVKPYVKRQKNDMADAEAICEAVTRANMRFVPTKTPEQQSGLMLHRTRHLFIRQQTAVINAIRAHLAEFGIVAPVGRKGVEELLRVVADGNDKRVPDVARACLAALSSQLLRLKEQILQFDRMIMAWHRSNETSKRLHYIPGVGPLLATALVANVADPSTFRSGRNFSAWIGLVPKQHSSGGKDRLGSISKQGDRYLRSLFVAGALSVIRYAKVHGTKHRPWLTALLARRPTKVAAIALANKLARMAWAMMARGERYRNPVALAA

SEQ ID NO: 366894 - protein, 372 aa, unidentified
MQGTTFVGLDVHKPWINVAALLPGHDTPIEWRIANETQAIRKMLKRVASLTAGDVRYCYEAGPCGYALQRQIISWSEASCMLVAPSLIPRKPGERIKTDRRDAKRLAFLFRAGLLTEVHPLTEEDEAARDLSRAREDLREDLVRARHRLGKFLLRRAVTFTPGKRAWTLAHRRWLDSLRFDNPAHSVVVADYLLAIDHIEQRMKTLIVHLERLALDPRYAPAVATLRCFRSVDTITAVGLAVELHNFERFTAARRLMSFVGLIPGEHSSGDKRRQGSITKTGNSHVRRLLIEAAWNYRHQPHVGASLRNRRKGQSPKVIALADRAMLRLHRRYQQMTLRGVLPQKAIVAMARELTGFVWAALSPLAQQSTPR

SEQ ID NO: 366895 - protein, 433 aa, unidentified
MLKLNYMSTLFVGIDVSSKTNAVYAMDFEENKYISSSFGNNQPGADKLVNMIAECMHKHKNLNTILIVLESTSVYSVHISNFLSTSEVLMPYRPYVFCVNPKATSNYRKSYIGMEKTDPTDAYLIADFGRVGRTKKLEPWRGGQFISLKRLTRHRMHLSECITREKTYMVSNLYLKFSELQLLEGDDKPFGSLYGATSSAVLTEFLSPQEIIDMPEEELLTFLAGKSRNRISDLSKTSELLRKAARDSYRLDKCMYEPLSISLASSFNCIHAYQKEIKLIEQAIEKCINGMNPNALLILQSIPGIGPIWASGILSEIGDITVFHSSDALAKYAGLYWPKGDSGDFTSEDNKMSKAGNPYLRCYLGEAANSVRKHIPEYADFYARKYAEVTKHQHKRALALTSRKLVRLVFGLLVKNQLYTGEKLDTEYNIESN

SEQ ID NO: 366896 - protein, 458 aa, unidentified
MRTIGIDLAVTAAHMAVVVDDMGEFVTPVLSFHSSWDEILYLVARAREGVEEDHPLQAVMEPTGMAWFNVAVPLSRLGVTAYLVNGRKVAALRRYYKQHAGSDRISARVLAKVPLVDAESLYPLAIPTPVQLACQRGCKEDDRLQTLITAIQNRLMDTDRFAWPGLKQVLPDSFGPVARLFRNDWYDPARVIEAGSERLTQVFAAVVGPKDDLGWVPDLVQLAIEVLMLYGTEALDYTLLQDEVRRDQELLAVAERQQAAVLQDTVRPLYRQLHPSGHLETLYGVGEKGAPVYASFIGQADRFVDNRHFRGWHGLVPDSRQSGESEAKGLSISKAGPDLIKKFGFMGADVARRHDPQIAAIYYDQMVHKGQHHTQAVCACATHLLDRVLVVLREDRPYELRDVDGTPVTPEQARAIIAERYTVPEDIRKRNTKRARRDRAEQRAESRQSKQKGSRPRR

SEQ ID NO: 366897 - protein, 371 aa, unidentified
MKSILSVGMDVHKNSFSLCAYDGYTGEIVSESTFASDVKLVIKFIEALKSRYENDVEIKCGYEAGCLGYSLYKLLTARGVDCVILAPTTMQVSAKNKMVKNDRMDALNIAKNLASGSYKAVYVPDEEAVEIKEYIRMIHDFKKELKRVKQEICAFVLRHGYQYDGKSKWTIRYMNWIRELEMSEIQRETLNEYIAEMENLNDKIDRFMNRINEIYQSERYHEKVSKLRCFKGIETFAAMTIQVETADFERFPNAKAYASYTGLTTGEHSSGDKNNRIGITKQGNTVIRKTLVECAQALAKGNVYAKKSQRLKSRQKGMDVNIIVYADKATERLKKKYQKLIERNVPRNKAIVAIARELACFIWGMETGNIH

SEQ ID NO: 366898 - protein, 444 aa, unidentified
MLNVTFSHCAGLDVHKKTVVATRIRPLGESDEAEQETQTFGTTTAELLTLLDWLLGWEVTHVAMESTGVYWQPIYNILEGNLEVWLVNAHHLKQVPGRKTDVGDSAWLAQVMRLGLVKPSFIPPQPQRDLRDLTRYRVKLVQERAREVNRIQKVLEGANIKLASVASDVLGVSGRAMLEALVEGVRDARQLAELAKGRLRQKLSQWEQALQGRMRPHQAYLLAHQLAHLDFLDEEIAALSEQIERQLAALPPVVSPPTGEDTGSGAHPEGVGEPTPPLTATEAAALLDTIPGVSLRLAQAMLAEVGPDLTRFPSAKHLAAWAGLAPGNHESAGKRHSGRTRQGNPTLRTLMIEGAWAAAKTKQTYLATLYHRLAGRRGKKRAVVAVAHAMLVSAYYMLSRRRPYLELGPAYLDHRKKESLVNRLMQRLNRIGYAVTVQPMPTPA

SEQ ID NO: 366899 - protein, 406 aa, unidentified
MAAPTTAARVKKALANPEPSTHDPSRSLTALEQDSTIIAVIEMSQSKWLVAAVVPGIERQPLKRLIAEKEALLKLLHRWRNEAREVGREIKRIVVAYEAGRDGFWLARWLLGQGIESYVIHPTSIAVSREHRRAKTDRLDTELLIRVFLGWLRGERRHCSMVAIPTIEDEDARRPNRERKNLVTEQTRIVNQLKAIFTRFGIRIVPSTRRNLEQRLEGLRTAEGTLLPENTRAELCRHLARLRVVREQIRAIEQERLRKLAAAPGSARGSHAMVHLIARILGVGVETADMLVNEILSRHWRDHKAIARYAGLTGSPDESGSRRRERGLARAGNARVRCGMIQLAWRFLRFQNNSALAQWFAARTTDRRGGTRKTMIVALARKLLIALWRLVTTGELPQGVVLRPAA

SEQ ID NO: 366900 - protein, 368 aa, unidentified
MNETITSFVGLDVHKDSTAIGEAEAGRGSPRFIGTVGPDLGQLLKALKSLGKPEMMLVVYEAGPCGYGLARQLRSRGYACEVVAAGKIARRPGERIKTDRRDALTLARLARSGDLVKVMVPDERDEAMRDLSRAREDAVKARLKARQQLKALLLRHGHRYTGKSSWTLAHERYLATVSFAHPSQDIAFAEYRQSVREGYERVERLTEALRTQTDHWRMKPLVAALSSLRGIDFVAAVTLAAEIGDFSRFAHPTDLMGFLGLVPSEYSTGDSRRQGDITKTGNGHARRVLVEAAWNYRFPARLSRVLQVRQEGQPKAVREIAWRAQLRLTHRYRRLSSRKLHPNKICVAVARELAGFLWDIARQVKLAT

SEQ ID NO: 366901 - protein, 342 aa, unidentified
MKQYVGLDVSQKETSVCVVDESGKVVFQGRARSDPGALAEVLSKRAPGAERIGFETGAMSSWLWHELNRIGLPVVCIDARHAKAVLSVRMNKSDENDAQGLAELVRVGWYREVKVKSPESQATRSLLVARSRLVAIRRDLENQVRSMLKELGLQFSRSIGSQFRRKVLELLAEDHPLRSVIGTLLRVHEQTCEEQEKLDRQVRRLAHDDCTTRRLMTVPGIGVVTALTYRHTIDDPSRFSSASDVGAYLGLTPRRKQSGETDVSGRVSHWGDRLLRTYLYEAASVLMHRTKKWSALKAWGIRLSKRIGMKKAKVAVARKMAVLLHCIWVDGTSFQWGSENTA

SEQ ID NO: 366902 - protein, 330 aa, unidentified
MKNYVDVIGIDVSKLTIDAHIHHRAVHRVFSNTPKGFKALLSWTETYLEEHPYFFCFENTGHYSTKLSVYLSENDVDYVEESPLAIKRSAGIVRGKTDRLDAGMIARYAWLHKEELILSSPKEQDIQELGRLLSFREQLVRDRTGKMSSLKEMQTLLSSPSTDDCCKIIKKTIHYLTKQIEALEQRIKKLMKNDESLQKNYELLNTLKGVGLILSCQILYHTSNFKRFDSWRQFSSYCGVAPFEHSSGTSIRRKNRIHHIGDRKMKTLLTLASVSAIQCDKELKQYYKKKLAEGKPKMVALNNVRNKILSRAFAVVKRGTPYVELQKFAA

SEQ ID NO: 366903 - protein, 408 aa, unidentified
MRVVGLDIHRVFAEAVMLADGTIRRLGRIGMTREHLEAFARRLTHDDHVVVEATGNATAVAEVIGPHVGRVVIANPRQVRLIAEARIKTDVIDATVLARLYASGFLPEVWVPDQRTLALRRQVTRRNQIVRQRARLKTIIQSILHAHLVPPCPHADLLGPKGRAWLLGQTLPPDEQDAVVRHLREHDRLSEDLRVVEREIARDALADADTKRLMTVPGIDMVVATGLLAAIGPIERFAGPDKLVAYLGLNPSVHQSGEGRPRHGRITKQGRTHARTMLVEAAWQAVRGPGPLRAFYQRIARRRGNHIAAVAVARKLAVIVWHLLRHGEDYAWVRPALHAKKLRDLELRSGQPARRGQRGAAYAYNLSRTRLEERRRAEQAETAYRRQTEGWSRRGRRAPTSAATEERR

SEQ ID NO: 366904 - protein, 402 aa, unidentified
MNCVGIDVSKGKSMIAVMRPFGEVVVSPFEVRHTASELSELARLLKNLDGETRVVMESTGNYHAPVAWLLHGAGFYVSVVNAMLVHDYGNNSLRRGKTDKKDAVKLANYGLDHWLTLPRYVPEEDTRLMLKTCYRQYQQYSKVQTMLKNNLISLLDTAFPDANRLFTSPPRADGSEKWVDFVAAFWHCECVCGLSEKAFTAKYQKWCRKHGYNFSQDKALDIYASACGRFGVMPKTNTAKLLVEQAISQLQTTSAALAALKQEMQSLAASLPEYPVVMEMFGVGPTLGPQLIAEIGDVRRFHSKKALVAFAGIDAPPYQSGQIDVRSRSISKRGSASLRRTLFLVMGVLLQCAPMDEPVYQFMNKKRSEGKPYRVYMMASANKFLRIYYASVKAYLDSLEHD

SEQ ID NO: 366905 - protein, 343 aa, unidentified
MSNDTRIAIDVAKAVFELAISDRPGHVARRERLPRAQFLPFLALQPAATVFMEACGPAHHWAREIQRLGHRVVLLPPHHVRPYIRRNKTDRADAKGILEASRNDDIRPVPVKTVNQQVLTSLHRLRSGWMHDRTARLNGLRGLLRELGVFIPVGSDKVLPAAWALIEDADSVLPEALRPIFAEACREIREIETRTKLVERQLEALAEQLPAVEHLQTIPGIGLLTSTALVGFIGDIRRFPTGRHFASYLGLTPREYSSGLKRNLGRISKRGDGYLRTLLIHGARSVLVHARKQQPDRLREWANALSKTHVPNKVAVAVANKLARIAWAVWKHERPFALMAKAA

SEQ ID NO: 366906 - protein, 395 aa, unidentified
MKHILSFDIAKGKSVYCFIDELRNTIIDATLIEHNKNEFDKLYNLIKDYSNLIVIMESTSIYHLPVENYFRSKGIDTIVINPKLVKQFKDTLNKSKTDKLDCFKIARCYLGTIDNFYYKNDEYFMYNPLARQYWSLVEGQTRLKNRYKQLIEIVFPEFNLIFNDLYDDLALNFIHDFPHPILFVNRRVDYLMNYLKEKNGTTQAFRFKNKVLKMKELASNSLCFVTFDSLQVQNLVQTIEMIQYHKSEINKIKNQLIDEMKDKKLFKIINSIPGLSEFSTALFLAEVGDITRFDDKYQFISFIGIDSVTSQSGVSAYHGPISKTGCKFGRTILFNVVTTIIQISAHSDKSNPIYLFFRKKQSEGKHHYKCIIACETKLCKIIYKLCSSNCLYENK

SEQ ID NO: 366907 - protein, 360 aa, unidentified
MEVGQTMADHGVVGGVDTHKDLHVAAVVDELDRVLESRCFATTRHGYQQMLTWMRSFGQLRRIGVEATGTYGAGLLRYMQNAGVEVLEVTTPDTHDRRKRGKNDDLDAQNAAHAAFAGRRTVTPKSRDGMVESLRVLKACRKTAVAARRVALQMIHNTIVCAPDELRETLRRMTRMQLIRTLAAWRPDLTDYRSVVSAYRITLKSLGRRYLELHDEIADLDTMIVAIVDELAPALVARNSIGHGSAAQLLVTAGDNAERLQSEASFAALCGASPVPASSGKTTRHRLNRGGDRAANSALHIIAIGRLRTDPRTKAYIAKRVAEGHSKLEAIRCLKRYIAREVFSLISQRKREINQGRNAA

SEQ ID NO: 366908 - protein, 344 aa, unidentified
MSEVTTIGLDIAKHVFHAHGADARGAMVFSRRLTRSKLLDFFVRHPRCVVALEACGGAHHWARELRAIGHEVRLIPPAYVKPFVKRHKNDAVDAEAICEAAQRPSMRFVAVESEEQQAAALVFRTRDLAVKQRTQIANTIRGHLAEYGWVAPKGAAHLAMLADLLEGGEIGDTLPEAARPMFAMMIDMLTVLDRRIGELDKEIARLAREDEVARRLMTIPGIGPITATAIAAIAPPAETFAKGRDFAAWLGLVPKQASTGGKQKLGAISRMGERTLRRLLIIGSSAVVLQASKRGAPAGSWLEGMLAQKPRILITVALANKMARTVWALLVKQEDYRAPVAVAA

SEQ ID NO: 366909 - protein, 371 aa, unidentified
MKSIIYIGMDVHKKTYSLCALLKETGEIIGETKIPADVSLIIKFIENAKKSVDSDDVQIKTGYEAGCLGYSLYWQLAEKGIECDILAPSTMHRSAKNKVVKNDRRDAKNIATNLANGTYKSVYVPTDEYVEIKEYIRMMHDFKIELKKVKQHINAFLLRFGHQYPGKSKWIPAHIKWLKELELSDMYREILDEYLSQFEILSEKIERFKYRLEELSQKETYKEKIGQLRCIKGIDTTVAMTMHAETSDFDRFPTANAFASYCGLTPGEDSSGDSYHRVGITKQGNSIIRTTLVEAAQVLVRGTIGKKGKKVKSKQKDQDVKVIDYADKAVIRLQKKYHRMIFRGVKRNIAITAVARELACFVWGIETGHIS

SEQ ID NO: 366910 - protein, 340 aa, unidentified
MKRLSSLTGLNLNSIEAIGLDVAKEKIDICLFSSQQSLFYRIANNSQAICQFSTDLTKNGLLKTVPFVLESTWIYHLQCALQLTDDWWDVKEINPIITHQQIGYTIRWTKTDTTDSLLLAELWVTKWKKLHSFKRNRKIIELRKKVSLLAWVEKTMQAIKAQYDSYVKSARILWINTDDVDFVRKSLEDLNKCKKELEKSIISESVDEVWTRRIEIIDSITWISPLIAKICYTTFASNDFENKKQLLAYVWLDPKLRQSWTKSWSYKMSKRWNAFTRKKLFQAAFCWIQHSKQYKYIYNREIEKWKHHFEAVLTVVKKMIYTIRSLIKKNEMFDPNYCAM

SEQ ID NO: 366911 - protein, 343 aa, unidentified
MKNPAAPEFQSFRATADDMQGGGKAWRTKLMLGIDVSKDTLSCTLLEATTRQQLWHKEVKNTPTGWRALLRHTPSTAPWVLEPTGRYSQDVARAAREAGRDVRLAQPKKAQLFLKSVQSRAKTDKLDSCGLALYGLSCDLAPYPLKSPMQDELDQLLSARRGLSQSLCELQARQRELPRAAPMLAPAVTVLQEQLKEADRQIAGLTRAPELQAVKELQQVPGIGPVIAATLASRLTARSFSHSDQFVAYCGLDVRVRQSGKRSGQLGLSKQGEAELRRLLYLAAQSSLRAKDSPFKVQYERERQKGLSSTAALCAVARKIARLSWSLVTHGCAYDPERVYKQS

SEQ ID NO: 366912 - protein, 344 aa, unidentified
MIIIGCDFHTRFQKIAMVDTEIGEITKRRLEHGNGEARAFYAALPGPARVGMEATMNAQWFERLLQEYHHELWVGDAAQIRAAAVRKQKTDDRDALHILDLLVRDKFPRIWIPSPENRDLRQMLRHRDKLVRIRTSVQNQLHALAMSQGLCRKAKLWTKAGRKELEGLPLDPWASRRRWELLQLFDQLDPQIDELDKVVIQEADKRPAAVHLMTQQSVGPVTALAFVLTVGPVERFPTSKHLVSYLGLNPSEDSSGGRQRLGAISKQGNSMMRHLLSEAAQTAVKFDPELRRDYLRLKFRRGISGVAKVAIARTLAVRLYWKLREAAQPNTAARMQGSPTSLSR

SEQ ID NO: 366913 - protein, 413 aa, unidentified
MVNPGAAAIDIGLTMHMAAISPRADDNPVRAFGTFTGELHEMARWFKASGVTSVAMESTGVYWIPAYEVLEGHGFHIILVNARYAKNLPGRKTDVSDAASLQRLHSYALLRGSFRPEAGVATMLAYLRQRERLIEYAASHIEHMQKALMEMNVQLHHVVSDITGVTGMRIIRAIVAGERKPITLAEMRDVRCHASVETICAALSGNWWDEHIFALCQSLALYDFYQTKVLECDRKLKVALKALEIDKGHDIRGLPNVRTKRRQVNTPDLEVRSALYRVLGADLTQIHGIGPSLALKLVGECGTDLAAWPSSKHFTSWLCLAPGNKISGGKLLPSKTRRSSSRPATLLRLTATTTGRSDTASRVLPAAIGACRKGEGGHGHRAQYRFPVYNSLRYGMAYHDPGATQYEERYRSV

SEQ ID NO: 366914 - protein, 508 aa, unidentified
MRKVIWLAVLLAVPLLASCIRFSNPAPYKKMLRAQFGEQLQYLDMTRLFPSEPFKSWQGAYALYLLDRNDDQTFMVRVAETDSPAQFLARVQAERTEKTAFVKRQQAYLGRLLNLNLTGDFFSLAGKGLQDKDEWLVAYFADLSQLGQDRLIRWSPPPCERYADRVFFFLKGLIMQNVTLIGIDLGKHSFHVHAQDKNGNALLRKKFSRNQLTAFLSTCTASTVVMESCAGAHFMARHISQFGHQVKLISPQFVRPFVKSNKNDFIDAEAICEAASRPSMRFVTPRTEDQQAMSAFHRVRDTLVRERVKTTNQMHAFLLEFGISMPRGIAIIRRLAVVLEEHELPPYLARLLMRLHQHYACLTEQIKELEQELKIHIAGDDTAQRLLTIPGVGLITASLLATKLGDGKSYASSRDFAASTGLVPRQYSTGGKSTLMGISKRGDKNLRRLLVQCARAFMQRLEHNQGRLADWVKTQLSRHHSNVVACGLANKLARIAWSVTTHRTAFIQ

SEQ ID NO: 366915 - protein, 344 aa, unidentified
MVTTIGIDPHKATHTAVAIDDDETVLGEFTIRAGKDQTTRLLEWAQSVNGDARVWAVEAATGLGHLLSQQLVATGETVIDVPPVLASRVRVLSSGKSDKNDENDARSVAVAALRRDGLAEVRREDEAAVLRMLAKRHRELTSLRTQAVCRLHAMLAVLRPGGMGHRLSAKQASRMLGGIRGLDTVGEQRRTMAKTHLVDIRRLDRDLETIKAQIRTAVAAADTSVTDIYGVGPVVAAFLIGYTPPIERFTTADRYAAYNGTAPIEVSSGGKVRHRLSRRGNRILNHAIHTAAVTQIRHQTPGRIYYDKKLDEGKTNKEALRALKRRISDAVYRRLVTDAQRHSN

SEQ ID NO: 366916 - protein, 352 aa, unidentified
MIIGCDFHPSFQQIAYVEQETGEYEERRLSHRGEAEAFYRSLAGKAVRIGVEATGNDRWFHKLMSELGHELLVGDASAIHASAPREQRTDKRDARHILRLLMENRFPAIWQPSVANQEQRQLLLHRCRLVRMRTRIKNQLDSIAKNEGLTGSRVWKAKRRQQIEALPLSGWYAERRKDLLALLDEIDKLIEPLDEAVRAAAEQNAEAQLLMTHPGVGPVVSLSYVLILGDWRRFPRGKQVGSYLGLIPAEASSGKHQQQMGHITKQGNTLLRWLLVEAATKAQSKDPSWHRQYVRLSMNKHHGVAKVAIAHKLAVRLYWMLRSGQNYRQIVERGSHAGQSDLAGGCGLRPIN

SEQ ID NO: 366917 - protein, 341 aa, unidentified
MEHYVGLDVSLKLTSICVVNQTGSVVREGVVDSDPEAIAAFVRSNALVRIGLETGPTATWLWTELKRLDLPVICIDARHAKAVLKMQINKSDRNDAAGIARIMQTGWFKEVRVKDLDSHSVRALLASRALLVKIKRDLENQIRGLLKNLGLVIGRAKFNVFAVRAEELIENRPELIAAVRPLLVARKAIEQQVGDLDRKVLTLARHDVQVRRFMTVPGVGPITALCFKATVDDPTRFKRSRSVGAYVGLTTRRHASGEVDWSGRISKCGDRMLRMYLFEAAGVLLTRVPKWSALKAWGTRLAKRNGLRKAKVAVARKLAVILHRMWIDGTEFNWSTKKAMA

SEQ ID NO: 366918 - protein, 416 aa, unidentified
METEREVVCGADIHKQFLLATILTKDGQKFQDRFDSNFEGLLNFRQWLLDHDCQRLAVESTANYWQPIYFVVGKDVEFVLANAYQIKHIPGRKTDVLDSEWIAELCLKDLISPSRIFSEDDRDLRSMTRTRENYVKMRSQIKNRIHQELESACIKLSSVLSDIFGKSGIHIIRGILNGLSIDDILDRIPSKKLKAKRGEIQDAIQASISPVQIDLISLLLDSVDFLNREIESIDKQIQSLISTRQEDLKIAMSIPGMGFTSASTILAEIGNLKDFNNGEKLAAYCGLVPSVYQSAGKLITGHITKHGSPHVRRMLIEVAHAISRTKADSKLKRFYFRIKSRHGAKVAVVALARKVLCILHHLIVNREMFEDGISSKSKREKTGRSSSSTEMIIEDAIQILVRAGYLVQKRSEKEGG

SEQ ID NO: 366919 - protein, 346 aa, unidentified
MKIVGCDFHPSFQQVAILDISTGEVEELKLMHATGEAERFYRELASPVLVGMESMGNSLWFERLMERLGHELWIGDAAQIRASYVRRQKTDKRDAAHLLQLLIEKRFPRIWVPSHLERDQRQLLLHRHRLVQMRTRVKTELQHLALNQGLQQKRSLWSVRGRADLEKLPLEGWTRRRRLDLLKVLDMLETQVGELDEAAGKVASANAGARLLMTQPGVGPITALAFVVTIGDVARFKRGKQVASYLGLIPSERSSGQKRRLGAISKQGNVFLRTMLVEAAQSAVRHDEQFKKEYAHRCHSKPKGVAKVAAARKLAVRLYWMLRNQTPYTHAVHNEGSPSHPVVGAS

SEQ ID NO: 366920 - protein, 343 aa, unidentified
MDHSAGLDVSVKETSICIVDDAGKIVREVKVASEPEALLQVLKNPTYRFKRIGLEAGPLSQWLYSALAEAGLPVICVETRHMRAVLKAQINKTDRNDARGMAQMMRVGLYRPVHVKTLRSQKLRMLLTHRKLLQSKAIAIDNDLRGTLRNFGLKVGVVGTVKFEARIKELVENLPDLAELVEPLLVVRRVLREQFVIQHRRLLAIVRDDEVCRRLMTVPGVGPVVSLTYRATVDVPARFRKSKAVGAVFGLTCAKHQSGESERSGKISRCGDEMMRVMLYEAAQSMLLHSKKWSWLKAWAMQIARRRGMKKAIVALARRLAVIMHRIWVDGTEFRWTREAAVA

SEQ ID NO: 366921 - protein, 338 aa, unidentified
MNDTIYDHYIAIDWAEKNMAIARMTKKSNKITAIDVPADIAELKVYLKNLKGTKILTIEETTTSQWLYTELKDYVDRIIICDPHRNKLLSEGAKNDKIDASKLVQLLKTNLLKEVYHSTDKFLFLRRVVSGYEDLVKAGVRLQNQRTSLLKACGINKNEAMDARRFPGEQFVLECLDRQISSYETEKKSYENEFKVLAKKYPEIRHQKSLPGIGDINAVKIIARVVSPERFSTKGHYLSYAGLVKHEKISGQKSYGKRNPRYCRQLKDVYKTGVNAAIGGNNPINNYYEYLIHEKGDPPYNARNKACRRLATLSLGVFKSRKAYQPYRREHVKNKNTE

SEQ ID NO: 366922 - protein, 442 aa, unidentified
MLDTKTSHDLVIGLDRSDRKADLHFIATATGQSRSETLDSSPEKLQQWLLDLRQRHPKASVAICLEQPAGHLIPFLETYDWITLYPINPISLQKYRETFITSRAKDDGKDAQYLAELLLNHQDKLKAWKPQDSQTRLLQQLVAHRRAVVDERTALTNRLQALLKAYFPQALELCGEELWRPLATAFLLKWPTLLAVQKAKAGALKQFYYLHGSRSQKLIDQRLKLVEQAVAVSDEPALNQSFAIRVQLVCRQLQDVVQTIKRYEEQIAEGFAQHPDREIFASLPGAGPVLAPRLLASLGSERERFDSASNLQRYTGIAPVTKQSGKMHHVHRRYLCPKFERQSFHEYAKESVLWSRWAAAYYLSQRSKGKFHHTAVRALAFKWQRIIWRCWQSRAPYQEELYEAALRKNGSQLLGLFKRIDLGKSPVKNPAKPAQQNLVKKV

SEQ ID NO: 366923 - protein, 410 aa, unidentified
MRIIALDVHRSFAQIAILENGKIRDAGRVDLERSRLLQFASKLKPDDEIIIEATGNTSAIVRLLSSFVARIVIANPILVRAIAWAKVKTDKIDAAVLAKLHASGFLPEVWMPDEETETRRRVVAERTQLISQMTRLKNRIQSVLHANLIPPYKGTLFSKRGRAWLETQPLAQDQRRVVLRHAGELDRLGAELADVDKSLAQKALAEPRIKRLMTITGVNVTVAMSVLAAIGDINRFCSAQKLVSYFGLNPRVRQSGDKPAYHGRITKQGRAHARSMLVEAAWVISGVPGPLRAFFIRVRDKRGKHVAAVATARKLAVIVWHMLTKDEDYTWNRPALLDWKLRKLELKAGHPSRRGGKQKGSAAAYSDKSVRDSERETIGNAEQAYTRFVANWKQHLSKGRSSAANEVRLS

SEQ ID NO: 366924 - protein, 386 aa, unidentified
MPHVDDLSRSLTAFDQDSTLVAVIEMSLKSWLVAGIVPGVSRAPLKKLGADENAVLRLLHRWREEATKAGRRITRVVVAFEAGRDGFWLARWLRARGIETYVIHAASVAVSREHRRAKTDRLDTEMLKRAVLGWLRGEPEHCQMAAVPTLPEEDARRPNRERDCLVRERTRIVNRMKSALVRLGIRGFNPKLRKAAERLEELVTPEGEALPLNTLAELRRDLARLALLREQIKAIETARLERLEHAPKEGPHAMVRLIARVVGVGVETADMLVHEILSRNLRDQRALARYAGLTGSPDESGSRRREKGLARSGNGRVRRGMIQLAWRFLRFQGDSALAKWYQARTETAKGTRKTMIVALARKLLIALWRFATTGTVPDGVALRPAA

SEQ ID NO: 366925 - protein, 342 aa, unidentified
MTTIKYSVGIDIASSTFTAAVGEMPWKVVLKPQTFENTEEGYQILLVWFADHHLSVSETVVCMEATGVYSEGLAYFLYAKGYRVAVQSPLEVKRTFKPYGPKSDAVDSLQIAEYACRHTDKLLFWKPRSEILEQVKALLAVREQFVSQNTAHKNALKAIQRKVVRTPFAEQAYLQLIEQVKKQIQAIDTEVRRLIDSDPTFKEMLLLLISIPGVQLLLAAHFILLAQFSLEYKVLAAFLGIAPNEHSSGTSIFKHATSRHFGPAAIRKLLYLAACSVCTHRPQFGLYLARKTKQGKPARLVLNNVENKLVRIMCAVLQSKTAFIENYHSVQPLVFQKNLTTS

SEQ ID NO: 366926 - protein, 317 aa, unidentified
MSHDLWFGGIDVSKDTLDVAFVRGEEETTWQVSNAPAGWAKLVAACKECVVDRIVLEATGGYERRAVAELLTTGLPVVVINPRQARDFAKATGRLAKTDRLDAIGLARFAEAIQPPIRPMPDEKTLELQEKLARHRQLVQIHTAEGNRLAQAHSKPVRRSIQAVVKIIEQQLEAIDQDIDRRIKECPVWQDKDRILQSVPGIGPHTARTLLSSLPELGQCSRQQIAFLVGVAPLNRDSGKMRGTRSIHGGRGHVRQALYMATLAATRFNPLIRKHYQHLLELGKKKKVAIVACMRKLLCILNAMLRDHETWNLKVST

SEQ ID NO: 366927 - protein, 372 aa, unidentified
MNYNTVYVGMDVHKESFTLCAYTIEAEKALHYQKTEPDYKNVLKYLEFLRTIYGNDAIFICGYEAGCLGYTLYHQLTANNVTCIILAPTTMLEQRSKKRIKTDKRDAEIIAKCLAQRNYSPVHIPTAKDEETKEFLRMRDDHKLALKKIKQQILAFCLRHNFRYEGKSHWTAAHLNWLKSLDPEALYKEILDEYLLTYQTLSDKIERLDKRIEELASQDEYKESVKKLCCFIGISTHTALSALVEVGDFKRFATAENFASYLGLVPGEHTSDSTQVRLGITKAGNSHIRLLLTEAAQCYTRGQVGFKSKALKSRQAGNPPEVIAYADKANERLRRRYYKMVLGKGKKANVAKTAIARELACFIWGMMTDHIA

SEQ ID NO: 366928 - protein, 434 aa, unidentified
MGICTLEDFHLPISGQAIVMELQRNKVCGADIHKKFLVATILSRDGTKITQRFGMTLDDLLKFKIWVIENQCEQVAVESTGVYWIPIHAVLEDAIDLIVANAYKIKHIPGRKSDLIDSEWIAELCLNGMIEPSRIFPKEDRELRRLTRAREGYVTDMTREKNKIHHALESCGIKLSSVLADVFGKSGRYLLNCLLDGVELEEMIKGIPVKSIRNKSDQIREAVRGSLEITQIILIRGGLELIGSIQRRIDELDREIKNRIASREKDLRIAMSIPGIGFTSAVTILAEIGDFKDFAKAEQLAAWSGLVPSVYQSADKLVTGSITKHGSRHIRWILVEVAQAIARTNKSKLKRFFRRVQVKKGYNVAAVALARKVLCILYHLLMNREMYQEDDVVKTRSIDIDLSSLPTKLGFEEMIRVLVKAGYEIRKTNSGTGG

SEQ ID NO: 366929 - protein, 337 aa, unidentified
MDYFAGLDISMDETHVCVLDREGQVIYESKSASTAQAIADGLAKAPSCRRIVFETGRMAPILFHGLSRLGLPVVCVESRQAYRALKSLATHKTDRNDARGLAHLARTGFFKPVHVKSLSAHAVRSLIIARKKLVGQRVTLENQIRGLAVVFGVRLPRALTIAFIDQALKASEGVAGLSAAMRGLIAARTAVMTAVAAIDVDMRRMARASGACRRLMTIPGVGQLTALAFVAAIDDPSRIRRSRDVGAYLGLVPRRYQSGEVDYVGGISKCGDRRVRTLLYEAANVMLTRYNGQLKLKEWAFAIARRSTMRKARIALARRLAIIMHAMLRDGTEFEAA

SEQ ID NO: 366930 - protein, 415 aa, unidentified
MEATVERCAGLDIHQASVVACALVGPPGCKPRKETRSFGTATRELEALRAWLEGLGVTHVGMESTGVYWKPVHAVLEGHFELIVGNAHHIKAVPGRKTDVKDAEWLADLVRHGLIKPSFVPPPPIRELRDLVRLRRSLTAARSTERNRTLKLLETANIKLASVASEVFGVSGMAMLRALVEGEAAPAEMAELARGKLRSKRERLTLALEGRLTEHHRYVLAFHLRRLAAIEEDLRALDARIEAKAEPFQAQRRLLQEIPGVDALVAVTIIAEVGVDMSVFGNAKRLAAWAGVCPGNHQSAGRRRSGATRRGDVHLETALVTAAVSGSRRRGSYYKDKYHRLKARRGRLRAAVAIAHKILVAAYHMLAEGVPFRELGEAFLDQQARQRNVRHLLRRLDHLGYDVLLRPKAAEAAGP

SEQ ID NO: 366931 - protein, 453 aa, unidentified
MEILYTHCAGLDVHKKTVKVCLLTQGANEQPHKEFRTYLTTTQELLKLSDWLHEQGCTHVAFEATGVYWKPIFNLLEGHFELLVVNAQHIKAVPGRKTDVRDAEWIADLLRHGLLKASFIPSGPQRELRDLTRYRVKLTEEKAREINRVQKTLEDTNLKLGDVVSDIMGKASRMILHAIADGEKDPSRLAAFAVGRVRASQEQLEAALKGHATDHHRFLLREHLTQIHHLEQAIDRVTAEIIRRFTPPSSPEEPTSAAEKEDETTPERTSDPPSASPEGAVPPKAALSWAQAVVLLSSIPGISERSAIGILAEIGTNMQQFPTAAHLASWAGVCPGNHESAGKRLSGKTRKGNLFLRCLLVQAAHSASHQKQCYLAEQYRRIAKRRGAKRAAVAVAHSILVIIYHLLSDQTTYLEKGETFFEERDREGTQKRLVRQLSRLGYQVELQPITQAG

SEQ ID NO: 366932 - protein, 385 aa, unidentified
MSAHPTPIQAAAQLQANTLFASLELSKARWLVTVSAPGSDKLARHQVPGGDGQALLELLWRLQAAAARRTGAPVMIIVIQEAGLDGFWIHRLLVQNGITSHVVDPASIAINRRHRRAKTDKIDGVKLLRTLMAWMRGERQVCTMVQPPSPEDEDRRRLARERARLLKERIQHTNRIKGLLSGQGIPDYDPLHRDRRRCLAALTTGDGRPLPERLKAEIGRELDRLEMVVSQLTVVERERDALVARTAEADACAAPAALARLRGVGPELAALLWLEALFRRFDNRRQIAAYAGLTPSPWQSGGIDREQGIAKSGNPRLRRAMIELAWFWVRHQTGSALSRWFVERVGTARGRVRRIAIVALARKLLVALWRYVTQGVVPQGAVLKA

SEQ ID NO: 366933 - protein, 346 aa, unidentified
MEHYVGLDVSLKLTSICIVDRTGKVEREGVVASDPEAIATFIKLHAPHVVRIGLETGATSTWLWTELNKIGLPVICIDARHAKAILKMQINKSDRNDAAGIARIMQCGWYKEVCVKDLDSHATKALLVSRALLVKIKRDIENQIRGLLKNLGLVIGRAKMNMFAVRAAQLAEDRSEIFAAVDPLLKAREAIEQQIVDLDRKVLRLARNNAQVRRFMTAPGIGPVTALCFLATIDDPARFKRSRSVGAYAGLTTRRYASGEIDWTGRISKCGDKMLRSYLYEAANVLLTRVAKWSALKAWGIRLAKRSGLRKAKVAVARKLAVILHRMWIDGTEFKWSSRDAADQPA

SEQ ID NO: 366934 - protein, 336 aa, unidentified
METKTKFIGIDFSKATFDATIYEGEHCKFTNDDQGFKEFLAWVEMQIDGLSLQDCLFCGENTGNYSVRLSNFLYVHHCTMWLESALRIKRTMGLVRGKDDKIDSAYIARYAARNAEDAVSYEPCCKNIGELRRLFARRQLLVSQRTALMNAGKEANVLGEKSKYDRALEKQNTKLITLLAKEVLCIEKMMLEVIQADERLSRQYQHITSIKGMGPINAIALISVTEGFTKYAGDAKKLACHAGVAPFKKESGTSVNGGTHVSHLSNHILKPLLTQAALSAILYNRQIIAYYERLISRGKKSQVALNNVKNKLLHIVIGLIRKDEDYDIQYQPAPKI

SEQ ID NO: 366935 - protein, 349 aa, unidentified
MEKITRIFIDTSKQFFQLHGVNAAEAVVLRRKLKRSQLLPFFARLEPTAIGLEACGGSHHLARELIALGHEVKLVPPQYVKAYLKRGKNDGRDAEAGCEAMSRPTMRFVPIKSAESQAALMLASVRDRLTRSRTQLSNAIRGHAAEFGLVAPRGLAHVAPLLADIAAEARIPELARELFAALAREWDRLGDELKAVDAKLMAWHRQDAMSRRLAQVPSLGPIGASLLVMKTPDPAAFKSARNFAAWIGLTPKDHSTAGKQRLGVITRAGDEALRSTLVVGATAVIQQVVKGRGPRSPWLIKLLQKDKPKLAAVALANRVARIAWRMMLTGEDYDPARLLRDLPPAKAAI

SEQ ID NO: 366936 - protein, 348 aa, unidentified
MEQVTRIGMDTSKHVFQLHGVNAAETPLLRKRLRRQDMVAFFAKLAPTVIAIEAGGASHHWARLLRSMGHEVKLIAPQLVKPYVQRGKNDAADAAALCEAMSRPTMRFVPVKTVEQQAALMLVGHRERLVRQRTQLGNAIRGYAAEFGLTAAKGMAHLEPLLERLQADEQLPDLARELFAAHAEEYAQLQAHICRVEAKLMAWHQAHACSQRLARIPGIGPIGAVLLLMKTPAPELFRSGRDFAAWIGLTPKDHSTGGKIRQGGITRAGDEGLRSVLVTGATAVIRTVRNGKSRSALSPWLEQLLQRKPPKLVAVALANKLARIAWKLMATGATYAARPAPAASAGAI

SEQ ID NO: 366937 - protein, 339 aa, unidentified
MALHAVGIDLAKTVFQLHGANAHGKSVLQKRVSRAKLMETVAQLPPCLIGIEACQGAHQWARRFEALGHTVRLISPQFVTPYRRGNKNDGNDAAAICEAVTRADMRFVPVKQAQQLDVQAVHRARDRIVKARTALINQIRGCLAEHGIVMPQGANKVRQRLPEILEDAENGLSGLARQTHRLLFEELQALDARKSQFDAVLKQAFKSDEACQRLETVPGVGILTATAMVAAVGGAREFKNGRQMAAFLGLVPRQHSSGEKQRLGGISKRGNTPLRTLLIHGARAVLRYADNKTDARSRWLQALVARRGMNIAAVALANKTARTCWALLAKGESYRPTPA

SEQ ID NO: 366938 - protein, 450 aa, unidentified
MSNLRIKKKSKKFKAADLPVELKHVNLDAAGIDIGSDRHLVAVPAGRDDVTVREFGAFTPDLHALADWLEKCGVTTIAMESTGVYWIPLFEILEQRGFEVKLVDARKSKNVSGRKSDVLDCQWLQTLHTYGLLTGAFRPADEICVLRGYMRQKEMLVQSSSMHIQHMQKALQQMNLLLHNVVTDITGVTGMTILKAIIAGERDAKVLARHRDSRCRNSVQTIAKSLVGNYRQEHIFALTQAVELYEIYQAKINDCEVAIARFLTTQARQTEDEPPPSQKNIPPRQRIRAGVDLRSRLFKLTGVDLFSIPGLGADTLLSFDMTPWKTEKHFASWLALCSGTKISGGKVLDRKTKRSTNRAAQAFRLAASSLARSNTALGAFYRRIRARIGAPQAVTATAHKIAITFYSLLKNRTTYVEIGQNAYELKFRERRFKAMQKQALAMGYQLIPAA

SEQ ID NO: 366939 - protein, 342 aa, unidentified
MATVGQLLASEALGATVSGIALPPARIDPHKSSHTAVAIGVAEEPLGQLQVRASASQARRLVAWAAAWPERTWAVEGAGGLGHLLAQQLVAAGERVLDVPPRLAARVRVLATAASSKTDPNDAFSVAVAALRSRTRRPVIADDHAVALRVRSRRHRDLGRAKNQAACRLHAVLCELVPGGVPEEITAAQAARILQSATPSGSAGQARAELAAEPLEDIRRLGAQIRESKKLAVAVKAWGTTLTEIFGVGPVIAATVIGDVAGEARFATRDRFAAYNGTAPVEVSSGSRKIHRLSLKGNRRVNHALHMAAITQIRHPHSAGRAYYERKLAEGNLQGGGRRRRR

SEQ ID NO: 366940 - protein, 345 aa, unidentified
MKNYFIGIDVSKEKLDATLIHYESQSDSEQQLAYTTVANNPKGFKSLVSWSKKNAGRGVKTDTMLFCCETTGGYDRALCDWLYGNGLDIWRESALQIKRSMGLRKGKDDKADSEMIAHYALRFRSQAALYEPMDENMRSLRDLFLYRQSLVAERQAKLVSSKEKQHISRKSKSDNFIYRDAQKAIDLLTKSIKECERRMLEIIKADEEMYRNYLHLISCKGVGLVTSVMLIVYTDNFKGWNAKKMASYCGIAPFYESSGSSVFHKANTGGYSNRRLKGILTQAARSAITHNPTLRQYYLRMKAQGKPYGVILNNVNNKLLHILFSLVLHDCDFELDHEAKRALLA

SEQ ID NO: 366941 - protein, 344 aa, unidentified
MEITTIGLDLAKSIFQVHGVDASGNVVIRKALRRAQVLPFFTRTPPCLVGIEACGTSHHWARELSSLGHEVRLMPPAYVKPYVKRGKTDAADAEAICEAVARPTMRFVSVKSRDQQAALSMHRTRNLLVKQRTQLVNMMRGLLAEFGIDIPKGLERALMMAREIVDGAAPDVPPEAVKIIGTLSQQALDVHVRLREIDRDLLVWQRSSDVARRLMTIPGIGPVGATAFAATVNDASQFRSGRQFAAWLGLTPLQMSSGGKERLGRITKMGDKYLRKLLIVGMTSLVRRAKYKPETVDPRLADLLARKPVRVATVAMANKAARVIWAIMTRGETYRSGHVPALAA

SEQ ID NO: 366942 - protein, 414 aa, unidentified
MEVGYSHCAGLDVHKKTVVACVITPDAQGQVQKDIRTFGTMTADLLTLLDWLQTHAITHVAMESTGEYWKPIYNILEGNLEVWLINAQHIKAVPGRKTDVKDAEWIADLLRHGLVRPSFIPPVPQRDLRELTRHRANFVRERATLINRVQKTLESANIKLASVASDVLGVSGRAMLDALLAGQSDGTALAELAKGRLRNKRDALARALTGRVKAHHRFVLTELLCQIDALDETLEHFDREIETYCIPFQEAIPLLDTIPGMAQATAEMSVSEIGTDMSRFPSADHLAAWAGLVPGHNESAGKRRSGKTRMGNRVLRTGLVQAAYAVSHTKNNYLVAQYHRLAARRGKKKALVAVAHSILVIAYHLIKNKQPYNDLGGNYFDEQDSKKTAQRLAKRIEKLGYQVTLQTPPVSVPA

SEQ ID NO: 366943 - protein, 409 aa, unidentified
MKLFVGIDVSSEKLDVCFLDSSDTTLKEVTLPNNLNGASSIKESVLTFHHSFNYEKIVIGMESTSIYSFHPATFLSEDTDLKSLGCVEVVVQNPKSIHRYKGLFEEDKTDRIDAFRIADFLRIERFNKTVLKEERYIALQRLTRSRYQLVHQLTECKQHFLENLYYKCNTLSKELDTSVFGATMLDLLSDSLSLDEIAQMELEDLALLLQEKGRGRFSDPQKIAKMIKKAIRDSYRLAQVVQESVDMVLATYARLIQTLKKQIKDLEKSIVALFEIVSEVQCLKSIPGIGVVYAAGIVAEIGQIERFENEAQLAKYCGLYWKKNQSGNFESERTPMTRTGNQYLRYYMVEAANSIRRHEDSYRLYYQKKYDEVPKFKHKRALVLTARKFVRLVDTLLRNRQLYTPERSV

SEQ ID NO: 366944 - protein, 333 aa, unidentified
MNTIGIDVGCKELVIVVMVNGKARKAKSFDNTPLGHQSIIQSLTKLKGESKVCIEATGVYHFDLAVALSRANDIEVMVINPKAAHNFAKALMTRSKTDAIDAENLAIYAERMPFEAWDRPADECISLRATARRIAALSKQKTQTKNQLHALKSTVETPALVIEQTEQLIDVLDVQIKTLRDSAINIIHQNNGLEQAYTLITGIKGIAQASAIQILSELMILPEDMTARQWVAHAGLDPRIFDSGSSVSKKPRISKVGNKYIRQALYMPALVASRFEPNIKGYYHHLIDDNGLKKVQAVCAVMRKLLHAIHGMLRTNKEFDGTRFYTLPITTDS

SEQ ID NO: 366945 - protein, 312 aa, unidentified
MAKRVEEITLGIDACKDKLDIHHWQAEEACQVTNDRDSIEGFLKGLYGPARIAVEATSNYHLAVVEVALALGHAVYLVNGRQLANYRKAVNVRNKTDPLDAWLLARYLDREAASLRPFQPQSAKAQELWALLKRRALVVNTRKQIDLSFRDLHFSTQAMFSEFQRLLARIEQRLRTLLRALGWWADYQRCRSIPGVGLVNAIALTATYHRGAFGSSDAFVAFIGLDVRIRESGQYKGQRKLTKQGEPELRRLLWCAAHPARSYHRFDCYYRQQLDKGMTKIAARVVLARKIARIAFTLLANQQTFRKSEVPA

SEQ ID NO: 366946 - protein, 430 aa, unidentified
MAFLAILRISYEVVALISSEEHKHYLILIKIGVYTMLYLGIDIAKHKHYASIMDSNGNPIEKPFPVYNHRKGGQALLTKIYQYIDSSNEIKIGMEATGHYWLALYSFLLDHGFSVIVLNPIQTNAWRKGTEIRKRKTDAIDATMIADIIRFGNFLETPLVDEKMFALKQLSRFRNSLVSSMGDLKRKSLVVLDQTFPEYQKMFSDVFGKTSTQLLLEYASPSDYEQLSIDDLTQIIEQTSRNRLGKEKAHQIIESASHSFGITFGKEAFSFQLKMLMEQIHFIEIQLKQCEEQMDQLLIELDTPITTVPGIGPILGATILGEIGDIKRFDKPSKLVAYAGIDASVSQSGQYNSTSMSISKRGSSHLRRALFQAAVTGYKYDPVLKAFYEKKKQQGKHYYVCICAVARKLCHIIYAILKNNKPYKVPIPIA

SEQ ID NO: 366947 - protein, 402 aa, unidentified
MYFIGIDWADEKHTIVILDESSIEIASFEIPHSYDGIIEFVERLKQLSIGTENAYCFIETSRGLLVSALLQQGFKVYPLNPKFVDRQRRPSGAKTDFIDARLLADIGRKDLPNLRSLKMSSDLIEELRLLTRDQEGLIHAQTRLTNQLIACLKEFFPAALRFFNRIPQLCTLKFLQLYPSSESLVNASKEELIAILISLRHKSPDSKAREILEIAQQPKIYVPQATAKAKARLASVLIKQLLIIVEELDNYDKAILKLFKQHNDSEIFASLPGAGKRLAPKLLAEWGDDRSLYDSSSSIQALAGTSPVAFQSGKYNKARRRTSCVKPFRNALHEFAWCSVRWEPWAKEYYYRKRKEGKSHHVAIRSLANNWVRIIYALWRKEEKYDSAVFTTSQKKHFQKTA

SEQ ID NO: 366948 - protein, 346 aa, unidentified
MLHAGLDLSRRKVDVCLLSSAGEIVDEWASPPDGDGLRGLAARAAMWGAPVRGVIESMNGARFVHDRLEEHGWDVLIADATKVKGLAPLACKTDRIDARVLATLSARDLVPEIWLPDPTIRRERELARFRLHLVRHRTTLKNRIHAALVAFGHPCPVSDLFGHAGRELLDRLAFPDPWRSNVEVSLGLIDDLDLRIAELTVQLKRQGADHRYIPLLVTAPGIGWINAYTIASEIGDIARFSSPAKLCGYTGLCPRVKQSGAVDARGPISKHGPKYLRWALFEAALNACKHPYYAERYQHTKRRLGRQRGPKVAQIDLARRLTEAIWHMLTNNQPFAPAGAPFRLAA

SEQ ID NO: 366949 - protein, 426 aa, unidentified
MNEVDSIRIKEFRQLKKEVRGSKDYLIVGIDVAKDKHTAFFGTATGKTLFKRLVFENTIEGFNRLLIQTDTLKAQHALTKTVFGLEPTANYHKPLGEFLIKSGHMVVLVSGVAVKRNRELLDGRWDKHDTKDSANVADLISQGKCLFYEYPSMALRDLRNLLSLKKRLKKQEHGLRVRIRNHVLAQYFPEMDSYYGQSESDSLEIVKWCLNPSIIAGLEYEQFLQLVAPQKRGIWQQNRLKAIWKKAVDSIGCDAGESLEFEAKTMVEALEHTRETIRATDAKIKEICLEFPEYSYLLTIPGFGPDVSSKVLGAIGNPFRFKTGKQVLKMAGLDLSAERSGKNSDSAIPVITKKGKADLRYALYQAALIASTRDRHFIVYYTNKFRGREKEKGIKTKMRVKLAAKMLIIAWTLMKKKEVFYTPQAY

SEQ ID NO: 366950 - protein, 333 aa, unidentified
MDAIRQCCAGLDVHQATIVACLLKGPLDHKPTKQIREFPTVLSGLLSLADWLEQEGCSDVAMESTGVFWKPVFNILQDSCSLTVANAAHVKNIKGRKTDVKDAEWLAQLHRCDLIRSSFVPPQEIRNLRDLTRYRKKLKGNESSERNRIHKLLEDANIKLSSFVSDLFGVSGRLMLQAIIDGEVLEPEIIADLAKGKLRAKLPELTSALNGRVTKHHRQMISHSMKHLVFLESSIAELEAEMNIVFAPHCQHLQHLQTVPGLGPHTAKILLAELGTDMSVFPSAAHLTSWARLSPGSNESAGKKKVLPPQKVTPHSALPSLKPLGPLVKLEPI

SEQ ID NO: 366951 - protein, 406 aa, unidentified
MRVIGLDVHRSFAQVAELENGVVRQCGRLDLVHDKVLAFAKTLRSDDEVVLEATGNTMAIVRLLKPHAGRVVIANPLQVRVIAESKAKTDRIDAATLARLHAAGYLPEVWQPDDATERLRTLVSRRATIVQQMTRTKNRIHAVLHANLIPPFSGKLFMAPGRKWLSEQPLPEEERAAVNRWLGELDVMAQELASAESAIASDCLGDDRVRRLMTIGGINMVIAAGVLSAIGDVSRFASAEKLVSYLGLDPRVRQSGDRAAQHGRISKQGRSHARGMLVEAAWAAAVTPGPLRAFFDRVRGRKGKQVAAVATARKIAVLAWHLLTKKEDYAWARPALVAMKERQLQLKAGAKSRRGGNAPGPARDYSIKELREQERALVEQAERAYARFVSAWSEKPKSGRKGRLWN

SEQ ID NO: 366952 - protein, 343 aa, unidentified
MQTITTIGLDIAKSVFQVHGVDAQGNVTLRRQLKRRYVLTFFQKLPPCLVGIEACASSHHWSRELQALGHTVRLMPPAYVKPYVKRHKNDATDAEAICEAVTRPNMRFVATKTPEQQSCLTLHRTRHLFIRQQTSVINAIRAHLAEFGIVAPVGRNGVEQLLGVAADAGDKRLPDAARACVGALGAQLRMLKAQILQFDRMISAWHRSSETSRRLDEIPGVGPTLATALVASVADPKMFRSGRDFSAWIGLVPKQNSSGGKDRLGNISKRGDRYLRSLFTTGALAVIRYAKIHGTRHRPWLTALLARRPTKVAAIALANKIARMAWAIMAKGERYKEPAALAA

SEQ ID NO: 366953 - protein, 345 aa, unidentified
MQSMYYIRLDVHKRTITYCVKDGSGAIHAEGTIPATRFDLDHWMKTLPQPWTAAMEATVFTGWIYDHLQPHAAALKVAHPLMLRAIAAAKKKNDRIDASKICDCLRCDFLPQCYMASTAIRERRRTLRYRNLLVRQMVQMKNKIGMLLMEAGVSYNKQKLHKAGYFRELLATSPDIDEGLVSLLRLCRETVVRLQRTESALVRSLERDSLLLDRVERLMTVPAVGPITALTWALEVGDAKRFSSIKKAISYCGLCGAEKSSGTTVQRTPLSKQRNKHLQTTLIEAAKMAPRNSPELAMLYDREKQKGNANRATLAVARKLVAYLMAVDRGQRNFQVVETNNCVAA

SEQ ID NO: 366954 - protein, 422 aa, unidentified
MLEEAKDSEEIIERVAALDIGKASLVCCVRVPDEARSGRRLQEVGTYSTMTRSILALADHLRCLGVDRVVMEATSDYWKPVFYLLEAAGLETWLVNARDVKHLPGRPKTDRLDAVWLCKVAERQMLRPSFVPPAEIRHVRDLTRYRVDLIAARTAEKQRAEKLLEDAQIKLSVVASDIFGVSGRAMMDALVAGERNPKALAQLARSTLRRKISALEEAFTGHFTRHHAFLLGKMLTRVDQLNSDIAEVDKAIEESMAPFADALARLDDIPGIGITGAHAIIAEIGLDMSRFPTPGHLASWARFAPGVKESAGKKKGRGATGHGNPYLARVLGEAAVVAGRSNTFLGERYRRIARRRGTKRAVVAVGRSILTIIWHLLSDPDSHFIDLGADFYDRRVGTERKKRKHIRELEALGYRVTLEPAA

SEQ ID NO: 366955 - protein, 343 aa, unidentified
MAIVAGFDVHRNQITFDALDTETGELARGRIDSTPDAVRAWVGRFRGQHVDVAVEACTGWLFVCQSLAEVGATAHLAEAAEVSSRRGKKRHAKTDRADARHLRELLCEGRLPEAWLPPAHIVEWRTRTRLRKTLVEERTQWLQRIRATLFHHGVPAADVPQRLLSRTGRTFLERVRLPEAARERITVALAMIEAIEIQLAPLERRLRRLARRQPGCQALMREPGIGELIAPTLLCELGDVTRLSSSRKAVRAVGLDIGVYRSDRRSRVGKLTKQGSPTARWALYEAAQSACLRTSPNNAAYLELKARGLTHTRASLTIARKIARRSFHTLRELGPQALEPVND

SEQ ID NO: 366956 - protein, 363 aa, unidentified
MQYRTNNELSSLEETRCQFNGGTGVIKLGIDVHQDFYVVVEQVGGSNPKPPQRFKKEAFVLWAAKLKKQGNQVHAVYEACGFGFGLQRQLSALGIDCHVVCPQKLDEQNRRVKTDGLDAKALCLKLDRFVQGNRAALARVRVPTEKEEQLRAIHRQREQLVKARKRFEAQGRSLMVNHGIEPTQQWWKVRAFARLRVPAWMQELLATSQPILLALEQKIKTLTLQLQTAAEPNQPRGFGALTSVVIDREIGNWQRFNNRRQIGSYTGLCPGEHSSGNTRLQSCVTKHGNPRLRAALVELAWRLVRFQPNYKPIVKWRATLAKGALATGAARKKAIVAVARQLAVDLWRIRTGRLQAQELGLIN

SEQ ID NO: 366957 - protein, 334 aa, unidentified
MDKITTVGIDLAKRVFALHGVDGTGRVVLKKTVRREQLVELVASLPPCLIGMEACSGSHAWARQFEQFGHTVRLMAPVFVAPYRKSGKNDGNDAEAICEAVSRPNMRFVPVKSAEQQALLALHRVRQGFIEERTALINRLRAVLTEFGVALPNRTQWVRRDAIAAAEPLPVLARQAVEDLRAHLVQLDERIGAYDRQIEAQARNSEPAQRLMQVRGIGPLTAVAIVATVGNARDFKSGRQFAAWLGLVPRQNSSGGKSRLGHISRRGDGYLRMLLVQGARSVLHTAARHTDHLSRWGLSLQARRGYHKTLVAIAAKNARIAWALLSKNQTMRTA

SEQ ID NO: 366958 - protein, 406 aa, unidentified
MLFVGDDWAEDHHDVEVQDETGRRLAKARLPEGISGIARLHALVGRFLPEDDNAAAVKIGIETDRGPWVAALVASGYQVYAVNPLQSARARQGNGVSGAKSDAGDAHVLADLVRTGCHQLRTIAGDSEQAGAVKVLTRMHQTLVWDRTRQVLRLRSSLREFFPAALEAYEDLASPDVLELLTKAPEPHSAAALTRAQITAVLKRARRRDRDAKTIAILAALRAEHLTQPSLIAAAYGATVRALAAMITTSNDQITALEGPVEASFGQHPDAEIYLSQPGLGPILGARVLAEFGDDPTRYTGARARKNYAGTSPITRASGKKKVVLARYVRNKRLADALHRQAFCALRRSPGARAYYDALRDRDIGYNAALRQLGNRLVGILHGCLKTHTLYDEAVAWNELAQQAAA

SEQ ID NO: 366959 - protein, 355 aa, unidentified
MNQEKYIGMDVHDATISAAVKNAQGKLLMECVLETKAATILEFIQGLRGTLALTFEEGTLAAWLHDLLKPHVSRLVVCDPRKNALLRDGNQNDRVDARNLAELLRTNQVKAVYHGKHEIRALRELGRSYLTLTQDSTRVLNRIKSVYRSWAIPCAGTSVYSRRHRAEWLAKLVEPGVRIRAQHLYQELDSLEPLRQAARRELLRESGKHAAVKLLRQIPAIGPIRSALLVALLQTPHRFRTKRQLWAYSGLAVQTYDSGEFRFVRGKLQRNRERITVRGLNHNHNHDLKNLLKGAAISAIQRPGPLQDFYAALVEKGMRPSMARLTLARKIAAITLTMWKKGVSFDPRQLPRPAA

SEQ ID NO: 366960 - protein, 406 aa, unidentified
MPYSAGLDWGSTGHAICVVDEKGAVALRLEIVHDADGLAQMHKRLRRLAPAKDIPIAIERPSGLIVDALVEAGHPVVPIHPNVVKACRPRYRAAGGKSDPGDAYILADILRTDGHRFRPLSPCSDEIKALRALVRGRDDLVVQRGAMANRLRSLLESFWPGAAVIFADIASPVALAFIQRYPTPDSAARLGEKRLRVFLASHSYPNRRTPAELLARLRAAPTGLTSTAETKAKGEIAQALATVLAALVAEIATISDQIEQTIAKLDDGKIIMSFPRAGRICAAQILAELGDARDRFLTADQLAAEAGACPVTHASGKSRGVVFRWACNHRLRTAITCFADNSRHASPWAADVYKRARDRGCDHPHAIRILSRAWIRILWRAWMNGTTYDPQSHNAAAEFDRRLATA

SEQ ID NO: 366961 - protein, 345 aa, unidentified
MKFYTKQHKYYCGIDLHANNSYVAVTSPEEEVVLGQRYPNDLGKILGALEPYREGLEGIAVESTFNWYWLADGLRESGYTVHLVNPLAAKQYQGLKYTDDRSDARWLAKMLHLGILPTGWICPPEERAVRDLLRKRTQLVRQRVASRLSLRNILERTTARRLSGNALERLSEEELAGWIEDEHVRLSMTTTLAVIETLDEQIELLEGVVFEQARKESAFSVLQTIPGVGPILASTIQYETGDLSRFAGVGHYASYCRLVRSERLSNERRKGQGLRKNGNAYLSWAYHEAAHFALRYQPSARKWHERKRSKTCALVAIRALAHKLARAAYFMMRDQVAYEPSRLFG

SEQ ID NO: 366962 - protein, 345 aa, unidentified
MKITTIGIDLAKTLFQVHGVDERGNVRLRKQLKRKDVLSFFANLEPCLIGMEACGSAHYWARKLSELGHTVRLMAPQFVKPYVKTNKSDRNDAEAIGEAVGRPNMRFVPVKTAPMQAVLALHRARQGFVKARTAQANQIRGLLAEFGIVIAKGIGHISARLPEILEDGENGLPGMMRELLQRLGENLKNMDQQVGELERQIMLWHRDNEPSRKLEAIAGIGPLTASALVATVGDARSFKNARQVPAWLGMVPRHEGTGGNVKLSGISKRGDVYLRTLLIHGARAVIAHSERKPDQADAWLKKLLARRNKNVATVALAAKNARIAWALLAHGRSYQHDYVATRTAA

SEQ ID NO: 366963 - protein, 392 aa, unidentified
MDTLYVGIDVSKDRSSANGIDDHGKRRFEISFDMDGAGFAELLKAIEANSDGYVIAAMESTACYHINLYSFLSARGIETVVINPLLIANFAKLSLRKTKTDKKDASTIAQFILLHKESVKQLAISQDLQDIRDMARERESLCHQISAAKVEIRRILQTTFPELESMSNPFTKVMLHFIQRFPSARLVGMAKPSIIAKTLKGKPCSCRIRFTPSELINIARKSIATISPGKEIILSGKIGTLLHLQKQRDELSKALTKYCESYIIEDLKIVTSINGIGNNTATTFLAEIGGINNYASHKNLIAFAGIDPTVYQSGKYEGASKISKRGNRHLRRVIWLMTMRVINHNPLFRKYFLKKRNEGQPFKKAVFATAHKLMRVIFAMLSQKTYFKEECI

SEQ ID NO: 366964 - protein, 495 aa, unidentified
MDRKSNTPKNQEENVGRTGKRSPGPKTGKKNELKRLTKGEQRDLEIKAEEIGNSLTSFTWKELETGGKFDKNKKLDFIKDDTLIVGCDIGSETHFVRAIDTRGRELSQGILAFNNNSEGFEDALSWALLVAAQYGKTQIVLGLEPTGHYWFTLTAWMLMHGVSVVQVNPYAVKQTKELEDNSQDKNDRKDPKLIANLVKDGNYGLPYLPEDTYATLRVLSGLRDQRKEELVRSMNRLHRVLTIVFPEYKVAFGKIDGPFTLSLLSQAPIPAELVALGEDGIRKIWHDRKLRGAGYRRAAEIIRQAKNSVGITDGVEAHKTCILYYVADIQRLTSEIAEIEAELAVKCREVPNAENILAICGLGETITAGILAEMGDIDRFDDAKEIQKLSGLGLVACSSGKHKGQTKISHRGRKRLRYWLYQGAMSLVAHNEAFRQLHVYYTTRAENPLKKMQSLIVIACKLLRIIFVILKKGIQFDAERMLKDIVRSEAGKAVA

SEQ ID NO: 366965 - protein, 344 aa, unidentified
MEINVISVDLAKNVFQVHGFSALGDRLVAKRLSRQRFMHWMVSLPQRCEVVMEACSSAHYWGRWLEARGYRVRLIPPQHVRGYVVGNKTDGNDTDAIYEASRRRGLRAVAVKTVAQQDVQLVHRVRERRKKALVALMNQSRGALAERGYVCGRGVSALKGLVEQVLATPAAGEISDYFLEQLAQLWAEWRQLEEQVAEAEAMIKAHFRTDPVCARLAQVPGIGPISASAMAVLVGDGRQFRSGRQMAAWLGVTPKERSSGQLRRLGGMTKRGDRYLRTLLIHGARAVVRTALRKDDARSRWIQALVARRGYNKAVVALANKNARILWALLSRGEDYRGMGQAAV

SEQ ID NO: 366966 - protein, 393 aa, unidentified
MEVRTENTPSAEVNNDPVHCFVAIELSKSSWVVGFQTPLVKQTSRYQVKACDAKALLELIERVRIRVTRELGRPVEVMSCYEAGYDGFWLHRVLEAHGIHNHVLDPASLQVNRRARRPKTDRIDADRLVRALIRHLRGEPEACSVVRVPSPEQEDARRLHRERGRLIAERVAHVNRIKGLCASQGIYDYEPVRKDRLQRLEKLRTGDGRPLAPQLKAEIVREIKRLQCLLEMIATVEAERDAILESEKSRHLNADKIKMLAKLKAIGPEFSTTIVGEVLYREFANRRQLGSYVGLASSPFRSGSLGRDQGISKAGNPKARAMMIELAWSWLRYQPDSALSRWFRERVGNLKGRPRRIAIVAMARKLLVALWRYLQTGVIPTGANLKTNRLKQA

SEQ ID NO: 366967 - protein, 346 aa, unidentified
MSELKEFIIGVDVSKKTLEVAILEKATQKVVGTKSFSNTPKGYSELLLHVASKTKRCISTVVLESTGVYHENFVDYCHEVGWAVSVVLPTKIKNFTKVENIKTKNDKVDAKIIARYGCMFPLKLWTPMTGNYHELRTLSRHILALKKERSRAMTRLAAYKSTKRTPKSILQSEEEHILCLGDMIEHEEAELKKLAYTDHDFKRKIQKVATIKGISELVAIQIICEVNGFEMFANTRQVTSFAGFDIVERQSGDYAGRTHISKKGNRYIRRLLYMPAMTAATHGTGKFVDLYQRIAERNTGTSKLKGLVAVERKLLIIIYTIWRKNENYDPDFIHASAGIASGIAET

SEQ ID NO: 366968 - protein, 401 aa, unidentified
MEGPIVSIDVSNGNSHYMCFIKNNKRFGKVKKIDHDIEGFKRLLEDIQKLEAETNEKVCAVFEATGVYTKPLERFLSKNSIKTYIINPLESARKRKEEIHNKKTDKLDPISISKVYYDKEEMMELKKKDETYNWLRKKNRLYEDQLNHLRKYKVTFQNQLSICFPGYLDLFKDGYSDIPMTILKKYPHPDLLKNKKAETVARYLEKNTCHTHKVSLEYALKIIEFAKKTYPGCEKDDVEVEIFKILLDKVIETQRECEKTLNEMITVASTLEEYRYISSIDGIGPNLAARIIAEIGDIEEFKSREALVAYAGLDPHIYQSGDQDGKHLKISKKGNKYLRCLLFLAVGCSIRGAKDNPVNRFYQKKKQQSNPLNSKAAKTACTAKLLKIIYGICKNKTTYER

SEQ ID NO: 366969 - protein, 341 aa, unidentified
MKKFFIGIDVSKETVDVSFVESDFQRHPEYLAQYPNGKKGYRSMVRDLKQAMRGTGSGQWLFCCETTGAYDRQLCHWLTEHGMHVWRESALQIKQSLGIRRGKNDKADSMAIADYARRHHDKANLYKVPDKELAALKDLYLYRQTLVDKRKAVKNRVKALESQGGSVSPAAKFIRRDASRELRRLEQSIRECESAMKEVIRSDAQLERNYEHVKSIKGFGLVVTVALMVFSGNFQNIPTANKMATYCGVASFRSTSGTSIDFRQDVRHLSNRRLKGVLTMAARSAIRHDEALRQYYQRKIAQGKQYGVAINNVKNKLLHIAYALVKNDSDFKPGHVCGQAV

SEQ ID NO: 366970 - protein, 314 aa, unidentified
MILSLCCIGIDVSKQALDIFEEAIGTPERIANTPEAIAERIARWHDRDVFVVFEATGVYDRTLAAALARSGIRHTRINPSRARDFARASGRLAKTDAIDARMLAAYARAMEPAADPAVSQIRNALALLAKRRDQLVHMRAQEKNRFSEEQDLTMIKRLQRHLDFLSDDIKAIEDEIQELVRTDPAITEEARLMRSAPGIGPVACIQLISQMPELGRLSPKQIAALAGLAPFNVDSGGHRGKRSIAGGRKRVRDALYMAALNAVRKNGPIKRFYDRLRAANKAAKLALIAVARKLLTVLNAMIRDRKTFVSTPTT

SEQ ID NO: 366971 - protein, 398 aa, unidentified
MAPGRRLNIGEAPVALPQIRIHVWPTWAFVFGKRGGEIAGSQKETRTAGDEAEGQGLAVLRPNVAGIDLASEIHWVCAPNVDGTGREVEKFGATTPELERMAEWLKQRQVESVAMENTGVYWIAPYEVLERYEFEILLVDTRELARVPGRKKSDHVDCKWIQRLHSCGLLRGSFRPAEQVCRIRTLVRDRGNLVAAADWLRRMQKSLDQMNVRVHRAVNDIEGATGMAIIRAIVKGERRPEVGGIARCALPEERGTNRRTIERTLSGGPPIQLTGSAADVRCGAERDCRLRPEILRQLAAMEREECRGQQAPKLKNVNKAQKIKSRGEQTMRQALYRMSGVDATAIDTIGVGTVQVILSEYGPDLSRFATEKQFVQHATLAPHQPTSGGKKLKKEETG

SEQ ID NO: 366972 - protein, 352 aa, unidentified
MIVIGADTHKSSHTIAAVDAATGQVLGEKTIAVGARGFGALVLWARGLGGERAWALEDCRHVSGALERFLVARGERVVRVSTRLMATSRRSARERGKSDSIDALAVARAALAEGVETLPTAALAGPELDLRLLVDHRERLVRQRVGLNNTLQWNLHDLWPALALPGGALFSRKWSSRIGRRLARAEQTMRVRIARDELRRLRELTQAINALEAEISELVARAAPQLLSEPGFGPLTAAKLVGEIAGADRFNSDAKLARAAGLAPIPVSSGRSNRHRLDRGGNRQVNAAIHRIAVTRARCHPETRDYVARKTAEGKTHREAIRCLKRHLARRVWQLLRAPHPVRGTPPSPSHS

SEQ ID NO: 366973 - protein, 315 aa, unidentified
MERSPVAPTFVGIDVAKNRLDVHLRPAGETFALGRDGSGLAALVERLVALTPALVVLEATGGFEVTVAGTLAAAGLPLVVVNPRQIRDFARATGRLAKTDRLDAEAIARFAEAVQPAPRPVPSAAAQALGELVARRRQLVEMITSEGQRRRQTRDPRLGRRLEAHVSWLQRELATLETDLDDAVRGTPAWRATEDLLASVPGIGKTSARTLIAELPELGSLDRRKIAALVGVAPINRDSGCFRGRRMVMGGRASVRTALYMPTLTAIRHNPALQAFYQRLIGRGRPAKVAITACMRKLLVVLNAILRDQTPWQSA

SEQ ID NO: 366974 - protein, 422 aa, unidentified
MGKHRYKTVGFKALDWAGLSERLAGRRVVFSIDVAKDDFYAALMTAEDAVEALVKWVHPRETTALLAHLSALAQVAQVEVVMEPSGTYGDALRWQLTQRGLGVWRMGPKRVHDAAEVYDGVPSLHDAKAAYLIGRLHWQGVSRPWREADAERRALLAEVSLVDLYKARHQAGTNRLEAQLSRHWPEVLRVLGCKSVTLARLLAQYGDAAHVAADETRARELMRHSGRSVLGAERIEAVLASARTTLGVPCVEAERCLVQELARDVIETAKRLREAERTLERRATEDATLTRLSAVVGVTSSAVLMATQGRPQDYSSPASYVKGLGLNLKERSSGKHVGQLKLTKRGPGVARHYLYFAALRQIRRDPEIRRWYQARIQRPGAVRGKSVVALMRKLAQGLWHVARGQPFEPGKLFDSKPQAGAA

SEQ ID NO: 366975 - protein, 345 aa, unidentified
MELHTIGIDLGKTVFHLVGLNLQGEVVVRKKFSRTQLLRFTANLHVELMGMEACGGAHFLGRALREQGHEVRLIPAQYVKPYVKTNKNDYVDAEAIAEAVARPTMRFVPIKTDDQLDMQSLHRVRERWVMRRTAVINQIRGLLLERGITLRKERRHVDAALPGILEDADANLSRALRMPLAQLKMNLDQLAMRISEADAVIEKTAHQNDACRRLVAIRCIGPVTATALIAAIGNGGAFRKGREFAAWMGVVPREHSTGGQQKLLGISKRGNSYLRRLFVQGARAVMQQRTKQASGLSAWLAQLTARAHRNVAPVALANKLAHVAWAVLAKNEEYRPPVLADVTAA

SEQ ID NO: 366976 - protein, 352 aa, unidentified
MSIIAFDSHKHYTFARTEDKNGNNVTESRIEHRRGNIVHFLRQHQVGSPVAVETIGNWYWIIDEIEKAGMQPLLVHARKAKLMLGCINKTDKLDAKGLNKLQRVGTLPTVWIPPGDIRDKRELPRTRIVFGKTRTQLKNRIHSVLDKYGLQDAFTDISDIFGKKGREQVQLVLGQMPSETRYVTVLLLEQLDQTQQKITWIEGRMKELFEETEQIKLLKTMPGVGFILAVVILYEIGDIGRFSSAERLASYSGVTPRVHSSGGKTRYGRLRPDTNHYLKWAFSEAGNSVAVNHKRHPQRHVSRLYKRIRHRKNHAKAIGAVGRHLAEATYWMLTKGEAYRERGPFKVSSTGT

SEQ ID NO: 366977 - protein, 429 aa, unidentified
MRAGDCAANSSSKENCHCYRFRRYDHLRWGGLPVGRLSLCNLNEGCAEKAPILLHRRRTMNYSAYVGLDVHKTTIAIAVAEAGRGSEVRFFGEIANSPDALATLLKKLGARHGKLYFVHEAGPCGYGLYRQIIDAGHVCDVVSPAHTPRRAGDRIKTDRRDAIMLARLSRAGELTKVWTPDYAHEAMRDLIRSREVASKDVRQARQRVQGFLLRNGRRYAGAVWKRSHRVWLGNQTFDHPAQQIAFQTHLNAMDQAVERKLEIEKQIQALLPDWSLGPVVEALQALRGVALAVAAGVVAEVGDFQRFDNPRQLMAYLGLVPGERSSGETRRPTSITKAGSIVARKLIVEAAWAYRMPAKIGQAMQRRQEGATAEVRAIAWKAQVRLCARYRRMLARRKTPPVVITAIARELVGFIWAIGRSVKPRMIAA

SEQ ID NO: 366978 - protein, 468 aa, unidentified
MRLRLGIDVACKAAHQVSCTDETGRFLFSGRRFRTTVEDLEKLWASLPAADEVLIVLEPTRNAWVPLAAWLRARGAKVVLVPPEQSADLRDYYHKHTKNDRLDSRMLARLPLLHPEGLRILGDDELGPADPLRRATRRRRSLVKRRTATYARIDALLELLGPHWAEALNTGEYGKTALTLLERTGADPHALTRLGRKRLTALLVRASRGQWRDEHADRILHAAEQSLRLWDAGGLDLTELAADLSGEARLALQLSSEIDGLDDRIDVLYSETDPAGLLTSAPGLGVTSAATILAGLGDPDRFTTLAGIRSFTGLIPKLDESGTSSRYGPPTKAGDPALREALFNAADRARKTDPTLAARYHRLVTQAGKHHNSAVCTLAAVLVTRLAACWRNRTPYQLHDLDGQPITEAEGRTICATRYQVTDTDRAKNRSQRAAQRQKQGTGRRSKESRSAPAASLSTNHPSHPPTA

SEQ ID NO: 366979 - protein, 428 aa, unidentified
MNYNTQNRKIASITEKTLVVGIDVGSQVHYARAFDWRNYEYSKKAFAFSNDEEGFMAFKNWMNEIAEKHQKEAIIPGMEPTGHYWFSLGAFLQNNGMRVVHVNPHHVKKSKELDDNNPNKNDRKDPKTIAALVNEGRFSYPYIPTGIYAEIRNLSNLRFRTQEEITRIKNRLARWFSIYFPEYKDVYGNLDAVSGMMILKEAPLPADIVKLGVEGINKIWRDAKLRAVGMKRAKTLVNKAEHSIGSHEAPEAARVELVMLLNDYEMYNLRMEELMNTIEEKLQEIPYIDKLMEIKGIGMITICGFIAEVGDIRRFDNPKQLQKLAGYAVVSNDSGKHNGESHISYRGRKRLRYVLYEAAISLIGKNPEFKEIHNYYLTRDKNPLKKMQSVIAVACKVIRVFYMMLTKGISYDGTKMLNDIKRRELTMI

SEQ ID NO: 366980 - protein, 500 aa, unidentified
MFTVSVRNQRRYVLCLLVSPRRILLKTVPHTCVFSSNPVAVFLRFGQPFCRRVRASVPKAYSNPRGCCAAGSWALLVGFFLILTRKEVITLNTTTLFVGIDVSKKSNTVRFMDGGGDTLSRFTVPNNADGAAKLQEKLRYTLLHMDYSKVTIGMESTSVYGDHLAAYLRSDPFLQKWCCKVYTLNAKQVANFKKSYPALPKDDDIDTLIIADFLRFGRLPKEVHHDEKYLALRNLTRARFQAAQNLSREKTRFIDTLFQKFSTLDSAKVFSNTFGATALAVACEFLSVDEIIYKPIDELTDFINTKGKGKFADPSEVAKALQAAARSSYRIPKTVSDSLNQLLAVRLVGIRSIEDQIKSLDKAIESFMGAFQNVLISIPGIGPVYSAGIMAEIGCVHRFEGQASLAKYAGLMWSKYQSGGYEAANTKLVVSGNKYLRYYLLEAANKVRLHDAEFERYYRLKFREVPKHQHKRALALTARKLVRLVYSLLSTNRLYTPPTV

SEQ ID NO: 366981 - protein, 411 aa, unidentified
MNRKLTLLYIGVDLHKNHHTAIMMNCLHEKLGELKFENKPSAFPLFLKEVNKIAKKESLTPVFGLEDVGGYGRGLAMFLIENKYEVKAVNPALTVSMRRSSPNNKKTDAWDAECVARILISNLDTLPDANPLDLYYAISQLVTRRANIVSVLTGLKLQLHQQLGYHYPSYKKFFSQVDGKTALAFWRKFPSPSCLKGGRVEELAEFLRKKSNYCLSTKKAEEILSLVEQDGDTSKDYQEANDFLVKDVVRDIFIREHQLDQIDAELKKHMALLDYKLETMHGISTVTAAELIAEIGDISRFPNADKLANFAGIAPVQHSSGNKQKIKKSKLGNRSLYDIFYNLAIRMLGVTRGEKKPNHPMYHAYYEKKLAEGKTKWQAIICVMRKLVNVIYSMMKYKTEYKMPVVPERAA

SEQ ID NO: 366982 - protein, 360 aa, unidentified
MEVGQTVADHGVVGGVDTHKDLHVAAVVDELDRVLESRCFATTRHGYQQMLTWMRSFGQLRRIGVEATGTYGAGLLRYMQNAGVEVLEVTTPDTHDRRKRGKNDDLDAQNAAHAAFAGRRTVTPKSRDGMVESLRVLKACRKTAVAARRVALQMIHNTIVCAPDELRETLRRMTRMQLIRTLAAWRPDLTDYRSVVSAYRITLKSLGRRYLELHDEIADLDTMIVAIVDELAPALVARNSIGHGSAAQLLVTAGDNAERLQSEASFAALCGASPVPASSGKTTRHRLNRGGDRAANSALHIIAIGRLRTDPRTKAYIAKRVAEGHSKLEAIRCLKRYIAREVFSLISQRKREINQGRNAA

SEQ ID NO: 366983 - protein, 447 aa, unidentified
MLSLEDWSISTVECLRVEKFRQEVCLLAIGIDWAEDFHLVALGRPHEGIFEVLRVEHRPDAIERLVARVSELEPDPEEVRVVVETRHGLLVETLLDAGYAVVPVNPDLIARRRGPARKKDDTEDARIACLLALDRFTPLNPLIPHGELANELRAIARDDLRASRDQRRLLNRLRMDLLSTFPAALTLAGEDLGAPTMLRLLERWPTLEQLASATRDEIVTFARAGRHGWPERFADEVAAALAASHFVARPSLARAKEDSIRLTVAQLLLIHTQRKAWERRMGELLLGAPRQGRAKQPNPEEAGERLPGGEIYLSFPGLGDRLTARVAGEIGDHPQQFSSPNSLQCYAGKAPVTRRSGKSEFVVAHRLACNRYLADAVQQWAFCSLRRSGWARDFYQAKTALGKTHHAALRALGNRWLEVLWHCLMKNVPYSETIHVANRNRALGRAA

SEQ ID NO: 366984 - protein, 378 aa, unidentified
MADKDTKYVGLDVHKDTISVAIAESGRGNPVFYGQIPSTPEALRRLVQSLGGDRSGLRFCYEAGPCGYEVYRQLVSWGYDCMVVAPALIPRKPGDRIKTDRRDALSLARLYRAGELTPVWVPDEEQEAIRDLVRCREDGKQQEQKARQRLQAFLLRHGQVYGGKSKWTQAHFRWLEGCRFSQPAQQIVFEEYIQAIRQASARVAALEEEMGRIWPGWSLGPVVEGLMALRGVSLIVAMTVVAELGDITRFDSPRELMAFLGLVPGEHSSGQRQQRGGITKTGNGHVRRVLVEAAWCYRFAARKTAHLQRRAERTSEEVQAIAWKAQKRLSHRYRHLQNQGKPKQQVCTAVARELAGFIWAIAEQVKDPTHAVAGIGGE

SEQ ID NO: 366985 - protein, 335 aa, unidentified
MKKIYVGIDISKEKLNLCYREGLEIILEEECMNDVKAIKKGFKTALKAFGATIDEVLVCAEYTGRYIYPLTVACQELDIFLWMDDPTRIKNSMGITRGKNDKIDAARIAEYAYRYCDKAVRYTIAEDAMVPMKNLLADREFLLTDKKRYQSQITDQKRYMAPGDFKHKNSRWKKVIKAIDDQIKAIDAEIDGIIASNPVLTRQKELLTSIDGIGDRIAINMIAITGGFKRFENARHFCSFAGLTPYKYDSGTSVRSKAKISKRANQTMKALLHLAAVSAATHMKEGEYRDYYERKTKEGKHVMCVLNVIRAKLVHRMFSVIRRNEMYTKSYQPAS

SEQ ID NO: 366986 - protein, 464 aa, unidentified
MNGDSKAGSGQEGGRKEEGIAALGRRVAGVDVGSKEHWVCAPVREGEGREVGVFGATTAQLEKMATWLIERRVESVALESTGVYWVAVYEVLEARGLKVLLVDGRALARVPGRPKTDRRDCQWIQRLHSCGLLQGAFRPPEQICMLRTLVRDKGNLVAEQGDWVRRMQKSLEQMNVRVHRAVADLTGATGMALVRAIVKGEREARELAKLRDPRCHKSEEEIAEQLKGHWREDHLFSLGQALKMYEAIQERIQDYERAILEKLKAMEREECRQQEPPELKNKKKAQSILHRGQEPLRQALYRASGADLTAIDGLGVETVQAVTSEYGTDLSAFPQEKQFVKHVLLAPNRPTSGGKPVKKKQKHGTASSRVAAALRMAALTLRHSQTALGAYYRQIARHKGDDVAVFATARKLATLIYRMLRWGKDYVDEGAEAYENRYREGRLRRLTSLARELGYQLAPLPAKP

SEQ ID NO: 366987 - protein, 400 aa, unidentified
MSLAVGIDVAKETHWAVIKVAETGKVLASHAVDNAPQAIADVIAEIHAAEASHGPATVGIDILGGIAALAEAMLLAGGLRVVHISGLAVNRARRATRGGEHKSDPKDAAVIADLVRTRDDLRVIEPAREIDVELRLLAGRRAEIVADQTRRAARIRDLLVSVFPGLERVVDVTTKTGLHLLTRYVTPAEIRRAGKARLTAHLRRAGRVKDATISDLATAATAAAQAQRIAVPGETVAAGLIRALAAEALAGRDQLAAIDKQIEETLARHPDAALIRSLPGMGAILTAEFLAITGGISRFPDGDRLAAAAGLAPVLKQSGKVRYLQRATAGDKALKRVFYQSAFVAISCDPASRTYYQRKRAEGKTHHQAVLALARRRVNVLHAILRNQTPYQAGHVSTAA

SEQ ID NO: 366988 - protein, 430 aa, unidentified
MKSNTQNAKIEAITEKTLVLGIDVGSETHYARAFDYRGIEYSKKPFKFSNTEAGFVTFKEWILDLKEKHEKDKVVPGMEPTGHYWFNLGKFLQDNEMKPVLVNPHHVKKSKELDDNNPTKNDRKDPKVIAGLVREGRYMIPYLPDGVYADLRTASNIRFQLQAELTRIQNRISRWFNIYFPEYKTVYGKPDAKSGMLILKQAPLPEDILTLGIEGVNQIWRDAKMRAVGKARAKTLIEAAEHSVGSKEGAVSARMEIRMLLEDYESRNIRLQEVMTLIEELVNQIPMAEKLLEIKGVGIKTVSGFLAEVGDISRFNNPKELQKLAGLALVENSSGKHKGRTTISRRGRKRLRYLLFEVAMSLVAKNPEFRELHTYYTTRRLNPLKKMQSLMAVAAKLIRVFYVMLTKGVDYDPKKMVGDIKRPAVYLQAA

SEQ ID NO: 366989 - protein, 351 aa, unidentified
MKEYAKESAGTEQFAGLDVSLKDVSICVSDGGGQVLWRGDVINDAAAVVAALRRHAPGLVRAVLETGSCGVHLYRGLEAASVPIVCICARHAKGVLKCKINKSDANDAEGLAQLARTGWYREVYVKSADAHVIRAHLLARQQINKARRNFENQIRALLRVFGLKVGQVARGRFEARVTGLLERAPALRLPIEQLLASRRALEASQAALEGEAKRLAAADERCRTLQTMPGVGPLTALAFVSAMDEPSRFAKSSSVGAYLGLTPRSYQSGEVAWTGRISKTGDALSRALLYEAANVLMVRVKAPLPLKIWALGLAARIGGKKARVALARKMAVILHRMLSNGTAYRWNPEAA

SEQ ID NO: 366990 - protein, 492 aa, unidentified
MCTLAVACSSESEQQVNKTQGNNLQAPGTKTKRRKRNKGMCLEERPILEPNAAGIDVGAREMFVAVPPGRDENPVRVFATFTEDLERLTDWLEQCGVTTVALESTGVYWIPLFEILEQRGIRPCLVNARHMKNVPGRRTDWHECQWLQFLHSVGLLRAAFRPGQDICAVRTLVRHRNELVSAASQHVQHMHKALTQMNLQIHHVISDITGLTGLAIVDAILAGERDGAELAKLKDPHIKADTETIRKSLEGNWRPEHLFTLGQSRALYRIYQQQIVSCDLEIERMLGEFEPRVDPTQKLLPPDGKRNRAGRKRRRKNGHPHPEFDLRTEVYKLFGVDVTQIPGLEENALPLFSEVGRDMSRWPSAAHFVSWLALCPDNDISGGKLLWRGARRVKNRAGHLFRLAAFSLHHSPTPLGNYLRRMKTKLGPKGATMATAHKIAVIFYVMVKKQVEYDQSIWATRDAQREKRLETKLKRQAKQLGYELVPIQPKAA

SEQ ID NO: 366991 - protein, 308 aa, unidentified
MTLWIGIDVSKASLAVCLLPQAQQLSLPNTADGHAQLRALLADRPVGNVLLEATGGYERPLMRALAAAGIPVTRINPRRARAFATAMGKTAKTDPIDAALLARMAELVCAPGPALEPEREALRELVQRREQLVQQRDDERRRLHQAHLPRVRHDLIEHIAQLRLRIRQIDKAVAQAQRQLDDHLSQQLRAIAGIGEVTAASLLAYLPELGRLDRRQIAALAGLAPYNVDSGQHAGKRRIRGGRAPIRRVLYMACWSVIRTQPDFKARYQRLRQRGKCAKVAITACMRVLLTRLNAMARDQTEWRMAAA

SEQ ID NO: 366992 - protein, 344 aa, unidentified
MECYVGLDVSLKQTSICVVNEKGLVVREGVVDSVPEAIAGFVRSKAPGAVRVGLETGPTATWLWTELARLDLPVICIDARHAKAVLKMQVNKNDRNDAAGIARIMQTGWFKEVHVKDLDSHAVKALLASRALLVKIKRDLENQVRGLLKNLGLVVGHGTFNVFAVRAKELIADRPELTSAVSPLLTARTAIEQQIGELDRRVLKLSRQDAQARRFMTVPGIGPITALCFKATIDDPARFRRSRSVGAYIGLTTRRHASGELDWSGRISKCGDAMLRMYLFEAAGVLLTRVPKWSALKAWGTRLTKRNGLRKAKVAVARKLAVILHRMWVDGTEFNWSNNKEVAA

SEQ ID NO: 366993 - protein, 341 aa, unidentified
MKAINFFVGIDVSKETLDFCLVVQGKYFSSFTSKNTVEGIKNSVEKLIKEQKIIAQETVFCLEHTGIYSYHLCAVLQELGLSIWLENPTQIKFSMGLQRGKNDKIDARRIAMYAYKNRENVKEWTPKRENIVLLTELLAVRDRLSTTLHALAVPIKEQKKYWNDKLYEEISPYSQTVVEELEKQIKAINEKIDEVIDKDKHLKELFGLITSVPGIGRITATELIVQTNEFKDFSNARKLACYIGVAPFEHSSGTSVRGRTKVSQKANKKLKTLLQLVTMNCAKVRGKMNVFKAYYQRKVTEGKSKMSVLNALKNKLLHTIFAVVKNKQKFENNWENYLVKP

SEQ ID NO: 366994 - protein, 428 aa, unidentified
MNEDELSRLKEFRQLKKQVQGSESHLIVGIDVAKDRHHAFLGTATGRTLVKKLIFENSASGFSELLARVEAVRAQSGLSGVVFGLEPTSNYHKPLGRYLISKGCHVVLVGGKAVKNNRELLDERWDKHDTKDAANIADLVSRGKCFYYDRPSGQIEELRELHSLRARLKKEEHSLNLRIRNNLLAKHFPELDRFYTASERETLAIVRWCLNPRQIAAMPFEEFFKRVAPNARGIGQKLRLQKIHRLAHESIGCPVDSAVQLQAGLLVEKMKQVREQIAQVEQGIQQRCVQFPSYGHLLSIPGFGPYVASKVLATIADPWRFDSAKQVIRSAGYDLCADRSGKSSDQAVPVISKKGNSQLRYALYQAALIASSRHRFFMAYFARMLQGRERERGIRTKMRVKLAAKLLVIAWTLMKRGESFNPEYLKVQ

SEQ ID NO: 366995 - protein, 371 aa, unidentified
MRIGMDTSKSVFQLHGVDAAERPVLRKKLRRSQVLEFFKKLPRTRVGMEACGAAHHWAREIGALGHEAVLLPPQLVKPYIPRNKNDAADADGVCEAMSRPRMRSVPVKTAEQQAALMLVGVRDQLVARRTQLSNSIRGYAAEFGLVAAKGLDKIAPLLARIAADARLPDLAKEMFATLGADYAELGMRLSRLEARLHAWQRQDETSRRLMEVPGVGPIAAALLVMKVPNPRAFRSGRDFAAWLGLTPKDHSTAGKQRLGVITRAGDEALRRTLVVGATAVIQQTRRGRGRASPWLTGLIARKPPKLAAVALANKTARIVWKLMVSGERYDHGRAARARAERSAALTEGFALRSALAATAVRGDAAATVLEP

SEQ ID NO: 366996 - protein, 429 aa, unidentified
MTRISVGVDVSKNRSTVCIMDQDGKFIMRPFLVWHSTEELDFLADTLKRLNGEVRVIMESTSVYQYPIALHLKERGLFISIVNAYEMKQFANIDFRGGKTDKKDSRTIASYGISYWDKLVEWQIPKDTYFNLDLLNRTYMNAKKHRQIILQELQHYIDCAMPGMDKELHSLNLSTKKDFMLDFVEKFWHRDEIVNKTETEFTEVFTAWAKKKGYRPVEGKAAKIYAIAKSCIPYYPANPTVKTILQCIVDKLSGVNRTLVTIVTQMIEEAKKLPEYQIVREMPGVGDPLAARFFGSAGDIRRFKNSKALVAYAGIDSPPDESGDFSSTHRHITKKGSKVFRDTGYEIMMALRAQKRTWEKGRKNPEVYDYMLRKEAEGKPPKVAKIAALNKFLRIIYARIKELYDNMALAERAKAKTKSKTKAKTKATA

SEQ ID NO: 366997 - protein, 340 aa, unidentified
MEFRFFIGIDVSKDTLDIGLLDAESSETVNHQQVGNNDSGITAMLNWLQQHNEFSIESSLFCLEHTGMYNYPLLQFFSKQGASVSVENPIQIKRSLGLQRGKNDKVDAVRIAQYAYRSKQQIKLWQPAREVIERLKHLSALRERLVETRKRLLTPVEELSKVGNEAMAKILEKAMNKTMKALDKDLEAIEAQMKEVIDKDDNLRNMYELITSVVGIGFVTAVNLIVYTNEFKLFSCHRQFACYSGIAPFEYRSGSSIRGKTKVSHMANKKIKRYLHMASLTGIRLDEDLKSYYKRKVEEGKSKMSVLNAIRNKLLARIFAVVNRRSVYQKINYQTSLVLS

SEQ ID NO: 366998 - protein, 405 aa, unidentified
MSNDVFVGLDWAVHTHAVCVIDAAGSVLDRFEVAHDRDGLAELMRRLARWGSRVRIAIERPSGLIVDALVEAGHAVFPIHPNAVKASRPRYRSHGAKSDASDAYLLADLLRTDGHRWRALAQQSDAIRALRALVRSRDALVAARVAAANQLTSTLQAFWPGAAVIFADVASPIALAFLRRYPSPSSAKRLTEAQLQRFCKTQHYSGRRSAADLLGRLRAAATGRVGVQTQKAMAEVVRADVAVLVPIVSQIAELTRCIEQFMHSLPDGLLMMSFPRAGQVCAAQILSELGDVRERFPNPDQLAAEAGAVPVTYQSGKTRSVAFRWACNHRLRQAITCLADNSRHANAWAKGLYQAARTRGCDHTHAVRILARAWLRVIWRAWTDRKPYDPALHGSARALASNQGG

SEQ ID NO: 366999 - protein, 410 aa, unidentified
MGLYCGIDWATTHHDIAILDDEGKLVARARVTNDAAGFALALTLLAEAGDSSDEPIPVAIETDRGLWVAALRATGRAIYPINPLAASRYRARYQVSGAKSDAADAVLLANILRTDMAAHRPLPADSEAAQAIRVLARAQQDAVWARQQLGNQVRDLLKDYYPAALAAFADLPGGGLARRDARTILTAAPAPASAARLTRTQLRKLLTKAGRQRFIDRDIDRLREIFADTYLHQPPQVEAAMGIQLAALLRQFDAACTAADELAEAAIAHFDKHPDAKIITSFPGLGKLSGARVLAEIGDDRTRFADARGLKAYAGSAPITRASGKKTVVLHRQIKNRRLTTTGSMWALASLRASPGARRHFDARRAVGDWNHQAQRHLFNKFLGQLFHCLQTGQLYDEHRAFPPPSTAAA

SEQ ID NO: 367000 - protein, 444 aa, unidentified
MNAVGIDVSSRKSTVAVLRPLGEVVCLPFDVSHDADGLASLAEKLKDLDGETRVVMEHTGRYYEAVEKALHEAGLFVCAVNPLLIKEYGANSLRRVKTDKADAVKIARYALDNWADLRDFTPMDAIRYDLKTLNRQFQLASKQRTASANNLIALLEQSFPGIRKCFDSPVLSDGTQKWVDFAHSFWHVDCVRKQPFPAFCERYRKWCKRHAYLFKQSNAEEVYALAKRAVVLTPKSKVVKVLVQEAANQLSSISRSVEVYRAEMDRLAAMLPEYPVVMAMYGVGKSYGPQLMAEIGDVRRFERKQALVAFAGIDPMPNQSGDKNVRSNKSSKRGSPYLRKTLFNVIRDPPHNCAQPRHIIPADPNFEKKRNSSALFAREINLVTQPSFDCEQGINSQVQTACSNADAIFPVLGIVSCRNERFSLSRKTHVPLWNAPRISHVRLP

SEQ ID NO: 367001 - protein, 307 aa, unidentified
MTAVGIDVGKVSLDLAIDGQIEVARYPNTMAGIAKVIRRLQILKTPRIVVEATGGYEEPLLDACCDADLWIARVNPRQARDFSRATGELAKTDTIDARLLALMARLFADRLRPYLAPPPWQREMRDWLRRRAQVVVTLQAQKQQAAMAPVSVRKLAARTIAALAREQAAINQAIHALIKQHGTPAVHSSKGLGPVFQATVLALLPELGHLDRRQIAKLVGVAPMNRDSGQGCGQRRIRGGRSPMRVALYMATLSAVRWDPVMKAHYQQLRERGKLGKVALIACMRKLLGIVNARRRDELRAEELAMA

SEQ ID NO: 367002 - protein, 417 aa, unidentified
MTHYAALIGIDWADTKHDICLIETTTGQREASILRHSAKTLDEWATALRLRFAGQPIAVCLEQSRGPLIFALMKYDFLTIYPINPSTLAKYREAFSPSGHKDDVTDAAYLAELLLHHREHLRAWQPDSEQTRTLGYLIEHRRRLIDDRTRISNRLTALLKLYFPQVLDWFPDLRTELVCEFLLRWPALETLHKVRRETLLKFFRQHHSVRVETLQKRVEAIKVSQPLTTDRAIIKASIVMCQALVAQLRSTLLAIKEFDTQIAAICEGHQDFALFKSLPGAGAVYEARLLVALGSDRERWSSADEVAQLSGIAPVIERSGKSCRVRWRYFCPKFLRQSFHEYAGESVRHSFWARAYYEQQRGKGKSHQAAVRALAFKWIRIIFRCWKTRCAYDEVKYLEGLRKKGSSLLNYAANHPA

SEQ ID NO: 367003 - protein, 322 aa, unidentified
MSLPSPLCVGIDVSKATLDIAASSAIEQFSVANDADGFDSIIAVLRKRTVALVLMEATGGLEAAVACALQAEGFEIAVVNPKQARDFARAMGYLAKTDRIDARALAQMAEVINCHPERDRFIRALPDAERQVLNAMVVRRRQLITMLVAERNRLHPAHPQSRKSINIIIKALEDELARIDEDMNTHIRNHFKELSERLSSIKGVGTMTVATLLAEVPELGRLSRREISALVGVAPVNRDSGTMRGRRTIFGGRAGVRTVLYMAALVATRFNPVIKAFYTRLVAAGKPKKVALVACIRKLLTILNAMLRKNEGWDEPYHHIAP

SEQ ID NO: 367004 - protein, 418 aa, unidentified
MSEEANARRSRRYVALDIHKHYCVVAAVNRDGEVTLEPVRVEHEDLERWLQKHLLRDDDVVIESTTNAWHVYDLLEPLVERVLVANPIKVKQIACARVKTDIRDTLILARLLAANLVPTVWVPPVHVRDLRQLLSQRRSLVGMHTQGINRMHSTAHRHHLNHPKGKRFLPKNTAWQKEDVLSTLEKLQLELEMETREHLRDQIDRITTVLARMSHQAPWNEGMQYLMQLPGFGVVTGMTVLAAIGDVSRFESPRHLASYSGLTPGVEQSGVKLRGKGITKEGRKELRWAMVEVAQRAVKSDPHWQYRFNELQRRMHRNQAIVAIARRLLELVWYVLTRRQPYRHFSQERIAYKYLTWSWQLSEDDRDGLTRQQFVRYYLMRLGIGHDLERIVLDPKHPRKLASEAEILTLRPELIQIE

SEQ ID NO: 367005 - protein, 336 aa, unidentified
MRYIGLDVHKNNTTACVIAANGKPVGSMDVKSNEAGLQKVLDYMQGQEFCVMMESTTYAYRIFRFFSRHDVEAHVVHAASLKMVTDTDKKTDRKDAESIGRYLRLWKKGDIELSMSYMPTIEECRVKDICRIKEENSMKIGDESRRIKSHMSRNLEEFRRNSDLKTKYVRDDLREDYHGDPVLMFRLDEYERLITEGNWLKHMVENELPDNRYVELIESIPGIGRQTAVQIMSMIVDPNRFEDGKKICAYFGMVPRVRDSGGKEHHGKLTKNGDKMMRSIMERVTSAHVRFCESSVTAYFKAKEPVMGTKKATVTASRKMLTMILAILKRGTPFRA

SEQ ID NO: 367006 - protein, 389 aa, unidentified
MVTTHFQTETPTAIRTDLGAIFVSLELSRSTWLVTSLSPGGGERMSNHAVAGGNVSELLARFTHLQEKARSRSGRLFPIVTIQEEGLDGFWIDRVLETNGIESYVVDAASIAASRRRKRAKTDKIDGEALVRALLAFKRGEPRVCAMVKAPGPEEEDRRRICRERRVLIAERVEHVNRIKGLLFAQGIGGYQPLRKDRRRQLEDLRTGGRVLPPHLRAQICRVLDRLELLLDHLAVVERERDALVERVECEAKAPEPATMLCAIKGVGPEVAAVLWTEGLCRQFDNRRQVAAYAGLAPTPWQSGTIDREQGVSKAGNPRLRTTMIQLAWLWLRNQPSSALSRWFIDRVQSNGGRHKKSTIVALARKLLVALWKYVTFGIVIDGAVLKSA

SEQ ID NO: 367007 - protein, 355 aa, unidentified
MNKYSVGIDISKNDFHACFSEMDNCQHVKVIRSGTFTNNKKGFVEFSKWVEVTSKQKDTPLFITMEATGVYFENCALYLFTNGFNVSVVLPNKAKRYIGALGIKTKNDKADARALSRMGAEQALQLWQPMGSFFYELRSLTRLYQTMQENITASRNQLEAAELAMYPSKFIIKSLKKLIDQTEKQLLEIRRAIKNHIASDEKVAEKVKDISTIRGVAELTIAVLIAETNGFLLFENQGQLVSYAGYDVVESQSGLRIGKTKISKKGNSRIRRALHMPALNVVSYNEKIFKDFFERNFDRHGIKMKSYVAVQKKLLITIYALWKKAEKFDPEYGSKNTTRDEEVAQSSRANFEEVG

SEQ ID NO: 367008 - protein, 388 aa, unidentified
MDVLYQSCAGIDVHQATVVVCILHGPLTSTRPKREMAQFDTTTKGLKACHDFLSQFHVEAVGMESTGIYWRPVWHELCDDFELILAQPAHMKAIPGQKTDKKDAHWIAQLTRIGLLPRSFVPDETIQELRELTRQRKHYVESRNRETNRIHKILQSGGIKLTTYIEDIMGASGRNLLQLLIDETPITPRIVHQSVYTSLKRKVPQLLEALDGYFSAHHRFMLAQSLEIYDFYQKQIDCLEERMNGYLNLYERPVEILDSIPGIDLTTASVIIAEIGVDMNRFPTAGHLASWAGLCPGNNESAGKKRSTKIRHGNSYLKRCLCQTVFAAKKQKGSPLAERYYQIQSRRGPQKATIALAHQLLKIAYILLKENLTYQEFVLQKRLLETSQ

SEQ ID NO: 367009 - protein, 433 aa, unidentified
MLKLNYMSTLFVGIDVSSKTNAVYAMDFEENKYISSSFGNNQPGADQLVNMIAECMQKHKNLDTILIVLESTSVYSVHISNFLSASEVLMPYRPYVFCVNPKAASNYRKSYIGMEKTDPTDAYLIADFGRVGRTKKLEPWRGGQFISLKRLTRHRMHLSECITREKTYMVSNLYLKFSELQLLEGDDKPFGSLYGATSSAVLTEFLSPQEIIDMPEEDLLTFLAGKSRNRISDLSKTSELLRKAARDSYRLDKCMYEPLSISLASSFNCIHAYQKEIKLIEQAIEKCINGMNPNALLILQSIPGIGPIWASGILSEIGDITVFHSSDALAKYAGLYWPKGDSGDFTSEDNKMSKAGNPYLRCYLGEAANSVRKHIPEYADFYARKYAEVTKHQHKRALALTSRKLVRLVFGLLVKNQLYTGEKLDTEYNIESN

SEQ ID NO: 367010 - protein, 357 aa, unidentified
MKRVKFVGLDVHAETIAIAIAEQDGEVRSLGVIPNREDSVRKLVRKLGTMEELRFCYEAGPTGYVLYWQLTRMGAKCEVLAPTLVPVKAGDRVKTDRRDALKLARNYRAGELTAVWVPDAAHEALRDVVRAREAAKKDQLRARHRLSKFLLRHGRRPPMGVKVWTIKYLEWVKREVHFEQLAQEATLLDYLHEVEHAAARIARLDGAIEEAVKVAPPKMRAVIEALQALRGVAHVSAVTVVAELGELSRFARAKQLMGYGGIVASEGGGGGRMGLPTPTRRGSHLAQAARACQRRGQRDRLESTTTVTSAISEVAGQGQEQGSCGHGDRTRVVGFYLGHRDKSRNSAEGAPTAGGLK

SEQ ID NO: 367011 - protein, 310 aa, unidentified
MEQVFVGIDVAKDRLDVHVRPSGEAFVVARDDEGVAALVERLCVLSPALIVSEATGGFEQVVAGALGSAGLPVVVVNPRQIRDFARALGRLAKTDRLDAEAIALFAERVQPQLRTLPDEQARLLGELVARRRQLIEMIVAEGNRARQLESRRLKKRIERHRTVLQAELTAIERELDDTIRGTPIWRETEDLLKSAPGVGDGLARTLIADLPELGTLDRKKIAALVGVAPFNRDSGTLRGKRTIWGGRAAIRTTLYMAALAATRHNPIIASFYRRLLAAGKPKKLALTACMRKLLTILNAMLRDRKPWQAA

SEQ ID NO: 367012 - protein, 316 aa, unidentified
MRDTPVFIGIDISKARLDVALRPTGSAFAVPYDETGITTVVQRLKTLSPAGIVLEATGGLEVLLSGALAMAGLPVAVVNPRQVRDFARATGRLAKTDALDAQLLAQFAEAVRPACRPLPDASAQQLAALITRRRQLVEMLTAEKNRRGSAPRAMRSQIQQHIDWLQQHVAQLDQELTTAVQASPIWREHDELLQSVPGIGPVVTRTLLAELPELGTLSRRQIAALVGVAPLNRDSGTFHGKRTVWGGRATVRAALYMGALVAARHNRVLKAFYQRLRQAGKAPKVALTACMRKLLTMLNAMLKHRTPWREIAVAAT

SEQ ID NO: 367013 - protein, 334 aa, unidentified
MQYTHIVGIDISKATIDVAVCQKEATAVILNRRFSNRLEGYEELLAWLEKAGIKLEQVLICLENTGLYHVNLVNFLYSKKGSVWIENAVEIKWSTGLVRGKSDKADAQRIGLYALKNQDKAKLYAAEDEYLTELSDLLTDRERLVKAKNMLLGPLKEKQDLGLGKRADRSKEGCKQSVAALNKDIKGIEKQIAELVKSSKELSKNYKLIRSVKGIGMITALYLIKYTQNFKRLTNPKKLASYCGIAPFEYSSGTSIRGKNKVHPMSNKVLKKLLHMCALSSVPIQEGEMRAYYERKVGEGKNKMSVLNAIRNKLIHRECACIRDQKVYSYKQVA

SEQ ID NO: 367014 - protein, 414 aa, unidentified
MLYLGIDWAADSHTVTLLAATGEVLASIAIDNRLSGFLVLIEAIRKHLHKLEPAATPDSVSFAIEDQNQRLTDFLLAQGFQGYLIEPSRMKGYRLRYRSSGNKTDPDDSFILADVLYRDHNQLPRMAPDSEVIGALKTLLRDREGFVRDSIRLTNRLTACLRQYYPEALGFFEDVAGKTALNFIAAFPDFTAASQLSRREVQRFLAEHHCNRATQLERILTALGSGPTPVPAVVVRTKRQQALAIIQQLRTVQTAVAEYDAEIERLGKENDDVKRFRSIPGGGPIIGAGLSTLFGDDRTRFSRAMAVQSLAGTAPKTIQSGQFRSACFRFGCNRFYRMLLQQMAMGALRSSAWAKQYYRKKRREGKTHQHSLRCLANLLLKIAYAIWRDGTEYNEDRHLAQVMRHHLRPTSNSV

SEQ ID NO: 367015 - protein, 341 aa, unidentified
MLETPPRCFIGIDPALESFALSLFHGPNQEQPTTTFSNDFDGFSACRAWLCEHGATPKETVICVEATGVYAEALCYFLHEHGYRVCVESPHKVKRAFKTANKNDPTDARQIAEYAYRYEDELPLWQPKEAIIEQIRVLLTTRESLVRQLVTNGNLRKSLQHKVIQTPAANTLLGETITHLKAQIKAIEQAIRRLIRQHPTLSELLTLLVLIPSVGLLLSAHLMVVTDGFQREVTARQLAAYLGICPYEHTSGTSVKKPSKSRGYGPPILRKLVYLAAMNLKQHQQKYRRYYARKVAEGKSGRLVLNNLSNKLLRVICAVVRDRRPYEKTYRSVSPQVLQAA

SEQ ID NO: 367016 - protein, 323 aa, unidentified
MGMDVSKKTLDCHLFVQQKSLSAVSNDSKGFKTIKNWLKKEVKQLDGLLVVMEYTGIYTYQVEWFLEQQKIQFVKRPALDIKRSLGMVRGKSDKIDAKFISKYGWMRKEELQPMSVLSDTQLELQQLMSHRDKLVADHASYQSKLKELVLQMGKKANKKMIASMNLVMEVLKKQIKEAEKSIKELISSEQALEMNYDLACSVTGIGFATGVHLLIATENFTRFSDVRKLICYCGVAPFEHSSGTSIRGKVRVSHLANKKLKSLLTMAALSAIQHDPELKAKYEQKVKEGKAKMCVINIIRAKLIERVFAVIKKQKPYELRLAA

SEQ ID NO: 367017 - protein, 407 aa, unidentified
MRVVHERCAALDVHKKTVVACAMTAQGRETVTFGTMTRDLIRLAEWLTERGVRVVAMESTGVYWKPIFNILETRDFEPLVVNARHVKAVPGRKTDVKDAEWLADLLRHGLLRPSYIPDRWQRELRELVRYRKSLIEERARLVTRVQKLLEGANIKLGDVASDVMGMSGRAMLKQLAAGKTNTKAMADLALSNLKKKKPELEEALTGSVGKHQQFMLHSLIRLVEELEDEIAGLDEEVEKRVRPFRAALALLDEIPGIGPLTAEAVLAETGIDMSRFPTAAHFASWAKVCPGNKESAGKRHYASAGIGNPYLRTALVEAALGAVRAGRAKPNFFSARYQRLSARRGPKRAAMAVAHSMLIAIYHMLKDGEHFNDLGPHFHDEQRRERVVRRSMQRLEDLGYKVTIEAA

SEQ ID NO: 367018 - protein, 369 aa, unidentified
MKQLITYIGLDVHKETIAVALAEAGKRNEVREYGKIANTPAAVKALVAKLARNGHELRFCYEAGPCGYGIQRQLTASKHDCIVVAPSLIPRRPGERIKTDRRDAINLAKLHRAGELTPVWVPDEAHEAIRDLVRARLAAVRTVRQARQQLSSFLLRHGHHYNRPAWTLMHRRWLAGLRFEHAMHHIVLEDCIAAVEAATARRDRLEAHIAAALPDWSLAMVVHALQALRGMALVAAATLVAELGDITRFANPRQLMAYLGLVPSEHSSGGTRRQGGITKAGNGAARRMLIEAAWSYRFPARISREQLLRQEGLAKPIRDTAWKAQERLCRRYRKLARAGKPPTVVTAAIARELAGFVWAIARQAQPTDA

SEQ ID NO: 367019 - protein, 361 aa, unidentified
MSSAFQSFVGVDLHKCTVTLTAVDAAGEVTRLKISTKSTGKIEAWLRALPGPVWLAVEACPFVEWFIDRFRACVEQIDIADATELSNRRGKRRKTDWNDSLDIAVRLSRGECPLGFIADEELMQLRKRGRHWRHLSRLLSRSKHSMKSMLNAANIRGPKFDGASAQRWLLANRELLKPVQQQAFADFIDVVMLTERQRERLRREIIFATRSERFAPLVALLMSVPGIGEIWAAIIVAEIGPFGRFPNADTLEFWAGLTADMKESAGRTQSGNITKAGSVTLRWALCQAAVTLCQCDARQEATRQRLVRRIGKPKANVAMGRRLLRILYAMVRDGKTFERGPARDRTAAANRARLGRKKQVA

SEQ ID NO: 367020 - protein, 417 aa, unidentified
MSDDIQWFAGVDWASEIHQVVLVDAHGTVTGEHTFPHGGEGLGAMCDWLLITTGAPAEAIAVAIEVPHGPVVETLMERGFLVHAINPKQLDRFRDRFTVAGAKDDRLDGRVLADSLRTDRHCFRPLRPADPVTVELREWSRMAEDLRQERNRLSNRVREQLWRYYPQLLKVTDDVGADWFLALWALIPTPAKAARIHKATIDRLLKAYRIRRINAETAIPVLREKPIQVAPGTTEAATAHIRALAVRLKVVNRQIKDAHRQLDVLCAKLAGPEESEPGQSHEQRDAAILRSLPGVGRIVLATLLAEAWEPLRERDYHALRSLCGAAPVTRRSGKRRVVVMRQACHIRLRTAIYHWARVAIQHDELSRRRYRELRKRGHSHGRALRTVADRLLAVACAMLRTRTLFDPARASVLKEAA

SEQ ID NO: 367021 - protein, 410 aa, unidentified
MDAVLERCAGLDVHQETVVACVISGPLDRKPQQEIRTFGTTTKELLQLSDWLTDMKCSHVAMESTGVYWKAVWNVLEGSFTLVLGNAKKIRNVPGRKTDVKDAAWIASLLRCGLIESSFVPPVDIRDLRDLTRYRRKLKGQVTSEKNRIHKILQDANIKLTTYVSDLFGKSGLALLEAIVNGEVLDTDSVKNMVFSQLKKKVPDLIEALNGRVRAHHRFMIGRHLEHLRQVEEHIEFLQGEIDRMLKPYREEIDLLITIPGIQEDAAASILAEIGVDMSVFPSENHLASWATVCPGNNESAGKSRSSKTNKGNKGLKAVLCQVAWAASKTKSTRIAAFYSRVVKRRGPKKAAVATAHLILKICYIMLRDKTTYQELGWDYLQTKEKGLDYWVSKIKSLGYSIQIQDAHSA

SEQ ID NO: 367022 - protein, 390 aa, unidentified
MIYVGIDIAKDKHDCCILDAEGRKLYPVFTISNDKVGFDELFSRIEEVTSDKTEIKVGLEATGHYSNNLLASLVDKGFPTVVINPLHTNLYRKGLSLRKTKTDKVDASSIAMMLMTDRTLKPYSETSYHNEELKSLTRYRFDKVHERSKLKASLARLVNILFPELEKLVPTLHQNSVYTLLEELPGADYIAGCHLTHLKKILENSSRGHYSRDKAIEIRNAAIDSIGMPMNAKSMELRHTIHLIWMLSEEIEEIEASIKSIMDETQSPIMSIPGISYRMGAMILAEVGDFARFDNADKILAYAGLSPSTYQSGQLDSSHSHMEKRGSRYLRYALFNATKFVCKWDESFGIYLGRKISEGKHYNVAISHAAKKLIRTIYRMELTGQAYSPS

SEQ ID NO: 367023 - protein, 345 aa, unidentified
MPIVGGLDIHRKQLTFDYLDTVTGEVRRGQIAPADREHLRGWLARFAGRDDVAFAMEGCTGWRYVAEELAAAGVVAHLAEPADTAAARGRKRHAKTDKTDSRHLRALLAEGRLPECWIPPAHILECRALLETYHDLRTEHTAWVQRIHAVLFHQGVPRLGEEALRTGQGLAALRAAAAAHLSAAGQLQVATALDTIAALEARMDVVRKQVLAAARHLTGAKVLAARLYGVGPVTALALTCWLGGADRFSSSRKAVRFTGLDITVWSSDRKGPPGRLSRQGPPVLRWAVYEAGKTHARAAAPDHGYYAAVKDRKNGKRAALSEARKIVRQACHILAELGDDALTAA

SEQ ID NO: 367024 - protein, 358 aa, unidentified
MNYIGCDCHISRLDFAVVNERGQETKEEKVNTGVKEFIEFVKSIPKPRTVIIEEGTLASWLLEICTNYGEKLVITDPKTNRWIGRADQKNDTIDANKLAQLARGGYIKEIHHPIGQRRRFRELVLSYHDTVKSQTRIKNKLKAKFRQNGIRCSGETVYSNKYRKEWKKKLPKDRVVQVIVEGLWQQLDQIHEVQEELLSHIRRQGRNYSEIKRFKKIPGIGTVHAATISAIMENPHRFAHKKKLWMYAGLGLAEKGSGGKVYSRNLTRDYNRLLKNALKQATEAAIIAKDNQFRRQYLRLTIEQGIPSHRAKLTVSRSILATVYGIWKSGEDYNPNIDKRRTESNKTQVRVYHLVRSG

SEQ ID NO: 367025 - protein, 411 aa, unidentified
MRRCIGLDVHREFAEVAIWEDGVVRSAGQVETTPEALRLFAESLCIHDEVALEATCNTHAIARLLERHVGRVLVSNPQKTRAIAEAKVKTDKVDARVLAQLLAAGFLPSVWIADEETQSLRRQVARRAHIVRQRTRLKNRVQSIVHRNLVPRCPAADLFGHKGRRWLAEQDLPADERQAVEALLRQLDFHGEELKLIDGELARVALRREEVKRLMTIPGVDATVALSIVAAVGDFGRFSSPDRLVSYLGLNPRVRQSGGQPASHGRITKQGRAHARGMLVEAAWAAAKTPGPLRAFYERVRARRGMQIAVVATARKLAVLCWHLVVTGEDYAYGRPSLLAQKLRALELRAGMPSRRGQRGSTHAYNLKEVRARERALSEQGERAYRQLVANWQAKGPRAKAGAGAATGERL

SEQ ID NO: 367026 - protein, 430 aa, unidentified
MKSNTQNAKIEAITEKTLVLGIDVGSETHYARAFDYRGIEYSKKPFKFSNTEAGFATFKEWILDLKERHEKDKVVPGMEPTGHYWFNLGKFLQDNEMKPVLVNPHHVKKSKELDDNNPTKNDRKDPKVIAGLVREGRYMIPYLPDGVYADLRTASNIRFQLQAELTRIQNRISRWFNIYFPEYKTVYGKPDAKSGMLILKAAPLPEDILTLGIDGVNQIWRDAKLRAVGKARAKTLIEAAGHSVGSKEGAVSARMEIRMLLEDYESRNTRLQEVMVLIEELVRKIPMAEKLLEIKGVGIRTVSGFLAEVGDISRFNNPKELQKLAGLALVENSSGKHKGETTISRRGRKRLRYLLFEAAMSLVAKNPEFRELHNYYTTRRRNPLKKMQSLMAVATKLIRVFYAMLTKGVDYDPKKMVSDIRRPEAYLQAA

SEQ ID NO: 367027 - protein, 355 aa, unidentified
MNSEKYIGLDVHQATISVAVLDSTGKLVMESILETKAATILEFFAGLRGTLSVTFEEGTWAAWLYDLLKPHVAKLVVCNPRKNALLKDGNKSDRIDAHKLAELLYLNKLSSVYHGETGVRMLRELARSYLTIAKDLTRVMCRLKAVYRSWAIPCAGRDVYYTRHRTEWLGKIKEAGVRRRAERLYQQLDMLQYLRQQARRELLAESRKHAITVKLRQIPSLGPIRSALAVALIQTPHRFRTKRQLWAYSGLALETRTSAEYCYVKGGLRRSKKQISIRGLNKDHNHDLKGLFKGAATRASVLPGPFQDFYQRSLAKGIKPTMARLTLARKIAAITLTLWKKGENFDADKLKSQAA

SEQ ID NO: 367028 - protein, 407 aa, unidentified
MIFVGNDWAEDHHDVCVMSDSGEVLATRRFPDDVEGVGAFHALVDEYVNSSDDVVIGIEIDRGLWVQTLVAAGYQVYAVNPRSVARYRERYSVSGAKSDRGDAKVLADLVRTDRHNHRQVAGDSGEVLGIGVLARSHKNLIRERTRHANSLRSGLRQYYPQALEAFDTMADRDTLAVLERAPTPTAGARLSVSQIRSALHKAGRRRYLDSRATDIQAKLRTTGLTAPDQVASAYAVTTRATVKVLLEVNRQITQLETELENCFEQHPDAAIYLSLPGLGVVLGARVLGEFGDDPDRYADVKSRRNYAGTSPLTIASGKKKAVIARYIRNNWLYDAVDRWAFSSLTASPGCRSYYDERKSKGDTHPQALRALGNRLVGILHGCLRTRTHYNEHTAWNHRQHTPETIAA

SEQ ID NO: 367029 - protein, 456 aa, unidentified
MKNEAFLGIDVSKGYADFLLLDRGKSPLDDCFQLYDTAQDRKQLGSIISKWFTAGLTCLYCGVESTGGYENNWYSFIKGLSQEFNIHVARLNARGVKAIGDAALKRTITDGVSAENIAVYLISFPEKIKYAVQGQPEDQFKEGRQHYTYIKMLQKQKVQLVNQLEKLLYQYFGEMVSYCRHGVPGWLLRMLVRYPCAEAVVKGGQPRLSAIKGISAEKAQSLLNKALLNDQLPGKQVQRIIQLTSKEILHKEDILTTEKKYLTDQLKDNNEVKLADSVPGIGLEGAVVLMQEIQTVRRFETCKKFVSNFGVHPTFKQSGDGIWGQHMSKKGPGEVRAILYMSALSAIRCNDLFKQLYARFRAKGMHHYQAIGVVMHKMLRIIYGILKTNTPFNPDVDKQNSDRSIEKQNETKNQKKQLEKETHETKHRYKKSKTEQAPVSRRHAQIKKKQAASQSS

SEQ ID NO: 367030 - protein, 385 aa, unidentified
MSGQTFIPMDYDVFAGLDVDKRSISVTFTTHHGFLKSLRMPYSVEHLLNHVRKHFPAQKVAFAYEAGPTGYGLYDGLVAQEYRCLIASPSMIPKAPGQRVKTNRLDSRGLAETLRGGQLKSIHVPSAVYRELRHLTQLRDTFVSEMAARKQRIKSLLLLEGIEFPPAPAGSQWSVLVKDQLRTLPCSTTLRFKLDQLLDSLAFNEQQVVKTTKEIRRFCQHEPELVQCIKYLMTLPGIGWIVASQLVARIGDWRELRNIRQLGGFLGLVPTEHSTGDRTERGSITHTGDPRLRSKLIQAAWSAIRQDGELREFFRSVCHTHPRPLAARVAIVAVARKLSVRIAVVLMKQRAYEVRKPVHSAPLTPEETVPQGTTRRLPEPGEKNS

SEQ ID NO: 367031 - protein, 360 aa, unidentified
MQIIGCDLHARQQTLAMLDTETGELVNRTLIHEGNEVREFYSQLPRPVLVGIEAIGPMQWFLKLLDELGIECRVGDAAKIRAAEPRKQKHDRRDAELILKLLVENRFPAIWRPSQELLDLRALLLHRHHWVRLRTQIQNALQAIALANGLRRGPSLWSYDGQAKIAFLPLAPHASYRRSMLQALYRKMDEEIEQLSAQVADQAEQRSGARLLMTHPGVGPVTALATEVFLGDPQRFADGKALASYVGLIPREYSSGAHQRLGALTKQGSPFLRFLWNEAAAHAVRRDPDLQRFYRRKLVQKGLGKSRVAAARKLGIRLWIMLRDQIDYEEFCRRGQKQSGAVCAGMLEVGYGANRHRPVG

SEQ ID NO: 367032 - protein, 505 aa, unidentified
MTTATARGKPASSSPPSAQRDQAQAQRQAYHRRKTRAKGKSEALRQQEAAHVEALPVQHPHAAGIDVGSRSHWVCVGFSTETPSCVIQEFPAHTDGLKAIAAFLREHQVNTIALESTGIYWIPLYELLQAEGFEVLLVDPSYSQQLRGRPKTDRRDCQWIYRLHSVGLLAAAFRPDEKTCQLRAYLRQRANVVRQASRHVQHMQKALEQMNLKLTEILSDITGVTGRSIIRAILRGTRAPEKLARYRDKQCKASEAEIAQALTGTYREEHLFELRLAYEAWQFSLGQIEKVGGQIALQLGRMKCDRALPPLRPKARPKRRVNSPGFDVRTALYYVVGLDLTEIEGISELTALTVISEIGPGVSQFATVKQFCSWLGLCPNWQKSGGRVKSSRTRRGVNRAAQALRLAAQSLHHSQGALGGFLRRMKGRLGTQAALTATAHKIARIVYLALKHGMTYVRQSQEQYEAQMKEKQIKALRRKARQLGLEVIEKTSASVATTVAAAEQE

SEQ ID NO: 367033 - protein, 351 aa, unidentified
MEEYIAFDSHKHYTWVEHEQVATGRVRQYRLQHAPGAIRRVLAGCEPGTPVALEATANWYWIVEEIEQAGLRPQLVHPRKAKLMMGLMNKTDKLDAHGMNRLQRNGTLPTVWIPPGRLREFRELTRTRVVLVAQRTRWKNRLTATLAKYGAPSSEYSDPYGKGAREELDSRIERLPEQTRWAARQMLAQLDTLSEQILQFEGRLKELVEVTPEMQRLMTLPGVGVILAATIALEIGEIERFPSAEHLASYAGTTPRVHSSGDRVRYGRTRPDVNRYLKWAFAEAGNSVAVNHTRCPARHVSQLYLRLRLRKGHGKAIGAVARHLAEAAFHVLSRQEAYQDPTVRPGRTREV

SEQ ID NO: 367034 - protein, 340 aa, unidentified
MKEVITTIGLDLGKKVFQVHGVDAVGGVRVRRSLRRSQVLGWFGKQPACLVGMEACATAHYWGRELSRLGHEVRLIAPAYAKAYVRRNKNDAADAAAICEAVSRPGMRFVAIKTAAQQAAGGLHRVRDLLQKQRTMLINQLRGLMAEFGIVVAGGPQHVKDLLAVLADPADARVPELLRGPLLGLAQVLGDVERRVATLERQIVAWGRGNATYRHLITVPGYGPILAGAFAAFVVEPSALRSGRDFAASLGLVPRQEGTGDKLRLGSISKRGNGYLRRLLVNGAMSVLNTRRARQDPWIARLLASKPRKLVAVALANKMARIGWAMMVRQEDFRPRSAAA

SEQ ID NO: 367035 - protein, 337 aa, unidentified
MRLYAGIDLHSSNNYIGILDETDKRVFGKRIDNHLPCVLSALEPFKNKLEGVVVESTYNWYWLVDGLQENDYKVHLANPAAIKQYEGLKYTDDKWDAFWLAHLKRLNILPEGYIYPKDLRPVRDLLRRRGLFVRQRTSQILSLQSMITRNLGIRMSARDLRKLEVDKFDQLTDANQIFMVKSHLKTIEHLDQTIKDIEKMVLSQVKLKKEFTLLQTIPGIGTILALTIMLEVGNIKRFKKVGQYSSYCRCVKSEKTSNSKKKGENNKKNGNKYLSWAYVEAANFANRFSLEARRFFQKKKAKRNRIVATKALSNKLCRASYFIMRDQTPYDEAKLFC

SEQ ID NO: 367036 - protein, 393 aa, unidentified
MYYVGIDVGKNNHVASMMDASRKTAFRAFSFPNTRDGAQDLVEKIERYSPEKDQVEIGLEATGHYWLALYSFLLDAEFLLHVINPIQTDGWRKGVEIRKRKTDDIDSVLIADLIRYGDFIETKLADEHLLSLRTLTRFRSYLVDSIADLKRKVICVLDQVFPEYESIFAQVFGSTSKEVLLTYSSPADLEGVSVEQLTELLQSLSRQKCGEDTAKRLSRAAANSFGVTFCRDSFSFQLRILLEQMKFIEQQVADTEKQIKAIMDILASPITSITGIGPVLGAVILGEIGDISRFPSPSKLVAYAGIDASVSNSGESESAHNRMSKRGSPYLRRALYQAATVAAFNDPELAAFYLKKRSEGKHHSVCVGAVSRKLCFIIFTILNENRPYVKRQP

SEQ ID NO: 367037 - protein, 400 aa, unidentified
MLSIGIDVSKGKSTVCGMKPGGEIVYAPFEVQHTREGMLELVSLLRSSGEEVRAVLESTGSYHCPVVAALLENGIFVSVVNSLRMKRFCSQSIRKVKTDRIDAMQIALYGLAYWQELQPTRLPEDTYRELQLLARQYYQMTSLLIKAKVDFNAICDQVLPGMQELMSDHAGRHKLSNFVLRYCHTTHILEMGETRFRKDYCKWAEKKGYRNCERMAALIFATAQNGIPVLPNAPSTQIVITEAIRVLHTVEASRDAILTQMQALAKTLPEYSLVREMPCIGDTLAPRLIAEIGDVRRFHSKRALIAYAGIDAPPYQSGKFCANNRHISKRGNRYLRKTGYEVMQSYVMHKPANDPIFTFIEKKRGEGKSGKLAMVAGLNKFLRVYYGKVTELYRSLPAIE

SEQ ID NO: 367038 - protein, 470 aa, unidentified
MRACLSGFARIAARAREPYAPSDWDLAEMANRGSTTRGMVILLEGGAQMKEPEVRIVGFDCAEEEHYAVLLDEDGAFESRLKVVNRRAEIEEALAQLVLAIPSDADLVVVVESKRSHGRLVTDVAKELGIQVWQVNTVALDHFRDVEGQPRKDDEWDAFLAARMVYLRTRGCRLVTETTDEERALSRLTRSYSRLTNDRTQQTLRLRAILLELAPEMLHRLWKGPKPNSKAIMYLLDRWPGFEGLEKAQLRSIEKILHRCRYGDRAPKVAKLLRDMARRISIEGQERSAMTLEMSFLVQQIKVCDASLQKLYGEITRRVENHPVGEKLLEMHGIGPVIAGVLISELLPVARTATEAQSATYSGVTPLSRKSGKTLDTAHLTRGANKRILTALYISSVAAIKNSAIDKAYYNKKLRDYVGHPKPHVAAFIALSRQRHKVIFKLMTTDARYDKEVLIASHLARLEEARGMAA

SEQ ID NO: 367039 - protein, 354 aa, unidentified
MPRKSPDSVAVIGIDLGKNVFHLIGLSKRGAIVLRQKMSRSQLETRLANMPPCLIGMEACVGAHHLARRLRALGHDAKLMPAKYVRPYSKGQKNDFKDAEAIAEAVQRPTMRFVAIKSVEQLDLQALHRIRERLVSQRTGVINQIRAFMLERGIAVRQGLRFLRAELPGLLATRSDVLSPHMIRLIEDLAGDWRCLDARIDALTTQIEAIARSDVNCQRTMSVPGVGPIVSSAMVAAIGTGEGFCKGRDFAAWLGIVPKQISTGDRTILGSISKRGNKYLRKLFVQAAWVVLVKPMSWERHGLKSWIEAARKRLHHNVLAIALANKLARIAWAVLAKGRGFEAMSTTNAAARYA

SEQ ID NO: 367040 - protein, 400 aa, unidentified
MRVVFGIDVSKVSSEVAILVNGEKVHNYTMSNDAIGFARLLGDLRTVHKPEIIFEATGVYSRRLQAFLDEHGYAYTRLNPLEAKKQLDSLRVRKTDQIDAEKLAQSQCVLNRKTTYVQKEVYQNLRDLSRFYQNLTEDIVRAKNRLHKVLQVTFPELENILSTPTGEQYWNLVITFPCKDFVLELSNDELSKSIRLSTSKRISDKRVAYLAEKLIALANQSYCAVKKTSPILEEVRYYAKELLRLSEQRQAVLDEMVELAQPLPEYDILLSIPGIAETTATSIIGELGDIRRFQSANQINAFIGIDLRHYESGNFLAKEHITKRGNPYARKILFKCIHNIASASHTNPCHIADFYKKRKRQSQTTSTKPHTIASIHRLIRTMYYLIMHNKLYDYASTQNR

SEQ ID NO: 367041 - protein, 454 aa, unidentified
MTKRKTGGHPDLKMVNPQAAAIDIGSTMHMAAVNPDADIIMPVRAFGTITQDLHDLADWFQSCGVTSVAMESTGVYWIPAFEILEAHGFEVILVNARYAKNVPGRKTDVSDAGWLRQLHSYGLLRGSFRPDAEIATLRAYVRQRERLTEYAAAHIQHMQKALMEMNLQLHHVVSDITGATGMRIIRAIVGGERDPEALAALRDVRCKSSVDTIKASLVGNDREEHVFALTQSLELYDFYKAQIETCDRRLEAAVAALTVRADDDLAPLPKARIKGKQHNAPSFDVRAALYGVLGTDLTQIHGLGPSLALKLVAECGTDLRAWKSAKHFTSWLCLAPGNKISGGRLLSSRTRRSSSRAAALLRLAAVTIGKSDTALGAFYRRLSSRIGKQKAVTATARKIAVLFYNAIRHGMTYQDQGAAAYDERHRQRVLSNLQRRAKIMGYALAPIPETAGVS

SEQ ID NO: 367042 - protein, 331 aa, unidentified
MCVISNDSQIVHEATCPTAVKSIHHELRCMRRRRFARVGLEASGGMALARGLRSLGYEVDLYEQRQLSKFLRVRRNKTDAGDAFGIAEAGRVGATVSKVYLKNLECQLLQSRLTIRRHLVRQRVSAVNILGRQLEVFGGRLRRGDLPNLRSNVEREIKKVFGKHPNNVIPHLRYLIGCCEELIEYGHLADRELRRAARENEVCRRFMEIPGVGPLCALTFYATVGEPHRFVRSADIGCYLGLTPRVAESGMKSSRGKISKMGPKAARTLLVSSSLAFMRSANKDSNLWNWARGLEQRRGRQKAYVALARKLSIVMLAMWKNGATYGEYFST

SEQ ID NO: 367043 - protein, 414 aa, unidentified
MDLLHERCGGGDLGKRDCKVCIRVPGKGTRRHQEVRTFTTTTSGLLELRDYLLANKITVFGMEATGSYWKALYYLLEATDGIEPWLLNAQHMKAVPGRKTDVTDAQWICRLVEHGLVRPSFVPPVEIRRLRDLTRYRTETCQERTREVNRLANLLEDAGIKLSLVVSDIAGVSALEMLEAMAGGERDPEVLAELARGAMRRKHNELVEALTGDFTDHHGFMVRVLIRAIRDANARIVLLEEEIQRQIAPFRHQVDLLITIPGISTTVAHVMIAEMGADMSRFPSAGHLAAWAGLAPGNRESAGKRKRAPTRHGNVWLKGGLGVAALAIGRTKGTYLAAQYHRLRPRRGEKRTIVAVAHSMLVSAYHMLTTDVPYQDLGPDHFTRRLGEERHRRRLLAQLDALGYDVTLERRQTA

SEQ ID NO: 367044 - protein, 355 aa, unidentified
MDSKKYIGMDVHKESISIAVMNGAGKIVMECVIETKAGMILQFIDGLRGDVHVTFEEGTSAAWLYDLLKPHVTKLVVCDPRKNASMREGNQSDKIDARRLAELLRLNHLHPVYHGEHGLRSLKELVRSYLTITKDLGRVMSRVKAIYRSWAIPCTGKQVYAPRHRAEWLGKIGEPGVRRRAEFYYQQLDALRCLRQEVRRELLAESKKHQAWRRLCGIPSIGPIRSAVLLGIVQTPHRFRTKRQLWTYSGFGIETQSSADHRSVNGQLQRAKKPSSIRGLNRNCNHDLKNLFKGAAIVASSKPGPFQEFYTALLTKGIRPEMARLTLARKIATIVLMVWKRGACFDAQHLKPQTA

SEQ ID NO: 367045 - protein, 418 aa, unidentified
MDVLVERCAGLDVHRDNVVATVRVPGTGRRRVDQQTRTFAATLGGLAQLAGWLAGFGVTRVGMEATGVYWKTVFQALETHFECWLLNAQHMRNVPGRKTDVKDSEWICQLVAHGLVRPSFVPPPEIRRLRDLTRLRKAQSNERTRTIQRLEKVLQDAGIKLTSVASQTYSKSARAMLEALLGGVTDPEQLAELAKARMRSKIPQLKEALANRFDVAHHGVLVAQLLAHIDSLDIAIATLDARIALMLEEHQAVIERLCTIPGVAERTAQVMIAECGLDMARFPTVGHFASWAGMCPGHHESAGRRRSGRTRPGPCWLTEALTESAKAAARTKGTYLAAHHAQIRGRRGEAKAIGATRHDILVAYFHIVRDEVEFRELGPDWQRKRYSPERRARRLQRQIEALGYQVTLQPSQETAPAG

SEQ ID NO: 367046 - protein, 405 aa, unidentified
MQETTQHDAVDVFVGVDVGVDVGRGQHHAVALDRNGKRLYNKALPNDEVKLRALIAELKTHRRLLFVVDQPSTIGALPVAVARAEGVLVAYLPGLAMRRIADLHAGEAKTDARDAAIIAEAARSMPHTLRSLRLADEQLAELTMLCGFDDDLAAQVTQTSNRIRGLLTQIHPALERVLGPRLDHPAVLDLLERYPSPSALAAANEKTLANRLTKLAPRLGKNLAAEIVQALNEQAVIVPGTQAAAIVMPRLAQQLAALRKQRDEIAAEVERLVLAHPFWPVLTSMPGVGVRTAARRLTEAAPKAFATAAHLAAYAGLAPVTRRSGSSIRGEHPSRRGNKVLKRALFLSAFAALRDPVSRAYYSRKIQQGKRHNQALIALARRRCDVLFAMLRDGTIYPPKSAPNA

SEQ ID NO: 367047 - protein, 451 aa, unidentified
MAQGSGLTRGDRNRNRKIAALRGVVRRDRAVLAVDLGEDKQAAVLVDHEGRVLARKMVTAKAYRLGGLLEWAAGQAGRAGFAGVVVACEPTGHRWKALMGLAEGAGQGFCCVQPLAVHKEREKDDYTRDKTDHRDAYLIGRLVIRLDCYLPERAEEAWARLRHLGARRFALVADVVCCTQQVSDLLACAWPAALGVAARPLESTTWLAGMGVVTDRCCGDPARLRKMGYDRFVAAVRRELPRWGAKRAYRKIVAGLWAALADPGGVAAQRRGVLERVHLLMGDWRSLLARLAEVEARMCAVLDELGLTALAASIDGLSAVGAAVILAETGDLARFATSRAVVKHAGLNPAQNTSATLAGATRISRRGRPGLRTAAWRAAWPGVRHNRVLAARYAHLTGRDGNRLSDGQARAACAATLLRWLWAVITRRQAWDARIAAGLIPARAVTAPAAA

SEQ ID NO: 367048 - protein, 322 aa, unidentified
MKLFVGVDVSKNSLDMWCNNKSFTISNNQAGLTKFYRLLQQEIKNGNEIALVVCEATGGYETKLVRFATKKSMPIHVAHANKVRDYAKSKGLLAKTDKIDAYLLADYGEIMRVQPNDKLCTVEEETLAGLLKRREQLIEDKIKEMVRLDKDLDMRAKRSIKAHIKWLEKEIAKIELLIHKTQKEHGAINTKTELLKSVPSIGNITACILVAFLPELGRTTGAKKISALAGLAPYTKDSGKYKGKRFIKGGRSVVRKALYMSALTCIRHYEELRGFYLRLRNKGKTAKVALIAVARKLLTVLNSIMYRKTAWQKTYSVANETL

SEQ ID NO: 367049 - protein, 358 aa, unidentified
MTITSMAHPSAPQLTVGVDTHLDVHVAHAVDQLGRSMATVSIPTTPAGYQDLLAWARGLGEPVAWGVEGTGAYGAALARFLAANGQAVVEVNRPDRQARRRRGKSDPVDAEAAARAVQAGQVTVTPKAGTGQVEMIRSLRVARATAMRARTQATNALHALLVTAPAELREQLRGLSATRLLGAAAELQPGPVISPLAAAMLALGILARRSQALSAEITTLTTQLDRLTATTAPKLVALFGVGQDSAGALLTAAGDNPDRLRSDACFAMLCGASPIQASSGKTARHRLNRGGDRQANAALYRVVLVRLRWHQPTKDYMARRLKEGKSKKEIIRCLKRYVAREVFAALNQTGHDTLTPAA

SEQ ID NO: 367050 - protein, 336 aa, unidentified
MNYNFFIGIDVSKKTLDFAVFKGKDLLFNWTGENDESGIKKFWTQLKAQQGFCVNEAIFCMEHTGIYNQHLLSFLYSKKAGVCLEAAVHIKLSSGLQRGKSDQIDAIRIAQYAYKNCAELRLWQPKRQVIQQLKRLSVLRNRMISARKQLTVAINETISFDKATAGECKKLCKASLKSLEQDIERIELKIDQVIAADSELKRLFSVVTSIEGIGKITATEMIITTNEFKDITDPAKFACYSGVAPFEHSSGSSIRGKSRVSHKANKTMKSLLHMAALVAINYNTDMKAYYQRKVEQKKNKMLVINAVRNKLIWRVFACVKSNRLYQKTIKQLLFKS

SEQ ID NO: 367051 - protein, 316 aa, unidentified
MAGSAVEVYVGIDVSKAQLEVAIRPSGERFSEANDARAVRRLVKRLAPLGCTRIVVEATGGYEALLAAALYAAGLPVVVVNPRWARDFARSIGQLAKTDVIDAALLAQYAALPQLKVRALPDAQTRELQALCARREELIDMLVAEEHRLEHVPARLRRELNGHIDYLRKRLKHLDHDLDQTVRNSELFRQQSELLTSVPGVGRVLCVSLLARLPELGRLNRAEVAQLVGVAPLNHDSGRLRGVRLIAGGRAPLRRVLYMAALSATRSNPVLRAYYRHLRDLGKPGKVALVAVMRKLLLMLNAIIKTQTPWRPPCPA

SEQ ID NO: 367052 - protein, 419 aa, unidentified
MIPAVIERCAGIDVGKKFLAVCVMTGPAQGSAIAEVRKFGTVRGELERLREWLKSESCTHVVMESTGVYWKPVLNILEDDPEYQLEIVLANAQQVKAVTGHKTDPHDARWLAHLLRHGMIRPSFIPPRAQRELRDLTRRRKQMVRAAAEERNRVQKALEDANVKIGDVLSDVFGLSGQLMLEALVEGKLSAVDVAALARGNARKKIDELKAALEGHQVRDSHRFLITRAMRHMAFLADEIEALDQEIAKHIDNPDLSKPNQLLQTIPGIRTQAAAAMLAEGGPDMKQYPSGSHFSSWSGIAPGNNESAGKRKRAPTLRGNPHMKVALVESAWSASRTQGSEFLERYQRLQTRIGHKRALIAVAHLLALRIYEVLQTGEPYEKGRSARTESSARRLVRHHTRRLKHLHRWLADIDSKEAQ

SEQ ID NO: 367053 - protein, 338 aa, unidentified
MEVTTVGIDLAKNLFQLHGVDERGRVVLSRRVKRSQLAEAVASLPPCVVGMEACASAHHWGRAFEKFGHTVKLMSPKYVKPYVKTNKNDCRDAEAICEAVSRPTMRFVSIKTVEQADMQALHRTRSLLVKHRTAVINQIRGLLAEYGLVIAPSPEKVRPTLVRFLDDAESGLTAFARDTFAELYEQLRDLESRIARVTERVERVFRAHPVCRKLAAVPGIGPLTATALLAAVGRPQAFRNGRHLAAWLGLVPRQYSSGGKEILGGLSKRGSRYVRTLLIHGARAVVHRAQGRSDPQGRWLWTLKCRKGTNVAAAALANKNARVVWALLAHDDVYRPSA

SEQ ID NO: 367054 - protein, 395 aa, unidentified
MSAEGEAIRSNDYRKDTTVKATSTRPAAVLGLDVGKSSHWACLIDRDGEVLDSAPVRNREAELDALFASAPAGTLVVVDQFRNIGSLAVRRARAAGLGVAHLPGLAASRAAGLFAGEAKTDERDAAVIARTALGVPDSLSGVPGRGEALEAARALSSQRDHVVACATRDKNRLRAVLLESCPALEAAVDLSDRRWLELLAGFGGAWGIARSGAEGPRAEAAGEAAAASTAPPPALVEAENRQVRFLAARISEALDEAGALEAETAALLEGDETYACLLTVPGIGPRTAAQLAVSVDIGRFPDHDHLASYCGIAPRVRSSGTSVRSVRASRRGDARLKSLLIFSCNSLVRSSGRYGEYYRACRARGMGHGRALKAVARKRLRAIYAVMRDRVPYRE

SEQ ID NO: 367055 - protein, 337 aa, unidentified
MPGIDLAKTVFSIHGTDQHGKVVVRKRLNRPKLLPYIAQLPPCLIGMEACSGAHYWAREMTKLGHDVRIIAPRFVAPYRKSSKNDDNDAEAICEAVGRPNMRFVPIKTEDQQAVLCLHRIRRGLTKERTAQINQVRGLLAEFGLIIPQGRYAARRRVPEILEDAENGLPMLTRRLLNDINQRILQLDEEILAYDREIEAMARRDEQARRLMAIPGIGPQTATALLASAPDPRQFKSGRHFAAWLGLVPRQYSTGGKVRLGRITKRGDKYLRMLLIHGTRAVIAKLPDRNDRLSGWARDLVERRGYKRAAVALAAKNARIIWALLMNQTEFKTQPVEG

SEQ ID NO: 367056 - protein, 395 aa, unidentified
MSPKNTTPAPVGLERSTLYISLEISRKSWVVGIKIPTRDRIGLHVLPAADTDALKILIEEQRAKAERALGQQVRVLCCYEAGYEGFWLARWFDEFMSIETVILDPASLLVNRKAKQRKTDRIDAKKMVRALLAHDRGDSSVLSRVRVPALEEEDRKRKLRERRRLVKERTSLTNSIKGLLKLHGIFDLDPHRKDFEPRFDDVKTAYGTPFPAQARKEILRILDRLQLAEKQIAEIEAERDEIVGKGATIAIADTAAGSEEQVAAKIAILSQLKGIGANDATLLVNEIFYRDFRNRRELAGWVGIAPTPHASGDTERDQGIGGDGPGWIRANLIQMAWRWIRYQPDSVLSKWFEERTAGAKGRMRRVMIVALARKLLIALWRFCETGLVPTEAKLA

SEQ ID NO: 367057 - protein, 389 aa, unidentified
MSQPFDASRSLTVLEQDSTIIAVIEMSQSKWLVSAVVPGVERQPLKKLDPDEEALRKLLHRWRNEAGQAGREIKRIVVAYEAGRDGFWLARWLQARDVEAYVIHPASVAVSREHRRAKTDRLDTELLMRAFLGWLRGEKRHCSMAAIPTAEEEDAKRPNRERGNLVTDQTRIVNQIKAILARFGIRTFRPTLRKAAEKLDGLRTAEGTPLLENTRAELRRHLARLRVVREQIRAIEHERLRKFATALAGVKGPHAMVRLIARVVGVGVETADMLVNEVLSRHLRDRKAVARYAGLTGSPDESGRRRRERGLARAGNARVRCGMIQLAWRFLRFQKDSALAQWFDARTADGRGSTRKTMIVALARKLLIALWQLVTTGEMPRGVVLRPAS

SEQ ID NO: 367058 - protein, 333 aa, unidentified
MKFKTFIGIDVSKLTLDICLVTLDGEIENFKIENKDLSIGRFFRRLEKSRAWGEVLVCAEHTGHYSNPLKVFCMGNGIALWLESGAEIRLRSGVQRRKDDKIDAERIADYAMRYVDKARLQTLDDKVIETVKLLGSERDMYIRDRAKYKSQIRDFEGYIDSDVYKAKAKRLKRQVESLTKLIDLLDQQIEGQLMGSEKLARQKEILVSVGGVGDKVATETIIATQGFTKFGSGRQFSCHVGVAPFSFESGTSQRSRRKVSNRANKDLKTLFHMAALSAIKMKGELRDYFERKVAEGKNKMTVLNAVRAKIINRIFALIREDRKYEKSYIKPVV

SEQ ID NO: 367059 - protein, 342 aa, unidentified
MDYFAGLDVSVKETSVCIVDDTGKIVREVKVASEPNALLPVLTNPGYHFKRIGLEAGPLSQWLYSALAEAGLPVICVETRHMRAVLKAQINKTDRNDARGMAQMMRAGLYRPVHVKTLRSQKLRMLLTHRRLLQSKAIAIENDLRATLRNFGLKVGIAGKVRFETRINELVENLPDLAALVEPLLIVRRVLREQIVILHRNLLAIVRDDEVCRRLMTVPGVGPVVSLTYRATVDVPARFRKSKAVGAVFGLTCSKYQSGEIDRSGRISRCGDEMMRVMLYEAAQSMLRSKKWSWLKAWAMQIARRRGMKKAIVALARRLAVILHRIWVDGTEFRWSRETAAA

SEQ ID NO: 367060 - protein, 414 aa, unidentified
MLIIGPPNTADKLRRRRSPNGEREAAASTPTLPSRPPRGAVSFIDEMDSSCDSVGIDVPESLLFRAKEEPIMSNDTRIGVDVAKAVFEIAISDRPGHIVRRERAQRAQFLPFMAQQPRATVVMEACGSAHHWGRKLQDLGHRVVLLPPHHVRPYICRNKTDRTDAKGILEASRNEDIRPVPVKTVDQHVLTSLHRLRSGWMTERTARLNALRGLLRELGIFIPMGAREVVPMVWSLIEDADSDLPEALRPIFAEACREIREIEARVKQVERQLEATAEQLPAVGYLRTIPGIGLLIATALVAFIGDIRRFPSGRHFASYLGLTPREYSSGLKRNLGRISKRGDGYLRTLLIHGARSVLLHARQQQPDRLREWANNLGKTHVHNKAAVAVANKLARIVWAVWSRQQPFVLIAKAA

SEQ ID NO: 367061 - protein, 351 aa, unidentified
MQPILKSCCGIDVHKSMIKASIAKGPLDKPPKFYTRTFSTMTSDLLKLKDWLRENEVEAVAMESTGVYWKPIFNILEDEFPVILANPQYLKKVPGKKSDVKDSKWIASLLRCGLIPASFIPPKPIRELRELNRTRRKLVGMMASEKNRIQKVLEDANIKLASVMSKIDGVSSMNMIRTLLKKDKILRDEIADMARGKLKNKVDLLVEALNGKVTDHHRFLLRLHLNNIAFLAEQMCPGNNESAGVKKSGKIRKGNSSLKATLTEVAWAASKTKGSAYSAIYNNIAKRRGKKRALIALGHRILLDIHRVLTTGEPFVDEGAVAVHQRNSRARQQSAIRFLEQSGYTITKASA

SEQ ID NO: 367062 - protein, 338 aa, unidentified
MKFKRIAIDTSKHVFTIHGVDEQERPVLRRDLKRDQFEAFFKKLPGTEVVLEACGGSHHWARVLQGMGHQARLIPPQYVKPFLKRSKNDDKDAEAINEAAARPSMGSVAVKTVDQQAKGMIVKHREMLVGQRTQAINALRGHAMEFGVVAAKGTAKVAPLLAVLAGDKAIPAAARAMFAQMGAHIEALESRIAGLDAELLAMHKAHPVSRLLAEIPGVGPMIATTMALTVEPQNFASGRHFAAWLGLTPREHSTGGKQRLGKISKAGNERLRTLLVVGAMSVIRFAKPGSKSASPWLLQLLERKPRKLAAVALANKMARIIWAMMARGEAFRRQPVAA

SEQ ID NO: 367063 - protein, 339 aa, unidentified
MNYIGIDHHKQYSHMTIMDEAGKVLKAGNVLNIRNEVEDFLEGKAEETKAVIEAGRSSYVMVDLLKDFGVDIRIANPSDVKAIAKAKIKTDKRDSKILAHLLRTDLIPEVYARSEENRRSQRVLRHRAFYVGTMTRVKNKIRVLLSQQKLELQEEASQVKNIFSKNGLIALGGLDLPSTDRDLLEGLLKIYGHLEKRIKDSDGLVEKLYSELREAQLISTVPGFGYFFSVLMATEIADIRRFESVEKLHSYAGVIPSTHSSGERSYHGKIIKGGNVWIRWAAVEAVYPAGRKDFNIRLFYDKRARRKGANTAKVATARRLLTIIYRVLKDRRHYIPYRR

SEQ ID NO: 367064 - protein, 459 aa, unidentified
MARKKKIEMEIVNPNAAGIDVGSRSHYVAVGQALEDVKEFGVYAEDLVELCQWLLSYDIKTVALESTGDYWQNLFVELQKHGFEVILCNGKFTKNAKGKKTDVKDCRWIQQLHSLGLLSSSFLPDATTENLRTYCRQRANWIDLSASASHKMQKYLKLLNFRLDVVVNDICGLTGLKIIEDICRGNLNPYSLAEHRHYNCRKPKEEIAKALHGNNRSDYLFGLKQELESYKFFQKKIKACDKEIEKLIKKEIKKSPIKQNLETNHKPYKRVNKNAIDIKDFNQIAFKYFGGVDLMAIEGVSHATVMAIMSEIGIEGFKKFKTAKQFCSWLRLAPNNKISGGKILSNKIPKGSNRLKIALRHSANAIGNLKDTHLSDFFGRISYRKGRQAAVSATARKLATIIWTMVVKNVPYSPPKEYLFLDQKRKMGIAKRIRKQMTKFDIKPDDIGFCNSLITNYNF

SEQ ID NO: 367065 - protein, 339 aa, unidentified
MNSMAVGVDIAKQVFQVHYVDRETGEIVNRQIKRAKFLEHFANRAPCLIGMEACGGAHHWARELTKLGHEVRLMPAEFVKAFNIRNKNDAADARAIWLAVQQPGKPVAVKTEMQQAMLALHRMREQLVKFRTMQVNGLRGLLTEYGEVMSKGRAALDKEIPAALGRIAARLPAALIDTLREQWNGLARLDEQIAEIERRMREWKQQDRAVKAISEIPGVGLLTATAAVAMMGDPKAFRSGREFAAWAGLVPKQTGSGGKVNLHGISRRGDTYLRTLLIHGARSVMTHTKEPGPWVEQMKQRRPMNVVIVALANKMARMIWAVLAHERPYRNDYVSVKPA

SEQ ID NO: 367066 - protein, 361 aa, unidentified
MSATMTWVGFDVHARSTHGAAIDTMTGALSRVRFGPGIDGPLAWLGELPGPVRACYEAGPTGFGLYRSAMAAGIAMQVIAPGKTPRGPSDRVKTDRKDAELLARLLLAGSLTRVVVPAPEVEAARELTRAHDACRRDLMNARHRVSKMLLRHGRVYPKSTTWTAEHRRWLATQQFDEPASSMVFADLLAAVDGLTSRKTAIALRLSELATDERWWPTVARLRAFRGIDTLTAFSLHLELGADWKRFATAPALSAWLGLTPSLNQSGESSRQGAITKTGSMLARRLLVESAWHYSRQPRLGATLANRQAGQPDHVLAITNRAQQRLYRVNRRMRARGKPHNVTVVACARELACFLWAAATTD

SEQ ID NO: 367067 - protein, 352 aa, unidentified
MPMLEGRVDAVIGVDTHRDSHAAALLDPNGGVRATLAVPSDRAGHARLLQLAVAQAPGRRVWALEGTGCYGAGLTGFLVDHGEWVVEIDRPRRPRGRNGAKSDALDAIRAGREALAREHLACPRQRGHREAIRVLHTTRSAIVEAGANARRQLKALIITAPEPLRDSLRGRTWLQQARACAGLVAAPSDPVEHRATVRALGMTAQRVLTARAEAKELEVQLRMLITAVAPVLLAQRGVGPISAAQVLISWSHPGRFRSEAAFAMLAGAAPVEASSGQVVRHRLNRGGDRQLNRALHTIVMIRQTHHGPTQTYTTRRIAQGKSQRDIRRCLKRTLARQLYRLLESTAANQATS

SEQ ID NO: 367068 - protein, 400 aa, unidentified
MNPVVGIDIAKEESEVQAFLDKGKPYGTSFSIKHNREELEKFIYFLEEMKETTGQMPVVILESTGHYHTPVVQCLEENDILYILLNPIISHQAKKASLRKVKTDAFDAYQLCVLYYKEEFEPQKRRGIQLLNIRNLSRQQEIMTNMYVEAKLHFHTILDQVFPEYRKVFGDLFSKVSLSVLKEYPTSEKVLRASKEELEDRIREHCPSRSVQWAKEKARKLIHSASQNPFQKVRYESHLINLSMYIDILFHYQGHLTDLESQMVSLANEIEEYKIIQSIPGIGEKIAATIISEIGEIDRFNHPKKLVAFAGVDPSVYSSGKFTANINRITKRGSSRLRHSLYLAVLCGIRSSRNKKLREFYDRKRSEGKPSKVAIVACINKLLHWIYALLKKNQNFLDIA

SEQ ID NO: 367069 - protein, 340 aa, unidentified
MNQYYIGIDLHSNNLHLAMKDQDGKRRLHKKLPCDLNQVLEFLRPYREAIRTIAVESTYNWYWLVDGLREHDYPVLLANPAQIHQYQGLKQSKDIDDAYWLAEMARLDILPTGYLHDPKLRSVRDLLRRRMLLVHQRTGLILSFKGLHARTHGHAPKLAEVKRLAPEEAAAGFEREGDQLAARVQVTLLEHFDEQIALIEREVLRRVKATPLFQRLQSIPGIGKILGMTIALETGDITRFPSPGDFASYCRTVESKRWSNQKVKGRNNGKCGNRHLAWAFVEAAHCSRRFDERCAAFFEKKKRQRNTAVATKALGCKLAKAAWWIMKEGTAYDAGRMFGH

SEQ ID NO: 367070 - protein, 406 aa, unidentified
MQGPVITVDVSKGSCHYQPYVSNGHPMRKPKVLHDTVEGFQSLSDLIDTMKDRYECETIPVIFEATGVYHRCLQKYLDDHQIPYYIISPLMSASYRKTTPNSNKTDDLDCSHIAKAYYGECNLFPYDKPSKSFHNLRGLNRYYECELNHLRMRKNTFRKYLDIVYPRLDKCFKGHSSLYDEIPMEVIKQYPHPSLLLKHKEETIVKKIEKKTSHNALFIQNIVHEMYECSMHCYSGADVTDVESMILPELVDDLQSQEERCDEILKQLVSEAQKTPYFTSIVSIVGIGDNLAARIIAELGDMSRFSCRRAITAYAGLNPKIRQSGDMDGIHLAISKKGNKHLRCLMYLAVSCNYRLKKGDVLYEFNQKKRQQSFSPLKPKAATIATAHKLLLIIYALCTNGTVYHS

SEQ ID NO: 367071 - protein, 497 aa, unidentified
MLDFFFIILTNGFSLKDYTMENNAFLGVDVAKGSADFLLVNARKETLEEGFMLDDCAEGRKVLCRLIEKWFASGITHLYCAVESTGGYENNWFTLLCSLSASYDQKNKTLRVARVNPRPVKACGKAGMLRTQTDQTSALAIASYLIGFPENVRYSPHTGQSDDPVWLAARGQAGLIRMLIKQKTQLSSQLEKLLYTRLGETMIYCRNGIPGWLLRLVSRYPSREHLQRAGAGKLAKIKGLSPDKAKSLLGKLNGDQPATPVIACHTIKATARGILHLQKQIDTQQTFLIDQFSEHPDVRLLESITGIAVTSAVRLIVEIEDVSRFDSSKAFCAYFGVHPTWRESGDGHWKTGMSKQGRAQVRGMLYMSSLTAIRWDPDLKKLYHRFRKENRMNHYQAMGVLMHKLLRIIYGVLKNQTPYDRQVDRENRRQSKEKQQAYQKKIAQNKAVQKTTRQRFMSNRADSTEDAPISRRAWKKRKQEASQSSLVEEYAGSPPAD

SEQ ID NO: 367072 - protein, 358 aa, unidentified
MAKNTATHTQETIGCDLGDKKSEICVLDADGKVKQRASARTTRKSLGEWFNRAPAHVVIEVGTHSRWVSNVLRELGHRVTVANPRRVKLISASDSKTDRHDAELLARLGRVDEKLLAPVVHRGPQVQADLAVAKARDVLVSTRTKLVNHVRGTVKGTGERLPTCSAASFAAKTRELVPTILKAALQPIYEALERINEQIDEQDKMIERVAKKYPDVEVVSQIAGVGTLTALVFILSIEDKSRFSKSRMVGAFLGLRTRKSASGNDDPQLRITKAGDPFVRRLLVTAANYILGPFGRDSDLRRWGLALAQRGGKNAKKRAKVAVARKLAVLMHRLWVTGEIYEPLGYNERELEGKRQAA

SEQ ID NO: 367073 - protein, 324 aa, unidentified
MKSKSLERFIGIDICKARLDVADDANSLPWSVANNDAGIASLVERLQTLHPALIVMEATGGLETLLYAALTTAGLPAVVMNPRQVRDFAKALGTLAKTDALDARILARFGAAIQPAVRPMKDDTTQELTALVTRRRQLLAMLTAEKTRLQQAAKWIRKDINAHIASLEKRLQTIEGHIAEIIKKTPGWKEKDSLLRSVPGVGNVLSMNLLSSLTELGTLNRREIATLVGVAPLNRDSGNFRGNRRVWGGRAQVRAALYMAALSASRFNPVITPFYQRLIAQGKQPKVALTACMRKLLVILNTMVKTQTAWNPNHFSTLDFNHGC

SEQ ID NO: 367074 - protein, 374 aa, unidentified
MTTIRSEFRSVSEPTLYVAFELSKKQWKLALTSGLGVMPMVRTSTAGDLGAVGRVVDTARQRFRLAADAVVVSCYEAGRDGFWIHRALTTVGVRNRVVDSSSIEVNRRQRRTKTDRIDALKLVTMLVRACTGEEGVWQEVRVPTAAEEAARQVSRERTALTTERTRLQNQLKSWLATWGCLVSARTRRQAAWWTQVCDWRGRPLPTEVQARIGRAEARLAVITAQIAELETTEAAAAPDSALGRLVRLRGIATTSASILLDEGLVWRAFQNRRQIGGLLGFAPTRYASGETTRDQGISRAGNARCPAVSLQLAWNWVRWQPDRALTTWYLAEFGRRRRARRVGIVAVARKLVIALWRYVSTGVVPLGAQLKPAA

SEQ ID NO: 367075 - protein, 342 aa, unidentified
MVEVSTIGLDIAKNVFHAHGADRAGRPVFSRRLTRGKVLEFFAAQEPCLVALEACGGAHHWARELAQLGHEVRLIPAAYVKPFVKRHKNDAADAEAICEAAVRPNMRFVAVKSEEQQALALVFRTRDLMVKQRTQTINALRGHMAEYGWVAPQGPSYVALLADLLEDELGATLPEAARAMFRIMLDMLDDLGARIADLDKEIARRAREDATARRLMTIPGIGPIAATAIAALAPPLEGFARGRDFAAWLGLTPLQKSTGGKQKLGRTSKMGERTMRRLLIIGASAVVRQAAARGAPEGSWLAGMLARKPRMLVTVAQANKTARIVWAVLTKQEDYRALAPAA

SEQ ID NO: 367076 - protein, 322 aa, unidentified
MEQFSFFTGIDVSKLWLDIAVFKPDYGIVYQTRIDNDVKTIRSFLRNLKKQFKAEIAGHMFCMEHTGKYGHAFLNASILEQAKVWVELPIQIKRSLGLVRGKTDQWDAVRIAQYAYRFADKAVFWKPADKTVQDLKELQVKRSRLVKAYSQLSQENKNDPLFKKPLLALKQGIEAIELKMEHLIEQNESASHQYELLKTVPGIGKQTAMALIIVTNGFTRLTETRKLSCYSGVAPFPYSSGSSVKGRTKVSKMGDKKLKVLLNLSAWNAIRSITAFKDYFNRKVSEGKHKMSVINAVRNKLIALILAVIKRNSPFEKNYSFS

SEQ ID NO: 367077 - protein, 348 aa, unidentified
MLHAGLDLSRRRVDYCLLDEDGERVEVGAAPADADALAGLVRLVELRHGPGPVSAVIESMNGARFVHDTLERLGWEVQIADAQRVKGLAPLACKTDRIDAWVLAELSRRDLVPAIWLPSFAQRQERERARWRLHLVKHRSALKQRVHSELMAFGHTCPVSDLFGVRGRELLERLEFPEPWRSGVLCAVELIDELESEVDGIERELRALGADHPYVPLLMTVPGISWVLAYTIAAEIGDITRFATPTKLCGYSGLCPRVYQSGDTDRRGPLAKHGPKYLRWALMVAATNAAKHPLYRDRYQHTKQRLGRQRGAKVAQIQLARTLTEAIWHMLTRNQKFAPAGAPLPLAA

SEQ ID NO: 367078 - protein, 355 aa, unidentified
MDSVKYIGMDVHTEAISIAVLNSSGKLVMECVIETKAITILDFLKGLRGSLHVTLEEGTWAAWLYDLIKPHVTELVVCNPRRNALLKEGSKSDRIDARKLAELLRSNMLRSVYHGEQGVRKLKELARSYLAISKDLGRVMSRVKAIYRSWGIPCGGKQVYAQRYRSEWLGKIQEAGVRRRAEFYYQHLDALRPLRQQVRQELLAEAKKHSAWKLLRGIPFIGPIRAALLMALIQTPHRFRTKRQLWSYSGFGIETHSSAEQRFIHGELRRAKKPASIRGLNRNHNHDLKNLFKSVATVAAAKAGPFQEYYDALVAKGMRPEMARLTLARKIASITLIIWKRGARFEAQHLKPQTA

SEQ ID NO: 367079 - protein, 355 aa, unidentified
MNDAKYIGMDVHQATISVAIRDSHGNLVMEAIVETKAETILQFIRGLRGSLSVTFEEGTWAAWLHDLLQPHVTRVVVCDPRKNALLKVGNKNDRIDARKLSELLYLNKLSSVYHGEPGIRTLKELARSYIAMTRDLTRVMSRLKAIYRSWGIPCAGQQVYAPRYHAEWLAKISEDGVRRRAGLYYQQFDALAALRQQARRELLAEARKHPAMKLLRQIPTIGLIRAALLIALMQTPNRFRTKRQLWAYCGLALRTYTSGEYRFVGGQLKRSKKVLAVRGLNINHNHDLKNIFKGAATRAASTAGPFQHFYEACVARGVKPHLARLTLARKIAAITLFVWKKGVRFDAQHLKQRAA

SEQ ID NO: 367080 - protein, 507 aa, unidentified
MKEITTIGLDLAKQIFQVHAADFEGAPVISRKLRRADVLSFFRKTPRCLVGLEACGGAHYWAREIAALGHEVRLIPPAYVKPYVKRGKTDAADAEAICEAVTRKTMRFVPVKSAHQQAAAMVLKTRELLVRQHTQAINALRAHLAELGIIAATGTTKVASLIDIVRDETDNRLPQAARFALSEIADQIEGLNRKIGKLEHAIVMEAKRDDDMRRLCTIPGVGAIIAASIKATVPDPGGFTSGRHFAAWLGLTPKPHSSGGKERLGGISKMGNPMLRSLLVLGATSVLRHVKGNASAPPWLSALLARRLDRQLPGSRAPGGCGAARDGTEVGCGNIQQELGGPMSAQIVLGVDIGRSGALALVTGSGDLVFVADMPTLDDGSVGRPAVNAPLLASILRQWNPTDAYVEFVGARPGEAPSGAFAFGRSRGVVKGVLGTMGVPARMLTPPTWKREVGIKAGKDGAKDAARSEAIRRWPTRADLFAAKGSDGKAEGALIAVAGMAREAQGR

SEQ ID NO: 367081 - protein, 349 aa, unidentified
MGEVITIGVDIAKSVFQVHGVDADGTVVIRRRVGRARVLEFFADLPPCLVGMEACATAHQWARELKKFGHDTRLMPPAYVKAYVKRGKNDAADAAAICEAVTRPSMRFVPIKNVEQQSVLMLHRTRDLLIRQRTQLINALRAHLAELGLVAAKGREGVHQLVTVVTECGGERLPSNARFACQAIVTQLHAVQIEISGLDKRITQTHRVNADSKRLDTIPGFGVILSTAVVATMTDPKAFKTGREFAAWIGLVPRQNSTGGKQRLGSISKQGDRYLRRLLVVAATSVINSARARPCKYPWVIELLARRPTKVVAVALANKMARIAWALLANGETYRAPTYSSNAVVPAAA

SEQ ID NO: 367082 - protein, 347 aa, unidentified
MEILKQVLGVDVAQKELVVTLGRMNVDLSIDLYSHKVFRNIDTGILSMVKWVKKLTRNDLSVRYVMEATGVYHQKLAYYLDENGFDVSIVMPNKISNYMRTLENKTITDKTCSEAIAQFGLERNLDGWHKPNQVFKILQQLTRERDQIVTERVMVKNMLHAEETEAEPNSNSVKRLKARIKLLSKQENEIKLEIESCVEKQADLKQDIENICTIPGVGKLTAVIVLAETNGFELIRNKKQLTSYAGLDVKEKQSGTSVKGKPRISKKGNTVLRKSMHLPSLSAIKHNEMFKEIFVRLVSRHGVKMKAIVAIQRKILELIYLLHKNKTVFQPDYENKKREQLQVVATL

SEQ ID NO: 367083 - protein, 371 aa, unidentified
MKKDSTTKFIGLDVHSKTISVAIADEGRKGEVRHYGTIGNTTEAIDKIIKTLTATGTELKFIYEAGPCGFVLYRYLTGNGFKCIITAPGLIPKRSGVRIKNDRRDALTLARLYRAGELTGIYVPEPEDEAVRDLGRARDDARVAERKAKQRLNSFLLRHNLIYPGKTKWNRTYFNWLGSVGIKYPAQKVAFQEYIEAVNECTGRVARLSEQIGLAVEEWRMAPMVKALQALRGVSLICATVTVAELGDLSRFNKPKELMAYLGLVPSEHSSGESIRRGGITKTGNSHARRVLVEGAWTYKHHARVTPPLIKRQRDLPKSICQISWKAQLRLCARYRKMVARKKPMQVVVIAIARELAAFMWAIAQEVKTTA

SEQ ID NO: 367084 - protein, 354 aa, unidentified
MRIIGCDYHPAFQQIAFVDTDTGEFAEGRLAHREEAERFYRDVAARGVSVLVGMEASGHARWFEGLMAELRFELWIGDAAEIRITRVRKQKTDRQDAQLILRLLMEDRFPRIWVPSGENRDLRQLLWHRHRMVQARTRIMNQLQAVALNEGLRCKKRLWREAGREQLEAFRLAPWASRRRRDLLELLDRLTPTIAELSQAVEQEAEKCPEARRLQTHPGVGALTALAFVLIIGRAERFQCGKQLASYLGLVPLEESSGQRRRLGHITKQGNSLLRFLLVEAAQVTVRSDPEWRSKYFHLAMRRGRKIAKVAMARRLAVRMYWMWRKGWDYGQIKKFSSHAGEPGNRDGVQHNTE

SEQ ID NO: 367085 - protein, 453 aa, unidentified
MARKAEKERTKDGLKLKIVNPNAAGIDIAYGEMQVCVPEDRDGENNRCFGSFTCDYEEIASWLKACGITTVAMESTGSYWVGLYFFLEEKGFDVLLANAKDVKNVSGKKTDEADAEWIMLMHSYGLLKPSFHPDAAARNIRELARHRDNMLRSAGKEIQHMQKSLVLMNIKVDTVISDILGKSGKAIIEAILAGNHDPKSLAQLADPRCKASKETIEKSLEGTWDAVHLFELKQSYDLYKYIHTQITDCEAEMDRMLNDYTDGSGTDMQAYVPTKKRIAKKNAISFDAEKHAFSVWGVNAMEIPGMSHGALTVLMGELGSGFAEKFTSAKSFCKWCNLVPNNKISGGKLLSSKVPKQKNRVGQVFRLCANSVKSVKTGLGVYFRRQKSKGGHLQAIVATANKIARIFYIMVTTKVHFDESKVGLDEKELLQRKIALAQRTLDRLNLRLSVAEG

SEQ ID NO: 367086 - protein, 429 aa, unidentified
MNYTQNEKIDQVTDTTMVVGIDIGSQMHYARAFDNRGRELTKRVFSFKNDLEGFNSFYFWTETLRRDNGKADVMIGCEPTGHYWFAFAKYVQNHQMKLVMVNPFSVKKIKELDDNSPKKTDSKDPKTIAKLVVDGRYSIPYMPEGIYAEIRDLVYSRDRIMKQHNISANRIQRWLAIHFPEYLGLYTRFDAISGLAVIEKAPLPKDVIALGVNGIRKIWHDKKMRGRGVTEDRAKTLVEAAHNSVGLDGGIGTKSELYMLLEEHRLWTSQLEAVNKVLEEMILKVPHVEKLLAIKGVGSITIAGFIAEVGDIRRFDSLKQIQKYAGLELVENSSGKHKGRTRISKRGRRKLRKILYQVMVPLLARNREFREIYDYYVTRVKNPLKRRQAMVAVSCKLIRVFYAVLTKGMEYDRFKMMSDIQRKSDIIAA

SEQ ID NO: 367087 - protein, 344 aa, unidentified
MKNYAGLDVSLEETAIAIVDETGRTVREAKLASEIEAIDAWLGKTGIAIVRLGLEAGPLSSWLHAGLKERGWPAICIETRRLRAVTRAMPVKSDRKDAEAIAQVMRTGWYRPVHVKSLASQQLRVLLRHRKILQAKRQDLENELRGTLKNFGLKLGRVGRAKFAQRVGELVADEPWLERLALPMLAARAALLKSFGELHALVLRIVKADAVCRQLMTIPSIGAVNALAYKTGIDDPTRFRHSADVGPHFGLTPRRYESGETELVGPISKCGDAMVRSLLFEAAMTLLHRVKAASILKRWARALAKKIGTRKAAVALARRLAVIMHRMWLDGTDFNPSLIRATAT

SEQ ID NO: 367088 - protein, 410 aa, unidentified
MELIYERCCGLDVGKGEVVCCVRTPNGSGGRRQEIRTYSTFTAHLEELANWLTEEGVSEVVMEATGQYWKPIWYVLEEQGFELMLVNARHVKILPGRKTDVGDAAWLAELLEHGLLRGSFVPPQEIRELRDLTRYRKRLVQGHAAECQRIQKTLEDAGIRLDSVASDILGVSGRAMLRALVAGERDPEVLAEMAKGRMRNKLPELREALHGRFREHHALLVELALDHVEQIETTIARLDAEVDKVIAPFAVARDLLDTITGVGKRAAECIIAEIGVEMGHFPTAGHLASWAGSCPGNNVTGGKRRSGKTTKGDVWLQEILIECAWAAARAKDTYLQAQFWRLSRRIGKKRAAVAVGHSILVIAWHLLSEGCTYEDLGGDFFVKRDTDRQRQRAIAQLETLGYKVNLEQAA

SEQ ID NO: 367089 - protein, 421 aa, unidentified
MKSSQQITGYGGFDWGREHHAVVVVDLQGQIVADFQFDHTRSGWQKFLDKTAAFTGLAFAIETNQGAAVDHLLQHECIVYPVNPVAAKSYRQRKMPSGAKSDHVDAWALAEALRLDGHEWKPLKLTDDVSLKLKWLCQDEVVLISQRTQLVNQLQQALVEYYPAALEAFDDWTQSYTWDFIIAFPTPTALTKAGQRRWQKFLHLHRLWRPATLEHRLQVFAGADQFKGSAAITEVKSHLAVSLCKLLRTLQQQLDGYRGKIAELFVQHPDHHLFASLPGAKAKLAPRLLAAIGSDPGRYANNPEVLQAFAGTAPISFQSGQHHTVKMRRACDKFLRHTVHLWADTFHRASPWGEVYYNKKRAEGMSHACALRCLAQRLLKIVFRIIVDKKPYDAELHARNQQKHGSWVLSLVNLTPAKTGE

SEQ ID NO: 367090 - protein, 347 aa, unidentified
MLHVGLDLSRTRLDVHAMDEAGTSVLVTRAAPDAGGLGSLVHRLGEFGQPVTAVIESMNGARFVHDQLELRGWTVEIADAVKVKGFAPLACKTDKIDAWVLAELSRRELVPAIWLPAPGVRGERERARWRLHLVRHRTALKNRIHATLMAFGHPCPVSDLFGVAGHRLLDHLELPEPWAGDVTAALRLIEVLDGEIDDCEAALRREGAAHRYVPLLMTAPGIGPVLGYTIAAEIGDITRFPTPKKLVGYTGLCPSVDQSGGHDWRGSLAKNGPKYLRWALIEASTHASRHPVYAARYQRTKTRLGRQRGPSIARVDLARRLTEAIWHMLTTNKPFAPAGATTTALAA

SEQ ID NO: 367091 - protein, 388 aa, unidentified
MYYIAIDIGKFNHCASVTDSQGEVFVEPFFFKNNSEGFQLFLTTTKKFTHSRHLAGLEATGHYGDNFTAFLLDNDYHVGIINPISTDAQRKLKIRKTKNDKKDTFLIAKVLQAKEFTSMTKKKLQLRQAKQLTRLHSELTEDLNRIKNRLQYCIDILFPEYNSLFKTKYSKAYMAVLKAFGSASVIATTHLTKLSNVLFSTKRGKVQLSALELREAAKISVGEDNPIVVFQLHQLIAQIELINSQLSEVHKKIEDFALSSNSPIFSIPGIASISGTSILSEIGDIALFSQYSKLIGFAGVDPATYQSGEYNATTTAISKRGSRYLRKSLYQCILAVCTHNPTFKTYYTRKRNQGKSHRCAQGHCVRKLLRVIHKMLSENSQFDITKCI

SEQ ID NO: 367092 - protein, 340 aa, unidentified
MSLHGGIDLHANNSVIVLINEQDEVIYRKRLPNALPTILEQLAPYHMQIKGLVVESTYNWYWLVDGLMEADYRVHLANPAAIQQYSGLKYTDDHSDARWLAHLLRLGVLPEGYIYPKAERAVRDLLRKRAHLVRQHTANVLSVQTILVRNTGARFSVKRLQELTKQELKSLLAEEPQVLAVTSSLAVLDCLRQQIKTLEKTVHKRLHHTPAYEQLLTVDGIGTILAQTITLETGAISRFPTVGNSASYCRCVDSTKISNGKRKGTGNVKNGHPYLAWASMEAAQFAMRFQPEAQRLYQRKLAQSRNNTVLARKAVAHKLARACYYMMRDLVPYEATKAFG

SEQ ID NO: 367093 - protein, 344 aa, unidentified
MQIAVIGIDLGKNSCSIVGLDQTGAVIKRRRMRPEGIAAFTEKLPACIIAMEACCGAHHLGRTMAGQGHQVRLMSPEYVRPYVKAQKNDDRDAEAIAEAATRPTMRFVELKSEEQLDVQTLHRVRDRLVGERTALINQLRAVLLERGITIPQGRRKLEGHLAALLAPDSDHSLSLRIRRLIDDMRAEWHELDRRIAAFDDEFVALARSDADARRLATIPGIGVLNATALLAAIGNGQTFARGRDLAAWLGLVPRQVTTGGKPRLVGITKRGNKYLRKLLIHGARAALPSLATSATPLGGWLRGLMQRVHKNAAVVALANKLARIVWVVLRRGEEFDAAAVKAAA

SEQ ID NO: 367094 - protein, 355 aa, unidentified
MKDSIYAAIDLHSNSSTIGYMSPDGTYHGSRTFATTENNLISHVKAIEASNRYLVIEQCNQAHWAACLLHNYVDELIICDPSVNTRVHSGVIKNDASDTRDLCELYRLNGLKPIYYARDLGNRKLLLHQVKEYERLTKMITRNKNQLQASLRNWGYPIKMNKTLYVHPDRVLSQIDREELREQFGRKLSLIGSLQQAKDAEKKQFKQLGASFWEIAEFKKVPGCGDISSHTISAYIQTPHRFRKRSEVIHFSKLAIKQFTSDGKPVKVETLARSGHSSLKSASHQIWKSALSRNDDNEVKRFYRQSIERSENETNARLNTQRKIIKSLWSLWKNNQPYRPEKFLAPTAGDGVCTS

SEQ ID NO: 367095 - protein, 401 aa, unidentified
MNAVGIDVSKGKSTVTILRPFGEIVASPFEIKHTREDIGSLINLIKSTEGESRVIMEHTGRYHAVLAHYLSESSIFVSTVNSKRIKDFDNDSLRKVKSDKADSIKIARYGIDKWDSLQQYSRMDAIREQLKSMNRQFAFYNEHKASMKNNLTSVLELTYPGVRDYFTSPARSDGHQKWVDFAYTYWHVDCVRNRSLDAFLEHYRNWCKRNDYSYSESKAKSIYKQSKDIAAVLPKDELTKSLVKQAANELISISTTVESLRTLMDQTASKLPEYSIVLSMKGVGPSLGPQIMAEIGDVSRFTHKGALTAFAGVDPGINESGTYAQNSVRTTKRGSSHLRSSLFKVMDALIKNSPEGDPVYEFMAKKRAEGKPYYVYMTAGCNKFLRIYYGRVKEYLLQTAD

SEQ ID NO: 367096 - protein, 404 aa, unidentified
MTSAVAEDPAGQVVFGGVDSHADTLHVAVISDNGGHLADAEFTTTAAGYAAALAFLGAHGHVRAIGVEGTSSYGAGFTRAARSHAHRVVEVNRPDRAERRRIGKSDPIDAYAAARAALSGRASSAPKDDTVAGIRALHNAARSAVKARTAALNQITHILITAPEAVRAKYGRLKGTDRTDVLARLRPAGDAVHIAVLTALKSLARRVKELTAEHETLTRALDSEVTAHNPGLRAAYGVGPDTAAQLLVTAGGNPDRMRTEAAFAALCGAAPVPASSGRTNRHRLSRGGDRAANAALYRIALVRMSSDSRTRAYVTRQTAAGRTKKEIIRLLKRAIAREVFRCLTTAVTVPGIADLRPLRQSKNITLTAVARHFGVWPATISTLERGIRRDDDLASTYRDWLTAA

SEQ ID NO: 367097 - protein, 329 aa, unidentified
MEIIDVIGIDVSKLTLDCCVHSNGLQRRFANHSKGIAKMIKWGLTKSNGDRENLLFILEHTGLYSDRLVQMLAADDCVMKVVSGLEIKRSLGITRGKDDRADARRIALYGYRTREEGRPSTLPSATLVRLKRLMSLRRKLVAQRAGHMATLREQKKVLDQDALLFWVQEDIINLLTWRINDLEREMDNLMQEDPELREMLRLLMGIKGIGKVTARFLIVYTSGFTSFGSWRKFASYCGIAPFPHTSGTSVRGRTRISRLANLEGKSLLHQCALSAVKSSPEMKAYYERRLEMGKSKMSTLNIIRNKLVARAFAVVNRGTPYVNTMKYAS

SEQ ID NO: 367098 - protein, 336 aa, unidentified
MNYIGMDIHKQFTVAVAKDKDGNELDNEKFDNSKENFRNFLKDYPPEETKIVMESTSVWEPIYDMIEDMKFDIKLANPVKTRAIAESRIKTDKVDADILCDLLRLNALAESYIPSKEERILRDIMRARKTLVQGKVKVKNKIHAILIKTGIKLPYKTLCKSSMAFIVEEIETKHFNMKTIITSYLNLLEQYNFEIEKIDEKLSDIAMKDSRVQLLKTIPGIGNIIALTVIAEIGDINRFKSSKKLCSFAGLVPGIRQSGDTLRFGRLIKQSNQSLKTCLIEASWVLVRTKEASRFKWFFGNLSKKKGKQKAICAVARKLCCVIYAMLTKNQEFMLL

SEQ ID NO: 367099 - protein, 345 aa, unidentified
MAEIITIGLDIAKNVFQVHGVDAAGTVVVRRQLRRAEILKFLGKLAPCVVGLEACGTAHYWARQIAALGHEVKLLAPARVKPYVKLGKKNDAADAAAICEAVTRPHMQFVPVKSAEQQAALMLHRARDLLVGQRTMLINAMRGHLAEYGFIARQGKAPFAGLVALVRDDEAARLPDAVRMALRLLADQIDACTAKIEALECDIVARHRGSEVSRNLATIPGIGPIIASALAAAVPDPAMFKSGRQFAAWLGLVPSQNSTGGKQRLGGITKAGDRYLRRLLVVGATGLVRYKRENVPGGLAWLTKLLANKPVRLVTVALANKMARIAWAVMTSGEVYREVPVPQAA

SEQ ID NO: 367100 - protein, 415 aa, unidentified
MALKIVYQICCGIDVHKTFVVACIASTNKQGVTTYKRHRFSTFTQGLKELLQWLLDNHCKDVCMESTGKYWIPVYNVLENDCTIVLAHPKYVKAIRGKKTDKKDAKWIADLFKHDLVAGSFMPPADIRQLRDLMRYRYKLTCFMSSEKNRFQICLTVSNIQLASVVSDTFGKSSQRILDKILENPHDTSFDIESLIHGSMKKKLPELELAIDGFITPEQAGKLKIIKKHFEDLESRKAELEELILALASPYQQELDLILTAPSFKNTFTAIGIISEIGVNMEAFPSAKHLCSWAGLTPTNNESAGKKKSVRVSKAGCYIKPLLVQCANSVVKSEKHPEIRNRYLRLRKRRGHKKAIIAIARMLLTALYNMLKNKEPYNAELYRKCDVLPVNREITVEQAILMAQFQGYKIKPATE

SEQ ID NO: 367101 - protein, 340 aa, unidentified
MRDNITIGMDLGDKFHIAVVFDADGNELDTTKVVNTKDGISKYFKRFKGASVAIEAGTHSPWVSRLLEEIGCRVYVGNPRKLRFIWDSKDKSDERDARMLGMVCRLEPRLLHPLQHRGSKAQADRVMIKSRDILVQSRTKLVNHARGVVKTTGERLPKCSSDSFAKRCADHVPKDLWPALEPLFSIIGHLSEQIHELDAKINQMCRQHYPEAERLQQVPGVGPVTALCYVLTIEDPARFSKSRQIGPFLGLTPRRDQSGDTDKQLRITKAGDKYLRQLLVGSAQYILGPFAPDSHLRRHGLAIAARGGKNAKKRAAVAVARKLAVLMHRLWTSDQAYDPC

SEQ ID NO: 367102 - protein, 470 aa, unidentified
MLLRARVSVSCTDPGLRRAARLFPSAWGVPLQEVAGLMKVLYERVAGIDVHKDMIKVAIRSPGEKPWTRKTEILEFRTFYGVLQETARELRRRGVTHVVMEASGIYTDPVYYALCEQDFEQVAVINPAHAKALKGHKTDAKDCARLAELFECGLLRGSYIPPAELKEVRDLTRYRIKTVQARTSEIQRLGKALEMAGIKLGSVASSITGTASTAMIEALIDGERRGAVLADLAIGRMRTAGKLADLSMALAGRFTGHHALLCRLHLDRIAVFDAAVGGLDERIAGKAARWQREQGLLTSVPGFGDVVAQAWLGEIGPAPHRHFATHEKLACWVTLCPGNNISARKRKHGRTGHAGTYIKPMLIQAAWAAIRVRGRLQARYNRLVRRFGGARNPAAKKKAITAIAHTLLKIAYQVLKSGTPYQEPGADFCTRRESPEQKHAWLERQLQKLHPGCTVTITISPPEAALPPGA

SEQ ID NO: 367103 - protein, 410 aa, unidentified
MQVVYTHCAGLDVHKKTVVACVITPNGSGGWHKEIRTFSTMTAQLLSLSDWLLSLNCSHVAMESTGEYWRPVFNILEANFEVILVNARHIKAVPGRKTDIKDAQWIAELLQHGLLRASFIPPLAQRDLRDLTRHRSNFIRERVNLVNRLQKVLEAANIKLASVASDVMGVSGRAMLDAIVEGKASPEVMADFARGRMRDKHEQLILALEGRVRPHQRLILAELLCQIDSIDATLERFNHQIEEFCRPFETAVELLDTIPGIARQSAEMIVAEIGTDMSRFPSAAHLAAWAGLAPGNCESAGKQLSTTTRKGNRVLRTILVQAAHALARTKTYLAAQFSRLSARRGKKRAAIAVAHSILVIAYHLIQRQEPYRDLGANYFDQQRPEATKKRLVKRLEKLGYQVSLQSSACS

SEQ ID NO: 367104 - protein, 424 aa, unidentified
MKVTYKTCCGVDVHKSFLVATIITTTGGIEPSYQKKRYSTFNNSILEFKQWLLDNDCHELCMESTGKYWIPVFNLLEDEINVTIANPKWVKAVKGNKDDTKDSKWIGDLFRLGLVKGSYIPCKKIRILREFTRYRYKIVSCRSSEKNRYQNALTVCNVALDSVVSDIFGKSSTSIIDYLLEQSGNSINHKEIASKLLKSLKSKEDAVIESIEGYQMTDSQKYRMHLVRAHMDYITAEINDVDREIEKLISSDPDFENAIQFLMTIPGVKRDSAITVISEIGIDMTQFSSSKRLCCWAGLTPGSNESGGKKKSVRVTRAGVYLKPALVQCAHAAVKSEKSPYYKKKYESLMKRRGKKRAIVAIARMILTAIYQMLSTGESWNPSDLYKIDIPEALLEKQKAKAIKQAMKLLQREGLYPPPEPIAS

SEQ ID NO: 367105 - protein, 347 aa, unidentified
MRFYTRQHRFYCGVDLHARSMYVCVLDQEGSVLVSKDIATAPEPFLELIAPYREDLAVAAECMFTWYWLADLCAREGLVFVLGHALYMRAIHGGKAKNDRIDAHKIAALLRGGMLPQAYVYPQAMRATRDLMRRRNYLMRQRAELLSHITNTNHQYNLPALGVRPARPAERSGLAEHFTEVSVRKSIEVDLSVIGHYDRELPRLERYLESNAQAHDPMALAIVRTIHGMGKVLGLSILYEIHDIGRFARVQQFLSYCRLVKPTKESGGKILGHSGRKIGNAHLKWAFSEAAVCFLRANKPAQALRARLMAKHGKGKSLAIIAARLARAVYFTLRRSEAFDAERFFAH

SEQ ID NO: 367106 - protein, 322 aa, unidentified
MAMLSFGGIDVSKDRLDITVLPDEQCSSVSNDAAGWAELIEQLRGSSITAIGVEASGGYERGVVRALLAAGMSVRQINPFKLRQFAKASGVLAKNDRLDARMIASFVAIMPTRPAQRQTPMIEQLAAMLTVRRQLSDHKVATENASRLLEGAMLQRLSRRRVAGLTADIDLLDQRLVEIVTADPALAHRFWLLTSMPGVGAVLACTLIALLPELGQMSRKQVAALVGLAPYDFDSGKLKGRRCIWGGRARVRHVLYMAALSASNWNPALKAFHDRLAATGKKPKVVIVAVMRKMITTLNAMLRDGTTWVDRYSGRRSAATAR

SEQ ID NO: 367107 - protein, 328 aa, unidentified
MEQQYIGADLSKKSIDLASYLSRDHVRIENSASGFRSLLQWFGQLHIDCKSVIVVMEHTGLYSHQFEAFLHQHEITYVKVPGLALKRSLGLIRGKNDALDAARIASYGYEKRDQLKAERRVAGNIERLQLLQSTRERIVRSMAGLKCAIKEYENIGIKRTDSLLKTQLGIIATAEKQIEKLEAEIEQIISADEALHTTFLLLQSIKGVGKVLATATLIKTRNFTRFSTARKFACFCGTAPFEYESGTSIKRRTRVSHLADKKMKSLLDLSAKCAMRYDPELKAYYQRRTEAGKPKMSTINIIRNKIIYRMFAVIKRQSPFVQDYQCQF

SEQ ID NO: 367108 - protein, 391 aa, unidentified
MFLLGIDIAKLNHVASCIDSSTNEVVFSNFKFKNNFKGFSALLNKIKSFDAKNLIIGLESTSHYGENLINFLFIHNFKVALINPLQTSHLRKANIRDAKNDNIDSLNIAKSLIFTNLNFVSKKNIECFSLKKLTRFRSNLIKQRSKAKIQLTSLLDLLFPELQYLFKSKIHSKAIYSLLKKYPSAEEIAALKDDEISNLLYASSKGHFKKEKSIELKSLAKTTVGIKDTSISLHLIQLIELIELYTKQIKDIEIKITDIVKNLDTTLLSVPGISVIACAIILGETNNFENFSSSKKLLAFAGLDPKIRQSGNFNASSCRMSKKGSPYLRYALIFTAWNIVRHSEKFNKYYSLKRSQGKSHYNALGHVAHKLVRILFTLIKKNISYQEEKLE

SEQ ID NO: 367109 - protein, 445 aa, unidentified
MKTYILRHPKSVEPQKIQFAPAPLPTAAAPRVVQAEDPALAATVDAICGRPAAPRSAKANGPVLFIGLDVHNDSIAVSLAPSDSTEVRRYGIIGGQHDDVLRLIKKLAAAHPGVALKFCYEAGPRGYPLCRFIRQHGAECIIVSPSKVPRQPGDRVKTDRRDADQLARLFRAGELTGIYVPDPQDEAVRDLIRARYQVQKQQHRARQQLKMFLLRQNIRYAGTKPWTQKHLNFLATVKLPFAEQQFTFQEMVQVISDAGQRLERYEKEIVSVVESWRWQPVVQALMSLRGVALLTGATLVAELGDLERFATAPQLMSYLGLCPSEHTSGETRQQGGITKLGNGIARKAMIEAAWNNSRAPRVSRTVLARQEGLPKAVTEAAWNAQTRLHQRYQHLTGVGRKKSQVAAAALGRELSGFVWAIGRMVKPRAAKLEAGKTHPTKPKTA

SEQ ID NO: 367110 - protein, 386 aa, unidentified
MQASTVGTPTASRYGTIFITIELSQKSWLVTLHSPDQDKLSRHQLAGGDHAGLLALIDRIRDRAARALGGVPAVASCYEAGYDGFWLHRLLLAAGITNYVFDPASIAVDQRARRVKTDRIDGETMLRTLMAFLRGEPRVVRIVRVPSAEQEDARRASRERDRLVKEQTAHTNRIKALLRLLGMAIGNPRRRDWLSWLATQRDWQGQAVPPQMLGEIRHEHARLMLVRERLDALAKTPAQADPTPAAAQMIERSELLLRLKCLGPAFATTLTNEVFYKDFRNRREVASYFGLTPSPWRSGGIDRDQGISKAGNPRARCAAIELAWLWLRHQPDSKLTQEYRRRTLDAGKRIKRVAIVALARKLVVALWRYLTTGLVPDGAVLKAVKV

SEQ ID NO: 367111 - protein, 333 aa, unidentified
MLYVGVDAHKKRSHLAVMDGNGGLLKSVEVSSTREGFAKALGRYRRPMKAVVEACYTWEPIYDWLDELVDEVTLAHPLKVRAIADARIKTDRIDAETLAHLLRADLIPAAYVPAQETRQVKRVLRQRRFLVQVRGMLKNRISALLSRNAVKRPKLSDQFGKRGRMFLATVELPEVERRLLDEDLAMLDTLSARIAKTDSLIEELSEGDPVIGWLRSIPGIGAFFAVLLRYEIDDIERFCSPRKLAAYAGLVPSTYQSSGRCFHGRLTKQGNRHVRWAAVEAVTSAVRCSWYFRRYYQHIKYRAGTGAARVATARKLLAMVWTVWKEQRCYEPR

SEQ ID NO: 367112 - protein, 369 aa, unidentified
MIHPDAAGIDIGNESHYVAVPPPRDSQPVQRFGCTTAELKDMAGWLKQCGIRTVAMQSTGVYWIAVYDILEEAGLEVYLVNARDTKNLPGHKSDVQESQWLMKLHTYGLLRNSFRPSQEIRTMRTYWRQRNDLVQSAGRHIQRMQKTLTQMNLQLANVLSDISGVTGQAIIKAILAGEHDPDKLAEFRDPRVKARKGQIARSLEGNWQEDLLFVLQQEQDGYEFCHKQMAECDQRLAQYLERREDRSAGAHLPEEKRKGRLKKKSGNKPRFDLRTGLFRMSGADLTRIDGLDVMTAMTILCEAGWDMSKWETEDHFVSWLRLCPDNRISGDKIIGKGRLPTNNRVTTALRWRPTPYAQARPILEHSSAV

SEQ ID NO: 367113 - protein, 320 aa, unidentified
MDRIIGIDISKQDFVVAILTNNKPIIKKFVNNESGFHKLVKYLKMLKIDNAKICMEATGKYGEKLANFFYDLGYKVSVVNPACIKAFAKTNLSRNKTDSADALLIANYANKCDPKLFIPKKPILKEIQEIHRCIQDLKSQLNQVTNRLENVDLLTQVVSSTWQDLASSIRLKIEALQNHLVKLALSDKNIKKDYENLQTIPGIASISAIAIIAEVPDIDILPNARALAAYAGLNPKHTLSGSSVKGKSRISKIGSGNLRKILYFPAIVSSSVNRNFQEFKQRMRAKGKHNMVIIVALMRKLLHIIFAILKNKSIFSYELA

SEQ ID NO: 367114 - protein, 410 aa, unidentified
MEVIYSRCCGLDVHAKTVVACLCIQGEKQIRTFTTMTEGLLQLSDWLALAGCTHVAIESTGVYWRPVFNILEGNFEVLLVNAHHIKSVPGRKTDVRDCEWICDLLRHGLLKASFIPPRPIRELRELTRHRQTLVRDLAAVANRIQKLIESANIKLGQVATNTLGFSGRLMLSALAEGETDAEKMALLAKGKLKAKTAQLKQALTGSLTPTQRFLLKELLLQYDQLQEAIDRTTTELERQFQSSEDPFLREAVELLQTIPGVGQRVAETIISEIGADMSRFPTAAHLASWAGICPGNHESAGKQLSGKTRKGNIYVRGALTQAAWAATRTKNTYLAAQFRRLTTRLGKRRALVAVGHSILVIAYHLLSKRASYQELGGDYFDRQNVTAYRAKLVRKLEALGLKVTLEPAVT

SEQ ID NO: 367115 - protein, 367 aa, unidentified
MNYKLKAAPTAVSKEENSQKEPKANRIAIGVDAHLKSYQAARKIDKGAVGVAQTFRSKAALLLYLEKQREQSKEVVVLYEAGPLGYTLYRELKAKDIQCLVCAPRSGEQKRKRRKNNAIDARSLTSELSNYLNGNEQALQLVRVPSEAQEQARVASRQHDALVQERKRIGAVGNALLLSQGYGSWSNWWRPKAFERLSRVVAGWVLKQLQRWVKVLRELDQQIQQAKVELSQQWKGPRPKGMGAPSLAQLNAEVLDYNLYSSGRKIGCLAGMVPSEWSTGNSQRLGSITKVGVPAIRRILTEMVWRMILFQPEYKAVQKWREVLEGSNRGLKKKAVVAIGRQLIVDIWRLQTGRISAQELGLIMIEA

SEQ ID NO: 367116 - protein, 453 aa, unidentified
MARKAEKERTKDGLKLKIVNPNAAGIDIAYGEMQVCVPEDRDGENNRCFGSFTCDYEEIASWLKACGITTVAMESTGSYWVGLYFFLEEKGFDVLLANAKDVKNVSGKKTDEADAEWIMLMHSYGLLKPSFHPDAAAREIRELARHRDNMLRSAGKEIQHMQKSLVLMNIKLDTVISDILGKSGKAIVEAILAGNHDPKSLAQLADRRCKASKETIEKSLEGTWDSVHLFELRQSYDLYKYIHTQIADCEAEMDRLLTGYTDGSGTDMQGYVPTKKRVAKKNAISFDAEKHAFSLWGVNVMEVPGMSLGALAVLMGELGSGFTEKFTSAKSFCKWCNLVPNNKISGGKLLSSKVPKQKNRVGQVFRLCANSVKSVKTGLGVYFRRQKSKGGHLQAIVATANKIARIFYAMVTTKTPFEESKVGLDEKELLQRKIALAQRTLDRLNLRLSVAEG

SEQ ID NO: 367117 - protein, 341 aa, unidentified
MTSFIAQSILGLDIAKAKLDTHFLRVGSADKPIHRLYDNTPAGHEQLVSWLASQQVGSLHVCLEATGTYGRAVALRLHQVGYRVSIVNPLRIKRYGESELLRVKTDKSDAPLIARFCLTQQPAPWTPPANEQQQLQDLVRSLRDLRRLHQQQRCRQQSGPQEQAVATVTSAVLTCLQTQMQSLRQQIEAHILAHESLKTPYDLLLSICGLGKHTAALLLGELGDVSRFPNVRDLVAYVGLAPQLHHSGSSVHGPSPLSKHGHAAIRHALYFPAMSAVRHNPAIKACYERLLAQGKPKMVALVAAMRKLLHQIYGVLRSGQAFDPAHVSARPVRKAADHSGQ

SEQ ID NO: 367118 - protein, 407 aa, unidentified
MEVVYRCCCGIDVHKKVIVACLVNGGEQELREFGTTTSEIKTLANWLTESGCEMIAMESTGVFWKPLYNLFELMDLDAMIVNAAHMKALPGRKTDVKDAEWIADLLRHGLLKASYIPNREQRELREITRYRKSLTEERCREVNRLQKILEGANIKLDSVVKDITGKSARKLLQRIIDDDIPDSDEVSKLVYGRMRPKLEQIVASIEGITTPLQRKLLAQIIDHSDDLNRRIGELDKLVQEYMAEYEAAIEAIDEIPGIARRSAEVILAEIGLDMGRFPSAAHLCSWAGVCPGNYQSAGRRKHGKTAKGNKALKTILTQCAKSAKIVKSSYFFAQYQRISARRGKNRATLAVAHSMLIAIYHILKNKTAFHDLGSDYYDSFNRDRKINSYLKRLKALGWEPDAISSSA

SEQ ID NO: 367119 - protein, 471 aa, unidentified
MNNHRRRPGKHRRHRPGKPRTSPSVLERINPNVAGIDCGSAEHFVAVPPDRDPCPVQSFRTFTGDLVRLADWLVACGVMSVAMEATGVYWIPVYDILEARGLNVLLVNARHIKNVPGRKSDVSDCEWLRELHSVGLLRGSFRPTATIVALRTYLRHRQTMIEDASTYIQRMQKALVQMNVQLLLVVTDITGVTGMSILRAIVGGQRDPERLAECRDPRCQASKAEIIEALTGHYQADHLFVLQQNLALYDACQQQIAACDRAIEAHVQILVATVEPPSTPLPPARARTGLKNEPAFEIRSPLHQLTGGVDLSQIEGIAPYSALKLLSEIGTDMTRWSTEKHFTAWLTLAPKNRISGGRLLSSKTQSSANRAAQILRMAAMSLGKTQTALGAFYRRLALRIGKPQAITATARKLAVLVYRALKGELVYRDPGADAYTAKQRTRIVRHLRQRAGSFGFDLVNRETGEIVSAVS

SEQ ID NO: 367120 - protein, 308 aa, unidentified
MTTIYTGLDIAKLNLQLHLAGRIHDLPNTAAGHRRLLKLLTTQAGVHVVCEATGGYERDVVAALHEAKLPVSVLNPARVRHFARATGQRAKTDDIDAAVLTAYGQALQPKPTAPRTEQEQQLAELIRRRVQVLEILVAQRQQAERLTVPALRRQAQSLVRRLERDVAQIEEQLKALRTQAAILDARVQKLEAITGVGAITALGVLAELPELGTLNRRQAAALAGLAPHPRESGQWHGRRSIGGGRAPVRRALYMAALVAAHSNRQLKEFYKRLRAAGKPAKVALTAVMRKLIVLMNHILKNPNFALQN

SEQ ID NO: 367121 - protein, 417 aa, unidentified
MEPNRFRHYIGIDWATEAHRICLLDHNGQLCAKVSIAHSGAGLDQLLEWLASHGVEPAFAAVAIETPRGALVETLVERHYAVFAINPKQLAHFRDRYTSAGAKDDDRDAWVAASALRTDEAAFQQVTIDAPELIQLRELYRTADELREEVQRLTSRLREQLIRYYPQMLALYPAPDQPVIWDLLELASLPATAHHLTLPQVAAVLQKRRIRRLTPGQVLEQLRATPLTLANGAAAAASEHALVLVAQLRVMYELRKQTLQRLASALKKVRQATTESGAPSDAAIIASLPGAGILTTAALLSESSRAVAQREAPALRAYAGVAPVTRQSGKTLQVSMRYACNNRLRNALYHFAMGSLRDPVARRHYDRLREEGHTHARALRGVADRWITVLMAMLRSGTLYDATRRKAWQAADPGATA

SEQ ID NO: 367122 - protein, 327 aa, unidentified
MHYLGIDVAKAKLDCTLLLDAANKRKAKCVSNDKTGIHALLSWLTKQGLEPRQVHAVMEGTGVYHEQAAIALCDADVIVSIINPAQIRDFAKGLAIRTKTDGVDSLVLARYGALLQPMAWMPPSRQARALQALLARREALQQDLRRELNRQEKAEATDTPELIQQSLIESIAFIGTQLAKLQQDIDDHIDRHPELKADLALLSSIPAIGPQSGSNLLAIIHTHHFVSAEQLAAYLGLVPVERQSGSSLLGRAHLSKAGPARLRAVLYMAAVVAIRYNPHVKALYQRLLARGKTKMSALGAAMRKLVHLCFGVLKTRQPYRADYARAA

SEQ ID NO: 367123 - protein, 375 aa, unidentified
MSKIRFIGLDVHAGTIAIAVAEPNGEVRAVGIIPNRLESIRKAMAKLGPAKQLKACYEAGPTGYVLYWQLTQLGVACEVIAPSLVPAKAGDRVKTDRRDAEKLARCYRNGDLTAVWVPDAAHEALRDLVRAREDAKQDQQRARQRLGKFLLRHGAQAPADIKEKWTAKYMTWLHDHVRFEQPALQATLADYVHEVHHAGERIARLEKAIDQAVATAPEQIRSVIAALQALRGVAQMTAVTIVAETGSLSRFQNPRQLMSYSGLVSSEYSSGNRVQRGGITKTGNAHLRRVMVEAAWAYQHKPWVGGFLLKRQQGLDQQVKDIAWKAQWRLCTRYKKLAAAGKNKPQIVTAIARELLGFAWAIALQTEPQPQRQAA

SEQ ID NO: 367124 - protein, 369 aa, unidentified
MNHTTSIGLDVHARSIAAAALDPLTGEVVTKTFAYSPGEVASWALGFDSPKAVYESGVTGFHLCRELNALGLECAVGASSKMQRPPADVKRKNDLSDAQFLARLLATHNVTEVFVPDAETGASRDLVRAHADARADLTRARQRLNLFLMRHGHVFCEKGPTGAPVGSWTKAHWAWIRQISFPDEADEEALAFYIAQVRHMEGQKRELEKFIRAHARELRWRGRVDALRCLKGIEEITAFSLVAEAGVFSRFDSARAFSTWAGLVPSEHSSGPRRRTGGITKTGNSNVRRLLVEASWHYARATAARKPAPSPDVPLRIENHAAKAVKRLVARRREMPARGKRPSVANCATARELACWCWAIGRMVEGADA

SEQ ID NO: 367125 - protein, 415 aa, unidentified
MEGMELLHRHVAGIDVHRKSLSVCVRHASDSGEIRQEVRTLGTMTRDLLTLRHWLEVEQVTHVAMESTGVLWKPVYNLLEGPVEVLLVNARHVRQVPGRKTDVKDCQWLAQLLSCGLLKASFIGPKPQRELRDLTRTRSQLVGERTRVVNRIHKVLEDANIQLGAVASDILGVSGREMIEALIEGEQDTQKMADLARRQLRGKIPQLRLALEGTVSDHHRFLLRMYLQQYGQIESWIGQLTERIEAVCGPFAAAMEKIMEVPGYSRTGAQNLLAEIGADMSRFASDDHLCSWATICPGNRQSAGKQASGKTVQGNRWLKAALCQSAWAAARMKGSYFGAQYHRLAGRRGKKRAVIAVAHAQLKVIYHLLRSDASYHDLGADYFLKLNADRAARYHCRVLESMGYTVVPPAAKQAI

SEQ ID NO: 367126 - protein, 338 aa, unidentified
MELYAAIDLHSNNSVLVVLDSEDRTVFAKRLHNDLGEIVSCLRGCPGEMKAVAVESTFNWYWLVDGLGEAGFDVRLVNTAAVQQYEGLKHGGDFSDAKYLAHLLRLGILPVGYICPKELRAVRDLMRKRSQLVRQRTAQILSIQNQIARSLASSLSGNNIKRMEESDIDALPLLEEHKVALKANLAVMRCLDDRIHELERVILARARLQPQYHALKTVSGIGDVLALTIALETGEINRFTSAGHFASYARMVDSRRESNGKTKGTGNARCGNKHLSWAFVEAAHFAVRYDPLVRRFYQRKCSKTLAVVAIKAVAHKLARACYHVMRDGVAFDATRAFA

SEQ ID NO: 367127 - protein, 415 aa, unidentified
MALKIVYQICCGIDVHKTFVVACIASTNKQGVTIYKRHRFSTFTQGLKELLQWLLDNHCKDVCMESTGKYWIPIYNVLEKDCNIVLAHPKYVKAIRGKKTDKKDAKWIADLFKHDLVAGSFMPPADIRQLRDLMRYRFKLTCFMSSEKNRLQNCLTVSNIQLASVVSDTFGKSSQRILDKILENPDDTSFDIEPLIHGSMKKKLPELELAIDGFITPEQAGKLKVIKKHFEDLESRKAELEKLILALASPYQQELDLILTAPSFKNKFTAIGIISEIGVNMEAFPSAKHLCSWAGLTPTNNESAGKKKSVRVSKAGCYIKPLLVQCANSVVKSEKHPEIRNRYLRLRKRRGHKKAIIAIARMLLTALYNMLKNKEPYNSELYRKSDALPVNREITIEQAILIAQFQGYKIKSAAE

SEQ ID NO: 367128 - protein, 430 aa, unidentified
MGLIVPTTLHPAREDQPLPYEWFVGIDWGSQRHQVCVLDRDRRQVGERVVDHDGASLARLADWLWTLSGGQPQRVAVAIEVPRGAIVEGLVERGFHVFAINPKQLDRFRDRHSVAGAKDDRRDAFVLADSVRTDQPSFRRLQLDEPQLLRLRELSRAEETLLEDFRRSANRLQDQLHRFYPQMLKLCSAADASWLWELIDLAPTPAHAALLSEEQVQRVLKAHRIRRVKAQEVLTCLQAPALPVAPGAAEAAQAHCAFLLPCLRVLAEQLQACSQQVSALLRALAQEPGEGEGPSDVAIVLSLPGVGRKITAWLFAEAAQPLAERDYQVLRTHGGVAPVTKQSGKRRLVVMRHGCNPRVRHALYHMARVAMQHDAHFSSVYAALRAKGQRHGQALRNLGDRLLRILMAMLRERTCYDATRIRREPVVQMG

SEQ ID NO: 367129 - protein, 398 aa, unidentified
MTESSDYESVQVFIGVDVGKDTHHAVAINRSGKRLFDKALPNDENKLRSLISDLKQHGQILLVVDQPATIGALPVAVARSEGVLVGYLPGLAMRRIADLHAGEAKTDARDAAIIAEAARTLPHALRTLKLADEQIAELSMLCGFDDDLAAQTTQASNRIRGLLTQIHPALERVLGPRLEHPAVLDLLQRYPSPEKLASLGEKKLAAQLCKLAPRLGKRLAADIAQALAEQTVVVPGTNAAAVVLPRLALQLITLRKQRDEVALEVEQRVLAHPLYPVLTSMPGVGARTAARLLTEVACRAFASAAHLAAYAGLAPVTRRSGSSIRGEHPSRRGNKALKRALFLSAFAALRDPLSRAYYTRKMSQGKRHNQVLIALARRRCDVLFAMMRDGTFYTPQGS

SEQ ID NO: 367130 - protein, 344 aa, unidentified
MANLNQFCDFTKLIGIDIAKSVFQIYSCDTQTGEITNVQIKRDKVLESLANCGKCLIGMEACGSSQYWARKLQSLGHTVRLMDPKLVKPFVRHNKSDKADAEGVYHALVSGVRAVAVKTETERDIQTLLTMRALLVKQRTARINHVRGLLAEYGHVMPKSVDQFDKKVDECINSLEGDAVQLVIDMLRDTIKSIRDEHDRIKTLQREISRLANQTRNAKHFLTVPGIGETIMAYMCVLLADPTQFSSGRQFAAYLGLVPMHTGSGGKTVTTKIPGRCDKALRALLVQGAHAEARSKYRTDWVKNILAKKPKKVAMVAIANRMARQCWAVASKGQDWRRMPVTAA

SEQ ID NO: 367131 - protein, 345 aa, unidentified
MPIVGGLDIHRKQITFDYLNTVTGEVKRGQIAPADRGHVRAWLARFAGHGDVAFAVEGCAGWRYVAGELAAAGIAAHLGEPADTAALRGRKRHAKTDKTDARHLRALLAEGRLPECWIPPAQILEYRALLETYHDLRAEHTAWVQRIHAVFFHQDAPPLAEGMLRTEPGLAGLRAAAAAHLSAAGQQQVATALDMLAATEAQLGPLRHQLRQAAAHLTGAKVLTARLYGVGPVTALALTCWLAGKDRFSSSRKAVRFTGLDITVHSSDRKGPPGRLSRQGPPVLRWAVYEAGKTHARTSAPDHGYYATVADRKNSKRAALSEARKIVRQACHILTELGDDALTAA

SEQ ID NO: 367132 - protein, 384 aa, unidentified
MAEQIFKYSVGCDISKDTFNVCILEVSQELSKVKASHKFKNEKSGFREFETWVKKHKRHDVPTGFYMEATGVYYENLAWYLFEQEYNVFVLLPYKTKHYLKSIGIKSKNDKIDAQGLAQMGSEQKHNPWRPHSKSIYVLRALTRQHESVTKLKTSLQNQLHANEHSAVRNATVKKQLNATIRLLEKQLDELAGEISNLIDADEKLNEKYSHIDQLRGISKLSWATIIAETSGFETFENQRQLVSYAGYDVVENQSGKHVGKTKISKKGNSRIRRILYMPSLVSVRLKEPALFNLYQRVHERTGIKMKGYVAVQKKLLVLIYHIWKNDKAFQSDYSKTFGEKESKSLFPFGFEETTKESSPDKRATQDEHSYELSSKVLFPLAQI

SEQ ID NO: 367133 - protein, 354 aa, unidentified
MSQNSNTSIVIVGIDIGKNSFHVVGLDQRGAIVLRQKWSRGQVEARLANMPPCLIGMEACVGAHHLSRRLKALGHDTRLMPARYVRPYSKGQKNDFRDAEAIAEAVQRPTMKFVATKTADQLDLQALHRVRERLVSQRIGIINQIRAFLLERGIAVRQGLRFLRAELSRILAAPPDVLSPRMVRVIEDLAGDWRRLDERIESLSGEIEAVARQDAGCERLMSVPGIGPIISSAMVAAIGTGDVFSKGRDFAAWLGLVPKQISTGDRTILGKISKRGNRYLRVLFVQAAWVVLIKPKSWERHGLKPWIEAAKRRLHRNVLAIALANKLARIAWSVLAQGRNFEVRKIDEAAAQSV

SEQ ID NO: 367134 - protein, 319 aa, unidentified
MTQNDLVVVGIDVAKDKVDACIRTVTERRTFPTTASGRRSLIAWLRKHQVGKAVMEASGGYERVWAKALRQTALEVRIVDPKRVRSFAESAGRLAKNDKIDAEMIAWFAETFSEAPSQVEDPAHEEIKALVKGRKSLIDLRARLEMQKEHEVPALVGKAHARLLKKLASEIAAIETAIGAKIKATPAFAVRAEIIQSVPGFAEATALTLLAGLPELGQVSNEVAAALVGVAPYDDDSGKRHGQRCIKGGRRWVRNALYMPCVGAATLNNLVFKAFYQRLIAKGKKPKAALIACMRKLIVILNTMIARGEKWDPKRYQVA

SEQ ID NO: 367135 - protein, 402 aa, unidentified
MNAVGIDVSKSKSVVAIMRPFGEIVSTPFEIKHTASDIHSLIELINSVEGESRIVMEHTGRYYEVLAHQLLEANLFVSAINPKLIKDFDNDSLRKVKSDKADAVKIARYALDKWQNLKQYNVMDELRNQLKTMNRQFGFYIKHKTAMKNNLIGILDQTYPGVNTYFDSPARSDGSQKWVDFASTYWHVDCVRKMSLNAFIDHYQNWCKRKKYNFSQSKAEEIYGKAKELVPVLPKDAITKLIIKQAVDQLNSASTTVESLRTLMNETASKLPEYPVVMAMKGVGTSLGPQLMAEIGNVSRFTHKSAITAFAGVDPGVNESGSYEQKSVPTSKRGSSDLRKTLFQVMDVLIKTHPQDDPVYQFLDKKRAQGKPYYVYMTAGANKFLRIYYGRVKEYLASLPES

SEQ ID NO: 367136 - protein, 413 aa, unidentified
MLMWCGIDWAEHHHDVAIIDEAGQPRARLRIGDDAAGFTALLELLATHRLECASDIPVAIETAKGLLVANLRAAGVPVFAINPLSVSRYRDRHSVARRKSDPGDALVLAHLLRTDMTAHRPLPADSEQARAVAVLARAQQDAAWDRVTAHNRLRAVLHEYFPAFLNAFSGKRGGIMRPEARALLATAPTPRRAARLTRTQLVSVLRRAGRVRLLDEQAEALQTMLRRDELHHPEPVETAMGHQALALLRLLDAACRNADDLAANAEAAFAAHPDAQIITSFPGIGGLTGARVLAEIGDDRSRFADARGLKAYAGAAPITRASGKSRSVTTRRTKNQRLAAAGYSWAFSSPTASPGARAHYDRRRTRGDAHVAAQRNLFNRLLGCLHHCLTTDTAYDENTAFPATPTDAAPHAA

SEQ ID NO: 367137 - protein, 387 aa, unidentified
MAKVDDLSRSLTGLDQEETLICVVELSQSSWLIAGMVPGVERQPLKKLEPDAPGLMRVIERWRDEAIRAERMITRIVLAYEAGRDGFWLARWMRARGVEVHVIHSTSVAVSREHRRAKTDRLDTAMLMRVFLGWLRGERGHCSMVAVPTIDEEDAKRPGRERESLVGERTRIINRMKAALARLGIRGFKPELRNAPARLETLRTPEEVMLPPNTLGEIRRDMARLDVIREQIKTIEQARLESIGRAPDEPAHAMVRLLARVIGVGIESADMLVREVLLRGFRDRRAVARYAGLTGAPDESGAKRREKGLAKSGNSRVRRGLIQLAWRFLLFQRNSALAQWYVERTSGTKGARKTTMIVALARKLLIALWRLATAGLVPDGVVLRSAV

SEQ ID NO: 367138 - protein, 457 aa, unidentified
MGNARARRIPAQLVEDEDYQLRHERAAGIDIAKAKGDVCTRLPPQRDGGRRASRVEDVPARAREILDLAVRLIADGVELVVMESTSDYWRIWFYLLESAGLNVHLVNSAHARQLAGRPKTDKLDAQWIARLAEMGLLRPSFVPPPEIRALRDLTRTRLQLVRDRTREWQRLEKLLEGALVKLSSVVSSLARTKTARDILEAIAAGERDPKALAALAAAHVKGGRAAIEEALEGMMPGGHHQMLIRVHLDHITFLDRSVSAVEDEIRAALDAIPAAWGIGADGVPSPDPGPGAAVLAAAARLAEIPGVSPGLATAIIAETGLDMTRFPTAAHLASWAGLAPVARQSGPRSRKPKKGQGDHYLKGYCTQAANGAARTGTFLGERLRRLSKRLGGNRARCAVARSILVIIWHLLASPEARFTDLGPDWHARSGDRDRKIRAHLRQLQALGLDVTITPTAA

SEQ ID NO: 367139 - protein, 392 aa, unidentified
MYIVGIDIGKNHHEASIVSPEGKQIGRSLRFATTHKGADSLMSFIFKNIGNSPCVFGMEATGHYWYPIYSFLKAKGYTIYVINPIQSDSLRKMYIRQTKNDSIDSFLIAEVIRFGQFTTTSMADENILAMRQLCRYRDSVISSRTEIKLRISTIMEQIFPEYEKQFSSLWLSTSMGILEKYLTPENIENTPIDELFEIIKDKSHNKLTMKKAISIREAAADTFGIKIAQDAFSFQLKQLIDRMNFLDKQIEALDCQILEYYEKFDCYLHTIPGIGIIGAATILAEIGDISRFKNSSSLIAFAGIDPTVRQSGEFNSTHNHMSKRGSPYLRHAIFLAATTCSFHNSPLNAYYKKKRDQGKHHLTATGAVARKLTSVIYAVLQDSKPYEPKSFC

SEQ ID NO: 367140 - protein, 412 aa, unidentified
MQDILTCVMGLDVHRDIIVACLAKGELGTDPEIEIRSFSTLIPEMQKLRDWVLEADCHHVAMESTGIYWQPIYEMLELCFDGQINILVVNARHMKNVPGRKTDMRDAQWIATLLRAGLLKGRFIPDKTFRELRHLTRYRKSIVHDITAQKNRIDKFLQSSGFRFAAFLSDTFGASGRNIIRHLMEYGSISREALDKCLKTQTRKRIDEILIALNGSLSEHQRGFLRMIFEHLEALEQHRHSVENAIAEEITKHEKALSLLCSIPGIDVTAAAAIIAEIGTDMSAFPDSQHICSWAGLSPGNNESAGKRKSAHINKGNPYLKSMLCEVGWVISGKRTLYLSGWYWRIKQRKGAKRATIALARKLLALIYTMLKVGTPYNEECFETRRKQSEHKRASRMVNELQKLGYFVVAPD

SEQ ID NO: 367141 - protein, 408 aa, unidentified
MARKRTLSTLDTSIAYEAVGLDLAKEDTAIAAFGPDHEGPYLIDRMPYDKLYELLADMAPTLVAMEPCSGAHQIAEQIQELGHEVMMISGRHVQAWVKDHCNGQKTDLNDAFAILNLAYDRWLTPIRGKTREECRLLALQASYRQLKGQRTKTMVHVKATLHAWGFPIRAGSFNQKVLHELIDTNREAFGDEVVETLHLMINRVRDLDHDIATVLKLLTEATKRDPRASLLRSIPGFGILTMSRWCAVIGDIARFDSPKQTMAFVGLVPNNRITGHHTETSSGREARGQGRMSKRGDKMLRSLCILGAASLCLMVRNDRLPDCPFVASIKERLASPRPWFKVLVYVAAKLVRIATALLKYGETFSFEKAGISKAVLKQWELEQAKAAKALTARKRIVRPQARLIHEMP

SEQ ID NO: 367142 - protein, 351 aa, unidentified
MPRASTVHAVIAIGIDLGKNTLHMIGLDSSGAIVLREKVSRGRIASRLANLPPCLIGIEAGMATHYVARELTALGHDVKQVPATYAKPFRQGHKNDFRDAHAVAEAVQRPTTRFVPAKTDEQLDLQALHRVRSRLVSERTAVINQIRGFLLERGVIVRQGLRFLRQLLPDILAKRADVLSPRMVRIVTELAGDWRRLDERIETVTDEIEALAKSDDSCRRVMTVPGIGPIISSAMVAAIGNGVAFARGRDFSAWLGLVPKQMSTGDRTILGRISERGNGYLRMLFMQAARVILLRPANWPKHGFGAWLARAAQRLHPNVLAAALANKLARIAWTVLAQERSYESRVKKAAA

SEQ ID NO: 367143 - protein, 348 aa, unidentified
MSQWPLNLEPGEIRMVEQIYIPLGIDISKQTFDAAIPMGGKRSKKFKTIKLSNDEEGFQQLVEWLKENQVEQVHACLEATNIYGQDLANFLYERGERVSIVNPAQVKGYAQSKLKRTKNDQADAGILSQFCRDLTPRLWKPSATEVQKLQRISRRRHALQEMLTQETNRLQLCRDAELEADIQDHIDFLKQKIEQLKKLMTELVKTHEYLAAQSELLCSIDGIGELSASIILAEVGSIPNFHSARQLAAFAGLTPREFTSGTSVRGKTRLCKIGNSHLRTAFYFPALSAIRKCPQITAFRDRLIERGKTKMQAIGAVMHKLVRIVFGVLCHQAPFDPNQLAPVVADSA

SEQ ID NO: 367144 - protein, 350 aa, unidentified
MTTIARRITGGVDTHLDVNVAAALDERGALLGIESFSTTAAGYRRLLHWLESFGTVELVGVEGTGSYGAGLTRHLLSREIAVVEVDRPNRQRRRLAGKSDPHDAVAAARAAQGGDATGLAKSRDGNVEAMRVLRVARFSARRSRTQAINQMRSLISTAPDELRAELRDLSIYKILTIASAYRYTGRTDVTTLTKLALRTLARRALSLEEEVKEIDRLLKALVNETAPELCAVDGVGTDVASAILVAAGDNPERLKSEATFAKLCGVSPLDASSGKQVRHRLNRSGDRQANSALWHIVFTRMVNDPRTQHYIERRMKDGRTKKEAVRCLKRYVSREVFAALPRSQFGLDNP

SEQ ID NO: 367145 - protein, 286 aa, unidentified
MDNFYFIGVDVSKKKLDFCVLFEGKVLREEQVSNHQQAVARLIGELKNDLEMDNEQFLICAEHTGQYTFPLVCACKSVECKLWLENPSQIKYSSGMQRGKNDKVDAKRIAIYASRFGDKVKYYDRPTEEIERLKQLERERALYVTDLAKYKGQMYDQKDFMPAALYRKKTKRMKGLIQELQAAIDAITAEMEKIIGSTEVLARQMELLMSIDGVGKVVALNVIIETEAFSRFDNPRKFCCHAGVAPFSYTSGSSQHSKNKVSHRANKNIKKQKKPATYGSRIGNSS

SEQ ID NO: 367146 - protein, 341 aa, unidentified
MSDLYVGLDLHSGNTYIGLIEQGTMKRVFEKRVRNNLEELVWTLSPYRDEIRGIAVESTFNWYFLVDGLNEAGYDCVHLANPAAIQQYKGLKYADDRHDAFWLAQMLSLGILPEGYVYPREERPIRDLLRKRSFLVKQRTAHIISLQSMIERNTGVHMSSNTLRKVKAEDIKQILKEDHLVLLGTTSLETIAFLGKNIRNIEKTVKREVKMRDAFEKLHMVPGIGDILAMTIMLEVGDISRFARVGDFTSYCRCVPTGRLSNGKNKGKGNAKNGNRYLAWAFVEAAVISLRQSPRIAGYYKRKASKTHRMVAIKTIASKLARACYYMLRDGVEFKEEMLFC

SEQ ID NO: 367147 - protein, 463 aa, unidentified
MTLGIDVACRAAHQASLADETGRFAWSGRRFRTAVADLEQLWLAIPAGAAVTVVMEPTRNAWVPLAAWFRRRGATVIMVPPEQSADLRDYYSKHAKSDRLDSRMLARLPLLHPDGLRPAEGLGPAEALRRATRLRSSLVKRRNVIIARLDSYLELLGPAWHAAFGGDLALFTPLRFLAAGYADPHAVRRLGHARLTRFIWRYSHGAWSHAHATALLAAATETLQLWDGELSYPDLAEDIAAEARLALSLSAEIRDLDVKLAALLHQADPGAILTSVPGVGIITGAQILARLGDPARFQSLAGARSFSGLVPSLTASGTSGHHGPPTKKGDAPLREALFMAANQARRTDPTLAARYHRLMVAQGKHHNSALCHISTTLLTRIIACWRAGTAYQIRDTDGTPLTTAQGRAITAQRYRVSDELRAQRRTSHTKTGTSRRHQESPRAPTPARPRTTLRPPAETLDTA

SEQ ID NO: 367148 - protein, 478 aa, unidentified
MEAKQQKQGARRPDERSWHDMNRKQRREIARRIQSEDLRLEVVHPDAAGVDIGNESHYVAVPTSRASQPVRRFGCTTAELKDMATWLKQCGILTVALQSTGVYWIPVYDILEEAGLEVYLVNARDTKNLPGRKSDVQESQWLMKLHTYGLLRNSFRPPQEVRRMRTYWRQRNDLVRSAGRQIQRMQKALTQMNLRLANVLSDVSGVTGQAIIKAILAGERDPRKLAAFRDKRVKASEEEIARGLEGNWQDDLLFMLKQEQEGYEFCQKQIAECDARLEQYLQQTADRSQGASLPEEKRKGRLQKKAKNPHFDLRTALFRITGTDLTQIDGIDVRTAATVISEAGWDMSKWENENHFVSWLRLCPDNRISGEKVIGKGRLRTNNRLATALRMAASTLRESDTYLGAQFRRLRTRLEAPVAIKAMAAKLARLVYRMLRYGMQFVDQGAIFYDARHRQRQINSLKRKAAKLGFQIVLAPAT

SEQ ID NO: 367149 - protein, 345 aa, unidentified
MSMVRSVVGGVDTHADTHVAAAVDHNGGLLGIESFPADRAGYGELLGWLVGFGEVEQIGVEGTGSWGVGLTRFLTGQDIVVVEVDRPNRQKRRKVGKSDPTDALAAARAVLSGEASVTPKTRNGPVEQIRVLMVARRSAREQRIQSLNQLRHLVFTAPEEIRTRFKDRYKTGLITEAANMRPRKGSDPVNYTTYLVIRNLARRIRGLNAEMRNIDEMITDLITETAPGLLELYGVGVDTAASLLVTAGDNPDRLHAEGSWAHLCGVTPLPANSGKVTTRFRLSRGGDRQANAALYRIVLTRMSSHDETRRYVARRRKEGLNTAEIMRCLKRYVARQTYKHLPHMI

SEQ ID NO: 367150 - protein, 338 aa, unidentified
MQTYAAIDLHSNNGVLTIIDETDRVLKQRRIPNRLEEFLAELEPFRATLQGVAVESTFNWYWLVDGLRAKKFPVTLVNTAAIQQYEGLKRSDDQYDAWWLAHMMRLGILPKGYIYPREERAIRDLLRKRATLVQQRTANILSVQNLEARNRGTKISSNEVKHLTNMRIAELYDNEDLALALTTTLTVIDALTKQTSILEKAVLKKARLRSDWELILTVWGVGKILGLTIMYEAGDMSRFAGPGNFASYCRCVDATRLSNGKKKHDNNAKNGNKYLAWAFVEAAHFAIRFYPEAKRFYDRKTAKTNNIVAIKAIAHKLARAVFHVLRDQKPFDPKKVFV

SEQ ID NO: 367151 - protein, 482 aa, unidentified
MKHSHQDKSQKASPHKEQNSWQHMNRKQRREMARKLYVGDLSLEVVHPHAAGIDIGNQAHYVAVPPDHDNKSVRRFGCTTAELKDMAAWLKHCQIRTVAMQSTGVYWIAVYDILEAAGLEVYLVNARETKNLPGRKSDVQESQWLMKLHTYGLLRNSFRPPQEIRTMRTYWRQRNDLIRSAARHVQRMQKALTQMNIQLANVLSEVSGVTGQAIIQAILTGERDPRKLAAFRDKRVKASEEEIARSLEGNWQEDLLFMLKQEQDGYEFCQKQMSECDERLQQYLRQKEDRSKGAELPEENRKERLRKKKTNKPRFDLRTELFRMTGTDLTQIDAIDVRTAATVISEAGWDMSKWPTEHHFVSWLRLCPDNRVSGDRVIGKGRLPINNRLTVALKIAASTLRQSNTYLGAQFRRLKTRLGPPIAIKAMAAKLARLVYRMLRYGMRFIDRGAQFYEAQHRWRQINSLKRKAANFGLKIIDAPAA

SEQ ID NO: 367152 - protein, 344 aa, unidentified
MEHYAAIDVSLEWSSVCVVDAAGQIVREAKVRSEREALAAFFTESGLAFARIGLEAGPLSQWLHAGLVEAGLPAILIETRHVKAALKAMTVKTDRNDARGMAQLMRMGWFRPVHAKAPMVQEIRALLTARKLLVAKLRDVESSIRGILRGFGLKVGAVSKGKFEARIRELVTGQVMLERVAEPLLRARAALRTEYTTLHRDLLRTVREDAVCGRLMTVPGVGAVVAMTFRSAIDQPERFAKSKAVGAHFGLTPKKYQSGEIDRTGRISKVGDAMVRTALFEAANVMLTRAVRFSTLKAWALRVAGRHGMKKAKVALARKLAVVMHRMWVDGTSFCWGEASVSAA

SEQ ID NO: 367153 - protein, 372 aa, unidentified
MKQSTTTYVAMDTHKKTISVAIAEGGRRGETRFLGEIPSQPEAVAKLVDRLAKKHSKLAFCYEAGPCGYGLYRQITALGHECVVVAPSLIPTRPGDRVKTDRRDAVTQASLFRSGELTPVWIPDDAHEAMRDLCRARQAAVEALRRARQQLLGFLLRHGRVYSGGENWTRKHRLWLAAQRFDHPARQIAFEELAKATDEAQARRDRLAEQMQELLPSWSLAQIVAAIQALRGIAMISAITLVAEIGDFKRFANPRQLMAYLGLTPSEHSSGAKTARGAITKAGNTRARRMLVEGAWTYRLPARMGADTLKRNEALPQAVKDIAWKAQARLCARYRRLGKAGKPTNVICVAIARELAAFVWAIATNDAIVAVV

SEQ ID NO: 367154 - protein, 422 aa, unidentified
MNALSHIRPDSVIPSAMESPGTVLAIGIDIAKQTHVACALRGTGVRVRETFSCTSQPESLQALAAWIKALRLRLRCSHVFIGMEPTNVFWRPVYAYLVEHLPDCGVYVVPAVNVHYARRMHGSNLSKTDPRDAFLIAEQILQVHCSRPIQHTPVTRQVRDTLHNYLRADHDATVWKHQLQAMLGQVFPEAFVGAGPSAAEGRLAILRDTPAPADVRAVPEAQWVKDRLKPGRSRAMLLALYRAAMSSAAPPIESPLWRDSWDIALHAWDNALRYRTALHILLGRLLQEIPAVPLLQTVPGVDLLTAAAFFAGVGDLSQYSRAAQVEKVFGFDLHRWQSGAMDSTPHITKRGYAPARRAFFLAALSACTHEPFNRWYRRHVPNKEQKGKRKSIVALAAKLVRICFCIARSGSPFDAFLAVEHE

SEQ ID NO: 367155 - protein, 383 aa, unidentified
MRSVALDLAVKKISYCEVEVGHVVARRTVTSLSSLKELLGPGCLPARIAIEACREAWHVHAELTRWGNEVLLVDTTRVRQLGVGEHGRKTDRIDAEILAKAVEKGSLPKAHLLSKPRQQLRLELSVRRTLVETRSQYVTTIRGLARTHGVRLPSCDTNAFVSHLRKVKLDQDLQELIEPMSHVLEKVDEDLARAEMRLQSIVEKDSKIQLLMTVPNVNVVVAAVFVSVIDDAHRFRNAHQVGAYLGLVPSEKSSGEHRRLGSITKEGNSYARATLMQASWGLIRLGRSDDPLQQWAKAVAHRRGKFIAAVALARRLAGILWAMWRDDTAYDAARVGFRSAAGLERQAQETKFRATAMHSAAQKARRRARPHERKLEHLKEMNL

SEQ ID NO: 367156 - protein, 412 aa, unidentified
MPKIVYPVCCGIDVHKSFVVACIATTDKNLVTTYSASKRFSTFTGDLRRLAEWLAQNNCRDVCMESTGKYWIPVWNILEPTCDLVLAHPKYTKAIKGKKTDKRDAKWIADVFKHDLVNGSFIPPADIRQLRDLVRYHFKLTSYTSGEKNRAQNCLTVSNIKLDDVFSNVFGKSAAAITSQLLERPGETFDVAPFVDRRCKTPIEEIQASVDGMMCAEQAEKLRIIRSHMDSLELCKANLVSEILTVAEKFLPQIELTSTVPGILTFSAVAVIGEIGADMSVFQTSRHLCSWAGLTPQNDNSAGKKKTTRISRAGAYIKPLLVQCALAAIKSNKHPEVRNRYLSIKKRRGHKKAIIAIARMLLTAIYNILKKNEPYNAELYGQSDKPPVKREVTVEQAVFILQRQGYLVTASA

SEQ ID NO: 367157 - protein, 362 aa, unidentified
MKKSIRERESEWKQRPDRTVGVDLGDRFSHYCVLNGEGEVLEEGRVRTSEEAFRRHWEAEPRQRIVMETGTHSPWISRLLRGFGHQVIVAKARKVRAISENESKNDRQDAEMLARLGYCNPRLLKPIQHRSAERQRDLNLIRARDTLVRARTMLINSMRGLVKSAGGGLPPASSESFAARVSAAVPAELGTATHPLLHQIAGLTVEIRGLDQAIEKLAERYPEIRILRTAPGVGPVIAAAYVLTLDGVDAVEHSRSVGAFLGLRPKQSQSGDSDPEHNISKTGNIYLRRLLVQAAQYILGRFGPDSALRRWGLKLAQGGKRTKKRAVVAVARKLAVLLHHLWRTGQHYQPFPEVAAGAGSAA

SEQ ID NO: 367158 - protein, 328 aa, unidentified
MVTIGIDAHKRSHTAIVVDEHGLELAQKTSGTTSSEHFQLLVWAAGYGSERRFAVEDCRHLSRRLERDLSAAGECILRVPPKLMAKARDGARTFGKSDPIDALAVARAALREPNLPVARLDGVERELRLLVDHREDLVQERTRAINRLRWHLHELVPGAEPRARSLTHLRNLDSLAARLDGGEGTVARLARELTKRCRELTVEIRTLEREISALVQALAPSLLAIVGCGPLSAAKIVGETAGVERFRSADAYARYNGSAPLPVWSSNRARHRLSRSGNRQLNAALHRIALTQAQWHPGAQALLARRKAQGDGGLEALRVLKRRLSDVV

SEQ ID NO: 367159 - protein, 335 aa, unidentified
MSKRTLYVGIDVSKKALEVATTVDGKEAEATKEIRNNLGGFRMLEEWTRKQSHKHGCEEIHYCIESTGVYSEKVVEYLQGRGDLMVSVVNPFVVKSFGKSLGVRTKTDRVDSELLALYAATVKPKVTEKRPEDLKELRSLVRHLEYLINRRGQEVGRLESTTNALVADSTKGIIKSYDKQIEKIKEAIEEHLRKHPDLRERTELLESIPGIGEITSKILLCELHMEGGGERISAKAQTAHAGLAPQHRISGSSVRGKPRICKTGNSRLRRCLYFPTMVAIKHNPVIRRFYRRMLENGKPKMVALVAAMRKLLVIAIGVLNNRTEFDENWDGREYA

SEQ ID NO: 367160 - protein, 414 aa, unidentified
MNTLVSNIGVSGTLIALDIAKKHHDAKIRHPDGRTSYLRIENTLEGFNRLLALTASPHEDIIAAFEPTADYHRNIAWWLHKQGVQCHLVSSVRCARAREMLFKTWDKNDRKDASVIMYLLEQGLSSPFYDPLANGIIDIQEISNTYHQVTLARTRCLNSLVNHYLTLYFPEAEQFLHMSRAEWFCQFLLQFPTPSCITSLNRDVFVKQSWDVVGRKQYKQQFLEHLYDVAANSIALPLPDDSLAVATFRLQLHRYIELSAQRLQLEKQAEKYLQKRSDYQHLRTIPGIGPVIALMVIAESGDLTRFAHYRQYLNFCGFNLSAIQSGQKHSGYRLSKRGNARLRYAFWLAATVAVRTRENSFRYKYERYLRENGDKPDQKRKAMTAVATKVARVAHAIVKQNIDYKGYYEISHGT

SEQ ID NO: 367161 - protein, 417 aa, unidentified
MKKHNNSKKKSEPTSKVKTRGPMRRDTKEVLADLVGKLKEKLDPKKPAARSAGEKHKRGELRPNLDRLTVGVDLGDQWSHYCILGLEGETLVEGQLRTTQEDIAEFFQALNAARVVFEVGTHSPWVQELIDSCGHEVLVANPRLMEGPKRRKRKNDRIDANKLARLGRVDPQSLHPMRHRSKEVRQDLVVLRAREALVAARTELINATRGLVKSMGARLPKCSSESFAQKVEEAIPGEIREALLPLVRMAAALSDSIQGYDEKIEKLGREKYGHTSLLRQVKGVGPITALAYVLTLENPDRFVKSRDVGPYLGLVPKQEDSGESQPQLGISKAGDRMMRRLLVGSAHYILGPFGPDTDLRRYGLRLCERGGKNAMKRAAVAVARKLAVLLHRLWASGEVYEPLRQGTSATIAPAVAA

SEQ ID NO: 367162 - protein, 342 aa, unidentified
MKIPVRIGMDTAKSVFQLHGVDENEVVVVRRQFRRGEMVRYFERLPPVLVAIESCGSSHHWARLLQSLGHEVKLIPPQYVKPYVKRGKNDAADAEALCEAVTRPSMRFVPVKSQERQAACMLMSVRERLVSVKSQLSNAFRSYAAEFGIVGPAGRQNVNALIQQVLENDALPKMARELFAFQAQEYAAVEARLNEIETKLMKWHREDDVSRRIASIPGVGPIGSTMLSMKAPPPEAFRSGRDFAAWIGLTPRDHSTGGRQRLGGITKAGDSALRSVLIVGATALLRHVRAGRHKPSPWLAALLERKPPKLVAVALANKFARIAWRLMVSGGVYTRPPVAMAA

SEQ ID NO: 367163 - protein, 315 aa, unidentified
MINMTLSAGVDVGSAWLDVGFHPFARPIRARNNETGVGTIVAALRERGVGKVALEAIGGYARKLVAALIEAEVKVFVVNPRRIKAFRDAEGLRAKTDKLDASLIARFAHAMAHELRPLPDAEQAILKALSTRRRQLTESIAIEKTRLKQAFDPLVLESCREMIVFLEQKRQLIERDLDRRIDAEDRMARRRAILSSIPGIGARISSLLVVEMPELGAIDRKAVASLAGLAPHPSQSGLSPGRNAISGGRPCVRAAFYMAALVATRSNSKFKSVYRDLRNAGKPAKVALIAVARRIATLANALIRQDITFQHAAFA

SEQ ID NO: 367164 - protein, 348 aa, unidentified
MAYFVGLDVSVKETSVCVVDDTGKVILEQKVPTEPADIIAVLSSLAVPFGRIGIEAGPLSQWLVNALTAAELPVICVETRHMKALLTAQQINKTDRNDARGIAQMMRVGLFKPVHVKTLAAQEQRMLLTSRKLLQRKLLDVESDLRGTLRNFGLKVGVVSRSRYEVRISELVESFPRLAAIVEPLLRVRRVMRQQLAVLHKMLLDTVRSDPVCRRLMTAPGVGAVVALTYRATVDQPQRFVHSRAVGAHVGLTPKRYQSGETDYDGGVSKCGDALLRTMLYEAAHSLLTHSGKWSWLKAWGIRVAQRRGIRRAIVAVARRLAVVLHRMWVDGSEFRWKKDSAAAPAVA

SEQ ID NO: 367165 - protein, 337 aa, unidentified
MSLMNTNPQGGVASHQSGPNAGIDVCKQHLDLCLLDCELRVANEVSGWNELTAKLQAARVDLVVVEATGGYERGLVCALQHGGIAVARVNPRQARDFAKSMGVLAKTDRVDARTLRDFADVLARHGQRSKYITPMQDEQRRALAELMTRRRQLVDMRVAENNRLEHSGKLAERSIKMVLKTLDKQLKSVDDEIDGHMDRHFSAQRKLLDSVKGVGPVTILTLTAALPELGHLDRRQISKLVGVAPLADDSGKRSGKRRIWARALAKCSRAVVYMAALVAIQHNPVIQVFHRRLIAAGKPKKVAIVACMRKLLTIVNAMLRDKTMWDAAKHVQMPAGA

SEQ ID NO: 367166 - protein, 416 aa, unidentified
MSQKLKEQRLKELAFVGVDTHKDEHTACITNCFGQSLGVFTSENRPKELKGLLEKVDETAKSHNLKPVFGLEDVMGLGQHLARSLISGGYHLKEVNPIETERKRLKNAHPDKSDPLDALAISRVLITDFDKLPTIQSLNEIYLAIHELSNRRDSLVKEKTRIKNKLHILLHREYPYYQTMFKNTFSKAALAFWERFPIASLLKGIGVERLAQYLRANSNNTVSTKKALSILKLVDKDSVPSCLNLVHSSIIRNLVKHLRFIEEQIAIVEKELEPLVDETGMKLSTLTGVDLVTAAKLIAEIGDVNRFSSSDKLARCAGIAPQQKSSGKKLKFKKSNRGRRQLNTAIYHIALSQISRDRSGKPRNSKARDYFLRKISEGKTKKEALTCLQRRLCDIIYAMMKNKTEYRFQRTTNLVT

SEQ ID NO: 367167 - protein, 399 aa, unidentified
MSALRRVVIGADTHLDTNHLAVLTDTGKPLADAEFPTSPAGYDDAVRWAQSLGTICIAGVEGTSSYGAGLTRVLQAAGIEVAEVSRPDRAARRRRGKSDPLDAYAAARAALAGDRLAVPKDEHTTALRALLSARRSAVKAHTAATNQLHALLVTAPAELRERYRRHHTTALVAALAQCRPATHGDPTTAAVLTAAKALAQRVKFLEQQRQDLTAQLDALVGQINPALRAAYGVGPHTAAQLLVTAGTNPHRLRSEASFAALCGAAPVPASSGTITRHRLSRGGDRAANNALYRIALVRMSSHSQTRDYVERQVTKGRTKKEILRLLKRAIAREVFRLLTRPGPVDDYRDLRAARQAKNLTLAAVAQHFGVPIITISRLERGHQRNDTLANHYRQWLTAA

SEQ ID NO: 367168 - protein, 386 aa, unidentified
MKNRKRDTPAIPEKDVATIFVAIELSKASWIIAVHRPLCDKISLFKLPAGDSRELLKLIDKMRDKVACLVAGPVQALSCYEAGYDGFWLHRVLFAHGVHNRVIDPASIQVNRKARRAKTDRLDARGMVRALMAFQRGEEQVFSVVQVPAVEDEDARRLHRERERLIKERVQHVNRIKGLLATQGIYHFQPLRRDRFDRFDALKTATGSSLPPRLRREIRRHLRRLELVLEMIAEIEAERDDVIKAKNPADEPGRKIQQLARLRAIGPQFSTVLVGEVFHRAFDNRRHLASYTGLTPSPFNSGLVVRDQGISKAGNPRARTTMIEVAWQWLRYQPASRLSQWYKKRVGNGTGRIRRITIVALARKLLIALWRFLETGLIPDGAEMKA

SEQ ID NO: 367169 - protein, 345 aa, unidentified
MPIVGGLDIHRKQITFDYLDTGTGQVRRGQISPADREHLRAWLARFAGREDVAFAAEGCTGWRYVAEELAAAGIAAHLAEPADTAFARGRKRHAKTGKTDCRHLRMLLAEGRLPECWIPPGHILECRALLETYHDLRAEHTAWVQRIHAVLFHQGAPALGEGTLRTGPGLAALREAAADWLSPAGQLQVATALEVLEALEARMHAVRHQLLDAARHLAGAKILAARLYGVGPFAALAMTCWLGGAGRFSSSRQAVRFAGLDVTVSSSGRKGPPGRLSRQGPPVLRWALYEAGKTHARASAPDHRYYAQVKDRCNGKRAALSGARKLLRQACHILAELGDDALAAV

SEQ ID NO: 367170 - protein, 475 aa, unidentified
MNIKGSKKKNQVLSVNIFEQQEIIAKADAIKAGLKASTWHELETKGKFDKNDKLSFVSDDMLILGCDIGSETHYVRAIDTRGRELSKSVFGFSNTAEGFESMLDWSTKLAAANDKKQIVLGLEPTGHYWFCLTTWLVAKGISVVQVNPYAVKQTKEVEDNSQLKDDKKDPKLIANLVKDGNFGMPYLPEKLYADIRRLSMFRDQLNEDRIRNLNRLHREMKIYFPEYKDAFGKIDGAFSLELLKEAPFPDGLAALGTEGMKQIWHEAKLRGRGYANASAILEYARKSVGIKDGADAGRQAVKWFVSRIIELDEQLSDIENQLNQRCNEIPYAKNILAISGIGENILSGILAEMGDISRFDDVKEIQKLSGLGLVACSSGKHTGETKISHRGRKRLRYWLFQAAKSAVAHAEEVKELHVYYTTRPDNPLKKMQSLIVIACKLLRIVYTILKKGTVYDPKKMLMDIRRPEKKEAIAA

SEQ ID NO: 367171 - protein, 322 aa, unidentified
MTTPTLSFVGIDVSKAHLDMALRPSGVGWQVDNGEAGIASLVQELVELQPTLIVLEATGGYETAAAAALASAGLAVAVINPRQARDFAKSLGRLAKTDKIDALMLARFAEAVRPEPRRLPDEQALQLQAWLVRRRQLLEMLVAEKNRLSMTHPQLRPGVQEHIDWLEKSLKDIDQAIQSHLHSSPVWREKEDLLRSVPGVGRVLAITLIAELPELGTLNRKQIAALVGVAPFNCDSGQLRGKRAIWGGRATVRTSLYMATLSAIRFNPILHTFYQRLKEAGKPAKVALTACMRKLLTILNAMMHSRQPWQPRLAANKTRILA

SEQ ID NO: 367172 - protein, 338 aa, unidentified
MAIVMGLDQHRAQITAEWIDTDTGEIGRARISPALRGDVRRFVKRFAEQRLEVALEATTGWRFVAEEFRAAGAAVHLAEPAETAARRGNKKRAKTDRADARHLRELLMIGRLPESWIPPAHLLDLRARVRLRHTLVDQRGEWQQRIQAVLYHHGFPQRNGLLTGENRAWLEALALPPSAREQVTIALQVIDSLDAQSAPITRELRLYARRQLGCRALMRHYGIGELTAVTILAELGDARRFSSSRHAVRYAGLDITVHQSDQRRAAGHLSRQGPPALRWALFEAAQAARRPGSPDRGYYDQAAERLGGNRACPALARKLLKRSFHTLRELGDEGLMPA

SEQ ID NO: 367173 - protein, 507 aa, unidentified
MEKTCGLDVHKDSVFACILDEQGKKIFEKRYGVLTPDLDELRDKLVEQGCGKVAMESTSIYWMPIWRVLESDFSQTLVNPYFIRQLPGRKSDMKDAAWIAECLQKNLLKSSFVAGEELQQMRQYSRQHRRLTKSRVRLEQQLDNQLQRCNIRFSNYVSNQGQNVSMRKIIYDIISGVRDSTKLSDKVHGRTLNKHGKQVITDSLSGVIGNADVEMLRQCMEQIELIEKQQATCLTHLEELADKHFANEISLLCTIPGIQKLSALFILAEIGGDMSAFQKATHLIGWAGLRPRNDETAEKVKNRKILHGNKYLRQILVEVSWAVSRSNKTFLGRKHNILKKRMKSQKALIAITRKLLVIIYNVLKTKQAFDPSRNLPSNETVQQSVNCAKSQCAQIANPKKSDTDSICQENLGKENIQVPCTENHIVGRTKKKLHSDSTLKQNVSTVKTVRVQKAGNGTKGSDCPKSKKEGDIAKGSDCPKSKKEGDIAKSAEKKKVGRPKKLQADKA

SEQ ID NO: 367174 - protein, 312 aa, unidentified
MNQKITYLGLDVSKTKLDLAGHSIKHTIFQNNPSGLAKLINLLLSLPGKIQIILEPTGGYERSVVMALQASRIDVSKVNAARIRSFAKGIGKLAKTDRIDAMLLAEFGQHCNPRILAPYDENLEKLRLLCDRRHQLLEAHTRDSNRLETAPTFLHHHLHDSLSFLDKQIVEINTLITKQISQNPIMKHKFDLMMAVKGVGNITATMMLAYMPELGSVDKKQIAALAGLAPFNKDSGAYQGRRVICGGRRQARCALFMASLSTARFNPILSAFYKNLTQQGKPKKLALIAVARKLIIYLNHILVKNPKISIAY

SEQ ID NO: 367175 - protein, 351 aa, unidentified
MACKITSNEAATTIGIDIGKNTFHLIGLDKKGAIVLRQKLSGRQVDSRLANMPPCLIGMEACVGAHHLGRHLKAFGHDTRLMPARYVRPYSKGFKNDFRDAEAIAEAVLRPTMKFVAIKTVEQLDLQGLHRIRERLVCQRTSVINQIRAFLLERGIAVRQGVRALRSEMSMILAMTDKLSPRMIRMIEDLCADWRYLDGRIESVSNEIKTLSEQDDGAKRLMTVPGIGPVISTATVAAIGNGDVFSKGRDFGAWLGLVPRQMSTGGRTVLGPISKRGNRYLRMLFVQAARAVLLRPRSWEKHGLKSWIEAAARRLNRFKLAIALANKLARIAWGVLHGGRQFEVRSTTPKS

SEQ ID NO: 367176 - protein, 390 aa, unidentified
MSQSFDASRSLTAFEQDSTLVAVIEMSQSKWLVAAVVPGIARQPLKKLDADAGALLKLLQRWREEARKAGREVKRIVCAYEAGRDGFWLVRWLQARTIEAYVIHAASIAVSREHRRAKTDRIDTELLMRSFLGWLRGEKRHCSMVAIPTMAEEDARRPSRERESLVAEQTRTVNRVKAALALFGIGGFNPRLRKAVQKLEMLHTADGTPLPENAQAELRHDLERLRLVHDQIRTIENERLRRLAQAPAAATGPHAMVRLIARVLGVGIETADMLVNEVLARNLRDRRAVARYAGLTGAPDESGKRRREKGLARAGNGRVRRGMIQLAWRFLIFQKDSRLVQWFRERTADGRSTTRKTMIVALARKLLIALWRLVTTGEMTEGLKLRPAGT

SEQ ID NO: 367177 - protein, 411 aa, unidentified
MDLLYPRCAGIDVHKRTAVVTLGWVDERGQRQKRTRTFGTMTGEIEQLAAWLVEHQVTHVAMESTGVYWKPVFNLLEPHVEVVLANAAHVKAVPGRKTDVRDSEWLLDLMQHGLIRGGFIPDAPIRALRDLTRYRTSVIEERTRALNRIQKVLEDTNIKLASVASDVLGVSGRAMLEAIIAGESDPEVLARLARGTLRKKHDALVQALTGRVQDHHRFLLRTLLAHVDQLTQAITELSEEIARRLEPYADAVALLCTIAGVKRRVAEVVLAEIGPDLSRFVDARHLCSWAAICPGNHESAGKRRSGRMRHGNRWLRGVLLQAAWAAIKVRGGYFGTQFRRIAKRRGDKRAAIAVAHSILTVIYYVLTRSEPYQDLGGDYFDQRKPEQRARYHARRLAELGYEVTLDPISAA

SEQ ID NO: 367178 - protein, 310 aa, unidentified
MEKVIEYPQVVEIGCGLDVHKDIIVGTISRGNQSFETREFGADTSSLTSLRDWCKQAGVTHIAMESTGIYWKPVFNILEEDFEILLVNARHVKNVPGHKTDKKDSAWLSKLLLSGLLKGSFIPPQDIRELRDMVRYNKKLIGQISSEKNRIIKILEDCNIKLSSVLSNVSGSVGTKIIDAIISGERNVDVLMGFYHGKIKTSNEDFRKALTGRITPHHVRMLQFHKKRIKDTEALIDEIDYEIEKAAEAYRVEINLLQTIDGIGKDSAIAIISEIGVDMSKFPSEHHLASWAGVSPGNNESGGKKKVPEA

SEQ ID NO: 367179 - protein, 418 aa, unidentified
MNEDGITRGPRRYIALDVHKKYSVIGGVEREGQVVLHAVRVEHADLEGWLKKNLRSTDHVVLESTTNAWHVYDLLSPLVERVVVANPAKVKQIANARVKTDVRDTFILARLLVANLVPDVWVPPAHVREMRQLLSQRRQLVETHTQIVNRMHSVAHRHHLKHERGKRFNEKNTVWQKDKRLSKVERFQLELEMENQVYIEKQISRIGKEVAKMSHQKPWAESMTYLMQLPGFGVITAMTVLAAIGDIQRFRSARHLASYSGLTGGLDQSGTHLVQKGITKEGRKELRWAMVEVAQRAVKSDPHWKRKFQEMEKRMHRNQAIVAVARQLLELVWYVLTRRQPYRHFSQERIAYKYLTWAWQMDEAARDGLTRQQFTRYYLMRLGIGQDLTRIALDPKHPRKIATETELLALRPELHHIE

SEQ ID NO: 367180 - protein, 383 aa, unidentified
MTTAIDTRDVCCVALELSKTSWVCAFAVPGESKVAIHKIKAGDTGRLMAVLTGSKARAEQQLGRPLQIVLCYEVGYDGFWLARYLIARAIHTIVFDPASFLMPRRSRVAKTDRLDAEGMTRILRRWLSGDREMARPVQIPSVEQEDAKRIERERKYLVEERISIIGRIKGLLALHGIWLDKKNIGKGLRQRLDAMKTGDGRPLAPFLRSEIERMLTRYDLISRQIADVEADRKAALNNEKGVFPHADKVRRLTTLGAVGETTATVLVAEIYHRTFLTRRQVASFVGLAPSPYKSGEVDRDRGINKAGSKLARHMLVELAWFWLRYQSNSQLSQWWHSRFGNQGMRGRKVGIVALARKLAIALWRFVEDGIVPEGATLKVRHAS

SEQ ID NO: 367181 - protein, 371 aa, unidentified
MREASTDVGMDVHKKDIVVAMLLPAAREVETWAVANEPRAVRRLARKLKREAPGIIRSVYEAGPCGYVLKRQLEAEGVPCEVVAPSLIPSAPGDRVKTDRRDAKKLAEMLRAGLLTEVHPPTQEDEAVRDLCRCREDVKQDLSRCRQRLGKFLLRKGLRYGAGRAWTERHRRWLWSLELEQRAAQATLEEYLLGIEQLETRLQELDATIGEIACAEVYRERVGWLRCFRGIDTLTAMMILAELHDFRRFTSARQLMSYLGLVPSERSSGESTRRGGITKAGNAHLRRVLVETAWHYRHKPAVGVTLRKRRQGQPAQIIAIADRAMRRLHRRYWRMLSLSKPAQKAVTAVARELVGFIWATLYPAQVDGSSN

SEQ ID NO: 367182 - protein, 407 aa, unidentified
MKRYYLGVDWADKEHEVYVGDEAGKKVAHRKVEESAEGLAEFGRWLDERRAEGIELWAAIEKPEGRIVDFLLDHGVEVYPINPKALDRARDRFRMSSSKSDPFDARVLCEFLRTDHVHLKALRPNSEQAQELKIVARDHERLERHQTRFLNQLTITLKEYYPRPLEVFDDLKSQVARDFLKAYPTPQALSGLRHSQWRRFAQRHRLGEARAEELWEELKKPQLPVPEHVIRAKAQLVEVLVEQLELSVRTLKNYSEKVQRFFASMPAAELTKGLPGGKSGTTVIKVWAELGDAPGRWACFEQLQAEAGTVPVTKRSGKSQVVCFRYACNKRLRHATYWLAFISLRQSEWARAYYDGQRKHGHSHHRALRALGAKWLKIIFVMWRDHVPYDENYHLANMARQQLCRAA

SEQ ID NO: 367183 - protein, 363 aa, unidentified
MEYIAFDAHKHYTLASVVRPDGQLVREERIEHDRGSLREFLDRCERGSPVAVETIGNWYWIVDEIEAAGCVPKLVHARKAKLMMGEINKTDRLDVRGLNRLQRNGTLPTVWIPPGALRDQRDLPRTRMVLVRQRTQLKNRIHATLAKYALHDLEVSDVFGVRGRALLRERFDRLPPHTAYASQHLLEQVESLDRQVRAFEDRIQAAFNPTPAIQLLLTMPGVGLTLAVVIALEVGEVTRFATAEKLAAYAGTTPRVHASGGKTRFGPSRPDVNRYLKWAFVEAANAICITHGRAPQRHVSRLYVRIARRKGHAKAIGAVARHLAEATFWILSKHEPYREPKASAVSSTGDKRGWPLSSRRLDR

SEQ ID NO: 367184 - protein, 415 aa, unidentified
MKYAPVSRPGPHPGGVTAGIDWASADHAVCVVDGAGEVVSRFSVEHSAEGLRALVSRLARAGVREAAIERGDGPVVDALLAAGVTVVVITPRQIKNLRSRYGSAGNKDDRFDAYVLADVLRTDRARLRPLIPNSPATVTLRQACRARQDLVRHRVAVTNQLRAHLLCVFPGAVGLFCRLDSAISLAFLARFGCQDRAGWLSEKRLAAWLKGAGYSGRISPAVLYERLRSAPGGATGEQGAASAQVTRALAAVLASLNTQIKALEAQIAGQLAAHADGHIFTSLPRSGTVRAARLLAEIGDCRARFPDPQALICLAGAAPSTRQSGKHKAVTFRWAVSKQLRDAVCDFADGSRHASPWAAKIYNDAITRGKDHPHAVRILARAWLYVIWDCWQHHAAYDPAQHRALQRLLATGQAA

SEQ ID NO: 367185 - protein, 345 aa, unidentified
METMYYIGLDVHKKTINYCVKDGSGRIYAEGSIPATRLDLDMWMKTLPQPWTAAMEATIFTAWIYDHLKPHAAAVKVAHPLMLRAIAAAKKKNDRIDAHKIADCLRCDFLPECYMASTEIRERRRTLRYRNLLVRQAVQMKNKIAVLLMEAGVSYNKQKLHKVGYFRELLATNQDIDEGLKPLLRLCRETVVRLGKTESALVRSLQRDSLLMARVERLMTIPAVGPITALTWALEVGDVQRFSSIKKAISYCGLCGAENSSANLIKRTPLSKQRNKHLQMVLIEAAKMAPRNSVDLAMIYDREKQKDNANRATLAVARKLVAYLVAVDRRQKDFVVVKSENRTAA

SEQ ID NO: 367186 - protein, 345 aa, unidentified
MGARSTAYQLYVGVDIAADTFAVALLPTGGTPAVPFTGDQTAAGFAALQRRLQATAVSPTATLVVLEATGNYWVALAVTLHEAGYRVAVVNPRQAHHCAKAQLRRAKTDALDARDLARLAAALQPAPWTPPPAVYHEARQRLVARDALLAMRTQARNQRHALLQWPVVVAGVRQHLDEIVADLDRRIASLEAEIAAVLGANEWAESLACLTSAPGIGLVTAAWLLVGTRNFARCASPAALAAYAGLVPMPRESGRSIRGRPTIGHDGNGRLRTALYMATLSAARHNPAIRVFYERLRAAGKPHKVARCAAARKLLHQVWALGTKQQHFDPYHGQRQPAPSPELAA

SEQ ID NO: 367187 - protein, 355 aa, unidentified
MDDFKYIGMDVHSATTTIAVRDGGGRLVMEATVATQAAALSDFLRGLRGRLWLTFEEGNWAAWLTQVLTPQVEKLIVCNPRRNASLKQGNKSDPLDARQLAHLLQANLLRPVYHEAAGPQTLQELARAYTTCVGDTTRVMNRIKARYRARGILCSGSRVYRPRFRQPWFEQLTDPGARQRVELLYLQLDLLQELRKKARRALLTEARRYPACSLLRTVPGVGPVRAALLLALLSTPFRFRTKRQLWMYAGLGLITRDSGQYQTVRGHIIRRDRPACVRGLNPEHNRELKEIFKGAALTATRSSSPLHAFYQQRLDQGMRPHLARLTLARKIATLTWILWKKGERFNAHDLTSQAE

SEQ ID NO: 367188 - protein, 392 aa, unidentified
MYEVFVGLDISKGSFAACAIGQEQDKIFEFSAPMNMEGFRKLTEHLSKFSKDSILIGQESSGCYHINLSAFLSDKGYQTVIINPLLISNFMKLSLRKTKTDRKDAFAIACFLTMFHDSLPQSCFLSTDFRELARERERLSSEIARLKNDIEKLLSVTFPELLKATNVYSRAILNLLKHHPSAWMIKSLPTSEIAKLLKPNGSGRKPRISPEELISLAKNSIASMSPGRELILSQKASRLLLFEEELKKLTDMLAETCRKCALEDLEILKSIKGIGDITALHFLAEVGDVSRFENYKKLIAYAGLDPTVHQSGKFEGQSRVSKRGNRHLRRVLWLMAAKVARYNQVFREYFLRRRAEGISYKKAILAVAHKLIRVIFAVLTHKTYFLAKKNSL

SEQ ID NO: 367189 - protein, 354 aa, unidentified
MKRTTKYVALDVHQATTVASVREESGRVIARSILPTEEGTILEFLKGMRGAIQVAFKEGTQAQWLYDLLVPVVDWVVVCDRRGKSRQGNKSDQVDADELSELLRRGALRAVYHGSPHRSTLRELTRTYQNVVEDATRVMLRLKALFRARGIKAPGKGVYHPKNREEWLAKLAGDGVRLRARTLYAQLDVLRELRPRVKAAMVAEARRDPAWAVLGSIPFLGPVRVALLLAIMRTPWRFRTKRNLWAYCGLAVVTHSTAEYALVDGRPVRRRRAPMTRGLNRNYNRELKDVFKGAATAATGRPGPLQDFYEGMIARGMREELARVTLTRKLAAVTLRLWKEGERYDPEKLTMQAR

SEQ ID NO: 367190 - protein, 398 aa, unidentified
MKTSGLDVHKDSIFCAIYDGKSYSIVKEFSTTTLSIRSLGQYLKSEDVKNVAMESTSTYWVPIWDILYEMGFDLKLINPLHIKQMPGRKSDAKDAQWIAELLYKNMLRGSLVPPPLVQELRTYTREYRNLVNQSTKVLTKMDRILVMSGIRLSSCISNIDSKSFIQVVEALIRGETDPEKLVKLVYGNCENKKSGKLCECLTGNMKAYHQIKLMTCKQQFDLFEKQISLYLSEMQKLCDEHFCEEINNLTTLPGLSKISAMIIIAETGGDMSVFENSGKFTGWTGLRPRNDESAGKFKSTATTKGNKHLRAIIVQVGWAATRTKESYFMDKFQKLAMRKSRKKALIAIGRKMLVIIWHILSEKTQYNPNLIRIYDPVKVEHKIKYHEREIERAKKLIY

SEQ ID NO: 367191 - protein, 345 aa, unidentified
MFVAGIDAHATYSVIAIVSNTGQLVAGPIRIKNTQEDRLNDLLGQYQPLEVVVETSPAWPWLFDRLQGNGIHFVLAHAKRLRVIAESNYKSDDIDAELLARMRLAGLIPEVHPKCTEQREQAVLLRNRARLVRERTRMVNRIHSQIHNVGLHLERGRLLTQDGRQWVRTVAWPLLGEERRLLIDMQWALVDQIVPMIKTLDRRVEHMGRGIPAVALLETVPGIGPYRALLIATETLPITRFRTPGHLVSYAGLAPRSSQSGLRPIRHGSIPAGANRWLRGTFVRAVVSHVTHAPDSWLSQSYELIRQRLGWQVARIATARRLARAVHAMLRTGEVWHDEPVSQAN

SEQ ID NO: 367192 - protein, 351 aa, unidentified
MENTTTAIETVGCDLGDKKSELFVMRPDGGCTRQTVRTSREAFNKWFSRPRAHVVFEVGAHSRWVSELLTQLGHQVTIANPRRVKAISESDTKTDRRDAELLARLGRADAKLLAPVSHRPAQAQADLAVAKARDLLVSTRTKLINHIRGTIKSFGLRLPSCSSGAFARKTRDLVPPNLQPALRPIYDSLECIDEQIRTHDRAIEVASVRYPETDAISQIKGVGPLTALVFLLTIEDKHRFKSSRLVGAYLGLRPRKSQTGNDDPELRITKAGDPFLRRLLINCANYQLGPFGADSDLRRWGLEIAKRGRKSAKKRAVVAVARKLAVLMHRLWVTGELYQPLGYRDSQRAAA

SEQ ID NO: 367193 - protein, 426 aa, unidentified
MKVMHDRVAAIDVHKDMVKVAVRVPGAKRGSRKTDVLEFRTFYGVLQEMGRELRRRGVTHVVMEASGVYTEPVYYALAGLDFTEVMVINPAHAKALKGHKTDARDALRLLDLYECGLLSGSYIPAPDLKEVRDLARYRMKTVQARASEIQRLQKTLESAGIKLDSVVSDITGMSSTAMIEALIDGERRGEVLADLARGRLRTAGKMADLSMALAGRFTDHHAMMCRLHRDRIKMFDDAVADLDARIAPLVARYAREADLLKTLPGFGDVVVAGWLGAIGPAPHQHFATAQRLASWATVCPGNYMSAKKSKGGRTGDGGNYIKPLLVQAAWAAVRVPGRLQARFHRLVRRFGGARNKGAVKRAIMAIAHTLLKIAYQILKTGTPYTDLGGDFYASRETPQARQDYLIRQLQKLNPGCVITVTPAEAA

SEQ ID NO: 367194 - protein, 409 aa, unidentified
MTTDIDLSASPVAGVDTHTDTHTVAAVTPTGRHLATETFPTTRPGYTHLAEFLSKHGVGAVGVEGTNSFGAGLTRHLIDRGYTVVEVLRPARSIRRRDGKSDPVDALAAARQVLTGEGLSTPKDSTGPVESLRALQITRKQLVSTTAKLITTMKSLLVTAPDDIRTRYATMTNHALVNALVYCRPSSDVTDPRNGVLTSLKILATTYRALRVQCDELETRIAALVSVINPHVSNIVGCGALVSADLLISIGDNPERIHSEAALAHLCGVAPLPASSGRTNRHRLNRGGDRRANSALYRIAMVRMKCDQRTREYVARRTEEGLSKREIIRCLKRAIVREIYRVICTRRSTSQPRDLRRDELKELRIAKHLTQVVVAKHLGCAPARISDIETGKRPLTELASAYEKFLKSA

SEQ ID NO: 367195 - protein, 425 aa, unidentified
MSEKIVVGIDVSKAFSDICILSPNNDIIKRLKISNDINGMKSLIYVLEKVEDEYEDRAIIIMEATAHYHQILANFFRKHNYEVIVINPIQSGALKNINIRKIKSDKTDAYNIALLYRIKNYNETITHSDTVNSIKKLCRQHKELTDEIVEHINRLIAFLDISFPDFKKVFTDLQGKTPLSLLEKYPTIQEVLSPENKQDIIKLIKENSHKSSSYAEVKYEKLFKAAEKSIEVCIVSLSSAVLIQTTVRVIFSLQEALKAIDDEIKRLSLLDEKFHKEIVLLQSIPGVGEYTACVVLSELGDISNFSKPKELVAFFGLDPGVTQSGTYNRKNNKISKRGSPHVRSILHMLAKSNVYPNRNREYLNPVMRAYFEKKIAEKPYKVVMCAIMRKMVQIIFAVLRNQKSFELRTPEEHQKLIREKSKLVA

SEQ ID NO: 367196 - protein, 346 aa, unidentified
MNATTFGVDIAKNVFQVHWVDSQTGEIKRKKLTRTKVSDFFAQRLPARIVMEACGGAHHWARTLGALGHQVELLPAGQVRAFVRGSKDDAADARAIWLAAQQSDIRRVPVKSCEQQAVLSLHRMRTHWVSVRTATLNAVRGLLYEFGVVLPQGRQLGLRTLAERRADIDARLPAPMLRLLDAQLLALQDLQRHIKAMDDEIALAQGALPAAQRLRQVKGIGLLGATALAAVLGDGSAWRNGREFSSCLGLPPGHTGTGGKVRMTGMSKRGDPYLRTLLISGARSVIATCEPTAWITAMLQRRPVNVVVVALANKLARTAWALVAHGRSYDAQWQAGAPAGSVQPAV

SEQ ID NO: 367197 - protein, 368 aa, unidentified
MKKTAYVGIDYHISKLTIAVMVEDEKDFHSTIHLENTTKVIANYLKKLSEQFQLKICYEASGSGYHFQRLLHSWGYHCDVIAPSLIPKKAGDRRKNDFRDARELARNYAAGQLTVVHPPTQYEEAVRSVVRCRLDFKENEKRTKQHINSLLISQGYCWQKSKWTLQHRKWIQQLSFSELFVQQVLKEHLAHLEYLEICTARLDQQIKKIAATDTYASSVKKLRALKGLGTLSAMILIAEITDFRRFASPRALMSFLGLIPSEDSSGGKSRFGSITKAGNRRCRTQLIESVRHYIKQPRMSAQMKADCAEVDPISAGIVQKCMHRLHKRYWALTMKGKTRNVALVAIAREFVGFIWALMTLEDTAAQAA

SEQ ID NO: 367198 - protein, 347 aa, unidentified
MKDVTTIGLDLAKHVFQAFGADVDGTPLFNRKLRRAEVLRFFERLPPCLVGMEACSSAHHWAREISAFGHDVRLLPPQYVKPFVKRGKTDAADAEAIAEAVTRKTMRFVPVKTAEQQAAVMVLRTRALLVRQRTQAINALRAHMGELGIIAPTGIANVKALAPIIRDEEDTRLPPAARFALTEIINQIEMLATQIDKLEREIVIQAKQDDEMRRLATIPGVGAIIALAVKAFVPDPAGFKSARHFAAWIGLTPKAHSSGGKERLGRISKMGNPVLRSLLTTGAASVLRHVQYRDRVWPWLKNMLTRRPFKVVAVALANKIARMIWALLTRGGVYRDPIGIEVGSAAV

SEQ ID NO: 367199 - protein, 411 aa, unidentified
MRRVIGMDIHRTFAEVVFWEDGKLRPAGRISMTRAGLEGFGRSLDKEDEIVIEATGNAMAAVHVLEPFVARVIVANPLQVKAIAHAHVKTDKVDAGVLASLRAANFLPEIWLPDADTERLRRLVARRNQVVRHRTRIKNEVHAILHAHLIPPCPHADLFGRLGRLWLARQVVPDDERAAIERHLRELDRLGEDLAVLDREIAQAAIGDPTVKRLLTITGVNLIVAAGLVAAIGDVRRFPDPQKLVSYVGLNPRVRQSGLGLAQHGRISKRGRSHARAMLVEAAWAASKAPGPLRAFFLRIRARRGHQIAAVAVARKLTVLCWHLLTKEADYQWARPALVANKVRAMELQAGQRVRKGNQRGAAYTYNIKELRDREIELARHAEQAYERFVSQWKRRGNRKQRTGAATEERR

SEQ ID NO: 367200 - protein, 340 aa, unidentified
MFYVGLDIHTTRISICVLGEAGQLVRRCQVRGIADMLGILKGLPDRFEVCYEASCGYGHYHDLLKPLAARVLVAHPGRLRLIFRSRDKNDRKDAERLAKLLYLGEAPAVHVPALDVRTWRELINCRSQVIAKRTRAKNALRALLRGAGVVPPRHPALWTKAGLAWLRQLELPTPSQQLRRDLLLEEIETLLRQGRRLEQQLNHQAQHTPAVAQLRSIPGVGIRTAEAVAAFVDDPDRFRNAKAVGRYFGLVPCQDQSGDKNRLGHITREGAPVVRQLVAEAAWQAQRRSPTVRAYFERVQRDDPQRKKIALVATAHYLVRVMWALLERGSTWEENAAQAK

SEQ ID NO: 367201 - protein, 344 aa, unidentified
MYRTRVGVDLAKKVIQICIHRNKKVQSNIELTPEAFLFWLFNNKPATIIFEACSSSNYWKQKATEAGHDARLISAKLVSVVRQNQKTDKNDALAIVQTTFMPDVTFIGGKTVEQQQLQSIKRLRELAVKQRDASQKQLIALLAELNIKIANRRGGIISSIEAVLEDATNELSTECRRAIYLAKEHLKVLFEAIRHYDDCMEKSVAAHPECKKLMRLEGVGAMNAINLYIALGCSEIGTFSKGKDAAACIGVTPIQHSSGGTVALGSIGKSKNSILRSQLICGATAAVQHAVKRKAKTKKDLWIQGLVERRGKKCAAVALANKTVRTAFSMLTKGTEYKAELLAA

SEQ ID NO: 367202 - protein, 348 aa, unidentified
MQISTIGIDIAKNVFQVHGVDAAGKPVLKKQLRRGQILEFFGKLAPCLIGMEACATSHHWARELRKLGHDVRLMPPSYVKAYVKRGKNDAADAEAICEAVTRPSMRFVPIKSAEQQGALMLHRTRDLLIRQRTQLINAMRAHLAELGLVAQKGREGVQQLMRTVADADDEQLPSDARVACQAIIAQLQAVQMQITGLEKRIHQAHRANPASKRLDAIPGFGVIVSTAVVATMTDPKAFKRGREFAAWIGLVPRQNSTGGKERLGSISKQGDRYLRRLLIVGALAVIRSARARPDKYPWVMKLLGRRPAKVVAVALANKMARMAWAILAKGEAYRAPVRSSSGAIAASA

SEQ ID NO: 367203 - protein, 360 aa, unidentified
MKQSNKINFKGQNIYIGIDVHLKSWHVTIMTDFGFKRKHSQVASALVLFEHLNHHYPGGNYCAIYESGFSGFSTYYSLKSYGIDCVIAHAADIPTGQNESVMKSDAVDSEKLARTLRERILKNPVYVPSKEILDHRGIVRYRKHLQDYISGCKSRIKHLLYSNGVIIPDCFLSSSTHWSKRFIEWLKNDVELLSPTKRTLERQLEHIENLRSEVLSVTREIRELSRSEYYAEKMRLIQSVPGIGMITAMNMLVELERIERFNNEKTFASYLGLIPTCRNSGEKTRTGEITFRGNNRLRKMLIESSWIAIRRDIALAAAYSEFCKRLKPQNAIIRIARKLSNRIFAVLKSGNIYEYDKCCQ

SEQ ID NO: 367204 - protein, 342 aa, unidentified
MQITTIGLDIAKNVFQVHGIDAKEKVVARKQLRRSQVITFFKALPPCLIGMEACATAHYWARELTKLGHEVRLMPAKDVKAYVKRNKNDAADAEAICEAVRRPTMRFVRIKSAEQQGQLMQHRTRDVLIRQRTQIINALRAHLAELGIVAAQGNAGVNELRAIVTDEQDTRLPIDARASVIVLAAQLEALESVIGAIEKRIKMQHRSSEASQRVEAIPGIGVIGATAIVATVADPTVFRSGRDFAAWIGLVPRQDSTGGKQKLGPISKQGDRYLRRILVVGAIAVLRRAKENPGKYPWLTQLLARRPFKVVAVALANKMARTAWALLAHGGTYRAPELAETA

SEQ ID NO: 367205 - protein, 287 aa, unidentified
MNDAKYIGMDVHQATISVAVGDSRGNLVMEAILETKTETILQFIRGLGGSLHVTFEEGTSAAWLYDLLKPHVTKVLVCDPRKTPLLKVGNHNDREDARKLSELLYLNRLSPVFHGETGIRTLRELARSYLTITRDLARVMNRLKAIYRGWGIPCAGQQVYAPRYRAEWLAKITEAGVRRRAEIYYQQFDVLARWRQEIRRELIAEGRKYFATRLLQRIPSIGPLRAALLIALMQTPRRFRTKRQLWAYCGLALKTYTSGEYRFVGGQLKRSKKAVAIRGLNKITITI

SEQ ID NO: 367206 - protein, 345 aa, unidentified
MPETEVDTFAGIDVSARELSVALRRGKDEDKPAMAKFSNHPSGHKALIAHLLRGGRRVRVCLEASGNYSLDLALTLQAHRQVEISVINPRRARRFAESLGERSKTDPVDARVLCEYAARMPWVSWQPPSPVALHLRALTRAIADLGAIHTQQNNRAHAAAASQALPVLVVKEMQRHQKYLEQRMTRLRREALRLIAHDPELDRRFRLMLTTTGIAETSALQILGELAVLPDMLDARQWVAFSGLDPRVFKSGKSVEKRPRISRGGSRHLRRALYMPALVALRRDPYLRGFYQNLLARGKARLQAIVAVMRRLLHALFAMFRSNQPYDGSKLCAPHLALDAVAACA

SEQ ID NO: 367207 - protein, 361 aa, unidentified
MAQARTLIGLDVHAAKIVAATLDAATGELQSFRLTGCPVEAARFCAELPAPVRATYEAGPTGYGLARELANRRVECVVAAPGKIPRASGDRVKTDRRDAENLARLLLAGKLRPVRVPGEAEEALRDLVRAREDIRGDLMSARHRLSKLPLRHGIRYHGKAWTERHRAWLAKVDLAAPAARATLADYRGAVEALILRRAELERQIVAQIPGSPLEREVALLRCLRGIDTLTAVGLAVEVGDFARFERAGRLASYLGLVPSEASSGEQRRQGQITKTGSRHARRLLVEAAWHYRHRPHLGKALAERQAGQPAAVVAISWSAQRRLNRTWTRLRARGKRPVVAVVAVARELAGFCWAITTVEQN

SEQ ID NO: 367208 - protein, 351 aa, unidentified
MNNNAKAIPVTIGLDIAKNFFQVHAVDGAGQVVLRRKLSRGEVLRFFETQPTTLVGIEACGTGHYWAREITALGHEVKLLPPTYVKAYVKRGKTDAADAEAICEAVSRPNMHFVPIKTPEQQAALMMHRSRDLLVGQRTALANALRGHLAELGIVAAKGLHRVADLLAELVGLENTKIPPLARSSLRCLASQIEAVEKQIDELEALIIEWHKGNAASQRLVKIPGVGPITASAVVATIGDASNFASARHLAAALGLTPRQNSSGGKARQGGISKAGNTYLRRLLYIGATSVIRSKRAREAGGWMAGLLERRPAKVVAIAMANKTARVIWAMLRRGEAYRAPKLPITATAMA

SEQ ID NO: 367209 - protein, 371 aa, unidentified
MEHTRFVGLDIHKERISIAVAESGRSCAVEYLGEISNDPVAIGRLCDRLERPGKTLAFCYEAGPCGYGVHRQLISLGHRCDVVAPSLIPTRPGDRVKTNRRDATMLARLHRAGELTPVWVPDVDHEAMRDLIRLRSVVRQIVSRARQHLQGFLLRHGRKHGRGTAWRMAYRRWLSTLAFEHPAQQIAFQDYVDAVMDAERPLQRVEEQISGLLPEWNLRPVVDALQAMRGIALITAVVLVAEVGDFTRFANPRQLMAYFGLIPGEQSSGETIRRGGITKTGNAHARRALVEGAWAYRMKARIGRHKVDRIEALPKVVRDIAWRAQLRLCTRYRRLSARGKTANVVNVAIAREMVGFIWSIACTVQSAPKTA

SEQ ID NO: 367210 - protein, 435 aa, unidentified
MPDRQDVFVGIDVSRRHHQCSFVTNDRKPVSKTLKINEDRKGFKTLIERMCDIAHEKGSVRFNIGLEATGHYHQNLAAFLHSIDDLDLRVSCINPVQTKRFIQMLMLREQNDKVDSRAIAEFMCVQRPDQTPQKRSEMRPLRDLSRLRDQLVSQRTACINQLHALLDQVFPEFEQVFPDIKTEPLAWAVLYRYPCPKNILAAKTSRLMTVQNRKGGRYLGEKKALQLKALAKQTIGSSKSDVYVFQIRILTQNLSSLHQQIEDTENTIENTINSMNLPPWKTIPSIGVLTMATLLGDVGDPRLFGSAKKFSSFLGLTPRGKQSGSSVNRKGHISKCGPSHIRQKLYMCVVSALATKKNPIIIDIYNRLVSKGKPKNVAIVACMNHLARVIYGVFKYNQPFDPDFSVAKKNPGLPQYGNLSTIMCGVNIPRSDNKI

SEQ ID NO: 367211 - protein, 340 aa, unidentified
MSEITTIGLDLAKHVFQVHGIDAQGTTVLRKRLRRGQVLAFFSRLPRCVVGLEACATAHYWGRELGALGHEVRLMPAQYVKAYIKRNKHDAADAEAICEAVQRPTMRFVPVKTAEQQATALLHRGREQLVRQRTMLVNALRAHLAEFGIVAAQGLRNVGELIAIVRDDGDTRLPDVARQVLQVLANQIEQIQTAVTALERQLLAWHKTNPVSQRLASIPGIGPIIATAIATTVADPKVFRSGREFAAWLGLVPRQNSTGGKTRLGGITKRGNRYLRRLLINGASANLLRSKATKADPWVIGLRRRRPPLVVAVALANKTARIAWAVMLREKEYQPRAVAA

SEQ ID NO: 367212 - protein, 345 aa, unidentified
MEITTVGLDIAKRVFQLHGVDAAGKAVLRRKLQRSEVLAFFKALPPCLVGIEACGTAHYWAREIRQLGHEVRLMPPSYVAPYVKRGKTDAADAAAICEAVTRPTMRFVPIKTAEQQAVLMLHRTRDLLVRQRTMLVNALRGHMAELGIIAPQGIARVADLLAVLLGEDTTNVPALAREALRGLAAELEALDRRVKEIEVAILTWHKDNEASRRLATIPGVGPITASAIVATITDPFQFHSARHLAAWIGLVPRQHSSGGKQRQGGISKQGDRYLRRLLVLGATAVIRHSRSKSTAEAGWLKSLLERRPARLVSVAQANKTARIVWALLVHGEAYRRPAAVPSGVA

SEQ ID NO: 367213 - protein, 343 aa, unidentified
MLYIGLDVHKEFCQACVMNKSGKVISNGRFLSTQEALDGFLDRFEDAKFVLESTGIWEFIYEGIEKRGFEVVLAHPLKVRAIAEAKVKTDKVDAEMLAHLLRADLIPRSHVPPRDIRNLRQLVRHRAYLVRQCTSIKNRIHAELLRRGIRRPDDLKKTFTFKHVGWMRSLGILTITSSLNCLEGIQEQIKEVESFLLAEYNSRKDAQLIATIPGIGFYGALLILAEIDDIHRFSHPEKLCAYAGLVPTVHQSASTMYHGGITKNGSPHLRWMLIEAVHVHTNYCPGSKLSKFHAKVAQRRGKQRATVATARKLLHTIYWMLLTKEKFHCQGFNLVEKAATLIA

SEQ ID NO: 367214 - protein, 352 aa, unidentified
MLIIGCDFHPGFQQVAIFDNRTGEIQEKRLQHRAEAEQFYRSLAGQEVRVGMEACGHYPWFERLLEELGIELWMGDAAKVRASVVRKQKTDRRDAEHLLQLLLEDRFPRIWVPSLEVRDVRQLLVHRHKQVQARTRTKNQLQAMALSHGVQKKGKLWSKAGRAELEQLPLLPYASQRRKRLLEALDALEAEIVELDRRVAEEARQRPEAVLLMTHPGVGPVTGLAMVLTLGPAERFDSAKKVGSYFGLIPSEDSSGGKQRLGKISKQGSSFLRFLLVEAGQTAARLDPQLKRFYRRLAVRKNRSISKVAVARKLATRLYLMLREDWTYAQLCQAVMQGSPSHSVAGGSEPSV

SEQ ID NO: 367215 - protein, 325 aa, unidentified
MQSQTNYTGIDISKSFFDVAFLAEGKYRYHKFSNDEAGFNGLLKVLPEGDQIVMEASGPYYLQLACYLRHRGLAVSVVNPLVIRRFSQMRMSRAKTDKKDAMMIAEYGKTEQPGLWEAPEKHVITMQQMEAVLSNLNKDRTALSNQLESFTHSGMLEKALEKILLEELEHKDGLIKGLNNSMEALAKQHYAEMLSNLESIPGMGRKTAMALIVLSGGFDRFDDYRKLSSYIGICPRLFESGSSVKGKSRICKMGMSRIRAMLYICSWSAMRCNKGCRELYGRLLAKGKAKKLALIAVANKLLKQAFAIATHKTKYNENYSNYICF

SEQ ID NO: 367216 - protein, 408 aa, unidentified
MERYYLGVDWADKFHQVWVSDAQGQKVAENKVVENKEGLAEFSRWLNESRARGIELWAAIEKPQGRIVDFLLDHGVVVYPVNPKALDRARDRFRMSQSKSDSFDAHVLAEFLRTDHGHLRALEPNSDDAQELKLLTRDQHRLGRQKTRLLNQIRVTLKEYYPRPLEVFSDLEAQIARDFLKQYPTPRALSDLTQRKWNRFAKREHHLGEGRCKELWEKLNQPQLQVPDHVVRAKAQLLLVLLAQLEASSDAVQTYNERVKHFFASMPAAKLVKTLPGAKTGTIVTMLWAELGDSNNRWESFHHLQAEAGVVPVTKASGKSHVVHFRFSCNKVMRHASYWLAFVSLNQSEWANHYYRDQRAKGHNHHQALRALGAKWLKIIFVMWRDHKPYDENYHLANITRQKMRQAA

SEQ ID NO: 367217 - protein, 360 aa, unidentified
MSDGSKEQPKITAGLDLGDKYSYLCLIDTESGEVIEEGRLRTTPEAFKRHFCSEQPLRIAIEAGTHSPWVSRVLEEECGHEVLVANPRKTRLIYSNKRKTDEIDAENLARLARLDPKLLYPLKHRAEECQAHLAIIRSREALVSCRTQLVNHVRGAVKSFGGRLPKCPAVSFHNKAPEHIPEALWPALGPILKTIGSLTERIREYDRQLETISKEHYPETDLLRQVEGVGVLTALTFVLTLEDPYRFAKSRTVGAYLGLVPARDQSGDRDPQKHISKEGDEMLRKLLVSSAHYILGPFGSESDLRRHGEKIASRGGKNAKKRAVVAVARKLSVLLHRLWVSGEIYEPLYNAHRRGEQQAA

SEQ ID NO: 367218 - protein, 312 aa, unidentified
MSEPLYVGLDVSKQHLDVAFEPTRPPQRVAQTDDGIATLVAHLQALGPALIVLEATGGYETDVATAVALAGLPVAVVNPRHVRDFARALGRLAKTDAIDAQVLALFAARVRPAPRPLPDEAQHALAALVTRRRQLVEMLTAERLRLPLAKGPIRRDVQTHIQWLEQRVKDSDRDLRAALKASPVWQATTRLLQSVPGIGPTTAAVLIAELPELGRLTRQQLASLVGVAPLNRDSGQHRGIRTIWGGRADVRRALYMATLVATRFNPVIRAFYRHLLAGGKPKLVALVASMRKLLTILNAMIKSQQPWAPTHP

SEQ ID NO: 367219 - protein, 340 aa, unidentified
MDVLYQSCAGIDVHQANIVVCILHGPLTSTRPKREMATFDTTTKGLRACHDFLSQFHVEAVGMESTGVYWRPVWHALCDDFELILAQPAHMKAIPGQKTDKKDAHWIAKLTRIGLLPRSFVPDETIQELRELTRQRKHYVESRNRETNRIHKFLQSGGIKLTTYIEDIMGLSGRNLLQLLVDGTPITPRIVHQSVYTSLKKKVPQLLEALDGYFSDHHRFMLKQSLEIYDFYQKQIELLEERITVYLSQYENHVETLDSIPGIDVITASVIISEVGVDMSQFPTSGHLASWAGLCPGNNESAGKKRSTKIRHGNSYLKKCLCQAAFAARNQKGSTLADRF

SEQ ID NO: 367220 - protein, 389 aa, unidentified
MKDELDRVLLFRVLRSEIRGASEYLVVGLDVAQERHHAFFGTASGRTLRKRFVFDNRRAGFEGLRALAGDLAARNELSKIVYGLEPTGVYHKPLLEYLVAQGEQVVLVSNVAVARNRELLDGRWDKNDLHDSANVADLLGQGRCLFADFPEDDLRELRTLVGVRARLKKQEHGLRMRVRNNLVAQYFPELADAYAQGAGANDVVVLAVVRQCFDPQAIAELSFDAFWARIARPRWGKAQEPRVRAVWEAAKVSVGCTLDAAVRWEASWLAQRLEAHREDLRDVERRMVATAQRMTGHVAVTSVPGVGPILAAMIQAAIGNPHRFEHVGQVLRLAGLDLCASRSGKQSDRAVARISKQGKAPLRFALVHAAMVAARSHPAIRTHFTVSAL

SEQ ID NO: 367221 - protein, 345 aa, unidentified
MLNIIAGIDLAKEEIQVCVCKHNKVQSNQAMTPVQFASWLASSTPMTIVFEACSTSNYWKQSALKYGHDARLISAKLVASVRQNQKTDKNDALAIAQAAQLIDVSFINGKSKEQQELQTLARLRELAVKQKVAIEHQLKSLLLEFNIRISPRQGGLHGVVQAVLEDAENGFSMLFRDALQTAWEQLMLRIDSIKKYDGYLEKAANQHAVCKSLQAIEGVGPLNAINLYIALGCGDMGQFKKGRDASACIGLTPTQHSSGGKVKLGSIGKYVKNHTIRSTLVCGAMAVVQHTLRRTAKTKKDLWIQQMVERRGKRCAAVALANKTVRTAFAMITNGTEYKAELLAA

SEQ ID NO: 367222 - protein, 331 aa, unidentified
MTDAASRDQTMPAPLDFFFFYMAKQAFVWSLHNVRGTHSAGNDMAGFQALLAALKGRRIGLITIEATGGLERELASFLLQHGLPVAVVNPRAAREFARSMGHLAKTDAIDAIALAHYAQTLAAKASQAGVQFAPPNAQVQALQAMVARRVQLLGMRTAEKNRLGGAIRVLKKSIEVVIKTLDKEVARLDKDIDAHLQQHFKEQTKRFEAIKGVGVTTCAMMLAFMPELGHVDSGRAAKLAGLAPLNQDSGRARGKRHVWGGRSVVRSTLYMATLSAVRFNPAIKTFYDRLLAAGKPKKVALTACSHKMLRILNAMARTGQPWTDEFHAITP

SEQ ID NO: 367223 - protein, 416 aa, unidentified
MRKKITWKTGGVARNELIVAVDIGMRKNTGYFRSFEGAERVPFDFFNDGHGYVWFYEKMIRFTREHGLERAVVGFESTGVYGLPFLHFLLKRGVRMVQVNPMHTKRLKELTGNSPNKTDKKDPRVIADIMMLGHMLSVVVPEGASAELRELTHARERAMSRRTTVYNQLHDRVFVMFPELVVIMKHLDSASARHLLRNHPTPEEIEALGVDALGMVFRKVSRGRFGNDHARKLVEAARSSAGIREGRTSILVEINYLLDEFDRMKVFIKGLENRMEQYVEKVPASQYLFTIKGMGLIGVACLIGEVGDFSNFRKADELVKLAGLNLYEVSSGIHRGKRRITKRGRPLMRKMLYLMVLNMVKSGGIFHDRYQGMIQRGMPRMKALVALSEKLLRIAWGVVRKQTAYQPMVSCVKRAA

SEQ ID NO: 367224 - protein, 342 aa, unidentified
MKQYVGLDVSQKETSVCVVDEVGQILFEGKAKSDPGALAALLRKRAPQAERIGFETGAMASWLWHELRRIDFPVVCIDARHAHAALSVRMNKSDQNDARGLAELVRVGWYREVKVKSEESQKIRAILVARSRLVAIRRDIENQVRSLIKEYGLLFPRAIGLQFRNQVRELLGEDHQLFGVIAPLLSIHEQICKQQSKFDNEVRELAKSDETTLRLMTVPGVGVVTALTFRHTIDDPSRFRSASTVGAYLGLTPRRNQSGETDINGKISRWGDRLLRTYLFEAATVLLYRTKKWSSLKAWGMKLAKRIGMRKAKVAIARKIAVILHCIWGDGTSFDWGQPQPV

SEQ ID NO: 367225 - protein, 278 aa, unidentified
MSRSTNLSVAPMGIDIGKNSFHVVGLDQRGAIVVRQRWTRSQIRARLANMPPCLIGMEACVGAHHLSRRLHSLGHDARLMPAKYVKPYRKGQKNDFRDAEAIAEAVQRPTMKFVATKTADQLDLQALHRVRARLVSQRTGIINQIRAFLLERGIAIRQGLRFLRAQLPEVLGKRTDVLSDRMVHVIEDLAADWRRLDERIQGLSGEIQIVASQDPGCKRLMTVPGIGPIISSAMVAAIGSGAVFSNGRDFGAWLGLVPRQLSTGDRTILGKVSKQGNR

SEQ ID NO: 367226 - protein, 344 aa, unidentified
MSNLDTCGIEVSAKELVVRLRRQEDLEPLRTFTNTPEGHLIILRYLRRAGRVVRVCMESTGLYGLDLALALSGQEGIEVMVANPRAVRHFAHALMQRSKNDQIDAGVLEQFAVHMPFKPWQRPSVAMLALHALARRLRELVEMQTAEKNRQHAAGLSKAIPAVVRRDLARSLRAQERAIGRLTRQARKLIAQDPQLTERFELLDSVPGIGETSAVQLLGELGVLAPDLGARQWVAYAGLDPRQYTSGTSVHKKPRISKAGNKHLRHALFMPALVAVQHDPHLRAFYQHLLAQGKFKMQALVAVMRKLLHALHAMFKTHQLYDGSKLFRLKPAPAQEVTHVLVAC

SEQ ID NO: 367227 - protein, 309 aa, unidentified
MKEQLVYLGVDIAKAYLDAAVGNEKRRFSNDAIGHRELIKWVKQLKAPVQVICESSGGYERALVQGLARARVKISLVQANRVRQFARAAGILAKTDRMDAKLLCAFGEAMKPGIISASQLEQEQLRELESQRRHLTHLLVMELNRGARVSDACVQKLNRSLINQIKKQIEQLDLLIKGHIDQSHELSAKAAKLTSISGVGARTAALLLAQLPELGELNRREIAALVGVAPFNRDSGRMRGKRAIYGGRKPVRHGLYMAALVAAHHNPILRNFYLRLRAAGKPAKLALTATMRKLLIVLNSALKTDLSYA

SEQ ID NO: 367228 - protein, 482 aa, unidentified
MHPLTTNISPPTCDVHRFGFESAGALEIINEYSGLAVAPAHLYCFRRSQAGMPHTFNLAHGRDVMREERLSQYTAYIGLDWADTKHDVCVQSAESGEREFSVVNHNPKALDEWVKELRKRFGGMIAIAVELSKGPIVSVLQRYDFIVIFPINPSTLAKYREAFQPSRAKDDPTDAELALDLLVRHPHRFKPLQPQSAKIRTLATLVEHRRQQVSDKIRVTNRLRATLKQYYPQILEWFYHIDTPLFCAFFKRWPTLIQAKRARATTLRKFFHEQHMYRETVLERRIAAIKDSLPLTEDEAIIVPFHLNAEVLVAQLDLALEAVDRFDKKIEMAASKHPDYELFKSFPGAGSSLAPRLLVAFGEQRDRFGNAADIQMYAGVAPVTERSGRKHWVHWRWQCSTFLRQTFVEWAAQTINKSYWAGQYYYKQREKGLTYQAACRSLAFKWIRIVYRCWQTGTHYDESKYLKALELRGSPLITQRSG

SEQ ID NO: 367229 - protein, 315 aa, unidentified
MIQTNTTTAGIDTSKAKLDIAVHGRTERWQVANALPGWGALAANLAEAGVTRVGIEATGGYERGVVEHLRAAGFTVLMLQPLQVKAFGRVHLRRAKNDALDAVLIAACAAALDPPKIAPDPRLSELADYLTFLEQIEEDIRRFKTRLEHIDEPALRRLVNSDIARLKVRKAAQIRDIAKRLRSHDDLAKRLKLVLSIPGIGERTALAIVIRMPELGRVSREEAAALAGLAPFDADSGQYRGQRKIAGGRSRLRRSLFAAALPAAFRWNKALVALYTRLIAKGKVHNAALIACARKLLIYANTVVQRGTPWTEKAA

SEQ ID NO: 367230 - protein, 500 aa, unidentified
MKTKRSKAKIGVGQKRRSVICSEPEQKLEILRPDAAGIDCGAQEHYIAVPPDRVHAGEPTVRCFRAFTEGLDAAIDWLKACRISTVAMESTGVYWIPLHQKLEAAGIEVYLVNARHVRHVPGRKTDVQDSQWLRQLHRFGLLNASFRPQDIICRLRSLHRHRDNLVSSSASEIQHMQKALQQMNLHLHHVVSDITGLTGLRIIDAILTGQRDPEQLVKLRDKRVYKSTPQQMQAALVGDYRPEHLFVLSQSLQAYRFYQARIEECDREIEPLLEKLAQQVEAASAKLNLDALRPSSAKDGARTPEPLPESKSASGLKAKRKHKPRANEPKIELAGLLERICGIDLTRVVGLNVLNVLVIVSEIGVDMSKWRSAKAFCSWLGLCPGNKISGGKLLDSRTRQVVNRVADALRLAAQSAGRTETCLGIFYRRKLAHLGAPKATTATARKLACLIYHLLKYKQHYHEPDPAIYQLRLKKSALTKLQRQAIALGYTLLPTTPPPA

SEQ ID NO: 367231 - protein, 387 aa, unidentified
MPQPNDLSRSLVALDQDSTLVAVIEMGQASWLVAAIVPGINRHPLKKIATDQEQLLQVLQRWAKEAETAGRMIKRIAVAYEAGRDGFWLARWLRARGIEAYVIHPSSVPVSREHRRAKTDRLDTELLKRAFLGWLRGEPDHCSMAAIPTLTAEDAKRPGRERENLVGERTRIVNRIKGALARLGIRNFKPMLRNAPQHLETLRTPEGVPLLPNTLAELRRDMARLSFVKRQIKEVETARIERLQQAPGEGGNAMVHLLTRVVGVGVETADMLVQEVFSRNLRDRRAVARYAGLTGAPDESGKKRRERGLAKSGNARVRRGMLQVAWGFLVHQPDSVLAEWYRARTADARGATRKTMIVALARKLLIALWRLATAGEVPEGLVLRAAA

SEQ ID NO: 367232 - protein, 390 aa, unidentified
MNNTTVYVGMDVHKESFTLCAYTLEKEKGSYSRRTPADYKEVLKYLEFLRTVYGNDTIFVCGYEAGCLGYTLYHQLTDHHVDCVILAPTTMLEQRGKKRIKTDKRDAEIIGKCLAQHNYSPVHVPTASDEEVKEFLRMRDDHKLALKKVKQQILAFCLRHNYRFDGNSHWTAAHINWLKSLTPEALYKEILDEYLLTYTILSDKLERLDKRIEELAAKDEYKEAVRKLCCFIGVKTHTALSVIVEVGDFKRFASAEKFASYIGLVPGEDSSGDGQTRLGITKAGNRHVRMLLTETSQCYSRGQIGYKSKALKARQDGNTPQVIAYADKANERLRRRYYKMVLSKCKKHNVAKTAIARELACFMWGMMTDNRGVKGTVLLTPAKLVFNASS

SEQ ID NO: 367233 - protein, 436 aa, unidentified
MIRLGPFLYLIYSIGGDYMSQELSTLYVGIDVSKESNYTYITNFNQSFHQSFNTLNNMHGAELIESNLIEILDDNDYTDIICVLESTGIYSAHIATYLSASEKLFSYNIFVYCINPKISRNYRASFSDMDKTDPKDSYILADIARVGRTKSMTPFKGSQKLALQRLTRHRVHLAELLAKEKTYVLTNIYLKFSEFGKPDFKFTSNKWSQTAISVLEEFSSPDEIVNTSLDDLVEFIIKVSKNGFSDPEAIAKSLKKAAKASYRLDRTAYEPINHAISSSLVVIRTYEAEIKKINKSIEILLKGFAVNEYTSLRSIPGIGPVYAAGIISEIGSIHQFDNEASLAKYAGITWRKNQSGNFEADDTSMTKTGNHYLRYYLIEAANLVKNYVPAFNVYYHKKFNEVTKHQHKRALALTARKLIRLIYGLMSKGQLFNKNY

SEQ ID NO: 367234 - protein, 347 aa, unidentified
MKYVGVDIGKKKCRAAIMNPQGRIVKELDFNNNSDGIASLTLLLSMDDKVVMESTGPYWLDLYNQLDELHIPVVLANPLRTKAIASARIKSDKVDARILAHLLRTDLIPECYVPPKEMREIRSLVRHRLSIVKLRTMVKNKAHALIDRNGLKHEFSDLFGKAGIQWLKSLELSGLDRLMLDNYLMHLENLDLQIERVDAEITSRASFDSDVRLLLSLKGINVYSALLIKSEIGSIERFSDYKKLVSWAGLAPSLHQSGDIEYHGNITKQGSTMLRWIMVESARVGSVFDPRMKAFYERVAKRRGDQKAVVAVANKMLKIIWFMLTRKEPYESVDEVRYAKKLKSLNG

SEQ ID NO: 367235 - protein, 402 aa, unidentified
MNAVGIDVSKGKSMVAIMRPFGEIVSAPFEIKHTTSDINSLVELINSVEGESRIVMEHTGRYYEVLAHQLSEANLFVSAINPKLIKDFDNDSLRKVKSDKADAVKIARYALDKWQNLKQYNVMDELRNQLKTMNRQFGFYIKHKTAMKNNLIGILDQTYPGVNTYFDSPARSDGSQKWVDFASTYWHVDCVRKMSLNSFIDHYQNWCKRKKYNFSQSKAEEIYGKAKELVPVLPKDAITKLIIKQAVNQLDNASTTVESLRTLMNETASKLPEYPVVMAMKGVGTSLGPQLMAEIGDVSRFTHKGAITAFAGVDPGVNESGSYEQKSVPTSKRGSSDLRKALFQVMDVLIKTHPQDDPVYQFLDKKRAQGKPYYVYMTAGANKFLRIYYGRVKEYLSSLPEV

SEQ ID NO: 367236 - protein, 387 aa, unidentified
MAKQNDLSRCLVTLEQDATVIAVIEMGQSSWLAAGIVPGLERNPLKKLSPDPDALLQLLHRWQKEAVQAGRAIKRIVVAYEAGRDGFWLARWLRAREIEAYVIHPSSVPVSREHRRAKTDRLDTELLKRAFLGWLRGEPKHCSMAAIPTVADEDTKRPGRERQSLVGERTRIINRVKANLARLGIRGFRANLAQASSRLEALRTPEGIAVPANTRAELQRDMDRLRFVKQQIKEIETTRAKRLAGAPNEQRHAMVRLLAQVVGVGIETADMLVQEVFSRNIRDRRALARYAGLTGAPDESGKKRRERGLAKAGNARVRRGMIELAWGHLLHQKASALTEWYRKRTSDTRGGTRKTMIVALARKLLIALWRLVTTGETPAGLLLRPAV

SEQ ID NO: 367237 - protein, 358 aa, unidentified
MRIIGVDLHARQQTIAMLDPETGELVEKTLKHEGETVREFYSALPHPVLVGIEATGSMYWFLELLEELGIERQVGHPAEIRAAEPRKQKHDRRDAALLLKLQVENRFPSIWVPSTELRDLRALLRHRHQWVRMRTRVQNTLQAIALSHGLRRGQSLWSQAGQQAIASLPLAPHAAHRRTELQALNCKLGKQIDELGERVMDQALQRPGAKLLMTHPGVGPITALATDVFLGDPARFDDGKAVASYVGMIPSEYSSGGRQRLGGLSKQGNPLLRFLWCEAGIHAVRRDPELKRFYRRKLQQKGLGKTRVAVGRKLGIRLWIMLRDQIDYQEFCRRGQMRQKSGGARAGMPEGVHSPARS

SEQ ID NO: 367238 - protein, 343 aa, unidentified
MKHYAAIDVSLELSSVCVVDASGKVVKESKVETHPDALVKFFKDLGLPLTLIGLEAGPLSQWLHAGLREAGFETVLMETRHVKKALSASTVKTDRRDARGMAQLLRMGWFRPVHAKSVGSQEVRALLVARKQLQHKLTDIELSIRGILRGFGLKVGKVTKTAFAKRIRELVTGHPMLEQIAEAMLAARATLLEQFNKLHKAVLAIVRRDEVSRRFMTAPGVGAIVAITYKSALDDPSRITKSKNAGPLFGLTPKRYQSGETDVTGGISRVGDEMVRTALYEAANAVLSRRGRFSTLKRWGLEVAKRRGNKRAKVAVARRLAVILHRMWIDKTTFRWTKTEATV

SEQ ID NO: 367239 - protein, 475 aa, unidentified
MTAGKSKEKDGAAAGQGGGDGAEVAEERTEVVTHAAAIDVAKGSGMVCTRVPGSRPDRKRQTVWQVDADYASVVALMDHLRCQGIRRLVLESTSDYWRIWYYLAEAAGLQVWLVNARDVKHLPGRSKSDREDCVWLCKLNERGMLRRSFVPPQPVRDLRSLTRTRSRLAQDQVRHQNRVEKILEDALLKISCVISDLFGASGRRFLEALVAGERSPAALAALGDARLHATPGQLADALTGRFREIHAFEIATHLRLIDAIDEEIARLDAAIEQQLASIPGVAPACTSCGLIGGGHSPGCAADGTPVLGLVARLDEITGVGARNAQVIIAELGTDMSVFPTPAHAAAWARLTPRTLQSGTTARPGRTGKGNPYLRGAFGQCVMAAARTDTRLGEQYRRIARRRGKQKAIVAVSRVVCEIACILIADPAARFADLGASYYSSLNPRRQTRSKIRELERLNPGMKVILTPAGPLSTAA

SEQ ID NO: 367240 - protein, 327 aa, unidentified
MDDVGKIVREVKVASEPEALLAVLKNPAYHFKRIGLEAGPLSQWLYSALAGAELPVICVETRHMRAVLKAQINKTDRNDARGIAQMMRAGLYRPVHVKTLRSQKLRMLLTHRKLLQAKAIAVENDLRATLRNFGLKVGVVGTVKFEARIKELVEDVPDLAVLVEPLLVVRRVLREQISVLHRRLLAIVRDDDVCRRLMTVPGVGPVVALTYRVTVDVPVRFRKSKSVGAVFGLTPSRHQSGESDRPGAISRCGDEMMRSMLYEAAQILLVRSTKWSWLKAWAMKIARHRGMKKAIVALARRLAVIMHRIWVNGTAFRWTQEQAAAAT

SEQ ID NO: 367241 - protein, 341 aa, unidentified
MNVKTIGIDLTKNVFQIHGVDEHGKRLFNKQLRRAQMASFFANIPPCLIGMEACASAHFWANKLISMGHNVKLMAPQFVKPYVKTNKHDAADAEAICEAVTRPNMRFVPVKTAEQQAVLALHRSRQSFIKQRTAQANQIRGLLAEFGIVVPRGIQQLQRRLPELVEDADNPLPVLFRTQLSLLQHHMAYLFDVIATLDKQIEQCYRQNALCQRIGKIPGIGPVTASALIATIGKANNFENGRQLAAWLGLVPRQHSSGGKQVLLGISKRGDTYLRTLLIHGARAVLQSAKHKQDAVSSWANQLMARRNNNIASVALANKNARTVWALLAKEREYCAPIISA

SEQ ID NO: 367242 - protein, 339 aa, unidentified
MKLYAGIDLHSNNSYLAISDEEDNRRYKKRLPNQADVILAELEPYHDDLVGIVVESTFNWYWVVDMLMDNGYKVHLANPAGIQKDKGLKYSGDNHDAFWLARLLRLGILAEGYIYPKEWRPVRDLLRKRGHLIKLRTSLINSLQGIISRNCGCQLPGKKIKQVRTNHVAPLLEAHTDLALSGSVSKECIDYISQKIREIEVSVESRVELLAPFAGLQTIPGVGKILSLTIMLETGDIGRFEKVGNFSSYCRKVPTSWTSNGKKKGRGNGKNGNRYLAWAFSEAAEFLRRYDQSARAFYNRKTAKKNFMVAHAALAHKLCRAAYFIIRDGVEYNPHKLFA

SEQ ID NO: 367243 - protein, 320 aa, unidentified
MNQENSFIGIDVAKARLDIAIRPTGRQWQADHTEKGMQELVEQITELHPTLVVLEASGGLEVPMVAALAVANLPVVVVNPRQVRDFARATGKLAKTDALDAHALAHFAEAVRPAYRSLPDPETQSLNALVARRNQVMSMLVAEKNRLRTSRPPVIQRIQVHIAWLEQELDEIDRELKEMLHNSPVWREKENLLRTVPGVGPQLAVSILAYLPELGTLNRKRIAALVGVAPFNRDSGTLRGKRAVWGGRSRIRASLYMAALVASRHNPVISAFYHRLLAAGKAKKVALTACMRKLLVILNAMLKNHSSWQSLNPQLPGSCS

SEQ ID NO: 367244 - protein, 353 aa, unidentified
MEQFIGCDAHKNFSVFVAVNEKGQAGEALRVAHDRQQYREFLARLPPHSAIAVEASGSYSWLVDEMERSGHQPKLCNPLEAKRRMGLTHKTDKLDARGLAILLRNGTLPEVWIPPSELRDQRELLRLRIFLVRLRTRVKNRIHGTLKRFNVQVPGADLFGVAARRLLGARLPELPEHTRGAMEQELATLDFLETEIESAEQRLQAIMQVSVEADLLKTLPCVGPILSMVLMLEIGRVDRFPTAAHLASYAGLVPRVHSSGGHTRMGQVCGNVNRNLKWAFVETGNLIVINQRKLAGSHVVRLYQRIRRNKNHQKAVVAVARHLAEAAWCVLTRLEVYREPHGSRQQALSSTHG

SEQ ID NO: 367245 - protein, 340 aa, unidentified
MGEITTIGLDLAKQVFQVHGIDADGTTVLRKQLRRSQVLSFFSRLAPCLVGMEACAAAHYWGRELAALGHEVRLMPAQYVKAYIKRNKNDAADAEAICEAVVRPTMRFVPAKTAEQQAALLLHRGRERLVRQRTGLVNALRGHLAEFGVIAPQGLRNVGKLIAVVRDPSDARLPDLARQVLEVLAAQIEQLEGAVAAVEKQLMAWHKSNPVSQRLATIPGIGPIIASAIAASVAEPGGFRSGREFAAWLGLVPRQNSTGGKHRLGGISKRGNQYLRRLLINGASANLLRSKATKADPWVIGLRRRRPSLVVAVALANKTARIAWAVMQRNENYQRMAAAA

SEQ ID NO: 367246 - protein, 464 aa, unidentified
MASLFFGIDVSKGYADFCCINQAGSRIGEIAKFDDTPSGHTAVKLIVESLRTKHPDAQMVFGLENSGGLERNWAVFLKDLVTPFDGRVFTLNPLAVKKFLDRDLHRNITDAVSAQGIANYLRQGMRPAEVPFEDSLSGPISLYRCLRNAISRCAQMKNELQSLLPRVQPELVQFCRHGLPAWVLEILHRWPTASKLSIAKMVQLVKVSHVTEKRAEKLILAAQESVASQGDSSTEVTVSLLAKEILHSQEIILTMKKHVIESLANDEGIKIIQSIPGIGAWGATCLRLEIGSIERFPSPEALVAFAGLDPRIKQSGDSTKHIGISRRGRRQIRAILYPLTLSAVRCNPAVKEFYSRLRGKGKGHKVSATACMRKMLHIIYGCWISRKAFDSNHEKNRQTQEPKPTVIPSQIENSQAKEKIYILKIDAPVSRREANKRRKAATMPQTSITRRERGLGAASKNNAT

SEQ ID NO: 367247 - protein, 338 aa, unidentified
MKLYGGIDLHSNNNVMAIVDERDRVVYQKRLPNDLDTILKRLAPYQSELEGLVVESTYNWYWLVDGLMEAGFRVHLANPAAIKQYEGIKYTDDDSDACLLAHLLRLGILPEGYIYPKEERPVRDLLRKRAQLVRQKVTQILSIETLMTRNTGQSISANEVKRLTEEQVEYQLPVPELALAVKSNLAVMRCLEERIALLEEAVMARVRLKKEFRSLLSVSGIGPILGLTVMLETGDLRRFATVGDFSSYCRCVESKRLSNGKKKGVGNTKNGNKYLAWAFVEAANFAVRFNPKVRAFYQRKRAKTNGIVAIKAVAHKLARASFYVMRDQVPFDVNKAFA

SEQ ID NO: 367248 - protein, 392 aa, unidentified
MIYVGIDVAKDKHDCFITNSDGEVLFKPFTIPNNRDGFETLFQRILSVSDDLNKVKVGLEATGHYSYNLLGFLLDKGCHTFVINPLHTNLYRKSLSLRKTKTDKVDSRTIATMMMSDMNLKSYSNTSYHNEELKSLTRYRFDKVKERAKLKTSVSRLVCILFPELEKLVPTLHMPSVYALLSELPGANAVASAHLTRLSNLLSESSKGRYGKDTAVIFREAARNSIGSVMPAKSLELKHTIKLIQELTSEIDEIETAIKRIMDEEIQSPILSIPGISYRMGAMIIAEIGDFNRFDSADKILAYAGMSPSTYQSGQMDNCYAHMEKRGSRYLRYALYNATKYVCHWDESFGAYLEKKRSEGKHYNVALSHAAKKLVRLIFAMEKSGQAYVPAA

SEQ ID NO: 367249 - protein, 465 aa, unidentified
MKHNPGRHRRRPRVSPSVLERINLNVAGIDCGSAEHFVAVPPDRDPTPVQSFKTFTGDLHRLADWLAACRVTSVAMEATGVYWIPLYEILEARGFDVVLVNAKHVKNVPGRKSDVLDCEWLRELHSVGLLRGSFRPVDAIVALRAYLRHRETLVQSAGTHIQRMQKALVQMNVQLPIVVSDITGVTGLRILRDIVAGRRDPHALAQHRDPRCRATHAEIVAALTGNYRPEHLFVLTQNLQLFDACQDQLAACDTAIEAHAHTLTARVDAPAAPLPDARVTRKPRANEPRFEIRIPLHQLTGVDLTQIDGIAPYTALKLVSEIGMDMRRWPSEKHFTSWLTLAPKNKVSGGRLLSSQTQPSANRAAAILPIAAMSLGRTQTALGAFYRRLAFRVGKAKAITATARKLAVLVYRTLKGDLAYCDSGADAYDAQQRTRVLRRLRQRAATLGFDLVNRGTGEVLEGAVS

SEQ ID NO: 367250 - protein, 338 aa, unidentified
MKTYAGIDLHSSNSFVGVINQDDKKLHSRRHENNLKEISKVLGKYKKSLQGVVVESTYNWYWLVDGLLEQGYKVHLANPAAIQQYKGLKNRDDKYDAFWLAHLLRLGILPQGYIYPKSLRPIRDLFRRRIMFVKQRTTQILSLQSMIARNKGVEQSASAIARFRDDFINQMFDCPHLVSTARHQIETIRFLEKQIKDIEAEVEGIVELDKAYQKLLSIPGIGRILAMTIMLEVGDIGRFETVGNYSSYCRCVKAQSTSNGKKKGNNNRKNGNRYLSWAYVEAANHNKRNCPRARKFVERKTAEKNYTVAIKALANKLSKASYFIMRDQTIYDPSLLFG

SEQ ID NO: 367251 - protein, 355 aa, unidentified
MKGNRTMIMLGIDAHKRTHTVVAVDDLGRQLGTRTTNATTTAEHLAIIRWADRFGSQRSWAVEDCRHLSRRLERDMLAAGERIVRVPPKLMAHARDAARTYGKSDPIDALAIARAALREPHLPVAHLDDVSRKLRLLVDHREDLVAERTRHINRLRWHLHEIDPTWDPSPRAFTTFKHLAIAEQRLRALDTVVARIALDLVGRIHALTVDIKSLAAELEERTVKTAPSLRKIHGIGPLAAAKLVGEVAGIERFRSRHAFARHNGTAPLPVWSGNRERHRLSRTGNRQINAAIHRIALTQARSYPDAIAFITRRVEAGSNGKEAIRSLKRRLSDVICRAMLADAAHLREQQSHVAA

SEQ ID NO: 367252 - protein, 354 aa, unidentified
MSKNRKAVARDQDSSIPGSETPSKKVEEVEEAKQPVDVGGYIGIDVSKLSLDVADRPTDEEWRFDNDEAGLSGLVELLKTRAPKLVVLEATGGLEMAVVGALLAGELSVAVVNPRQVRDFAKATGRLAKTDRLDAKVIARFGEMVQPEVRAFPDQATQELKTLMARRRQLVEMLISEKNRRHIVTKTIRPKLEEHIEWLQTAIAEIEGEIGQAVKASPAWREKDELLQSVPGVGPRVSSTILADLPEIGQLTRQEIAALAGVAPFNRDSGRYRGQRRIQGGRRTVRSMLYLAALVASRHNPIIKAMYERLLAAHKAKKVALVACMHKLLTILNAIVKHNTPWDADHAKTGSATA

SEQ ID NO: 367253 - protein, 313 aa, unidentified
MPKTYVGIDVSKRHLDVARYPQTQAWRVAHDEAGISAIVARLQELAPALIVLEATGGWETALARALTEAHLPVAVVNPRQVRDFAKATGTLAKTDRLDAQLLARFGATVHPEPRPLPDPATQQVQDLLARRRQLVEMLTAERNRLGQAPAHLRERIAKHIEWLEAELAEVEGEVEAVEQACAAWQQQRQLLQSVPGVGPVVARTLLAQLPELGRLNRKQIAALVGVAPFNRDSGTLRGKRAVWGGRAAVRAALYMAAVAAVRCNEVIREFYQRLRAAGKAAKVALVACLRKLLTILNAMVRHGTPWRSPLRST

SEQ ID NO: 367254 - protein, 413 aa, unidentified
MAQEETLSWFAGVDWGSEKHQACVVDAQGRIVGEREFPHGGTGLAELGDWLLAIAGAAGTVAVAIEVPHGPVVDSLVDRGFVVHAINPKQLDRLRDRFSIAGAKDDRRDAYVLGDGVRTDRRLFRQLHVSDPRLIELRAWSRLAEELKEERVRLSNRVGQQLWRYYPQMQKLTDDLAASWFLELWAIAPTPVKAQQLRKPPVESILRQHRVRRVDADTVLQTLREPAIKVADGVAEAASIHLRSLVARLRVVNRELREAEVQLDKLCLIIGESEATLGNCLRRQDVQILRSMPGIGRINLAVLLCEASGPLGRRDYRALRTLCGAAPVTKRSGKSHIVIMRYAAHVRLRNTVYHWARVATQHDPKCRARYAAFRQRGHSHGRALRGVADRLLALACVLLQRQTLFDPHFAQAG

SEQ ID NO: 367255 - protein, 411 aa, unidentified
MNTNPAFLRYLAIDAHKHYVVIGGVNAACELVLSPRRLEWAELEDWLRAHLQPTDKVVIEATTNTWTLYDQVARYAGAVVVAHPPHIKLIGAALVKTDKRDVQVLAKLLALNLIPEVWGPPQPVRELRELTAHRLRLTHTRTQTTNRLHSMLQRHNLAAPDGDPFAAKHRPWWEGLALSPTEKLHVRQDLATLDLLNTQLAEVEQELARLSTVAPWAAQVPFLIQLPGIGLITAMIILAAVGDITRFAHAKNLVGYAGLGTYVHDSGQTHRHGGITKHGRADLRSALVEAAWVAVRTHPRWQAEFERLSKRMPANQAIVAIARQLLVVVWHVLHDHQADHNAQADKVAAKFFVWSGRLGQDYRGRFTPRQFVRWQLMHLGLGDDLTHVRFGGELRSLPTVAELAALTPPVT

SEQ ID NO: 367256 - protein, 345 aa, unidentified
MPVAAASSPSTYRLFAGVDIAAATFTAVWMAPGASPSRPLTLDQTPQGFAALEARLRSAGHAPGEVLVVMEATGSYWVALATTLAQAGFAVSVINPDQAHNFAKALLQRAKTDAIDARTLARLASMLQPARWTPPPAIDAELQQRLAERDTLVDVRQQVRNQLHALIQLPVVIPAVRARMEDLIATFDAQIMAIEREIARVLPQDTAWAASAELLLSIAGVGLLTAAWLLVGTLNVTIGVNPEALAAYAGLAPHPKESGTSVRGRERVGRGGHKRLRTALYRATLAAARHNPVIKAFYERLRAAGKPPKVARGAAARKLLHLAWAVVRKGRAFDPAYGQHQRDVA

SEQ ID NO: 367257 - protein, 401 aa, unidentified
MHDGFGVFVGLDVGKEGHHAVALSREGKRLHDATLPNTEAGLRRLFDKLGRHGLILVVVDQPASIGALPVAVARACGHQVAYLPGLVMRRLADLHPGTAKTDARDAYVIADAARTLPHTLRRVDTGDEALAELEVLVGYDDDLAGEVTRISNRIRGLLTQIHPPLERVLGPKLQHPAVLELLSRCGGPAGISKAGRAKLLEIVKARAPRMGARLIEQILTALDAQTVVVPGTTAAETVLPRLADSLRDLLRQRDQVAEQVEGMLDAHPLAGVLTTMPGIGVRTAAGILLEVGDGTAFPTPGHLAAYAGLAPVTRRSGSSIRGEHPPKGGNKQLKRAFFLSAFAALADPASRTYYDRKRAEGKKHNAALICLARRRVDVLHAMLRTHTPYQPRTADEPRLAA

SEQ ID NO: 367258 - protein, 418 aa, unidentified
MGWSVMDVVHPRCAGVDISKRDAKVCVRIQGRGKQRTSSTVTTWGAMTNQILALREHLLEQKVTCVVMEATSDYWRPFYYLLEEHFEVMLVNARDVKTVPGRKSDVSDCAWLADLGAHGLVRASFVPPEPVRALRDLTRARTVITQERSREIQRLEKLLEDAGVKLSSVATDITGVSGRLMLQALIEGRDDPAGIADLAKRRLRSKIPQLTAALHGHFTDHHAFMARLFLDRIDAHTADITRLSARIEKSMQPFCAARELLVSIPGFSRTVAEVFLAETGGDMTQFPTAGHLASWVGTAPGSNESAGRVKSTKTRPGNRYLKGALGVAALSACRSKGTYFSAKYRRIAYRRGPMKALVAVEHSMLVAGWNMLTDGTFYRDPGPDYFTRHVPAKTKARAIEQLQALGYRVTLQPLADTA

SEQ ID NO: 367259 - protein, 402 aa, unidentified
MAKSPTRFIGLDIHKEYFVAVGVNAQREVVFGPQRVSNYQLDDWVSRVITTQDAVVLEMTTNTYLFYDTLLPQAHSIIAVHPPSVMLVTNAPVKTDKKAALTLAQLHAAGMLTGVWIPPHEVRDLRALISRREKMVRLSTMAKNRLHSLLHRNHLVLPENPFSPQQRNLWESLPLSATEQFLVRSDLDTLAFAQKQITQAEEHLKKASAEDERIPLLVQLPGVAMLTAITILAAIGDIARFPSAKKLVGYAGLGTRVHDSGMTHTSGRITKAGRRDLRRALVNAANHAIEHHPHWKKEFERLEPHLGRSKAVVAIARKLLVAVWHVLSKKTADRFADSGSVARSFFAHAYRIGVRNLPEGQSALAFTREQLDRLGIGQDLQEIPWGSKPHKLPHSKMLPEKE

SEQ ID NO: 367260 - protein, 308 aa, unidentified
MGCIGAGIDVSKDTLDVKVDKHGPQLHTSNDSAGWQQVIAWLTPFAPQQVVLEATGGYELQALKALYAAGLPMVRVNPRQARDFARSTGQLAKTDRLDACVLAHMASVLKLNRYQPPNEETQFLHACHRRRQQVVQMLAAEKQRRRLTEQPAMRLMLERNIQRLEADRDELDMHISEQLKGSVQAQVASAIKGVGPVVLSTLVCDMPELGHLNRKAIAKLYGVAPLAKDSGRSHGRRITWGGRANPRAMIYMAALSAVRYDPVLKTFYEGLVGRGKPKKLALVAAMRKLITILNARMREAFQASAQIT

SEQ ID NO: 367261 - protein, 518 aa, unidentified
MRAGVLSPSSTPIRFGSSSRRSPGSLVPAGFQGKRGGVAAEKKNAKTDTDGKSAGAAAEHGGDGAEVAEDRVQVVEYAAAIDVAKGFGMVCTRVPGSRPDRRRQKVWRVEATYGEVTALMDHLRCEGIQRLVLESTSDYWRIFYYLAEAAGLEVWLVNARDVKHLPGRGKSDKADCVWHCKLNERGMLRRSFVPPQEVRDLRALTRTRARLAQDQARHQNRVEKILEDALLKISVVISDLFGASGRRFLDALVAGQRSPAALAALGDPRLKATRKQLEDALTGRFRDIHAFEISTHLRLIDAINEEIARLDEAIGQQLAVIPRAAPCCTACGLAGGHAPGCADQEVPLLGLAGRLDEITGIGECNAAVVIAELGTDPSTFPTPGHAAAWARLTPRTMQSGQTARPGRTGKGNRYIRGALGQAAMTAAKTDTRLGAMYRRIARKRGKQKAIVAVSRIICEIAWILICDPGARYQELGPDYYHPRSPARQTRDKIRDIERLNPGKKVILVDVGPEADAAA

SEQ ID NO: 367262 - protein, 340 aa, unidentified
MHKLSPEVFLCCGIDVSAAQLVVALPGEGGRGGQRSFPNRASGHQALIRWLQNNGTPVRVCLEATGLYSLDLALALHAASGIEVAVLNPKRVNRFAATLCRSKTDPADAQVLAEYARRMPFQAWHPPQAAALELRAITRHLAALTQQHTQQSNRLHAISAASAGARCVRQDLKRSLRDLERRIEKMRRAALAVMEQDPELRLRFTLLLSMPGIGEVSALNLLGELALLAPSLTVRQWVAHSGLDPAHHDSGTSVHKRSRISRAGNRYLRRALYMPALVAVRHDPHLRAFYQALVARHKTKLQALIAAARKILHAIFGMFRGRTGYDGSRLFRAIELASAA

SEQ ID NO: 367263 - protein, 342 aa, unidentified
MSIVTVGLDLAKHVFQVHGVDETGTAVVRRSVRREQVEAFFRDLPPCLVGLEACATAHHWARRIRALGHEVRLVPPTRVKAYVQRGKKNDATDAAAIAEAVTRPHMTFVPIKSEEQQSVLVLHRSRDLLVRQHTMLLNALRAHLAEFGIVAPQGRRKLAGLIGQLNELDLPEMARTALVEVAEQIDRCTDRIAALETAIVTWHRTNEASRNLATIPGIGPITASVLAATATDPKAFKNGRHFAAWLGLVPRQNSSGGKDRLGGITKAGDRSIRRLLVVGATTVIRYARSKAPGDGEWLKSLLARKPARLASIALANKMARIARAVLSRGTVYRKTASLPAAG

SEQ ID NO: 367264 - protein, 340 aa, unidentified
MNIKRIGLDLAKNVFQIHAVDHREHVVLRKTLRRDRMAAFFTQLSPCLIGIEACGSAHYWARELTRMGHTVRIIPPRLVKPYLKGQKNDANDAEAICEAVSRPGMRFVAIRTERQQTLQAEHRVRARLIRARTALSNEIRGLLGEFGVVLPAGIAQLRKALPEIVSQQVQWDECFIRLLCELSEELQGLDERVARHDRRLQQSARDDIRIKRLLAIEGMGPVVASALVAAVGDGRQFRSGREMAAYLGLVPRQHSSGGKARLGHISKRGDRYVRTLIIHGARAVLNACQNKTDRRSQWLQGMSERRNRNIATVALANKNARIAWALLSREEDYHGIQVTG

SEQ ID NO: 367265 - protein, 330 aa, unidentified
MKKWEFTLGVDVSKNTLDISCSELNEHVKIKNGTEGFTVFLKWCKHFKIDLKQSFLVMEFTGGYEYKLIQFCESRGILYTRIPGLAIKNSLGITRGKNDKVDSSRIAQYGEEKHKSLTPSRPLNPAIVSLKELLSFRKRLVRENAGYQATIKERIHMYGGNKKDIIVKKLEQKLKGNIKNIAAIEAEMLNIVAQDEKISINYRLITSIKGIGKINGLMTIAFTENFTSFTNPRSYAVYVGVVPFDHSSGISIKGRKRVSHIANKELKQELNQAARSAMEWDKEMRSYGEEKLKTKCYKIVLNNIKFKLILRMFAVVKREEIYVENYRNVA

SEQ ID NO: 367266 - protein, 397 aa, unidentified
MIAVGIDVSKAKSTVAVLNSDGSIRTKPFTMHHTLSDMDAMVKYLNDLDESFTILMEYTGHYHYPVLKKLQEEGFPVCLVNPYQMKKYGDVEIHKAKTDKKDALRIAKYALEKSYMLTPYTSLEQKYEDLKFLSRQYNQRISMVSYTKTQLTNLLDETMPGITSLLKLKSRKPNECALLLFIKKYGSFDRVKAMGKSRFLSSYATLMKKSHDRYAPQKSLSIYELACDSITTRGDNDYIIAAQNQLVDLLATVQNAADEEIAQMQNIAETIPEYRILRAMNGVGDRLGPIILAEIGDIRRFHSAKALNSYAGNDAPPYQSGQFESRNRHISKRGSSALRKACFEVMQALKLTKPQDDPVYLFILKKEQEGKPYNVAKMAGVNKFLRIYYARAMELYK

SEQ ID NO: 367267 - protein, 482 aa, unidentified
MKPSQQNPFQKVSCHRAQVGWQGMNRKQRREMTRKIQAADLSLEVVHPDAAGIDIGNESHYVAVPPTRDEEPVRRFGCTTAELRDMADWLKQCRIRTVAMQSTGVYWIAVYDILEAAGLEVYLVNARETKNLPGRKSDVQESQWLMKLHTYGLLRNSFRPPQEIRTMRTYWRQRNDWIRSASRHIQRMQKALTQMNIQLANVLSEVSGVTGQAIIKAILAGERDPHELARFRDRRVKASADEIARSLEGNWQEDLLFLLHQEQDSYEFCQKQMSECDQRLQHFLQQREDRSAGASLPEEKRKERLKKKKTNKPRFDLRAELFRMTGTDLTQIDGIDVRTAATVISEAGWDMSKWRTEDHFVSWLRLCPDNRISGDKIMGKGRLPTTNRLTLALKIAATTLRPSRTYLGAQFRRLKTRLGAPIAIKAMAAKLARLVYRMLRYGMQFVDQGAEFYEARHRQREINSLKRKATNLGFQIVEAPAA

SEQ ID NO: 367268 - protein, 404 aa, unidentified
MGTNSDLRVSIDVGCYRHSVAIGLPGGELLEEFDLAHGPEGFDQFFGRVDKLQHHYGGSVLVAMEGYNGWARPLDTLVRAHGYRLFNINNLKLARFKEIFPAAAKTDRIDARKGLELFQLRDHFPTARDVLQEIAATPLVNDKLKRLTRRRRALVDERSRLIARLQADLQAVCPGLLEITKDTDNLWFLNFLTHGDDLRKLGRLRETTILGIAGIGRKFGAIIEHWQKTARFSHDAEWVGPMVVEDARRVLELRRTIKTLEAACKVLMQDSKIAVLTKTIPGFGLTCSSELAGEIGTIDRFDKEGSLAMYLGMANLTNSSGKHQGSKNPKHVNSRAKAAMMAAVDKHRKLVPESKRYYDKKRTEGKKHNQAIRALGRHLCRVIFVMLKQGRGYELRKENDSNIA

SEQ ID NO: 367269 - protein, 337 aa, unidentified
MYAAIDHHKAVFQAATLDPETGVAGDERFQGSRDGLGIWMERWQGRVTDVALEASTGWRWITQELEAHGFRVHLADPAEARAKRGRTKKAKTDKLDARWLVLLLCKQDLPEAWIPPEEIQQLRAKTRLRKALADDRTRWAQRLHAVLHHEGWPCRRSQLLTKKARQWVAALRLPGAAQQQVTAYQFLIETLEAQLQPLENELRHFAEGDPRCQALMKLFGVGPIIACHLLAEIGSALRFRRARQLVRLSGLDPIVEESGERRRRGKLAKQGPPLLRWAAVEAAQHGRRFNSPDRHLWAASSRRSGPNRATLTVARKLLRRSYHVLRRIELGEQEVAA

SEQ ID NO: 367270 - protein, 335 aa, unidentified
MERQYVGIDFHRRRSVIVRKNAAGQKLSSIRVPNDPLAIAAVVADAGPEPEVVIEAAYGWYWIVDWLQAQGARVHLANPSGLNWGTRRVKNDERDAIDLVDMLRLGRLPEAWIAPPATRELRELVRYRAKLVGLRSGLKAQVHAVMAKEGVLPAVIDMFCRAGNAQLDQMALGEAYTIRVESLRDLIEAYDREVAMLERNIHHRLRVDTGYRAIQAINGIGPTMAAILVAEIGDVRRFRSAAALCSWAGLTPKHKESDTTVHRGQLTKQGSRLVRWAVVEGTVRYHGGGKLAADFRKIAERRGKHKATVAIARKVLTLVYYGLRDGEIRCLANAA

SEQ ID NO: 367271 - protein, 349 aa, unidentified
MKIIGCDFHPGYQQIAMLDQETGELREMRLSHQLQGEEARKFYSALPLPVRVGLEASGQSQWFERLLAELGHELWIGDAGKIRARAERKQKTDRRDATLLLQLLLENRFPRIWIPTPEERDARQLLLHRAKLVRLRTQIKNQLQALALNQCVQRKWQLWTVAGRQRLESLPLLPWASRRRTELLKLLDELDVSIGELDGAVCQEAHTRPAVRRLMTHPGVGPITALAFALTLGPAERFRRGKQVGSYFGLIPAEHSSGGKQRLGHLSKQGSSFVRGLLVEAAQSAVRHEPQLRREYQRLAQRRCRALAKVAIARKLAVRLYWMLRTEMDYAQLLQGSHAGQPESSRGRG

SEQ ID NO: 367272 - protein, 368 aa, unidentified
MEKGTTYVALDDSKRKIVAGILRPGAPAPELRELPNDPPHIRRLFERLKREGPVTACYEAGVSGYDLYRQITGLGVSCQVMAPALTPRRPGQRIKTDRRDAGKLVHLFRAGELTPIHVPDEAEEAGRDLVRCRDDVRRDVLRWRHRLLKLLDRHGRVYRAGKNWSRGHWTWIRDQRFDLPALQRAFEASLFALEQALARRAELDNEVEALAETAPYRDPVGWLRCFRGIDTLSAMILLVEVVDFQRFERPRQLMAYLGLVPSEYSSGDTQRRGALTKAGNTHVRRALIEAAWHYRHRPTVGHALAARSQGQPREVVGEAWRAQQRLHRRYRHLVGHGKRPPVAVAAVARELVGFLWAAMTQRESQAAA

SEQ ID NO: 367273 - protein, 367 aa, unidentified
MIVNEVAKNVEKIISIDTAKNSFQVLVVNQKTGKKKNTKVQRSKFVEYILKQGPCLIFMESCSASQHWARLFESFGFTVKLIAAQHVKAFLRNRRVKNDERDAEAIYKCGIQPDTKFVRIKTVEEQTVALLHTLRKAAVSQRVELSNRIRGILAEFGIVVARGKGSFNSEIEAMFNECEKIHDVNLRVAISSLFEDYHRLEQREKELSEKIEALNKDNELVKIALTCPGVGPLTASAIVAEVGDASQFRNGREMAAWNGVVPSQHSTGGRSTLGGITKTGNRYLRTLLAQCACAVIQKASRHLEQGKDTHLDRFALRLKLNGKPAKKIMIAVANKIIRILWAMLTQRKTFENKAEETSDTSAELQLA

SEQ ID NO: 367274 - protein, 351 aa, unidentified
MMIIGVDYHPGFQQIAFLVEETGACGERRLNHSDGEAENFYRDLKARGISVRVGMETTGFSRWFERLLAELGFEVWIGDAAEIKTRRAKKQKTDRLDAELLLKLLLEDRFPRIWVPSPENRDVRQLLWHRHRLVQMRTRIMNQLQALAMNENRYWKGKLWSERGRAELEKLPLAPWTSRRRQELLELLDRMNPTIEELTAAATLEAKKRPEALRLMTHPGVGPLTALAFVLIIGTPERFGCAKQICNYVGLIPSEDSSGGRQRLGHISKQGSSLLRFLLVEAAQAAVRCNADWRRRYRHLAMRRQRNIAKVAMGRRMGARLYWMWRNGREYSPSLEFGSHAGKLGTGNGGQ

SEQ ID NO: 367275 - protein, 347 aa, unidentified
MSITMIGLDTAKSVFQIHAVDETGKTLIRRKLRRTELIPFFEKQEACTVVMEACGASHHWARLLTSLGHHVKLIAPEAVRPFVKKGKKNDAADAAALCEAASRPDMKFVPMKTAEQQAILALHSARSLLVKQQTMLVNAMRGLATEFGLTVPKGINRLDELTALVDADEAFPETARRVFRELRERCDSLAESIEKIETKIVAHARGDETARRLATIPGIGPITASLIAATVADIGMFKSARHFAAWLGLVPRQYSTGGKTRLGRITKAGNREIRKLLVLGATSMVYRAEQWNSAVGAWTRGVLERRPVRLVTVALANKVARIAWALMTRKEVYQAKGRIAAAAEVAA

SEQ ID NO: 367276 - protein, 424 aa, unidentified
MEQDYSLFVGIDWATEEHQVCGVDRQGTKVFESKVRHEGEDIARFVEELLERVGGRAEQVAVAIETPRGSIVEALMDRGVAAFSINPKQLDRFRDRYTVGGAKSDKLDAFVMSDTLRTDFKLYRRIEFGDPVVVQMRELSRVHDALSQDARALGSRLREQLVRYFPQVLALGSVYDEAWLWDLLELAPTPTDAACLPQSKVAAILRQRRVRRVKADIVIQKLREKALVVAPGVVEAASAHVRLLLPLLRLANQQLGDCDHQIAGLLEKLRSAVVSTSAEGEPEAPRKQHRDADILLSLPGLGVLTSATMLSEGATALRDRDYRALRVQAGVAPVSSQTGKQRRPTVTMRRACNLRLRNATYHWARVSMQHDAASREHYKRLRGAGHAHGRALRGVADRLLAMLVAMLRSGSLYDPNRRSALKAA

SEQ ID NO: 367277 - protein, 410 aa, unidentified
MVERFVGIDVGLREHRIAILDRDGEAVGPSFTIAASTDGVATLGRTLAARDATAAQTLIGLEASGHLWENLEAALVGVGYRVLVLNPLQTRRYRDVVRRKAKTDDIDAHVIAGLLRSGVARASYVPDEQIQSLRELARLRARLMADRQDYQRQLVAQLDVVLPEHRAVLGDLLTARARGILGQFPTAQHLANANPRAIRRAAEDAGARGFSLDDATGVRDSARRSLYSGKAAAARAHVVRTLVSQLERLTSAIDEVDHAATTLLPPSEPGTGPSDAELLQTIPGIGPQTAATLLGELGALTRFTDARALVAYVGFYPVISESGDRAAPPRLSRVGSRLARRSLYLAAVNAVRGSGEWRTIYLRKKAQGKTAKQALIVVAVKLLHALYAMLKHRQPYNPSRLLVAPTTIGS

SEQ ID NO: 367278 - protein, 395 aa, unidentified
MKSKHKYIGLDVHKDQNQVAIAADGPTGEVRMYGSISNDLHALEKLTRKLGGEGIVLHFVYEAGPCGFVIARRLAQLKIDCMVVSPSLVPKAAADRVKTNRRDAMQLARLRRAGELKPIRVPDAGDEAIRDLCRARTDAVKDLRAARFRLKGFLLRHGYKYSGKSSWTAAHLRYLRELVLADPAHKVVLEEDLLAITQAGERIERLEQALEPLARAWRWWPVVEALTALRGVQWLTATVLVAEIGDFHRFGHPRQLMAYLGLVPSEYSTGDHQRQGSITKCGNAHARWFVVEAAQSYRLPPKVSAGLSQRQENASARVQEISWKAQVRLHGRFRRLVGRGKRMQKIQVAMARELVGFIWAVAREVPTPGAVPPRSAPAPHEPKPTRTERTLARLA

SEQ ID NO: 367279 - protein, 409 aa, unidentified
MYYVGIDIAKNFHVVTIIDDSEKKITTKPIRVTNCIDGFSKFIVKLEAISSNPNDFIIGLEATGIYGENLLEFLNAHGFNVKLLNPFQTTRYREQHTMKKVKNDNIDSWIIALFLKDGKFSSGYVTDDEYQSLRTLYRNRASIQSDMKEVKKRIITQVTVTFPELENFIDIFSITGLALLDKYPTAHHYKHSSVDRILKIFRHIQGNSFNSEKALKVLELAKNSIYSGKAKDARAIAIKSSIRLLKIYQDELSILEDEILALLENNGIKEEKDVPTNSLIENLKTIPGVSSKTIAAVISECGDLSRFTTPIKFIGYLGLFPTENSSGNSKSTGHLSRRGSSLAKHALYMASVSCMIHNKELKQYYDTKKSQGKSKQEGLIAVSRKLATIIYSIFRYNTPYDPARVFSKS

SEQ ID NO: 367280 - protein, 344 aa, unidentified
MDHFAGLDVSVKETSVCIVDDTGRIVKEVKAASEPQALLKVLGNPAYRFKRIGLEAGPLSQWLFSGLAEAGLPVVCVETRHMQAVLKAHINKTDRNDARGIAQMMRAGLYRPVHVKTLRSQKLRMLLTHRKLLQSKAIAIENDLRGTLRNFGLKVGMVGQVRFEARIKELVESLPDLAELVEPLLIVRRTLREQIVILHRRLLAIVRDDEVCQRLMTTPGVGPVVALTYRATVDVPARFRKSKAVGAVFGLTCARYQSGEIDWSGRISRCGDEMMRVMLYEAAQSMMRSKKWSWLKAWAMQIARRRGMKKAIVALARRLAVIMHRIWVDGTEFRWTREQAVAAA

SEQ ID NO: 367281 - protein, 350 aa, unidentified
MTTIARRITGGVDTHLDVHVAASLDQRGALLGVESFPTTTAGYRALLRWLESFGTLELVGVEGTGSYGAGLTRHLLAHNVAVVEIDRPNRQRRRRTGKSDPADAVAAARAAQGGDATGLAKSRDGNVEAMRVLRVARLSARSSRTQAINQMRSLISTAPDELRSELRDLSIYQVLTVTSAYRHTGRSDVTTLTKLALRTLARRALSLEGEVKEIDALLKKLLAETAPELVAVDGVGTDVGTAILVAAGDNPQRLKNEATFAKLCGVSPLDASSGKQVRHRLNRSGDRQANSALWHIVFTRMVNDPRTQHYIERRMKDGRTKKEAVRCLKRYVAREVFAALPRSQFRVDNP

SEQ ID NO: 367282 - protein, 346 aa, unidentified
MLYAGLDLSRKRLDVCLLDEEGARVEMTAAPPDADGLRELAGRLAGHGQPIYAALESMNGARFVHDELEREGWEVALADARKVKGLAPLAAKTDRIDAFVLAELARRDLVPAIWLPTPGVRAERERARFRLHLVRHRAALKARIHASLIAHGHSCPVADLFGVRGRALLDRLALPEPWAATTAASLRLIAELDGEIAACEAELRRLGADHPYVPLLMTAPGIAWVLAYTIAAEIGEIERFATPKKLVGYSGLCPKVYQSGACDYRGPLAKNGPEHLRWALIEAAVHAARHPAFAAHYQRTRQRLGKQRGAKVARIEVARKLAEAIWHMLTRNQPFAPAGPAAALVA

SEQ ID NO: 367283 - protein, 335 aa, unidentified
MYYLGIDLHKDESHVAVLDDDAEVVEEIRVTNANLDEVAEEYAGAKAALEATSNYYTVYDTLDEHLDVVVADPSQTKAIGYAEVKNDRLDAKLLAQLRRAGMIAKSYVPPEELRERRALVRGRKRLVEKRTDFKNEVHAVLDKHGITYDWDPFSVNGREIFAGEDFSLSVVGDQLMESFLSIIDELTAQIEELEEMIEETAASLEETQLLMTIPGVSFYSSLLITSEIGEIDRFDEANQVVSYAGLDPVVRESGDSRTEGSISKRGSGDLRWILVQCVQTAVHRCNDPYLGRFYARLKRRKNHQIAIVATARKLLVSIFHMLDRKEVYDPPEVSA

SEQ ID NO: 367284 - protein, 441 aa, unidentified
MAARKQEVAVFPNAAGIDIGATSHWVAVPPHTADDPVREFGPMTTDLNALADWLLACGVDTVALESTGVYWIPVYEVLEQRGLKVWLVDARQMKYVPGRKSDVQDCQWLQKLMSLGLLRAAWRPDGEVCVVRAVARQREVLLTQQASWVQRMQKALVQMNLQLTEVLTDVMGVTGQAIIRAIVAGERDAVVLAQHRNRRVKASQDDVIKALSGNWREEHLFVLGQSLAMYDDIGRHLAGCDAKLQALLTERSRGDVELGKPPRAGSRTRAIFDLRQTLADWAGVDLTRINGLDVTSVMKILSELGPDLSRFANVKHFCSWLGLCPATKISGGKVISASTKRSANRVRQTLKLAAMSLSRSQSALGAFYRRLCTRMGKPSANTAAAHKLARLVYFMLTRGEAFVDQGQQRYEEQQRERSVAALKRRAAALGFQVAPAAPTTD

SEQ ID NO: 367285 - protein, 332 aa, unidentified
MNVVVSGLDVHKEYTYATVLGPDGEKLAQGKMPNEEVPAFLKPYRVERVAMEATTSIAPLYRRLTEEGYEVLVSHPKKTRYIAEARIKTDKVDSQALAELLRLNSLPLSYVPPPDIAVLREKVRRRAFLVGQQTKLKIKIRSTLTYEGVKTPKEYGLFTRKGREWLRDLGLEPVDSYLRMMEPLRTEIRLLSLKLRHIAADDEDVRLLMTIPGVGYYIALLVKAEIGDISRFHTGDQLASYAGLAPSTHSSGGVTHHGRITKEGSRWLRWAMVEAAHVHFRFDTPVTRAYHRIAERRGKGKATVAAARMLLLVCRSVLRNRRPYFNPVHGQA

SEQ ID NO: 367286 - protein, 463 aa, unidentified
MNIKGSKKKNQVLSVNIFEQQEIIVKADAIKAELKASTWHELETKVKFDKNDKLSFVSDDMLILGCDIGSETHYVRAIDTRGRELSKSAFGFSNTAEGFESMLDWSTKLAAANDKKQIVLGLEPTGHYCFCLTTWLVAKGISVVQVNPYAVKQTKEVEDNSQLKDDKKDPKLIANLVKDGNFGMPYLPEKLYADIRRLSMFRDQLNEDRIRNLNRLHREMKIYFPEYKDAFGKIDGAFSLELLKEAPFPDELAALGTEGMKQIWHETKLRGRGYANASSILEYARKSVGIKDGADAGRQAVKWFVSRIIELDEQLSDIENQLNQKCNEIPYAKNILAISGIGENILSGILAEMGDISRFDNVKEIQKLSGLGLVACSSGKYTGETKISHRGRKRLRYWLFQAAKSAVAHSEEFKKLHVYYTTRKQNPLKKMQSLIVIVFKILRVILIIFCMEGRKIKALILGE

SEQ ID NO: 367287 - protein, 350 aa, unidentified
MLIIGCDYHPGFQQIAYVDTETGELQERRLRHPEEAEKFYRDLWERKLRVRVGMEASGHARWFERLLAELSFELWIGDAAEIKAKRVRKQKTDRQDAQHILKLLLKDDFPKIWVPSWENRDLRQLLWHRHRMVQTRTRIMNQLQAVAINEGVRCKKRLWREAGRKQLESLPLAQWASRRRQDLLEVLDRINPTIAELTQAIEDEAEKCSEARRLMTHPGVGALTAVAFVLIIGEANRFGCGKQIASYLGLVPAEDSSGERRRLGHISKQGNSLLRFLLVEAAQATARSDCRWRNQFFHLAKRRGRKIAKVAMARRLAVRLYWMWRRGWNYEQLQSFGSHAGQPGNPHGVQ

SEQ ID NO: 367288 - protein, 327 aa, unidentified
MKTIYVGIDVSKRTLDICLKALDGEQFFKIKNEPKSLSKLAKKLSKLDSQVVIAMENTGHYNHHLYRVLANFNFIVYVVDPKHIKRSIGLVRGKNDKVDAKRIATFIERNNQDFDPWEPLSESIYSLKVLLAERKAEVDRIRSLKQRIDGLSQQKSVSSVLKLISHNKKEIQRTQRRVKDIEKLIREEIAKDPALNKEVKRIKTVPGIGDVTAWLLAAKTHGFKRLLDPRKLACFAGVVPFEQQSGTSLKTTPRVSKMADGSLKSVLQMAAMRAVRLNNELKSYYHRKIEEGKNKMSVLNAVRNKLIHIAMALIKNKTYYQNRLVLS

SEQ ID NO: 367289 - protein, 482 aa, unidentified
MKKKNIYVNQSQELLTLFEEAGDSAKIMCVPIDYAKKDHVVMFCNGHGDILRKPFSVKNNPEGVKYITEQVSRSCRHHKINQNHVFFGGEDVGSYAENFASTLRSGGWLVAGVNAHDAKKQRANLQASTDRLDLMGIATMLLNRRANCSPAQSGIYRNLRTLVRHRRRLVVMTTEVRNRIHAIVDRLFPGFLDERKSGITPFSKSSLYLMENRFSASQIRRRRRSTLIEALRGLGTPKPDCAVAKLEEYAQQVLKTPDEYVNTLQLSMAQHVKHYRCLQENIEQLERETALWLAQTQGAFLTSVRGIGIVLAAGVTAEIGDPFEQKPLNNLVSYSGIIPRVIQTGGPEGEIYTGKVAKRSNRILKDYLVQSASHLGLHGSEDLMIDHKRRNAAGQHADFGIARRYLRMAMCLMRTSQVYLPPRLRKPGMKPEERAGYYLMTWPYLRDKWQKLGALEAAFSQDRPLGRWRNMVQEFYKIKLTL

SEQ ID NO: 367290 - protein, 347 aa, unidentified
MNFYNNMHPYYCGIDLHARLLYVCIIDNTGLILVHKKIKDDPEALLKLLKPYIGDIVVGVECMHCWYWVADFCKEHTIDFILGHALYMKAIHGGKAKNDKIDSYKIAKLIRGGNFPLAYVYNKDMRATRDLLRRRTKIVRHGADLKAHVANTASQYNLPAHNVNLKNVCDREKMRYYFPDPVVQRSINLNMAILDCYHKELKPLEHYIEQMAKQHNPVHLNILQTINGIGRILALTIIYEIGDINRFSSVQKFASYSRLVKCKAESAGKTYGTQGNKIGNAHLKWAFSEAAVLLLRHSHNANKYLEKLQKRMSKAKALSALAHKLGRCVYYMLKKETVFDEAKFLKS

SEQ ID NO: 367291 - protein, 379 aa, unidentified
MTSTAAAAGSRETVYAAIELSKKTWVLGIAHPDRDRPSIHRVCGGNFAELVGRLRVAARNNRRILVCYEAGYDGFWLARALAKIGIECRVLDPASIQVNRRARRVKTDRIDVLALLRALIAADRGERHVCAIVRVPSVEEEDARRSHRERQRLVRERTGHINRIKGLLFAQGIRDIKPKLRRTRIDFAGLETAEGHQLPDRLRRELEREYARLALIETQLREVEKERDTADAQHPVVERKRQMLVALQGVGSTSAAILAREVFARSFASRRQLGSYLGLTPSAYDSGSTTRCQGISKAGNSWARRVLIEVAWLWRKYQPASPLSNWYLQKTTGQSGRIRRIMLIALARKLAICLWRYVETGLVPEGVVIARAEPRCTPA

SEQ ID NO: 367292 - protein, 389 aa, unidentified
MIYVGIDVAKDKYDCCILGSEADKLFPVFTIPNNKAGFDELYEKMFSVTDDKTKIKVGLEATGHYSLNLLGSLIDKGLPTCVINPLHTNLYRKGLSLRKTKTDKVDARSIAMMLMTNKTLKPYSDISYHNEELKSLTRYRFDKVQERAKLKSSVARLVNILFPELEKLVPSLHMASVYSLLSKLPGASYITECHLTHLKNLLETASKGHYGRDMAITLRNTARDSIGSVIPAKSMELKHTIHLIKVMTEEIDEIEDSIKSIMDTCNSPIMTIPGISYRMGAMILAEMGDFTRFNYADQILAFAGLSPSTYQSGQLDSSYSHMEKRGSRYLRYALFNAAKFVCKWDENFGAYLSKKIGEGKHYNVAIGHATKKLVRTIYRMELTGEAYRR

SEQ ID NO: 367293 - protein, 457 aa, unidentified
MNDAKRSRSQRNLPPVHPAAAAIDIGAKIHVAAVGPDRDKEPVRTFQTFTDDLHRLADWFTRCGIKTIVMESTGVYWIPVYEILEQRGFEVLVVNARDAKHVPGRKTDVSDAQWLQRLHEYGLLRASFRPQAEMAGLRAYLRQRERLLDYAAAHIQHMQKALTQMNLQLHHVVSDITGVTGMQIIRAIVAGERDPCVLASYRDSRCHASVETVRQALVGNDREEHIFALTQALELYDVYQTKVLACDKKIEAILMRLKKSAEPPISELPLARHKTRQPNAPAFEVREALNAILGVDLTQIHGLGPYLALKLVGECGTNLAAWPSAKHFTSWLALAPHNKISRGKVLSSKTRRSGNRATSLLRLAAITVGRTDTALGAFYRRLSARVGKAKAVTATARKIAVLFYNTLRHGMSYADPGAAYYEDRYRQRVLSNLQRRAKSLGFVLQQAESASARAGVS

SEQ ID NO: 367294 - protein, 457 aa, unidentified
MSQGSSQGLSRGDRRRNGKLSLLRKVIGRDTAVVAFDLAADKQVCAVTGPDSQVLARRTARVKAWQLGEVVAWGIAQARRAGYESVVVACEPTGHRWRVLDQLAAAQSAVLVCVQPLLVHRAREAEDFTRNKNDDTDAVIIARLVTELRCYLPEQTDSDWARLRHLGARRARLVTEAGAARQQIRDLLECAWPAALDAARDPLGSKSWLAALTVLLDRVGPGGDLSVIRAWGWDRFAAAVRRELASSGTRWYSTIVRAVYDAATDPAHTAVGVTAQRGGALERIAYAVADLATRREQITEVETRMLGVLDQLDLTELAASIPGVSAVGAAAILAESGDPARFSSARALVKHAGLCPRDNASGTYQGRTSISGRGRPELRLAAWRAVFSALQHNPVLTARYQHLTSRADNRLTDTQARVAVAASLLRQLHGVIVTRTAWDPAIAAGLDRREDGAAIAA

SEQ ID NO: 367295 - protein, 345 aa, unidentified
MEHYAAIDVSLEWSSVCVVDAAGQIVREAKVRSEREALVAFFAESGLSFARIGLEAGPLSQWLYAGLVEAGLPALLIETRHVKAALKAMTVKTDRNDARGMAQLMRMGWFRAVHVKAPMMQEIRALLTARKLLVVKLRDVESSLRGILRGFGLKVGAVSKGKFEARIRELVAGQAMLERIAEPLLRARAALRVEYASLHGELLKAVRADEVCRRLMTIPGVGAVVAMTFKAAVDQPERFARSKAVGAHFGLTPKKYQSGEIDRTGRISKVGDAMVRTALFEAANVMLTRAVRLSALKAWALRVASRQGMKKAKVALARKLAVVMHRMWVDGTTFRWGKTGVSVAA

SEQ ID NO: 367296 - protein, 352 aa, unidentified
MTVTNLARSITGGVDTHLDVHVAAALDERGALLGVESFPTTGDGYKKLLGWLSEFGPVELVGVEGTGSYGAGLTRYLQAERVRVVEVDRPNRQRRRRKGKSDPEDAITAARAALSGDASGEAKSRDGNVESMRVLRVARASARKARTQALNQMRGLVSTAPEAIRDELRGLNVLHLLERASAYRPGAKRDVVSLTKFALRMLARRAITLGEEISEIDTLLKPLVNETAPQLVGALGIGTDAASALLVSAGDNPERLRNEAAFAHLCGVSPIEASSGKQTRHRLNRSGDRQANSALWHIVITRMVYDPRTTEYIDRRTKEGLTKKEAMRCLKRYVAREVFSLLPHDKLGLDSP

SEQ ID NO: 367297 - protein, 358 aa, unidentified
MVTGPKHQKEKRSMEHFAGLDVSVKETSVCIVDETGKIIREVKVASEPDALLPVLTKPAYHFKRIGLEAGPLSQWLFSALVEAGLPAICVETRHMRAALKAQINKTDRNDARGIAQMMRAGLYRPVHVKTLRSQKLRMLLTHRKLLQSKAIAIENDLRATLRNFGLKVGVVGTVKFEARIKQLVENVPDLVVLVEPLLVVRRALREQIGILHRRLLTIVRDDDVCRRLMTVPGVGPVVALTYRATVDVPARFRNSKAVGAVLGLTPSKYQSGEINRTGAISKCGDEMMRAMLYEAAHIMLVRSTKWSWLKAWAMQIARRRGMKKAIVALARRLAVIMHRMWVDGTEFRWTREQAAAPA

SEQ ID NO: 367298 - protein, 411 aa, unidentified
MITITTLFVGIDVGKKSNHIHVLDSDGETLSRFAAPNNLDGAGKIKEKLRRIILDTDFTKVIIGMESTSIYADHLAAFFRNDEFLKTWQCKVYILNAKQVRKFKDSYPELPKMDDVDAFIVAERLRFGRLPVEVRQNEKYIALRNLTRARFQAAQSLSCEKSRFLETLFFKFSTLDSSGIFSDTFGATSLAIVTDFFSVDDIIYTPIEELAAFINEKGKSHFVDPENIAKELQAAAKSSYRLPKTVNDSVNQLLAVRLVGIRAIQNQIKELDKAIESFMSLFPNGLTGIPGIGPVYSAGLLAEIGDITRFQKHASLAKYGGLAWGKHQSGGFEAANTKMILTGNKYLKYYLLEAANKVRMHDAEFKRFYQSKFKEVPKHQHKRALALTARKLVRLVYSLLSTNRLYTPPTM

SEQ ID NO: 367299 - protein, 409 aa, unidentified
MYFVGIDIAKKTHQAAIICSDGKLIGKPFKFSNTVDGFNLFLEKITAVNTDLSQFEIGMEATGHYWLNLYTWLSDKGFRLHVINPLQSDALRNLYIRKTKTDSVDAKIIADVIRIGQYSETQLADENIIALRDLNRQRFYLVDMAADLKRKIIAMMDRIFPEYQDFFSDMFSKTSVQIMKEYTSPEQILQIPTERLTQLLKKASRGRFTETKAKELKALAANSFAALLSSEMTTLLIRQMLEQLDLLEKQIADIEHIIAAQFAQFDTKLTTIPGIGTTLGATILSEIGDINRFDKPKQLIAYAGMDPSVKQSGNFVGTQSHMSKRGSPYLRRALWLAAVVAVSHDDLFKYLFQQKMNAGKTYAQAMGYICHKLLNTVFAILKTGEEYKPVYPPQIDLSKLTDQPIHSLL

SEQ ID NO: 367300 - protein, 409 aa, unidentified
MEVVHARCAGLDVHPASVVACVRVADGRRVERPLKSFGTTTQERLRLVAWLESHGCTHVAMESSGGYWKPVWHVLEGHFELVLANARHIRNMPGRKSDVNDATWIADLLAHGLIRGSLVPPTEVRELRDLTRTHKQLTRERAQHVQRIQKVLEDANVKLTGVVSDVLGQSGRAILEAMVAGERDPERLLERTSGRLKASHAVLEEALRGNVTDHHRFMLRLPLGQIDALQAAIAALEQRAKELLRPFRDVVERLTSMPGMSVTSAHVIVAEIGLDMSRFPTAGHLRSWAGLCPRLDMSAGKRLSNRTHRGCPWLKTLLVQSAWAAMRHREGYFHAQFLRLKSRRGPKKAILAVAASMFSAVYYMLRDQADYRDLGEDYFHRRDRTRLARNLVKRLRELGVEVHITPVAA

SEQ ID NO: 367301 - protein, 430 aa, unidentified
MGFIVPTDMHPEQDDQPIPYQWFVGIDWGSQRHQVCVLDGERRRVGERAIDHDGASLAQLADWLWSVSTGQPQRVAVAIEVPRGAIVEGLLERGFHVFAMNPKQLDRFRDRHSVAGAKDDRRDAFVLADAVRTDQPSLRRLHLDAPQLLRLRELSRAEETLLEDFRRSANRFRDQLHRFYPQMLELCSAADEPWLWDLIDLAPTPAHVALLSEEQVQRVLKAHRIRRVTAKEVLTCLQALALPVAPGAAEAAQAHCQFLLPCLRVLAEQLQACSQQVSALLHTLAAEPGDGEGPSDVALVLSLPGVGRKITAWLFAEAAQPIAERDYQMLRTHSGIAPVTKQSGKRRLVVIRRGCNPRLRHALYHMARVAMQCDAHFNSVYAALRAKGQRHGQALRNIGGRLLRILMAMLRHRTCYDASRIRREPVVQMG

SEQ ID NO: 367302 - protein, 400 aa, unidentified
MISVGIDVSKGKSTVCIIKPYGEIVASPFEVKHTESELKGLSQMILRLEGDVHVVMEATGIYHLPILEFLKSKNIFVAVINPFEKKKYACRGLRRIKTDKQDSITIANYGIDNWFRLKNHQRSDETYSELKLLGRQYCHYMELHVKALLELTHMLDYTMPGIKKEFNSWNESNGRDKLSDFVERYWHFDNITGMTKSEFIDDYVKWAAEKKYHQNRSKAAIIYDLASDGIPTLSASTPSTKMLILEAVRVLREIDNTLYKIITRMKELAKTLPEYETVRAMGGVGDVLAPKLIAEIGDVRRFHSGKSLIAFAGIDAPPYESGQFTGINRKISKRGSKVLRKIGYETMQVLKSHKEPEDAAVYQFIFKKEAEGKSKKQAKIAGLNKFLRIYYARVYELYKQ

SEQ ID NO: 367303 - protein, 387 aa, unidentified
MRVAAHRAEAPSAICVDLGAIFVSLELSRSKWLITSLSPGGGEKMSKHMVAGGDVAGMLSCFAELKRKAQARTGRCLPIIVIQEAGLDGFWIHRVLQAEGIESHVVDPASIATSRRRRRAKTDKLDGEALLRALLAYKRGEPRVCAMLRAPTPEEEDRRRIVRERKALTNERIRHVNRVKGLLFGQGVSGYEPLRSDRRKRLEELKTGDGRSLSPNLKAQISRELDRIELLLTHIKDVEEARDTMLESAQAVAPAPKLLLNLKGIGSEFAAVLWSEGLSRHFDNRRQVAAYAGLAPTPWQSGIVDHEQGVSKSGNPRLRSMLIELSWLWVRHQPQSALTIWFKERVKQNGGRFKKSTIVALARKLLIAIWKYVNAGVVIEGAALKAA

SEQ ID NO: 367304 - protein, 343 aa, unidentified
MQSITTIGLDIAKSVFQVHGVDAAGQVVVRRQLRRRHVLAFFQKLPPCLVGMEACASSHHWSRELQALGHTVRLMPPAYVKPYVKRQKNDAADAEAICEAVTRPNMRFVPTKTLEQQGCLMLHRARHLFIRQQTAVINSIRAYLAEFGIVAPVGRRGVEQLLRIVGDTTDHRLPEVARACLAALGNQLRALKIQLLEFDRRIIAWHRSSATSKRLDAIPGVGPALATALVASIADPKAFRSGRDFSAWVGLVPKQNSSGGKDKLGSISKQGDRYLRSLFTAGALAVIRYAKIHGTSHRPWLTALLARRPTKVAAIALANKLARMAWAMMARNERYQEPAALTA

SEQ ID NO: 367305 - protein, 438 aa, unidentified
MATKLVNLNAAGIDISSKEHVVAVPEDRSKSPVRTFQGFTRDLHQLAKWLVDCKIETIAMESTGVYWYDLYTILLDYGFEVYLVNAYHVKNVPGRKSDVSDARWLQELHTFGLLRGSFQPDNLTRSLRNYVRQRKNTIRQMTRETQRMQKALEQMNIKLNNVIRDINGKTGTAIIIKILEGVQDPKILAQYRDWRIKASEETLIKSLEGNWREEQLFNLRIAYNHYLFLQDQLHQCDIESEKVIKKMSRNSSSNKKAGKLQKSKNNPNFNVSQYLYEALGVEVTKIYGIKEITALTIFSETGINLKEKFPTEKQFLSWLNVVPNNKITGGKVISSKVKRKKNKAGQAFRDAAGALWAAKNPIGDYIRRKKAKSGGKQAVVATARKLAAIYYKMVTEKVEFNPKYITKNKEEYLRNRLIQLEILKAKTETLLADCQNVA

SEQ ID NO: 367306 - protein, 423 aa, unidentified
MKPLSDRPFTAHVGIDWADAKHDVCLQAADSEQREFDRFAHQVGSIDRWAKSMHQRFGGPIAVALELAKGPIVYALQKYDFFVLFPINPATLAKYREAFKPSGAKDDPTDAELALDLLLRHPERFTPLKPQSVAMRTLLSLIEQRRELVDDKTRVTNRLGNALKQYYPQALDWFEQRDTILFCDFLSRWPTLSAVKRARQAGLKAFFYAHNGRRTKLIDERIDSIRAATPLTDDMGVIVPYRLQVLVLVEQLRVTLHAVDRFDRQIAAVAATLPDYALFSPLPGAGPHLAPRLLAAFGEQRERFMSADELQKYSGIAPVTERSGKKRWVHWRWQCPTFVRQTFVEWAGQTINKSFWAGVYYRQQRDKGSSHQAAVRALAFKWIRILYRCWQAGIPYDESTYLNALRQRGSPLLKQLHPTAQNA

SEQ ID NO: 367307 - protein, 346 aa, unidentified
MGKSITDCSSITTVGLDLAKHVFQVHGVDASGRVVVAKAMRRNKLLEFFASLPACLVGLEASGSAHHWARELIRLGHEARMMPPAYVKPYARRQKNDAADAAAICEAVTRPSMRFVGVRSLENQAALMRHKTREMLVSQRTQLLNGLRGHLTEVGVIAAQGPRHARELAELIEACDPTIPFEVCEALAPLVVQLRNLDEAIARLERTIAKLAQKDETARRLMSIPGFGPITASAMAATVQDTSSFAGPREFAAFLGLTPKQNSSGGKQKLGRISKMGNRNLRKLLVVGAHAVLFHRKPHTDPLRMWAKKLIEKKPFKLVAVALANKMARIAFAILRSKTVYREIPA

SEQ ID NO: 367308 - protein, 340 aa, unidentified
MGIVGGIDIHRRQLTFDIVDLATGENIRGRVSPADRIELRRFLAGLDGSGGDVAMEGCTGWRYVTEELERAGFRAHVAEPADTAALRGNKRRAKTDRGDAQHLRKLLMTGELPESWIPPRHVLEARGVVRLYKDLADQRVAWTQRLHATLYHHGVPELGCPVAGEQAKTLLHDAELSPAARRAVEVALAQIEVVNEMLAPIKLDLARLSRHQPGCQALTAHYGIGPVTSVAIWCEMGDTRRFSSSSDAVRHAGLDVTVYQSDTNRAKGHLARQGPGLLRWALYEAAMSSTKKASPDHEYFCSLRERLGTQRAALAVARKLARWCHHALRAAGDDAWAEAA

SEQ ID NO: 367309 - protein, 370 aa, unidentified
MEQYSTDQIWVGLDVHQSSITAAVLYGDSHDPEVVRMRGDLNAVRKFFRRLSQNGTPRSCYEASGAGYVLQRALGRDGFHCEIIAPSLIPRKPGDRRKTDKLDAIRLAKLYRSGHLTPIAVPDEEQEAVRQLVRARLVVQREITRLRHRIVRVLATHGYHFHGTKSNWTRKHRAWLGQLRHDLDGPLRTVAGIHLEHLEYLETQQRSMDAEIERFSQMLPWRRGADALRCFRGIKTLTAMTVLTEVGDVRRFRSPTQLMAYTGLIPSERSSGDVERRGPITRSGNSFLRRVLVESAWHYRHRAGADLILKRRRQGQNPEVVAIAVKAQHRLSRKFWSLSQRKHTNKAVVAVARELTGFIWAALMAVEEEV

SEQ ID NO: 367310 - protein, 401 aa, unidentified
MTTMQDNVQRVKRFREVKATLRTEHQRLLVGIDIAQAEHVVQVRHAHTRIVGPTLTIPNTTRGFTQLWARIQQAQRATGCREVVCGLEPTGTYHQAVAAFLEAQGATVVLISSSVAYWNRRTQDGTWDKHDRKDAANCAELLEQGKVLFYSQPEGPLAELRPLVKCLRRARTELAACKARWRTTLRPALGPMGEPLPNRLRAELPAVLQAWEVAAPGRPAQPKGRLPLGLATACADLGAQVTAVQARIAAIEAALTPLAERLPAYPLLRTIPGIGPTVGAILLAEIGDIAWFTQFSQLRKLAGLDIVRVQSGQFAGQARISKCGRGLLRWALYHAAMGMARTAAGRARLAALKAKRQGDRYAGFKAIVELAAKVLRVVWGVWRSGTPYDPRRTGGLQRQAR

SEQ ID NO: 367311 - protein, 367 aa, unidentified
MKKVSTVAAKPGKKISQQKLTVGLDLGDGNSWYCVLDESGQIQLEQRVRRNAKGLREVFGELPHSRIALEIGTHSPWISRLLSELGHEVIVANARKLRLIGESRKKDDRLDAQTLARLARIDPELLYPVKHRSEQAQADLTLIRARAGLVRARTGLVNTARGLAKSYGERLRSCNVRNLNPEKAESLSPELQAALEPLLNAIESLSERIVDYNERIEMVAQQSDRQVALLKQIKGVGTLIALTFLLTWEDPHRFGKSRDVGCYLGLQPGRRNSGQSEPQLHISKEGDPYLRTLLVQGAQHILGPFGVDCDLRRWGLKLAERGGRNGKKRAIVATARKLAVLLHHRWVSGEVYEPLHTSQRTTVAAAA

SEQ ID NO: 367312 - protein, 369 aa, unidentified
MKKDSTLYVGLDLHKDSIVAAYASSEGGDPVHLGAIGTRQCDIDALVRKLQSKGARLVFVYEAGPCGYWLYRYLTGKGLACLVVAPSLIPRKPGDRVKTDKRDALTLARLARSGDLTPVYVPQVADEAIRDLARAREDALGDLNDARFRLKALLLRHDIRYTGRANWGDEHRRWLARFVFPTPAQQSVFQEYVRTVTERTELLGRLEAALLEQAKTWRMYPVVEALQALRGVQFTVAIITVAELGDLTRFERPPELMKYLGLTPSEYTSANRRRLGGITKAGNGHARRALVEAAKAYRHRAKVSEQIQARQQHLPRAICDIAWRAQVRLCGRYRKMLARGKHPNTIAAAVARELIGFMWAIAKEQPVAA

SEQ ID NO: 367313 - protein, 436 aa, unidentified
MRGCRCSMIMGFTKPIEHFNLQRKKVITMNTLYVGIDVSSKSNVVYLMLPNGDKHSNFSVANSHEGSTQLVKRILSALTSHSLDTVLIGLEATSVYGDNLVYFLREDATLAPFNRKIHVLNPKQVKKFHDAYNDLPKNDYVDSFVIADCLRFGRINKEVYMGEYRYKALQNLTRARFFAVQNLVKEKQRFMNVLFKKYSTMTQEKVFSDAFSTTALAVYDEFESAEALANMDLHELTDFIIEKGKNRFPDPVAVAKAIQKAARSSYRLPKTVNDSVNQVLSISITSMKALESQIKEFDKAIKALMELLPNVLISIPGIGPVYSAGIMAEIGDINRFDNQASLAKYAGLAWKQHQSGGFEAEVTRLIPSGNRFLKYYLCEAAFSLVRCDKEYSDFYHLKYKEVNRCQHKRALALTARKFVRLVFRLLKDNRLYCPAK

SEQ ID NO: 367314 - protein, 394 aa, unidentified
MMSKDASISENTHAVSVAAERSEAATETAADDRSKPLSSGLAENVGEPDRRRFSGSSPNSRQSGRNRCSPSSYLQGRDTSKMEFASVIGIDVSKDKLDVANWPASFAECIANDETGHSQLLKKLPKPGSCLVVLEATGRYEKPVVLELLNAGHVVSVVNPRQVRDFAKALGILAKTDRIDARVIARFGEQVRPRTTEKTHEKQDELDQLVTRRRQLIALRTGEENRIGTATSKIVRRSLQKNIKHLSREIATIDQEIARLVKSDDEWKGKSEILKSVVGVGEVTATTLIAELPELGKLNRQKISALVGIAPFNRDSGQFRGRRMIYGGRRSVRSVLYMAVLSARQHNPVIRAFAERLKAKGKLPKVVLVACMRKLLVMLNTMIKTNTHWENKIA

SEQ ID NO: 367315 - protein, 413 aa, unidentified
MDRIIERCAGLDVHKDSITACVRVPGELGRRHQETRTFGTTTQSLLALRDWLAACGVTVVGMESTGAYWKPVYYLLEADFTPWLLNAHHLKAVPGRKTDVKDAEWIGQLVEHGLVRPSFVPPPDIRELRDLTRYRKALIEERTREGQRLDKVLQDAGLKLSSVASDVLGVSGRAMLAALVEGTRDPAVLADLARGQLRKKLPQLRAALEGHFRAHHALLVGELLAHIEYLEDAIARLSQELEERLRPFAAEIDLLDTIPGINRRGAEVLLAELGADMTRFPTARHLASWAGRCPGNHESAGKRGPGRTRKGSKWLAATLIECANAAARSKRTYLASQYARIKGRRGHKKAIGAVAHSILVIAYHVLKRGRPYAELGPEYLLRRDNTEAYTKRLVRQLERLGHKVVLEPLVATA

SEQ ID NO: 367316 - protein, 367 aa, unidentified
MTEGITWVGLDAHKVSISVAMLLPGHGQPMEWQIANQPAAVRRLARKLARESPSEVRCCYEAGPCGYALQRQLLAEDVVCEVVAPSLIPVKPGDHIKTDRRDAKKLAELFRAGLLTEVQPPTEEEESARDLCRCREDAVEDRARCRHRLLKMLLRRGLAYPGKRPWNRGHEEWLRSIRFERAAEQAVFEDYQLAILQVDERIKTLDERLAKLACEEPYREPVGWLRCFHGIDTITAMTLVTELHGVERFHTARQMMAYLGLVPSENSSSDKTRRGGITKAGNSHVRRVLVESAWHYRHAAGVGKVLLQRRTGQPARAIAIANTAQQRLCRRFRRLTERGKPSAKVVAIARELAGFVWSALYEQALSH

SEQ ID NO: 367317 - protein, 404 aa, unidentified
MFKFGIDWSEQHHNLCIRNSQGAIVSQVEFKHTLAGFQRLDDERRKLGVPPSQCLVAIETAYNLLVDFLLDRGYLVYLIPPQATRGYRNRQRSTDAHTDDSDAALLSSILHTDLDSHRRLQPNSALTQQILAQVRLIDLLRRSIQRQTNQLRAVLFRVYPQALGLFGKLTAQINLHFLMAYPTAQEAQALTLHAFETFCREHRYGRVDLISRRYAHLMEPAPEANPIAVAAYRDQIRILAELLLPQVLRRTEALSSLTELFSQHPDAFIFESLPEAGQLLAPGLLAKFGDHRDRFPTPNNAQALAGTCPVTKKSGKREIVIFRRGCDREFRRIVQQFAKASVRQSGWALAYWREVRPRCRSDSDAYRRLANRWLVIIWKMWQDGKAYDESYHLQQRAQRRRPRS

SEQ ID NO: 367318 - protein, 390 aa, unidentified
MFYLGIDIGKNTHVASLIDEKAKVIFKAFSFSNSTDGATRLLEKISPYQANLEIGMEATGHYWLSLYSFLIENQFVIHVINPIQTDGWRKGTEIRKRKTDIIDSVLIADFIRYGNFLETSLADEDIMSLRNLSRFRNYLISSIGDLKRKTICVLDQIFPEYASIFSDVFGKTSKEILMQINTPNDFEDISFSQLEKVLEKITFKKFTKDKIDSISKIAKNSFGITLGIDSFSFQLKLLIEQISFIEKQVTDVEKEIKNILTKINSPITTVPGIGDITAATILGEIGDINRFSSGSKLVAYAGIDATVSQSGEYESKINRMSKRGSPYLRKSLFQAAFIASNCDPMFKDYYLHKRAEGKHHKVAVGAVARKLCHVIHAVLKNNSSYEIRNL

SEQ ID NO: 367319 - protein, 457 aa, unidentified
MTVNASPTRTTAVPGVVRVSVGIDAAITAKHHVSVRETSADGSVTMHRFVVPPTLTGLSQLSRRLARYPGVVAVAEPTSMTWLSLALSLSNGGGRLALVGTRHSARLRGAISGKNKSDVIDADVLARADEVFDLPPLVLPSPAELALRRAVTRRASAVIDANRCWRRLVSLARWAFPDVWIAFAGSLATAKAVLGRWPHLDQLACARRASLTAVVAEHTRSVADVPDRVEQIRSAARDWAQFWAGRLDLDALAWEVSEHLADLAAGNDRVDRAAEQATMYWERLYGDDALLVSLPGMGPVTAPAVRAFLGDGSRFDTAKAVANYVGITPSNWSSGTVNQPSRAITKEGPAALRLAFYLAGNAARRTDPQLAALYHRLMTRAGHCHSQATIAVARKLAERTWTVLTRGAPYRLQDPDGAPITSRAAKVLIAQQFTVPNDVRDRARAHTAATHRSKLTR

SEQ ID NO: 367320 - protein, 321 aa, unidentified
MSNIIGIDVSKVDFYASFNEQDQSKLFQNDKRGIKIFEKYLNKNNFKKDQTIIGLESTGIYHLPLSHKLTQAGFTVKVINPLITKKQNQTTLRRVKNDCKDASLVRYCTLNGAGYEFIDTPEMLTLKSLVRLRDNLSNMKNVLNLQQKSLEYKEKNLDISVSKANHRLNKSVSVEIEKLEKELKEYRKAEQKLLQTIPGVGPITAVSFISEVGNVSRFPFSQKLIAYIGLDSRVHKSGTSINGKGYISKRGNKILRTRLYNACSVAVLRPNIFQDFFQKKRSEGKPYKVALVATMHKMANVIYAVWKNNTPFQDRRGLTGI

SEQ ID NO: 367321 - protein, 410 aa, unidentified
MQALVERGCGLDVHQATVVACLLIVRKDGKVQKQMRTFGTTTQELLSLREWLLSEGCTHVAMESTGVYWKPVYTILEGALEIVVANAQHVKKVPGRKTDVKDAEWIADLLCHGLLRSSFVPPKPIRELRDLTRYRRKLVESQAAERNRLLKLLETANIKLASVATDVFGMSGRLMLRALVEGKATPQEMAELAKGKLRKKIPELEPALEGKVEEHHRFLLRLQLDRLEAAEKDLAVLEQRIQEKLKAYEAQLTLLDEIPGVDWTLAAGIIAEMGVDMSVFGSVSQLASWAGVCPGNNESAGKRKSSRIPKGNVYLKTALVEAANSAAKAKGTYLRDKFYRLKARRGYKRAAVAVAHKILVAIYYMLSHRVCYNELGDAYLDKRNKHQLTRNLIHRLERLGYSVTLEQKAA

SEQ ID NO: 367322 - protein, 466 aa, unidentified
MSRKHAKRNAPRQRGGLPVDNAPVQDDRLRTVNCDAAGIDIGATVHFVAVPTGRDEVSVRNFGTYTADLEGIADWLAQCGVTTVAMESTGVYWIPLYELLEHRGFEVILSEPSQIKKVPGRKSDVLDCQWIQRLHSFGLLRGSFRPDDAIVVLRAYLRQRETLVGYAASHVQHMQKALEQMNVKLTEVISDITGLTGMSIIEAILAGQRDPETLAKLRHERCKNDEATIALALQGNWREEHLFALRQSLQLYCVYHEKLLELDAQIESYLQTFADRSKDQAINRPLKKPRRRRDEPAFDSHGLLFRMTGVDLTTVDGIGSHSALQLISEIGSDMNCWETEKQFCSWLSLCPGVNKTGGRKRSRSGRTRPSANRAARVLRLCAQSLFRADCALGAFGRRMRARLGAPKAVTAVAHKLAKIVYGMLKYGKPYIDQGAHYYQERYHQQLVNNLRRRAGQLGYSLAPSTQ

SEQ ID NO: 367323 - protein, 356 aa, unidentified
MSRDIKYIGMDVHKEATLIAVLNGSGKLIMESIVETKASSILQFIHGLRGELHVTWEEGTWAAWLYDLLQPQATQVLVCDPRRNALLKEGHKSDKIDARKLADLLRTGMLRPVYHGEHGLRTLRELGRSYQTLSQDLNRVMNRIKALYRGWSIPCAGTQVYAPRYREEWLGKIEHAGVRRRAELLYQQLDGLQALRRTLRPELLTESRKHKASKLLRQIPCIGPIRAARLLALMQTPHRFRSKRQLWTYSGLGIETRDSAQYRFVRGQLQRAKKPQQIRGLNRNHNHEMKDIFKGAATRASCGVGPLRDFYVALLAKGMKPEMARLTLARKIAAIALILWKKEEHFDAEQLKLQAA

SEQ ID NO: 367324 - protein, 338 aa, unidentified
MEQQREYVGIDLHRRRSVIVRITESGEVLETVRVDNDPLSVVRAVMHDDPNPEVALEATYGWYWAADLLQAEGATVHLVHPLGLHWDSRRVKNDERDATELAKRLLRGDLPEAWIAPPELRELRELVRYRAKLTALRTSAKAQVHAVMAKEGVLPTYGRMFGPAGQRLLDEMPVQGVYRDRVESLRHLLEIYERELVLVESHLSRRLKHHRGFLAIQASYGVGPVMEAIFVAEIGDASRFPSARHLCSWAGITPSHRESDVKVHRGHITRQGNNLVRWAAIEAVARYHGGAPIEATFERVAKRRGTMIARVAAARKLLSLVYYGLRDGEIRCLSREAS

SEQ ID NO: 367325 - protein, 326 aa, unidentified
MSQTHPASLGIDVAKAKFDAAVLWEGKRAQRTLPLDPAGFTALDGWIHEHRLEQVHACLEATGEYGAALALALYEAGYQVSLVHPARIAADAKSRLARTKTDKSDAALIAHFCAQEQPPIWTPPAAALQALQALVRRVEMLQEMGQHEANRRQSGGSARAVRASIEATLAFLRAELAKTQRLVQQQVPPSGELRRQQQLLCSIAGVGWWTAARVLAEIEAVRGVVDARQVAAYAGLTPRERTSGRSVHHPARLATTGNSRLRRALSLPAIVAMRHNPAVQALAERLRARGKRPLVIVGAAMRKLLQLIYGVLTSGKPFDPAVALAA

SEQ ID NO: 367326 - protein, 347 aa, unidentified
MRFYTGQHQYYCGIDLHARTMYVCILKHETGEVVLHRNLRCDPDTFLRTIAPFRDDLVVGIECIFCWYWLADLCTREDIPFVLGHALYMKAIHGGKAKNDKIDSHKIAVLLRAGAIPIAYVYPRGMRATRDLMRRRLFFVRKRSELFTHIRITFHQLNLPAPTGQLLYPGNRTGLLEAIREPMVRTSVEADLILATQLDEVIGSLKRAVLRQARIEDPGTLELLQTIPGVGPILALTLLYELHDIERFSRVQDFLSYARLVKSQKASAGKVLGTSGNKIGNAHLKWAFSEAAVCFLQKNPRGQRLLKRIRAKHGKGKALGILAARLGRASYYMLKRSAAFDMDRFMN

SEQ ID NO: 367327 - protein, 344 aa, unidentified
MNISVLGIDLGKNVCSVVGLDASGAVVMRRKMRRDTLIGLAEKLPACVVGMEACCGSHHVGRVFASHGHDVRLMSPEYVRPYVKAQKNDDRDAEGIAEATTRPTMRFVELKSQDQLDMQTLHRSRDRLVGERTALINQLRAILLERGLVAPQGKWKLKEFLNVLMDKQGGASLSPRMILLVEDARAQWAELDRRIAAFEAEFVRWAKENEEARRLTTIPGIGAIVASALVAAVGRAESFNHGRDLAAWLGLVPRQFTTGGKPKLLGISKRGNKYLRKQLIHGARAALPHIAERDTPLGRWAKELMRRAHRNVAVVALANKLARIAWAVLQRRKPFDANAVSVAA

SEQ ID NO: 367328 - protein, 328 aa, unidentified
MYLCILNQDGEILVHRNMPAGPEPFLKAVAPYREDLVVCVECIFPWDWLADLCAREGIPFVLGHALSMKAIHGGKAKNDQIDSQKMAVLLRGGMLPQADVYPAAMRATRDLLRRRMHLMRKRAELLAHVQNTNSQYNLPGMGKNIAYKANRDGIAERFPDPAVQKSIAVDLALIGHYDPLLNDVEFSIVHTAKQPDPQTLSRLQSVPGIGKILSLVLLYEIHTIDRFPRVQDFVSYCRLVKGAKESAGKRYGTSGAKIGNAYLKWAFSEAAGLLLRTNPAGQKSLARLEKKHGQGKALTVLAQKLARAVYSMLKRKTAFDMPMFLQSS

SEQ ID NO: 367329 - protein, 320 aa, unidentified
MIVGIDVSKLKLDITVLLEKNKEKHKVFANNLKGFGEITQWLDQLGIKTAHICLEATGSYSEAVSLFLHQQGHTVSLVNPARIKAYGKSEGSRAKTDKVDSGVIARFCQAQPPLAWNPPAPEEQALKDLYRCRQSLIEDQIRLSNRMEALDNTKASFKIWKTLLEELKKTIKDLEAQLNALLKSHTNLSNQVALLKTIPGISDKTAVAILSELPPPNTLKTAREAAAFAGLTPTVRQSGTSVRERGSLSKTGNAQLRKALYMPALVAKKSNPLVREFCNRLAEKAKTKMVVIGAAMRKLLHLIFGVLKHQTPFGLTQQNP

SEQ ID NO: 367330 - protein, 315 aa, unidentified
MKKHAKPDVGVFAGIDVSARQISVARLQRGEENPAFTTFANSASGHTALVAFLLHAGDGLRVCLEASGNYSLDVALMLHAHRQVEVSVINPRRARRFAESLGERSKTDPVDAYVLWQYAARMTWESWQPPSSTALRLRAITRAIESLGVMHTQENNRAHALSSSQALPALVLRERQRHQHYLEHRIKQLRREACRLIARDPELDRYYRLMLTVPGIAQTSALQILGELAVLSETSDARQWVAFSGLDPCHFSSGTSVEKRPRISRGGSRYLRHALYMLSGVIRPFAERTTGQYRMPASVRTRLVTLHCRFIGDPS

SEQ ID NO: 367331 - protein, 383 aa, unidentified
MMITTTRTAESTAPTSCLLLAFELGQRSWKLGFSVGMGQRPRIRQIPAGAVGTVATEIERAKKRLGLPADSPVMSCYEAGRDGFWLHRYLVALGITNYVVDSSSIEVNRRARRAKTDRLDLAGLLSLLARYVLGDRRAWRVVRVPTVAEEDARHLPRTLEALTQDHTRLMSRLKSLLVTQGVSLPINARFLNRLEAAHLWDGTPLPPGLQERLTRTWRQLQEVDGQIRDLKALRLTRRENLTPATSHALTQLLTMRAIGPIGASVLATEIFGWRRIRNRRELGALVGLVPAPYQSGETDYDQGITRAGNAHVRRVIVQLAWGWIRHQPDSALTRWYQQRFGGGGKRGRKIGIVALARKLLIALWRYLETGVVPDGAQLKPMEV

SEQ ID NO: 367332 - protein, 345 aa, unidentified
MEHHAGIDVSLEWSSVCVVDANGKIVREIKVASEPEVLVEFFKGLSFPVTRIGLEAGPLSQWLHAGLTRAGFETVLLETRHVKAALSAMSIKTDRNDARGIAQLMRMGWFRPVHAKSVGSREVRALLVARKQLLSKLMDLEASMRGILRGFGLKMGVVTRKGFEARVRELSAGQAMLERVTSAMLEARAALWREFEQLHREMLRIVRDDEICRRLMSTPGVGPLVAITFKSAIDDPGRIAKSKTIGALFGLVPKKYQSGERDVSGGITRTGDESVRTALYEAANVMLTRTTRFSSLKRWALEVAKRRGLKRARVALARKLGVVLHRIWIDGTTFHWTKHNPAIAG

SEQ ID NO: 367333 - protein, 347 aa, unidentified
MRFYTTQHSFYCGIDLHARTMYLCILDQRGEVLVHRNMQTDPDAFLKTIAPYREGLVVAVECMFTWYWLADLCADEGLPFVLGHALYMKAIHGGKAKNDRIDSQKIAALLRGGMLPQAYVYPAQMRATRDLLRRRMHLTHKRAELLAHVQNTHSQYNLPAIGKKIAYKANREGVAERFADPAVQKSIEVDLALITSYDELLRDVELTIVKTARHHDANTLYLLQTVPGIGKILSLVLLYEIHDINRFPRVQDFISYCRLVKCAKASAGKRLGTSGAKIGNAHLKWAFSEAAVLFLRDHAAAQKYLARLEKKHGKGKALTILAQKLARAVYYMLKRQVAFDREKFFHP

SEQ ID NO: 367334 - protein, 401 aa, unidentified
MTNDYAVYLGLDVGKGEHHAVGLDAAGKRLHDAPLPNSEPKLRAMFDKLAQHGPLLVVVDQPATIGALPVAVARACGHQVAYLPGLAMRRIADLYPGNAKTDARDAFVIADAARTLPHTLRQINVDDDALAELDVLIGYDDDLAAEATRISNRIRGLLTGIHPALERVLGPKATHLAVLEILSRCGGPAGIRKAGRRKLASIATKNAPRMGAKLVEDILAALDEQTVVVPGTSAADTVLPRLADSLKSVLLQRKNIADEVEEILDAHPLAQVLTSMPGIGVRTSARILLEIGDASAFTSSGHLAAYAGIAPVTQRSGSSIRGEHPARTGNRKLKRAFFLAAFAALSDPTSRAYYDRKRAEGKKHNAALICLARRRCDVLYAMLRNHTHYRHPEPASAPAAA

SEQ ID NO: 367335 - protein, 324 aa, unidentified
MTNFIFAGCDLHEETLVNRIAIGQQPSERKTVGNSRAGREKLIAGLKRESDKHGGARIIFGYEASGEGFGLHDQMVEAGIECYVLAPTKMESSVKQKRNKNDDRDAERILKRLRAHKLAGEELPSVWVPDLQTRDDRETVRARQDLGDKLSSVKVQLRSLLQRHGIEKPTGVGKPRTKSHQQWLEQLSGDSQLGVGVRTALGSLLRQVRHLEQEIQQLDEAVDQLSRKPHRQAVVDALDQETGIGRLTATAYAVEVADFTRFRRGRQIGAYWGMAPSSDESGEVNDRKGHITRQGSPRIRKLLCQPPGSGCRKTLKCVPSINAW

SEQ ID NO: 367336 - protein, 310 aa, unidentified
MENIIAGIDVSKDRLDVAVRPSGEAFVVERNGAGLEMLVARLRELSPYLVALEATGGFETVVTAALAGAALPVVVVNPAQVRAFATALGQRAKTDPIDAAVIAHFAEATRPQPRPLPDEATQLLADLVTRRRQIIEMIGAERQREKRVMNPHMRKSITRLIKVLEKELTGLDTDIDDAVRGSPAWRDKEDLLASVPGVGPVIARTLIAELPELGQLGRKRIAALVGLAPFTRRSGQWRGRSFIGGGRTTVRTVLFMGAMVAKQHNPVLKAFFDRLVAAGKPKMVALIAVARKLLTILNAILRDRRPWQTA

SEQ ID NO: 367337 - protein, 398 aa, unidentified
MTESSDYESVQVFIGVDVGKDTHHAVAINRSGKRLFDKALPNDENKLRSLISDLKQHGQILLVVDQPATIGALPVAVARSEGVLVGYLPGLAMRRIADLHAGEAKTDARDAAIIAEAARTLPHALRTLKLADEQIAELSMLCGFDDDLAAQTTQASNRIRGLLTQIHPALERVLGPRLEHPAVLDLLQRYPSPEKLASLGEKKLAAQLCKLAPRLGKRLAADIAQALAEQTVVVPGTNAAAVVLPRLALQLITLRKQRDEVALEVEQRVLAHPLYPVLTSMPGAGVRTAARLPTEVACRAFASAAHLAAYAGLAPVTRRSGSSIRGEHPSRRGNKALKRALFLSAFAALRDPLSRAYYTRKMSQGKRHNQALIALARRRCDVLFAMMRDGTFYTPQGS

SEQ ID NO: 367338 - protein, 334 aa, unidentified
MLYAAIDIHKQAFQAAVLDSDSGEVVEERFPADRDSLARWAEPWRGRVAAVAIEATTGWRWVWRELVANGFDVRLAEPVQTRALLGRRRSAKTDRLDARWLARLLAKEMLPQSWIPPAEIQELRDRTRLRKALAEDRRRWGQRLHAYLLHEGWPCSRSNLLRPPGLRWAAALQLPEHARLQVDSLLAVMAALQEQLDTVEGELRRFARNDQRCRALQSIYGIGPILACHLLAEIGEASRFQRAEQITRLAGLDPVVDESGETRRRGHLAKAGSPHLRWALVEAAVHAHRTTAPDLALYRATRERRDTTVARLTVARKIGKRAFHALRELELATT

SEQ ID NO: 367339 - protein, 424 aa, unidentified
MKVTYLTCCGVDVHKSFLVATIVKTNGGIEPSYQKKRFSTFNHSILEFKQWLLENECHDVCMESTGKYWVPAFNLLEDEINVTIANPKWVKAVKGNKDDTKDSKWIGDLFRLGLVKGSYIPCKKIRILREYTRYRYKLVSCRSSEKNRYQNALTVCNVALDSVVSDIFGKSSTSIIDYLLEQADNSINHEEIASKLLRRLKSKEDAVMESIEGYQMTDSQKYRMRLVRAHMDYITAEINDVDSMIESMISSDPDYENAIQFLMTIPGVKRDSAITIISETGIDMSQFCSSKRLCCWAGLVPGSNESGGKKKSVRIARAGVYLKPALVQCAHAAVKSEKSPYYKKKYESLMKRRGKKRAIVAIARMILTAIYQMLSTGEAWNPSDLYKIDMPEALLEKQKTKAIKQAMKLLQREGLYPPPEPIAS

SEQ ID NO: 367340 - protein, 372 aa, unidentified
MNYNTVYVGMDVHKESFTFCAYTIDAEKGSRFQRTEADYKNVLRYLEFLRTVYGNDANFICGYEAGCLGYTLYHQLTEHHVNCVILAPTTMLEQRSKKRIKTDKRDAEIIAKCLAQHNYSPVHIPTAADEETKEFLRMRDDHKLALKKVKQQILAFCLRQNYRYDGNSHWTAAHIKWLKSLKPEALYKEILDEYLLTYTALSDKLERLDKRIEELASKDEYKESVKKLCCFIGVKTHTALSVLVEVGDFHRFASAQNFASYLGLVPGEDSSGDGQTRLGITKAGNRHVRMLLTEASQCYARGQIGFKSKKLKSRQAGNSPQVIAYADKANERLRRRYYKMVLGKSKKPNVAKTAIARELACFMWGMMTDHVA

SEQ ID NO: 367341 - protein, 391 aa, unidentified
MKEAITKPLKGQEKAKAKGKTDARKAVSRREGVPPRAKVLSDGTTVVGIDIGERHVNLCEIDSDDAVTETRLGNTPKKLREQFEGKAKRRIVLEAGAHTRWIAELLGELGHEVLVVDPRRTKLISGSLYKDDRVDAQTLAMLGRDAPTLLKTIPVRPLESQVVLTLVRARAGAVQGRTRIINAVRGLLKPYGYTTTKDSRGAGFTAHIRATLDPILLRLVDSLLVLIDTFNAEIKRYDADIELVLPRFAPDAVHVTSINGVGALTVLYFVALVGNPGRFEKTRDVGPYLGLCRRRQDSGDYRSELGITKAGDNLMRALLANCAAYILGPFGQDSDLRQWGLKKVGGGSRAEKKKAKIAVARKLAVLILTLWKTGRVYTPFRKPANEATKAA

SEQ ID NO: 367342 - protein, 359 aa, unidentified
MSSIALGRGDVIIGVDTHKNEHIAVAIDGLGGRLGDLSLAANPGGYAQLVAWAVGLGTVARFGVEGTGSYGSGLARFLRRNGHNVIEVGRPPRKGERRMSGKSDVIDAEHAARAVLAGKATATPKLADGLIEAIRLVKIARDTAVKAHSTAMITLKATLVTASDELRAELEPLTDFKLTTACAALKADGDLGDPAQAMLHVLGSLARRWFELHEEIKVHSRQLKKLTKTAAPDLVAAFGVGPDVAAEMLVTAGDNTDRIRSDAALAKLCGACPIPAGSGKTNGRHRLNRGGNRQANSALHRTIVVRMRWHPPTIAYVERRTAEGLSKKDIIRCLKRFLAREIYGLLPAPSTPIVLASAA

SEQ ID NO: 367343 - protein, 405 aa, unidentified
MTFILAFDVSKGESYKVLYQDEYCLSEGKITHTQQEFHLLLEEIRSLPDTPEIVFEATGVYSRPLEKFCQDNHLFYSLLNPLEAKKQLEEGSLRSWKTDQADAHQLAQTHWKNQRPIKQLQQSHYLDLRDLSRFYQEIEEKIKRIRMDLHNALQLTFPEVEQFFSSRVTLYALSLIELFPHPAFVLSSSRTKIKNRLMKATRKKISENRAWQKADQLLAYASCAYPAVDSDSIQCQKVRYYACLLQDLLEQKDQLAQQMIERAQPFEAFQLYQSIPGIGELTAVLLLGELGDIQRFSTSNKLNAFVGIDIRRFQSGKYVGKDHINKRGNPKARKILYFTIRNMIRQQRAAPNHLVDYYYNLKKQPAPKKEKVATVACINKLLKCMYSMVRNHTRYAYAYTASNDQ

SEQ ID NO: 367344 - protein, 347 aa, unidentified
MERPQNYVGIDVASATFTSAVGRIGEQWQIVVRTAQFANAYDSFAQYLHWLQEHEIQPDNSVICMEATGVYNEVLAHFLVANRYRVAIEPPLKVKRAFKPAGHKSDPVDSCQISEYAYRYWDELSIWAPRQELLEQIKTLLTTREQFVTQKVGHHNALLALKRKAVRTPLAERAHEKAISELKAHIQRLEDEIVRLIDQDPDFHNMVDLLTSIPGVGLLLAAHMLLTLHSTPQPLSPKRLAAFIGICPYEESSGSSLHAPATSRHYGPPGLRRLLFLAAMSVRNHNVQFKTYFLRKQQEGKPKKLILNNIANKLLKIMVAVVRSNTPFIPNYRSVNPGLLKKALTLS

SEQ ID NO: 367345 - protein, 331 aa, unidentified
MKFSEIIGIDVSKETLDVKIHTEGLMSQFENTESGYTNLIKWVLAITKLGKSDLLFAFEHTGLYSLPLSVYLSNNGYSFFMIPGLELRRSMGIKRGKDDKIDAQAIALYAFRRKEEIEPYQMPSESIQELRRLLSLRERLVKQRAGYEASKKEYVRMMKSKNLVYVDIHEDMIQELNKQIQRIEKELDDLIRNDEQMKAMYDLITSIKGVGPQTAMFVIAVTNAFSLFKDWRKFASYAGIAPFPYRSGSSIRGKTKVSHLANKKIKTLLSSCASSAIQCNQEMKIYYERRINEGKNKMATLNIIRNKLLSRIFAVIERGTPYVNTFKYATC

SEQ ID NO: 367346 - protein, 384 aa, unidentified
MINSNIVFIGLDTHKEFTEVAYVEEGRNAKVIHLGRVPSSKLSIKKLVRQFQSKYPHSTLHFVYEAGPCGYWVYRLITSLGYPCYVVAPSLIPKKPGEHIKTDKRDAIKLASLLRTGDLDPIYVPEPEDEAIRDLSRARETAMKDLKDGKYQLKALLLRNNIKPTVKDNWSQKHLRWLTELVLPYPSQQIVLQEYIQTISERVKRLERLDNELIHHVKNWRYYPVVKAIQAMRGVRLLVAVGVIAELGDLTRFDHPRKLMSYLGLVPSEHSSGGHRRRGSITKCGNGRARRLLIEGAHSYRYSANISTDLQKRQEPLSKEIVDIGWEAQLRLCRRYQRLIKRGKHYNVVVTAIAREMIAYIWAIAREVVLSPIDSSKRLSRVPA

SEQ ID NO: 367347 - protein, 422 aa, unidentified
MEAFNVSDFAALIGIDWADRKHDICEINRDTNTQHLSVISSEPKSINSWALELKQRYNGRSVAVACELKKGPLIYALSKFKHIVLFVINPSSVAKYRAAFTHSGAKDDPTDAIIQVEILQLHMDKLTVIRPDSEDVRCLAQLVEYRRKLVQDRVNLTNKIATTLKNYYPHVIDWFKEKDTQIFCDFLLRWPSLAHAKKARKQTLLDFFNQHNSRYPIVNEKRIKEIKDAEILTEDMAVITPNLLLIECLVPQLKQLMLAITRFDDEIKTLYKQHTDRAIFDSLPGAGPQLAPRLLAAMGSNRDRYKCAADIQKYAGIAPVTERSGKKEWIHWRYSCTKFLRQTFVEWAGLSVRYSFWAKAYYRQQEAKGKPHNTIIRSLAFKWIRILFRCWKTHTPYDESTYLTALKSKGSPLLKFAVESGL

SEQ ID NO: 367348 - protein, 322 aa, unidentified
MGTLSFCGIDVSKDRLDAMVLPEQQSSCMGNDPAGWAQLVEWLSDFSIAAIGLEASGGYERGVMRALLAAGLSVRQINPFKLRQFANASGVLAKNDRLDARMIASFIAVMPTRAAQRRTPGIEQMSEIVTVRRHLSDQKIAAENATKLLEDAMLQRLSRRRIEQLASDIAQLDNRLAEIVAADSALSRRYQVLTSMPGVGLVLACTLIALLPELGRMSRKQIAALVGVAPYDFDSGKLKGKRCIWGGRAPVRHVLYMAAMSAGNWNPTLKAFRHRLKTAGKVPKVTIVAVMRKMITTLNAMVRDDVAWADHLAGRRSAPTAR

SEQ ID NO: 367349 - protein, 344 aa, unidentified
MKITTIGLDLAKSVFQVHGVDASGQVVIRRSLRRAQLLPFFARLPSCLVGMEACGTSHYWARELIKLGHQVRLMPPAYVKPYVKRGKTDAADAEAVCEAVMRPTMRFVPVKSPEQQAALSMHRTRDLLVKQRTQLVNMIRGLLAEFGIDIPKGLERALLMARRIVDGEAPDVPMEAAKIMSTLAQQALDIHVRLREIDRDLLVWQRGNDVARRLMTIPGIGPVGATALAASITDPHQFRSGRQFAAWLGLTPLQKSSGGKERLGRISKMGDKYLRKLLIVGMTSLVRRAKYNPKAVDPQLADLLARKPVRVATVAMANKTARIVWAVMARGETYRAGHRPALAT

SEQ ID NO: 367350 - protein, 367 aa, unidentified
MKKVSTAAAKQSKNFSEQKLTIGLDLGDRSSWYCVLDEAGSIVLEQKLNTTPKAMKEVFGTIPRSRIALETGMHSPWVSRLLTELGHEVIVAHARNVRLIGESRKKDDRLDARTLARLARIDPQLLSPVRHRSARAQADLTVIRARAGLVRARTALVNTARGLAKSYGERLRGCNVRNMNPEKAEGLSPELQTAIEPLLAGIEVVSEQIREYNERIEALAQQSYPQVALLKQIKGVGTLIALTFLLTLEDPHRFGKSRDVGCYLGLQPGRRNSGQSQPQMHISKEGDPYLRTLLVQGAQHILGPFGVDCDLRRWGLKLAERGGKSGKKRAIIATARKLAVLLHHLWVSGEVYEPLHNGSRMTVAAAA

SEQ ID NO: 367351 - protein, 448 aa, unidentified
MNFYLGIDVSKGYADFVIINDKKKTVLESFQLDDTFDGHSCLCSQLSTFVDQNKDTKLFAAVESTGGYENNWFDLLIRLQKSLPIQAARLNPLGVHANSRANLQRIITDQISAKNIAEYLVAHPEKVTYQIPDGKFASAKKLWKFIQMLKKQKKQLLKHLELHVYSANPELLQYCKDGVPIWVVKLLRKYPTAKKLSKAKVASVAAIPYIDEGKARKVIKAAKKSIASASDELTEISIITVVDQLISLNKTIKEQHQVLIDNFTTPEAELLDRIPGVGIESAIGMWIEIENIERFSTSKKLSSFFGLHPVYKESGDQGSGYRMSKKGRKAPREILYMLVLSAIQRNPIIKEIYDERTSKGMNKMSAMGMCMHKLLRIMYGMLKNKTEFDAEIDRQNRKDKELDQKVSTKKDKKRRFQKYDPKAPTSSRQYKKRKEQVQSTSQIHKNND

SEQ ID NO: 367352 - protein, 419 aa, unidentified
MKAPSDGEFTAFIGIDWADAKHDICLQLADGKPREFDQIPHRVDRIEQWACAMQRRFGGPIAVALELSKGPLVYALQKYDFFVLFPINPSTLAKYREAFKPSRAKDDPTDAELALDLLLHHRDRFKPLKPQSAAMRTLLYLVELRRRLVGDKTRFTNRLGNALKQYFPQALDWFEQRDTPLFCDFLTRWPTLAQVKHARKATLETFFQAHNVRFAKVIEARIESIKAATPLTEDVAVITAHRLQAQALVDQLRVTLQAIERFDAEIASLAPTLPDYALFSALPGAGPSLTPRLLAAFGEQRERFGGADELQKYSGIAPVTERSGNSCWVHWRWQCPTFLRQTFVEWAAQTINKSFWAGAYYRQQRAKGSSHQAAVRGLAFKWIRILYRCWQTRTPYDESTYLNALKRRGSPLLKQFEQG

SEQ ID NO: 367353 - protein, 341 aa, unidentified
MKNLFIGVDFSKEKVDVAIIFADGLTETAARVFNEFKTTVSGYKQLVKWVEQNSYGIDSSLWLFCGENTGDYSKGLCNFLYGKGYDMWLENAKSIKDSSGLRRLKSDRADASMIAEYAMRNYDRAIMYEPLSESLAQLRELFLYRQMVIRHRCSFQVRRGEKRLTMEKSPVKTMISQSGRHIVSELNKEVEKIDKRIAELIKSDEELTEVFTIVTSVPGIGTQNAICLMVYTDNFRRFNYDSRKIACYYGIAPFGKDSGTSVHSDPRVHYMANRQIKAMLTQAALVAVNFNPVIARYYMRLVERGKKKQVALNNVKNKLVHLVTAMVRNRQTFTPNYKISA

SEQ ID NO: 367354 - protein, 338 aa, unidentified
MNSSLPDSVLGIDIAKVKVDVQLRRVHSPQKPTHLIYDNSEQGHRKLLDWLAAQQVGQLHVCLEATGTYGDALALCLHQAGYTVSIVNPLRVKKYGESELSRVKTDKTDAGLLARFCLTQHPDPWTPPPVERRQLQDLVRSLQDLQHLRQQQLTRQQSGPHVESVATATTAVLTCLQTQIATLHTQIEQHVLAHENLKGEYELLLSICGIGKATAAVLLGELGDLRRFANVRDLVAYVGLCPHLSRSGTSVHHPSPLSKRGHAPVRKALYFPAMSAVRFNPAIKALYQRLLARGKPKMVALAAAMRKLVHVIYGVLRSGQPFDPAHVSVRPVRPAASH

SEQ ID NO: 367355 - protein, 347 aa, unidentified
MRFVGIDIGKAKCRAAIMGPGGAILEEFTFTNNHEGIEGLASRLTLDDRVVMESTGSVWTNLYNHLDERHISVALANPLKTKAIASAKIKSDKVDARILAHLLRSNLVAESYVPPKHLREIRALVRHRVGIIKIRTMVKNEIHALIDKHGLKHEFSDLFGKHGLEWLRNIELPPLDRLILNNHLTHLESLNQQTERVDEEIHNKACEDPDVRLLLSMTGIEIYSALLIRSEIGSVDRFPDYKKLVSWAGIAPSLHQSGSVEYHGSITKQGSRTLRWIIVEAARVAVNHDARMRSFYERVKHRRGDQKAIIAVANKMLKIIWFMLTRREPYESRNEKRYQQKLNSIAS

SEQ ID NO: 367356 - protein, 357 aa, unidentified
MSHNSHTALVPNVTIGLDLGDRMSRTYEIDAAGQCLREGAVSTTVAGITQYFAKRERCRVVLEVGTHSPWVSRLLEQLGHEPIVANPSAMFAGRRRRRRRNDRLDARFLGRQGRVDVELLYPIQHRSANAQRDLEYLRARDQLVAVRTGLINHVRGAVKSSGCRLSRCSAEAFAKRAAGEVPDALRSALTPLLEVIADLTRRITAAEHDIAVLTRERHPVALRLQQPAGVGPLTSLAFVLLIEDPTRFRKSRDVGAYFGLVPRLDDSGDATPQLRISKAGDEFGRRLLVSAAQYILGPFGPECDLRRHGNAIAQRGGTNAKKRAVIAVARKLAVLLHQLWVSRAVYDPDYQLKRRAA

SEQ ID NO: 367357 - protein, 387 aa, unidentified
MIYVGIDIAKLNHFASAVNSDGEVLVEPFKFSNDNDGFCLFISKLNSFSKDELIIGLESTAHYGNNLLSFLVPKGYKVVMINPIQTSTMRKNNIRKTKTDRVDTLVICKTLMLQPHRFVSLYDLGIIQLKNLGRFRQKVVKQRTRLKIQLTSYVDQVFPELQYFFKSGIHHKGCYALLKEAPSHTSIASMHLTHLTYLLSSNSHGRFKKETAVELRVLAQKSVGICDNSLSIQITQSIEQIELLDRQLELIESEMTDIVKSLDSVIMTIPGIGYINGGIILGEIGDISRFKSPSQLVAFAGLDPTVYQSGNFEAKHTRMSKRGSKTLRFALVNAAHNVVKYNNTFKAYYDQKISEGRSHYNALGHCAGKLTRIIFKMLRDDVKFDLD

SEQ ID NO: 367358 - protein, 340 aa, unidentified
MQFVGVDLHKKVIRLCVIRVVRGKRKITARRQFACRDTQRIRTFFEGLKRFQVVVEATASYEWFFLLIEDLADRLVLAHPKKLRVIAESTRKTDKIDAEVLAVFLALDMIPEAYRPSPRIRQYRVLVRHRRWLSSRITAVKAKLRNKLAHYNADIAELFTRRGKVYLANLALSASDRFETTALQEQLALLQRQLGEVEAELVQFAQTAPLAEREARAILASIPLVGPVTIDVMLSELGDWRRFHGARSVVDFAGLAPGLRESAGKRHELSITKEGSRLLRWAMIQAAWRLAIRSPRWNRLYQRLQRNTGSKKKAIVGVARQLLCVMFSMLQSGQTYRVAA

SEQ ID NO: 367359 - protein, 412 aa, unidentified
MRLFAGDDWAEDHHDIEVMDAAGKVLAKRRLPEGAAGMAQLHRLIGQFVPEDDIDSAEVVIGIETDRGPWVAALVAAGYTVYPVNPLQASRYRERHGVSGAKSDAGDAHMLADMVRTDSHQLRSAAGDSPEAAGIKVLARTHKTLIWERTRAVQRLRHQLREYFPAAIEAFDDLDAPDALELLGKAPDPGRARKLTRAQVSAALKHARRRDIPDKATAILAALRSEQLGQPPALTAAYAATVRSLIPVIATLNEQVKILQGQVGEHFGRHPDAEVYLSQPGMGKILGARVLGEFGDDPRRYRDGKARRNYAATSPITRASGKKKVVAARFIHNDRLVDALNAQAFAALNASPGARAFYDELRAREIEHNDALRRLANRLVGILHGCLKTGTLYDEATAWGHRENLPQSSAAA

SEQ ID NO: 367360 - protein, 351 aa, unidentified
MPYFIAFDTHCEFTEVAVLNSRGKLVRRQRCPTTIPTLVEAIESVKRPRQVTFEEGPLAGWLSRNLRDHADQVLVCDPRRNAYVAKEGDKDDPIDAERLAQLLRGGFLKEVHQVDSLDRSLLKQHVAFYHDRVRERVRQGHQLTALLRRYGVFASISKVNNPDERRLLWKQLPRRKVLREDLDCVLKVYQLLLEQEERLRARLTQLARKELAIRRFREVPGFGWIRAATFYVYIDAPTRFRSKSALWRYCGIGLERRHSGSGPQRVRLCKGGSRPLKNILMGAAKSAITQTGGPFADKYEEWTQQKGVNPATARRNIARSLAATLWSLWKNDDKYDPDKSRRPEKSSLETR

SEQ ID NO: 367361 - protein, 342 aa, unidentified
MESAVTIGLDLGKSVFQVHGVDAGGTVVVQRRLTRGKLLGFFAKQPPCLVGMEACAAAHHWGRELQKLGHRVRLMPPSYVKPYVKRQKNDAADAEAICEAVTRPNMRFVEIKTCEQQGTLVLHRVRLMLMRQRVQLSNAIRGHMAEYGLVAPVGRNGLQRLITILGNPDDDRIPAVARASLAPLVCQFDLVNDQVLENDRRVRANARSTEVGCRLMEIPGVGPVLASAIVATVPDPAAFKSGRDLAAWIGLVPRQNSSGGKEKLGGITKQGDRYLRQLLVIGALAVIRYAQRHGTKRPWLIQLLSRRTPKIAAVALANKMARMIWAMMMTGERYREPVVVAA

SEQ ID NO: 367362 - protein, 437 aa, unidentified
MGVEEVKDEPLYRGRVCGIDVGKAELYATIRVPSDSNPARRASETRRFATTKRGVLELAGWLRCWQVPAVVMEATGDYWKGPFYRLEAEGFECVLADARQVKNLPGRPRRDPSDSAWLAACFERGAVTACFVAAPEFRLIRLHTRYRRDLTEERTREKNRAEKLLESAAIKLSSVLTDLHGVTGRDIMGHLIAGERDPRALAQLARGRARAKISELVAALEGAEFFTAEHAALLRTMLDRIDQIDAGIARLSQTIERLLAPWEEQLQQAESMPGWRRRSAEDALAETGPDMTRFPTGAHLASWAGRTPLESSSGQRQGKARAKKGNRYLAAVTGETAVAAGKTQTREGARYRRLARRRGKPKAQVALGNTQLKVYHALLSHPGTRYQDLGPDYYERQRDTRRQIAHHVAKLGALGFEVTLARIPAPEPDQTADTTAA

SEQ ID NO: 367363 - protein, 342 aa, unidentified
MQITILGIDLGKNSCSVVGLDASGRVVLRRRLHRDGVVKLAAGLSHCIMAMEACCGAHHLGRKLREQGHEVRLMSPEYVRPYVKAQKNDDRDAEAIAEAATRPTMRFVELKSEDQLDMQSLHRARDRLVGERTALINQLRAFLLERGIIVPQGRRKLQRHIETLLGAEEVSFSRRTRALIEDQQAEWRELDRRIVAFDEEFALQARTDETARLLTTIPGIGPLNATALVAAIGNAQTFKRGRDLAAWLGLVPKQMTTGGKPKLLGINKRGNVYLRKMLIHGARAALPTLSKAETPLGAWLRGLLARAHTNTVVVALAARLARIICAVLRSGKKFEMSAATVS

SEQ ID NO: 367364 - protein, 312 aa, unidentified
MENEIHFIGIDVAKAKLDVDMLRPDGRHRSKKFANTPGGHDELVSWLQGHQVIHAHICMEATGTYMEDVAAHLSDAGYQVSVINPMLSKAFVQSQGIRSKTDTVDARQLAYFCREKRPAIWEAPHPVERALRALVLRHQALTEMHVQEQNRRESARDVQLPSIDMHLLWLDTELKRLEKQIKDLTDDDPDMKHRRKLLDSIPGIGPKTSAVLLAYVGLKERFREARQFAAYAGLTPRQHESGSSIRRVSRMSKMGHVSLRRALYMPAMVTLYKTEWGREFRERLEKNGIYGHSRFCNTDFDDKLACLNLSGV

SEQ ID NO: 367365 - protein, 419 aa, unidentified
MDLTDLTSTDTEPASPAPPPGLVAGVDTHQDTHTLAVLTAQGAVIATSSFPADQQGYDDLTAHLDRLGPLTAVGVEGTSSYGAGLTRTLRQAGYDTVEVLRPSRRVRRHHGKSDPIDAIAAARTVLSGDGVSQAKDTTGPAEQLRLLLAARTRLISAATAITNSIHSLLTTAPEPLRERYRRLDTPALITRLARTRPTRTITTPQQAATSALHHMARTHQDLHHRAERLNQQMHHILTTHYPGLLAVYGAGTTVAAQLAVTAGGNPGRIHNEAAFAHLCATAPIPASSGKTTRHRLNPGGDRRANAALHRIALVRLRHDPTTKNYANRRTQEGKTTKEIIRCLKRAIAREVYRALTQPPPTDTTSTLAAHRKRHHLTQTDVAHALNTYPARISDIENHRRPLPQLTHRYHQYLTTLDTQ

SEQ ID NO: 367366 - protein, 366 aa, unidentified
MDAIYIGVDFHSREQTICYLKTETGELVIRELKHQDKEQVRAFYQQFQEHVIVGLEASGYSPWFEAMLEELAHEVWLGDATEIRRRARWRYKDDRRDAELIWDLMVHHEFPLLHQLPLKSREILRMLRYRQKLIKVRTMTKNSLQAIAMQAGLAKARQLFTAAGQAEFKAAAMSPVLQYQRDHWFELLKPLNQELLETMKWFKAATKGDAAIARLRTHPGIGLLTALCLEHTLQPVSRFRNQRKVVAYAGFDPMVRRSADSAIHLGISKAGSRMLRYLMVEAVHTAIRYDEDLKRFYQRVAERRGRPKAKVAAARKLLIRAYIMMRDEIDYAEFKRRAVAARLARRGQGPLSVPEVLIGQSASPGA

SEQ ID NO: 367367 - protein, 391 aa, unidentified
MVCVGIDVAKDKHDCCILDSEGTTLVDCFTIPNNMDGFKSLLQTIQDCSQKSDKIKVGLEATGHYSYNILGFLLDNDLPVYVMNPLHTNLYRKSLSLRKTKTDRVDAKTIATMLLSDVDLKSYTDTAYHNEELKSLTRYRFDKVQERAKLKQSVSRLVTILFPELEQLVSSIHGTSIYALLREYPGAKQISEAHLTRLANILVTTSRGHYRKDRATHIRDAARTSIGSVMPAKSLELKHTIKLIQELTSEINEIEDAIRKIMDELKPPILSIPGMGFHSAAMILAEVGDFSNFNSPDKVLAYAGCSPSTYQSGKLTNCYAHMEKRGSRYLRYALYTATKYVCYWNPVFTEYLTKKQAEGKHYNVALSHATKKLVRLIYALQKSGKAYLAVT

SEQ ID NO: 367368 - protein, 341 aa, unidentified
MNQVSTVGLDLAKHIFQLHGADSAGAVVFRKKLRRGQLLAFLATLPPCTVAMEACGSAHYWGREIAKLGHTVKLIAPAYVKPFVKRQKNDMADAEAICEAAQRPTMRFVALKSANQQAAAVVFRTRDLLVRQRTQAINALRGHLAEFGVIASKGLVHTSKLIAALEDPASDLPQAARGILAILVEELRSLDERVAVLDREIARHAKESAVARRLMTIPGIGAVTAAALTALAPPADTFRRGRDFAAWLGLTPVQRSSGGKERLGKTSKMGERSLRRLLIIGASAVARWAARKGVPAGSWLGRMLARKPPMLVRVALANKMARIVWALLTKGGVYRAPGAAV

SEQ ID NO: 367369 - protein, 344 aa, unidentified
MTVASMPHPPQSSQADACGEEVVLGVDTHKDTHVAAVLTTMGALVTSRCFPTTAAGYQQLLSWAQAVGTLRRAGVECTGSYGAGLTRHLRTEGVQVVEVNQPDKTTRRRRGKTDAVDAEAAARAVLCGRATATAKTGDGPVEMARMFKLAKDSAIKSRTQAINQLKAVLVSADPALRESLSGLSTAKLIRRCAQLDTGVPTDATSAAAWTLRLLAHRIVGLTAEVGDLQTRITNAVNTSTPRLLERNGVGPDSAATLLITAGDNPERLHSEASFAALCGSSPVEASSGKTQRRRLNRGGDRQANAALYRIALSRLRWDPRTRGYVDRRIAEGKTPREAIRCLIG

SEQ ID NO: 367370 - protein, 412 aa, unidentified
MKDLLEISCGLDVHKEKIVACILIGPLGKPTRSEIREFSTLIPDMIALRHWIVSKNCHHVAMESTGIYWMPIYEILEDAFSGDITLLVVNARHMKNVPGKKTDMRDSEWISTLLRAGLLNGSFIPEKRIREFRDLNRYRKSVIRDITSQKNRSEKFLQSSGFRLSSFISDIFGASGRNIILHLIEHGQIDKTALDSCLKTKTRNRIDEILMSVNGTLSEHQKAFLRILMTHYDSLKKHLAEIETSLEEDMAPFALQVEQLNSIYGISTTASCAIIAEIGIDMKPFKTAEHICSWAGLCPGNNESAGKRKSTSVTKGNPYIKSMLCEIAWVIAGKRNTYLSAWYWRIKQKKGAKKAIVALARKLLVIIYTMLKQGTLFDESCFETRRKHCEQKQLSRYIRELEKHGYHVEAQS

SEQ ID NO: 367371 - protein, 335 aa, unidentified
MKNYLFYVGIDISKLKLDVVVIKFGTINSEEHFIVENNQKGVKSIIKFLLKRKIDLTTTLFCCENTGIYTFHLSAYLSEKGYDYWIVPAIEIKRSKGISRGKNDKTDAKDIALYSMRNIDKLNLSCLAEKEIQQLKLLFAEREKILKSVLLFETSKENKVFTSKEIYKTISLVNAKTIKALRNSLRIIETRMKEIIKNHADLNQQFELIKSIPGVGPQTAIYLIIATKGFKAFTNSRKFACYAGVAPFEYSSGSSIKGRTKVNHMANKKMKSLLQMCALTAIKWDPQLKDYYNRKKKEGKNSMLVLNNIRFKIIGRVFSVINRQTPYVNTYKFAS

SEQ ID NO: 367372 - protein, 372 aa, unidentified
MRKHSKDQAKGNHLMGNSSGKHTTKRVWIGIDLGDRWSEVCELDAAGAVRSRERVRTTPAAFQIHFEAYRGAEVAMETGTHSGWVSRLLADGGLRVTVANAREIRKIHQSDRKNDRSDAEILARMLRFDRSLLSPIYHRSAEMQAHIALLRARDTVVRTRTACINTVRGSVKALGGRLPACSAESFTRRASNEIPAELQAVLGPVLELIATTTAAIRAYDRRIEELGREHYPQTALLTQVAGVGPVTSLAFVLTLSDPQRFSRSRDVGAYFGLVPRQYDSGQQQSQLPISKAGNAFMRRLLVQSAQYILGPFGPDCRLRQSGERLMLRGGKNAKKRAVVAVARKLAVLLHYLWSTGAVYEPFHDSAIQKIAA

SEQ ID NO: 367373 - protein, 413 aa, unidentified
MALKIVYQICCGIDVHKTFVVACIASTNKGVTTYKRHRFSTYTKGLKELSQWLCKNNCKDVCMESTGKYWIPVFNVLENSCNITLAHPKYVKAIRGKKTDKKDAKWIADLFKHDLIAGSFMPPLAIRQLRDLMRYRFKLTNFMSSEKNRLQNCLTVSNIQLGNVVSDTFGKSSMNIINKLLENPLDNSFDIEPLIHGSMKDKLPELKLAIDGFITPEQAEKLKVIQQHHEDLKSRKADLEKIILSLSVPYAEEINLILTVPSFKNIFSAIAVVSEIGVNMDVFPTAKHLCSWAGLTPTNNESAGKKKSVRISRAGCYIKPLLVQCATAVVKSEKHPEIRNRYLRLKHRRGHKKAIIAIARMLLTAIYNILKKKESYNAELYRKSDVLPVNREITVEQAILLAKIQGYRIRAAS

SEQ ID NO: 367374 - protein, 343 aa, unidentified
MDHFAGLDVSVKETSVCIVDDTGRIVLEVKVASEPEALLPVLKSNAYHFKRIGLEAGPLSQWLFSALAEAGLPVICVETRHMRAVLKAQINKTDRNDARGIAQMMRVGLYRPVHVKTLRSQKLRMLLTHRKLLQSKAIAIENDLRATLRNFGLKVGMVGKVKFEARIKELVENLPDLGLLVEPLLIVRRALREQIAILHRRLLAIVRDDEVCRRLMTVPGVGPVVALTYRATVDVPARFRNSKAVGAVFGLTPAKYQSGEVNRTGAISRCGDNMMRTMLYEAAQVMLLRSAKWSWLKAWAMNIARHRGVKKAIVALARRLAVIMHRIWVDGTEFRWAREVAAA

SEQ ID NO: 367375 - protein, 355 aa, unidentified
MDSKKYIGMDVHKESISIAVMNGAGKIVMECVIETKASMILQFINGLSGDLQVTFEEGTWAAWLYDLLKPHVTRLVVCDPRKNASMKEGNKSDKIDARRLAELLRMNHLSPVYHGEHGLRSLKELVRSYLTITKDLGRVMSRVKAIYRSWAIACTGKQVYAPRHRSEWLGKITEVGVRRRAEFYYQQLDALRALRQQVRRDLLAECKKHPAWKQLCQIPSIGPIRAAVLLGILQTPHRFRTKRQLWTYSGFGIETHSSADHRSVSGQLERAKKQISIRGLNQNCNHDLKNLFKGAAIVASSKPGPFQEFYTALLTKGLRPEMARLTLARKIATIALIVWKRGVSFDAQHLKPQTA

SEQ ID NO: 367376 - protein, 324 aa, unidentified
MEVEAKYVGIDVSKARLDVAVWPGAQSFSVANDARGIAELVEQVTAFTPQAVVLEATGGLEALAAAELHAAELTVAVVNPRQVREFARSLGRMGKTDRLDALVLAQFAQSTHSNHRLPRLHLRDEAAAELKALVTRRRQLLAMLIAESNRRERAPRVIRRSIVASIKGLKRAIAEIEQQVRAVLASSPVQQAKAVLLAAVPGVGAQLTTTLLAELPELGSLGRRKIASLVGVAPHPHESGKFYGRRRCWGGRATVRTTLYMATLSGVRFNPALRACYQGLLERGKSPKLALVACMRKLLVILNAILRDSASWNPHYQLDSQHSR

SEQ ID NO: 367377 - protein, 351 aa, unidentified
MKTQITALPKLYIGIDIHKRSWKVHCSTDLFSGRSFSMPPDPGQLLKYVVKHFSDHEVSVAYEAGCCGYSAYRSFRSYGWGALVVNPADIFRRGKERHTKTDRIDAQLISRELKDGRLESIHVPSVEREQLRSLFRRRNDLVKDFRRIKSYIKMQLLYFGIKEPIEFDNGHWSHAYRKWLDDTLFKYPTAKAALESRMRFFRFVDKELREVSNQIRAYCRRHYKKDYYLLRSIPGIGGIVACGILSELGDLRRFNNLKQLAGYVGITPNVHQSGDSHKSFGMSYRAHRLIRSYFIEAAWQAIRTDPVMQQYYRKHYGKDTKKIIVKVARKLLSRTLAVIKTEIPYEIGVMQ

SEQ ID NO: 367378 - protein, 426 aa, unidentified
MAEKKMGPEPEFAAFVGIDWADRKHVWCLQAADSRKRETGGLEHKVEAVEAWVAELCRRFDHRPIAVAVEQVKGALVFLLNKYECLHIYPVPSTMTAKMREALYPSGAKDDPRDADLLLEILGQHRDKLHRLSPDDEATRRVQNLVEERRKLTAERTAQSNRLTSYLKIYFPQMVEWFEKLDMPLVCDLLERWPTLEELQKVSPEELRRFFCQHHCHRELRERRILAIGGAIPARGDRAVIEAKSAVVKVIVQLIRSLLEGIAELDRKIEEVAAEHPDFFIFDSLPGAGAVLAPRLLAAFGSQRDRYRCAAELQTYSGIAPVTERSGKRKWVHFRWACPKFLRQSFHEWAGHSIAQSTWARAYYQQQRDRGSDHHAAVRALAFKWVRILFRCWKDRVAYDENKYLAALTKRGSPLGKLFVVGLASL

SEQ ID NO: 367379 - protein, 361 aa, unidentified
MEEIIDRNNALYVGIDVHRYEHTAVCADRFEEEKGSLSFANTPIGIQQFINWLSAIGEPNLTKIIGVEGSNGNGRFLTESLSQDYSQIYEINPIRTKQRRNFGTRGDKSDAVDARLIIEVLTRKLDELPRITIQDRSKTMTTLEQLVIFHEDLIFQIARLKNQLHLLFHEIEPEYQSHRGSSFSVRILDVWLKKCGKKVILSDPKHIKYFMILEKIRQLRRLKRTSKRVDGEMKLLINQIKPNLLTFPGVGIVTAGKIITAVKGIDRFRLDTFIKYAGIAPVEKQSGRNKKHKQNKCGNRQLNNAIYTVALTQLRGHSKAKAYFQKKIAEGKTKKHAIRCLMKRVACIIYGLLRSRENYRG

SEQ ID NO: 367380 - protein, 319 aa, unidentified
MKRQKEVIEFEQVVERGCGMDVHKETVVATVAGIGIKEETRTFSTFTNSLRELNEWLKSLGVTVVAMESTGIYWKPVFNVLEADFEIMLVNARHVKNVPGHKTDTKDSRWITKLLLSGLLKGSFIPPVEIRELRDLFRYKRKLTGQASAERNRLQKILEDANIKLSSVVSDTFGVSATRIIDALLAGEEKVEELVKLCHGRLKPKEEALKEALVGKLTLHHKFMLRTIRKSMANIEGIIAEVETQIDEQTKAYEVEIGLLQSIPGVGKDSAIGIIAEIGVDMKVFPNEQHLASWAGMSPGNNESAGKKKVGAPRTEINI

SEQ ID NO: 367381 - protein, 298 aa, unidentified
MKKVSTVAAKPSKKISQQNLTVGLDLGDRNSWYCVLDESGQIQLEQGVRTNAKALQEVFGAMPHSRIALEIGTHSPWISRLLSELGHAVIVANARKVRLIGESRKKDDRLDAQTLARLARIDPELLYPVKHRSVQAQADLMMIRARAGLVRARTGLVNTARGLAKSYGERLRGCNVRNMNPEKAESLSPELQAALEPLLNAIESLSERIVEYNERIENLAQASYPQVALLKQIKGVGTLIALTFLLTLEDPHRFRKSRDVGCYLGLQPGRRNSGQSEPQMHAAGARSAAHFGTIRRGL

SEQ ID NO: 367382 - protein, 362 aa, unidentified
MRIIGCDLHARQQTLAMLDTATGEVVEVTLKHEGDNVREFYSSLPRPVRVGIEATGSMQWFVNLLEELGIECRVGHPATIRAAEPRKQKHDRRDAELILKLLVEGRFPAIWLPSQELQDLRSLLRHRHQWVRMRTRMQNALQSIALANGLRRGPALWSHDGQSRIASLPLAPHTAYRRSELQAMYEKFEAEIEKLNQRVEEQASKRPGARLLMSHPGVGPITALATEVFLGDPARFADSKALASYVGMIPREYSSGGRQRLGGLSKQGNPLLRFLWGEAGAHAARKDPELQRFYRRKWVQKGLGKASVAVARKLGIRLWILLREQIEYHEFCRRGQKQQKSSDACAGMPETPYGAKSHRPVD

SEQ ID NO: 367383 - protein, 387 aa, unidentified
MLKKTGKVAMMANHHLLECFPGAFAPVGRPARTGSGEIVLTQGQSPVCSLIRRCPQDSIRTVAGATKPAWQGRMNPMEHYVGIDIAKNTFDVHVLPEKAARHFEYTEEGIQACRQWLVAFHPSLILMEATGGHEKQLARELFAAQFPVAVINPRQVRDFARAKGRLAKTDKIDAFIIAEYAQTMQPPAQEAMDELSEKIRALIARRRQLVNMCTQEKNRREHAFDDYISGSLSCFIASFEKALQEIDELIENHINGAPALKKKADLLVTAPGIGKSTAMFLVAELPELGKVNRREIAALIGTAPVNRDSGTFRGKRMTGGGRRHIRNQLYMPTLAAIRYNSVIRTYYQHLLKNGKVKMVAVVACMRKIITILNSMLMSNQPWNPDFA

SEQ ID NO: 367384 - protein, 373 aa, unidentified
MLYIGIDVAKSKHDCCIIDSDSVIITDSLRIPNSRVGFETLYNTIVSTLNGLDISNVKIGLEATGHYNTNITNFLYSKGFSVVILNPLVTNAFRKAGTLRKTKTDKCDAKVIATMLFSDDSKSYSPSSYQIQELKSLTRHRYRMIGYRSKLKLSVTRLIDVIFPELPDFVWSIHQNSSYQLLLELPSPEVIKECHLTHLTNIISKASRGKYGKEKAIQLRELAGNSISSSNRSLTFELQQTIRLIQSVQKKITELDKQIKLVVDELNTPLMTVPGIGYTIAAIILAEIGDINNFSSPAKLLAFAGMEPSTYQSGKYNASNTPMVKRGSTYLRWAVMQAARLVPMRDPTFALYMNKKRSEGKHFNVARSHVGKN

SEQ ID NO: 367385 - protein, 318 aa, unidentified
MNTNTLQNINVGVDTGKSQLDIYIRPLDIYFTVPNTDKGISDAIKIIKKHKPQRVVIEATGRLEMPFILACDKAKLPYVVANPLRIKRFAEAIGQRAKNDRLDAELIAHYAERVQPELTKLKSENIRLMSDLVTRRNQLLTMQTMERNRLQILPKNISSTITPILTALKNQLEKVEAKIEKLIESCPEYQAKNTILQSMPGVGKILAASLISNVPELGFITNKQASSLIGVAPITRESGRFKGKRMIKGGRPQVRTVMYMAMMSAIQCNPVFKATYERLLAAGKPKKVAIVACMRKMVVTLNSMLRDGAMWNKDSVKN

SEQ ID NO: 367386 - protein, 340 aa, unidentified
MRELYAGCDLHGNNNLIGIVDGEGKRVFKKKLSNDLALVRDTLKPFQGELVGIVVESTYNWYWLVDGLMETGYKVHLANPSAIQQYSGLKHSDDQHDAFWLAEMLRLGILPEGYIYPKEERPVRDLLRKRGHLVRLRTSLVNSLQNILSRNLGRKMNVNDMKAIKEDRVSLLLEMNEDLALAGRVSKEAIDHLTRQIHKIEWVVQKRIALKEAYRYLLTLPGVGKILSFTIMLETGPIRRFATVGDYVSYCRKVPSQWTSNEKRKGSGNTKNGNKYLAWAYSEASEFARRLYPEPRAYYNRKMQKTNAAVAHSALANKLSRAGYYVMRDQVPFQPEKLFG

SEQ ID NO: 367387 - protein, 313 aa, unidentified
MKKTICGVDVSKAKLDVCIEPGHRLASFNNDTAGIAELAAFCREHAVTLVVMEASGGYERRAFVELWEKGISCALTNPRNVRRYAEAMGILEKTDRIDSSVIARFAHAKNLAPTPLPSQAQQRLKALVTRLRQVTDDLTVQKQRRAGLLDNSEMLASLNEVIALLKRQSRSLEGEIASMIDDDPLWAKLADTWREMKGVAGRTVARLHAELPEIGTLSNKAIAKLAGLAPIANDSGKRKGKRSTRGGRAGVRSILFLVAATVARYDKSLADFRARLIAAGKEKMVIRIALARKLLVRLNAKARDARAQYANAT

SEQ ID NO: 367388 - protein, 342 aa, unidentified
MKQYVGLDVSQRETAVCVVDETGRMIFEGRAKSNPGALAELIRKKAPCAERIGFETGAMSSWLWHELTRIDLPVVCIDARHAKAALSVRMNKSDENDARGLAELVRIGWYREVKVKSAESQQVRSLLVTRSRLIQIRRDLENQIRAMLKEHGLLFERAIGSMFRRKVVELVDTGHVLRDVIEPLLSIHEQVCREQEKLDKRMAGLARTDETIRRLMTVPGIGAITALTFRHTIDDPSRFRSATTIGAYLGLTPRRKQSGETDTNGKTSKWGDRLLRTYLFEAASVLLHRTKKWCSLKAWGLRLAKRIGMKKAQVAVARKLAVILHCIWVDGTTFEWSSEKKA

SEQ ID NO: 367389 - protein, 391 aa, unidentified
MPMYFVGIDISKYKHDCCIISAADQQIISKFTITNDKDGFEQLLTALNSLSNPEDIKIGFESTAHYALNLELFLENANHSFMEVNPVLIKEYKKSTTLRRTKTDSVDCESIARWLMTVEYKPHSKGFYHAYSLKSLTRLRDRLIRQRSFYLVKITNVLDHTFPEFKPFFNERLSKTAIYLLENYGSAEKMAHMNSASYDKLRCISRGKFSIQQFLHLKELAANTVGVNNSIFDIELNSLLTLYNSLCKEIKNLEAEITRLIEEVHPHYMSIPGIGPISAAVIYAEYGDISNFSNPSQMLAFAGIEPGINDSGTESHGGRMVKHGSSQLRYVLLNACLPLIRFDLTFATYYAKKRAEGKKHRVAITHVAKKLIRVIYALERQDVDFNAQKLR

SEQ ID NO: 367390 - protein, 430 aa, unidentified
MTLKETTPPDAVLVAIDISKLRNDVLIEVPGKRRRRRLVVPNTRREHDHLIELLCNFEHPVIAAFEATGNYHRPLAWRLLDAGLDARLISSVALARTREALHNSWDKNDPKDAQVILHMLKIGATQTYCDPLRTGINDIQEFSKTHEIVSKAKTELWHRILTHYLPLYFPEIARFAGNSRSDWFLAFLEQFPIPGSITAHAKDTFIDAAWSVVGKKVSKARLLGDIYETAQTSIGLPVSVDSSAIAMFRLVIAEGRSLIRQRNEIEQQAHAVLADNEDYQRLRQIPGIGPIIAMTILAEAGDLRRFRHHRQFLKFCGLDLATYQSGQFRGQTRLSKFGNARLRCAFWMAAQVAIRQRDNSFRAKYERYVAKDRTNSDLKRKALTAITAKMARTAHALIKTGSDYRPFIEEPMPSGRTSIRVGREGAKATL

SEQ ID NO: 367391 - protein, 346 aa, unidentified
MKILALDLGKYKSVACVYETTSLTHRFATIVSTPQALHDLLVAEEPERVVIEICPLAGWVSDLVGTLGIVLEVASTTHDAWRWKNVKRKNDRQDGLKLAQLSALGQLTLVHMPAPPVRQWRALINYRQRLVSRRTRIRNHIRALLLRQASVMGRGAGAWTRAGIAQLKALARPLAEVAPEELWRGELELELAALEALAAPLRQVEQKLDELSAANKGVQLLRTIPGVGPRGAEAMVAVLDEVQRFKRGKEVGAYLGLVPKQIQSGESNRLGRITHQGNRLLRSLLIEISWSGLRYNAWMRAVYERVRRGSKTRKKIAIVAVARRLLIRCWAMLRDGTRWRPELSST

SEQ ID NO: 367392 - protein, 410 aa, unidentified
MKTPTSTNNLVDIFVGVDIGKGSHCAAAINARGEVLLKPVKVLASAEGFAAFEERLRQLGDKSALLIGLEASGHYWMSLWRFLLERDWTVQVFNPVLSSKSARTHLRGRKTDADDALFIARTVRDGDFIPLQPGQEETQQLKLLCRQRRFITHELANAKRRLTGLIDLSFPEFSKHFDNIHSKAAHAVLKAAPSAAAIAVLSLRRLQSLLATASRGRFGAVKAKALKESATESLAALRPDPALELLIQSMIAQLEFFDQQLAQLDLHIQRLFCSMAHPIKSIPGIGSITGPLIVAELGDLRRFAGRRPLHALLAYAGMDPQVRQSGQWSGKTKMSKRGSVALRTALYQAASMARLHEPRLAQIYHHHRNELHKHHSVAISHVARKLLAIIYAVCARGQAFDPTKICPQPT

SEQ ID NO: 367393 - protein, 369 aa, unidentified
MDGPRRHRLCQNEVVADLKQRGPSVEQISRIGMDTSKHFFQLHGVNAAEKVVLRKKLRRKEMVAFFKALAPTVIGIEACGASHHWARILRSFGHEVKLIAPQLVKPYVKRGKNDTADAEALCEAMSRPTMRFVPVKTAEQQAALMMAGLRDRLIRNRTQLSNAIRGYAAEFGFTSARGMAHIDPLLDRIQADESVPVLARELFAAQAEEYAQLQAQIAEVDAKLMAWHKTNECSRRLANIPGIGPIGATLLLMKTPAPEMFRSGRQFAAWIGLTPKDHSTAGKVRLGVITRAGGEALRSVLVVGATAVIQHVRRGGRGSPWIVGLLKRKPPKLAAVALANKMARIAWKLMVTGNSYAAKSAPAALMGAA

SEQ ID NO: 367394 - protein, 448 aa, unidentified
MAQRSQLKRMEIANPNAAGIDVGSASHFVSVPPDRDDEPVREFKSFTEDLEHLADWLVSCGIDTVAMESTGVYWITLFELLESRGLNVFLVNARHVKNVSGRKSDVLDCQWLQQLMSYGLLSGAFRPKDEICALRSVMRQRAMLLSYQSRHVQHMQKALTLMNVQLANVISDVVGETGQKILRAIIAGERDPLKLADLKNGRIVASKEEIAKSLQGNWREEHLFALTQAVELFDAYSKALQRCDLQLESMLKALSRSKAEPGPSRRRVGKAKNAPKFDARTYLFRICGVDLTAIDGIDITTALKVVAEIGPDLSRFQNAKHFASWLGLSPGTKISGGKRLSGATKGNANRAAQALKLAAAALRPSQSALGAYYRRMCGRLDKGKAVTAVAHKLARLVYAMLTKGTAYVDQGQAYYEERYQQRVIYHLRRKAAAMGLELVPIQAQGQSA

SEQ ID NO: 367395 - protein, 343 aa, unidentified
MEKKWFVGIDVSKKTLDCAILRLGGKEKEAVCFQVQNDETGFMDIRSGIRSRKIEKNQLVVVMENTGMYCFELCCFLEATGIDYCVLNPLHVKLSFGLVRGKNDKLDSVRLASYARLHREELKCTHLSSRVIIHLKELIAERKHYTNALAALKNFDQEPKPKECLSTNERVREAKTFWEEKIQAVEKEMLELVCQEPDLLENYNLLVSIKGIALVNAINTIVYTNNFTLFTNARKYACYIGIAPFEYTSGTSVKGRTRVCKAGAKSLKADLSMAARSAVAYDNDIKTYYQRKKDEGKHFGVVLNAVKFKLVERMFAVVKRRKPYVDIYKYKSQIARDQAQLAI

SEQ ID NO: 367396 - protein, 344 aa, unidentified
MTIVEDPCVITGGVDTHADTHVAAALDSLGGLLGVREFPATAAGYADLLGWLGGFGTVALVGVEGTGSYGAGLARHLAAAGIRVVEVDRADRQDRHRQGKSDPLDAVSAARAALSGRAAGVPKGRDGAVEAIRALMVAKRSARAERTQAINQARALILTGPDELRARFAGKRAAALAEAVAALRPRPGDAADYSLRVALRELGRRVEFLDAQIGRLDDLIIPLVTARAPGLLSLYGVGPDTAALLLIAAGDRPERLRSEAAWAHMCAGAPIPASSGKTRRHRLNRGGNREANHALWRIVITRMSAHPATRAYLERRTAEGLSKKEIIRCLKRYVAREVYPYLRG

SEQ ID NO: 367397 - protein, 346 aa, unidentified
MVTLGADSHKATHTVVAVDETGAKLSHVTVKANSDGHLQALSWASQWSERRWALEDCRHVSGRLERDLLGAGETVVRVPPRLTAGVRESARTTGKSDPIDALAAARAALREPDLPTATLDGPSREVRLLVAHREDLVGERTRIQNRLRWHLHELAPGGDHENHSLNGRKALQTLEDQLTDEDGLVAALALEQVQSLRALTLRINQLEAEITARTAALAPSLLALPGCGSLTAAKLVGEVGGALRFKSRAAFAMHNGTAPIPVSSGRTDRFRLNRGGNRQVNTALHRIAITQLRIDGAGKDYIAKRMSLGNTKREAIRALRRRISDEVFRRMCSDETVDAGCQSQAA

SEQ ID NO: 367398 - protein, 438 aa, unidentified
MPEKKSAREVLQSLREEIRSSQNTLIVGIDIGKFRHCACFAASSGKVLRRRFFFTNTIDGFNNLIRQSKYYQKKNNLPKIIFGMEPSGSYWFHTYEFLQLRGKKAVTVSPLAVRRNRETINVSKDKTDPKDAHNIADLVGQGKFYLPIYRDKEIRQLKRLMRLYYRLIRQRASLRCRLRGVVGYVFPELEHYFTDITAKSMILILEKAPFPEKIRKMGKSRFTSFLAKKNPYLGRRRAEEIFKLARSSVGIRGEEEATSLEINLLLRELRSIKENVALINVQVGGIVKTREDYGLLLTIRGVGPITAASLIAEIGDITNFSSGKQLIKLAGLDLYGLESGISIHSQRKISKRGRKTLRTVVYQAAVGCIRCNVHLKACYLELLAHQAGKEKIKPKALVAIASKLLRIVFRMLTEKKAFDAHYDEMLKERFALRARKAA

SEQ ID NO: 367399 - protein, 342 aa, unidentified
MQITTIGLDIAKNVFQVHGIDANETVVVRKRLRRSQVLAFFKALPPCLIGMEACATAHYWARELTKLGHRVRLMPAKDVKAYVKRNKNDAADAEAICEAVRRPTMRFVQVKSAEQQGQLMQHRTRDLLMRQRTQSINALRGHLAELGIVAAQGDKGVKELLSIVADEKDARLPIDARASVIVLAAQLQAVQTLIGSIEKRIKTQHRSNEASKRLETIPGIGVIGASAIAATVADPTVFRSGRNFAAWIGLVPRQDSTGGKQKLGPISKQGDRYLRRILVVGAHSVLRRAKQNPEKYLWLTQLLARRPFKVVAVALANKMARMAWALLAHGGTYRAPVLAAAA

SEQ ID NO: 367400 - protein, 367 aa, unidentified
MKKVSTVAAKQGRNNSQQKLTIGLDLGDRNSWYCVVDEAGQIQLEQRVRTNAKALREVFGAMPHSRIALEIGTHSPWISRLLSELGHEVIVANARKVRLIGESRKKDDRLDAQTLARLARIDPELLSPVKHRSAQAQADLMMIRARAGLVRARTALVNTARGLAKSYGERLRGCNVRNMNPEKAEGLSPELQSALEPLLAGIEVLSEQIREYNEGIEKLAQESYPQVALLRQIKGVGTLIALTFLLTLEDPHRFRRSRDVGCYLGLQPGRRNSGQSEPQLHISKEGDPYLRTLLVQGAQHILGPFGVDCDLRRWGLKLAEHGGRNGKKRAIVATARKLAVLLHHLWVSGDVYEPLHNSSRTTVAAAA

SEQ ID NO: 367401 - protein, 376 aa, unidentified
MSKVLFVGLDVHAETIAVAVAETGGEVRSLGVIPNRLESVRKMVHKLGAVQHLRACYEAGPTGYVLYWQLTQLGVACEVIAPSLVPTKAGDRVKTDRRDAEKLARCYRAGELTAVWVPDASHEALRDLVRAREAAKKDQLKARHRLGKFLLRHGRRPEGLKAWTKQYVEWIKSHVHFEQPALEATLADYLEEVDHVAARIVKLEKAIDEAVRQAPPEIRAVIEALQALRGVAQTTAATIVSELGSLSRFQSPRQLMGYSGLVASEHSSGNRVQRGGITKTGNGHLRRVLVEAAWAYQHRPNVTGFLLRRQKNLDISEEAKKIAWKAQQRLHKRYQALAARGKNKNQIVTALGRELLGFIWAIAIETEKQYKLAKAA

SEQ ID NO: 367402 - protein, 352 aa, unidentified
MVVLGADVHKRSHTFVAVDDRGRKAGEKTVPATTEGHLKALAWAKTNFGEDLLWGIEDCRNLSARLERDLLSAGQKVVRVAPKLMAHERAGARTQGKSDPIDALAVARAVLRHPDLPVAAHDEVSRELKLLVDRREDLVAQRTSTINRLLGRIHELDPTQILKKKALTRAKAQTAMAAWLATIDGLLAELATDELGDIIRLTLSINELEKRIGTAVRAVAPQLLALPGCAELTAAKIVGETAGITRFKNEAAFACHTGTAPIPVWSGNTAGRVRLSRAGNRQLNAALYRIALTQTRLADSPGQTYYRKRIDQDGKTKAEALRCLKRRLARVVYNRLHADEQSRHHTHQTAAA

SEQ ID NO: 367403 - protein, 343 aa, unidentified
MQITTIGLDLAKHWFQVHGVDANGQVVVRRRLWRSGVIAYFRSLEPCLVGIEACATAHHWRRELIALGHTVKLMPPAYVKAYVKRNKNDASDAEAICEAVTRPSMRFVPIKDAEQQSVLMLHRARSLLVRQRTMLVNALRAHMAEFGIVAPQGLRHVEMLTKTITHQQERLPELARSILQTIADQLNGTMARIQEIEGRLVRWHRQSRVSRLVATVPGVGIMGASAIAATVPNPSLFRSGREFAAWLGMTPRQNSSGGKERLGRTSKRGNKYIRSLLTAGAVAVLRHARNRPTRDGAWVRALLARKPTKVAAVALANKTARIVWAVMVREAGYQPHEVFRQPA

SEQ ID NO: 367404 - protein, 344 aa, unidentified
MDNHTQYSGFAGVDLAKKVMQIHFVTGDGEITDKQVKRAEFLDFFRNRTKCLIGMEACGASQDWARKLEAMGHEVHLMSPKAVKPFVSGQKNDYNDEIGIYKAMFNGVRRVPVKSTEIRDLQTLRRIRSQVTKDKVKEINHVRGLLAEYGIVMGKSITAFNKGISSALESLKERGDVSPLVAEELQTTVESIKTKIERQKRLDREIEQLARGCKNYENFLKTPGVGPFTAAMLCVLLCDPAIFANGRQFAAYIGLAPRSRGSGGKNFIIGIPSKFNCDSESRAVFVECAQALARYKNKSPWVDGILRRKPKKVAVIAIANKLARQVWAMANKGESFKQMTILTA

SEQ ID NO: 367405 - protein, 276 aa, unidentified
MEAAVWVGIDVSKARLDVALGAAGELFEVANDQRGIAALLARLSQPALARVVVEATGGLETALVAELGAAGLPVVVVNPRQVRDFARATGQLAKTDALDARLLARFAERVQPPLRALPTPAERELKAVVARRRDLVEMLTAERNRLGSAPKVLHREITAHIRWLEARLKERDRDLDRKLRGSPLWQEKEDLLRGVPGVGPVLCATLLAELPELGRLDRREVAKLAGVAPLNHDSGRLRGQRTGWGGARAGARGALPGDPLRGALQPGPQGLLPASA

SEQ ID NO: 367406 - protein, 386 aa, unidentified
MSSIPVFVGLDYHQGSIQVCVLDRDGQQLANRGLVNDARAVAEFVRRHGHAVRVAVEACCGAADLAEELCVSQQLPVELAHPGYVARMKRSADKTDFGDAGLLADLARVNYLPKVWLAPAATRELRRLVRHRAQLVARRKDAKLRVRGLLRENRLRCEDARAWSKAWIRWVQVLAPLSDNDRFIANDHLAEIAALQGRIEACQRRIKAVTAGDPLMAKLMTLPQVALVTAATIRAEVGRVDRFDSGKQLARFCGVTPRNASSGQRQADAGLIKAGNPELRKVLIELAHRLIFRLDSHWAKLAYGMLNRGKPKNVVVAAVANRWVRWLFHELKRPSGDLRTSSTEGGPPLPPPPTPRPGRVKAEARAKAEGAHRTRRKERMPQPSVS

SEQ ID NO: 367407 - protein, 416 aa, unidentified
MNAVGIDVSSRKSTVAVLRPLGEVVCLPFDVTHDIAGLASLVEKLKALDGETRVVMEHTGRYYEAVAKALHEAGFFVCAVNPLLIKEYGANSLRRVKTDKADAVKIARYALDNWADLRDFTPMDAIRYDLKTLNRQFQLASKQRTASANNLIALLEQSFPGIRKCFDSPVRSDGTQKWVDFAHSFWHVDCVRKQPFPAFCERYRKWCKRHAYLFKLSNAEEVYALAKRAVVLTPKSKVVKVLVQEAANQLSSISRSVEVYRAEMDRLAAMLPEYPVVMAMYGVGKSYGPQLMAEIGDVRRFERKQALVAFAGIDPMPNQSGDKNVRSNKSSKRGSPYLRKTLFNVIRTYLQCAPQDEPVFQFLNRKRAEGKPFYVYMLAAANKFLRRYYAKLRDYFASLDTLQPVAPIPTILKAAL

SEQ ID NO: 367408 - protein, 410 aa, unidentified
MDIIVERCAGLDVHQATVVACVIAGPPGGKTKKEVRTFGTMHHELTALRDWLQAHGCTQVAMESTGVYWKPVHAMLEDHFDVIVGNAQHIKNVPGRKTDVKDCEWIANLARHGLIARSFVPPRAIRDLRDLTRYRRKLVDVAAAERNRLIALLESAGIKLAGVVSDVFGVSGRAMLSALIDADQSPAEMATLARGRMRRKLTELERALHGTIEDHHRFILRLQFGRIKAAEADLAILDARIDEKLAPYEEALHRLLGIQGVDRVVATTIIAEIGVDMTCFPDASHLSSWAGMCPGNHESAGRQRSGKTRKGNVFLKTALVTAAVGAAKARGTYYADKYRRLCARRGKMRAAVAVGHTILVAVYHMLADGTVHEDLGGDYLDRLDKRRTSNQLIRRLNNLGYNVLLTPKAA

SEQ ID NO: 367409 - protein, 261 aa, unidentified
MDIGKRNCKACIMNADGSIAEESEYDNKLTEAEIFAYSLVKKYGKCIAVCESTSNLWLKTYQAFEKYGIGVKLANPLKTKAIAEARIKTDTLDARTLAHLLRSDLVAECYIAPKGIREDRSLLRLRTNFVQDRTRVMNRVHSLLDKYDVKCDYDNIFGVKGTRWLSSLKLSVNDQILLHEYIMQIEFLNTEIKNTESKISYQASKNESAKILMSMTGIDYFSAMLIALEIGDITRFNTPEKLVSWSGLCPSIHQSGNSLYM

SEQ ID NO: 367410 - protein, 345 aa, unidentified
MECYVGLDVSLKQTSICVVNEKGLVVREGVVDSVPEAIAGFVRSKAPGAVRVGLETGPTATWLWTELARLDLPVICIDARHAKAVLKMQVNKNDRNDAAGIARIMQTGWFKEVRVKDLDSHAVKALLASRALLVKIKRDLENQVRGLLKNLGLVVGHGTFNVFAVRAKELIADRPELTSAVSPLLTARTAIEQQIGELDRRVLKLSRQDAQARRFMTVPGIGPITALCFKATIDDPARFRRSRSVGAYIGLTTRRHASGELDWSGRISKCGDAMLRMYLFEAAGVLLTRVPKWSALKAWGTRLTKRNGLRKAKVAVARKLAVILHRMWVDGTEFNWSNNNKEVAA

SEQ ID NO: 367411 - protein, 403 aa, unidentified
MNAVGIDVSKGKSMVTILRPFGEIVSSPFEIKHTSSDIHSLIKLIHSIEGESRVVMEHTGRYYEALAHQLSAADLFVSAVNPKLVKDFNNDSLRKIKSDKADSVKIARYALDKWQSLEPYSITDELRAQLKVMNRQFHFYVKQKTAMKNNLIGLIDQTYPNANTYFNSPTRSDGSQKWVDFVSTYWHVDCIRKMSLNAFVEHYQNWCKRKKYAFNKSKAEEIYTKTKELVPVFPKNEITKHIIRQAVDQLNSTSVTVETIRTLMNETASKLPEYSIVMQFKGIGPSLGPQLMAEIGDVTRFTHKGALTAFAGVDPGVNESGSYAPKSVPTSKRGSSNLRKTLFQAMDVLIKTMPQDDPVYQFMDRKRTQGKPYYVYMTAGANKFLRIYYGRVKEYLSVLPDPS

SEQ ID NO: 367412 - protein, 389 aa, unidentified
MKIYVGIDIAKLNHFAAAISSDGEIILEPFKFTNDADGFQLLVSKLESFDKNSIIIGLESTAHYGDNLVRYLVAEFYQVCVLNPIKTCQMRKNNIRKTKTDKVDTFVIAKTLMMQDDLRFVSFYDLDMMDLKALGRFRQKTIKQRTRLKIQLTTYVDQVFPEIQYFFKSGLHQHAVYALLKEAPSPKEIASMHMTHLANLLKVNSHGHFTKEQAKELRVLAQKSVGANDSSISIQITQTIQQIELLDSQLEKIEAEMTDIMRFNDSVIMTIPGIGYINGGMILGEIGDIHRFSNPNKLLAFAGLDPSVYQSGNFQAKTTRMSKRGSRVLRYALVNAAWNVVRNNATFKAYYDAKRAEGRTHYNALGHCAGKLVRVIWKMLTDEVEFNLE

SEQ ID NO: 367413 - protein, 321 aa, unidentified
MTGTQDKIEFDQVIERGCGIDIHKSVLVCTVQGKGIKTETRSYDAFTESIEQLGAWLSSLGITHIAMESTGVYWKPVYNMLEKDLAIVLVNARHLKSIPGNKTDKKDSRRIAKLLLAGLLKGSFIPPQPVREMRDLTRYKRRIIEQIASEKNRIHKFLEDANIKRSSAVSNLSGVVATKIIDAIIEGEGHPEELAKLRHGKMKASAQELIVALTGNLTEHHRFMLKMVKQSIKDKQGLINELDKQVDNKLKENEMVLDAELLSTIPGVDKEAAAYILSEIGNDMERFPDEQHLASWAGLSPGNNESAGKKKVHELRTVING

SEQ ID NO: 367414 - protein, 441 aa, unidentified
MPDTPLTTPEPVWAAFIALDWGSRRHAWILQPADGGPSERGFLDHAPEAVAVWAANLNRRFDGRPVAVALEQKRGSVVNLLLAYRHLVLFPVPSAMSASYRKTFVPSGAKNDPGDAAWILDLLLRHRDRLHRMEPDDDNTRLLLMLVEDRRQFVDDKTRLALRLQDCLQQYFPQLARWFDVDTVLVADLLKHWPDLQHLQRCHDGTLRTFFRQHHCGADLTARRIAAIRAAVPATHDPAVLEAGSTKARHLTQSIAMLRDQITRLEQRRDELVAEHPDRAIFASFPGAGRATVPRLIAAFGSRRERYQSAFEVECDSGIAPVHIASGKTERVSVRHACQKFTRQTFQEFAGQTIPQCAWAKAYYQARCHKPAQHHAAVRALAFKWIRILFRCWKDRHPYDEQLYLASVRRRRGQLGPALAPATCVEWKTVAGFSKLSEKTS

SEQ ID NO: 367415 - protein, 398 aa, unidentified
MLALFIGTDVSKDFSTAQALDSDGNKRFYLEFAMTADGFSKLFNVITSHCEDLAQVTVAMESTGCYHINLFSFLTHKGIRCVIINPLLTANFAKLSLRKTKTDKKDALTIAQFLLVHKNSLLKADLSPDLQDLKYLAREHESLTNLIAGIKNDIRRMLQITFPELESICNIFSETVLDFLRQFPSARLIKIVKPNTIANALMHEDKRKKTSVSAEDIIKAAKASVASHSAAKEIILPEKISTLQHLIEKKVKITKILVEACEAMMVEDIEIITSIGGISDTTASRLLAEMGDYKVFPSHKHLIAFAGLDPSVHQSGKFEGISKISKRGNRHLRHIIYLMTTCVVRGNNIFRSYYQKRRAEGQPFRKAIIATAHKLVRALFAMLSKRTTYRSKEVIPNS

SEQ ID NO: 367416 - protein, 386 aa, unidentified
MLKPDQRGKVGGPRRPSDWTVQPEDSLGPYKPAPECIAHGSRAGLREARTVYRAVSAQRQAWEAKTMSEQPVVVGIDVAKLHVDVAVLGAPAAAGRFDNDGEGHMALIEALSPLAPALVVMEATGGYEAPLACSLQAAGLAVAVVNPRQARDYARSFGQLAKTDRIDAAGLAEFAAALLVRPDLGRYLKPLATAEQQDLVALVNRRRQLLTMLGMEEQRLAAARPAVRRSIQTLIRAIRKQLDEVDGTMARHVTKHFAELAELLRSASGIGAVASATLIADLPELGHLSRRQVCALVGVAPYACESGSMRGRRRIRGGRFELRRTLYMATLAAITHNPVIRAHYRRLLDAGKLKKVALVACMRKLLTILNAMVRTHTPFQTDYRKA

SEQ ID NO: 367417 - protein, 341 aa, unidentified
MKDTMIGVDLAKRVFQLHGVAITGEVKFRKKLTREQFRVFMAGQPCALVVFEACGSASYWAREMEALGHEARLIAPQYVRPFVKRQKNDAADAEAIVIAARQPEMRFVAPKTAEQQAKAVLFRGRERLVHQRTELVNALRAVLYEYGHVFPIGLCHLKRIAEVVEDPNCDLPALVIAECQDLLAQIAEKTERIEAKTKALTVLAAETDIARRLQTMPGVGPLTALAVEAFAPDMAQFKSGRDFAAWLGLVPRQHSTGGKARLGRISKAGQSDIRRLLIIGAMTRIMGRARHKVPAESWIGRKLATKPKMLVGIALANRMARQIWAMLTKNEDYRDPALATA

SEQ ID NO: 367418 - protein, 354 aa, unidentified
MATKPPQVIGGVDTHRDLHVAAAIDPVGHLLGHRSFPATPAGYRALLAWLRGLGRLQRVGVEGTGAYGAGLLRHLRQAGVTVVEVDRPDRRTRRSKGKSDPLDAEAAARAALAGTATGTPKGRDGRVEAIRALRVARRGAMKARTAAGNQLGCLVVSAPEPLRGTLRALSGKELVVAAAGLRPGPDLTDAVAATKAALRRVAHRYQLLSQEIAELDQALELVVATTAPRLVALLGVGTDVAGQLLVTAGDNPNRLVNEAAFAHLCGVAPLPVNSGRTTGRHRLSRGGDRAANNALYTIVICRLRWDPRTRAYMQRRTKQGMSKLEVVRCLKRYVAREVHQILTAPQPPQRLDEP

SEQ ID NO: 367419 - protein, 346 aa, unidentified
MNHHRTLVVADHHKSVFVFQVLDRQSGETRKASLPSRRSELEPFLADLQGPVLVFVEACRSWEWVSDLCEDLGIDLKLVDPSRMPEIARSSKKTDHHDVEAMVQRLLVTGELPQSYRASRRERELRALTRRLSDLRKSRRRLLYQIHAAIDAHGLPAIKTEFVRVPWREQMQGKLSKLAWLDLECVLLQYDTNLALQQLLEGELHELLEEREDYQRLCEIPGVGGVIAATILGESAGIERFSTARKYAAFTGLTTRVRSSGGKVAPGHITREGSPDLRWALGQAAMVGILARRKPTAISNFYRRKRKRGKPGALAICAAAHKLSRAVWVVLARGERFLADPTKKAA

SEQ ID NO: 367420 - protein, 325 aa, unidentified
MDIPAIGIDVAKETLDVSVVTGGKSLARQFANTEQGFAQLIGWLAHRKLGQVHACLESTGRYSLGVALALHEAGHVVSIVNPAQIRDFARTKLGRNKSDTVDAGHIREYGALFRPPAWRPPSASLRRLCELQTMRAGFLASRIEWQNRAGSLGGDAAARALAAATIAHFAAQISAVDRAIAETIDTDDDLRGKRDLLLSIDGVGQTLAALVLAELPGPDVIAHSAQAVAYAGLNPRQFQSGTSVNRPTRISKIGNAKLRSGLYMPAMVAMRHNPAVAALADRLRAQGRLTPKQILIAAMRKLLVICFGVLKTGRPFDAALAMPAT

SEQ ID NO: 367421 - protein, 316 aa, unidentified
MEQPAVYVGVDVGKQQLEVVLRPSGEQFSLPNDERAVRALVKRLAPLGCVRIVVEATGGYETLLVAALHAGGLPVVLVNPRWAHAFAKAIGQLAKTDRIDARILALYAERVELKLRELPDEQTRELRALCARRDDLLDMIGAEQNRLEHAPKRLHREIRGHIDYLRKRLKHLDRDIDGAVRGSELWRQKDELLDSVPGVGPVLRASLLAWLPELGTLNRAEAAALVGVAPLNHDSGALRGRRAIEGGRAPLRRVLYCAASAAIIWNPHLRAYYDHLIARGKLHKVAMVATMRRLLLILNAIIKTGTPWKAPCSNAA

SEQ ID NO: 367422 - protein, 391 aa, unidentified
MSMYFVGIDISKYKHDCCIISAADQQIVSKFTVKNNKDGFEHLLTTLNSLSNPEDIKIGFESTAHYALNLELFLENAHHNFMEVNPVLIKEYKKSTTLRRTKTDSVDCESIARWLMTVEYKPHSKGFYHSYSLKSLTRLRDRLIRQRSFYLVKITNVLDHTFPEFKPFFNERLSKTAIYLLENYGSAEKMAHMNSASYDKLRCASRGKFSIQQFLRLKELAANTVGVNNSIFDIELNSLLTLYNSLCKEIKTLEAEITKLIEEVHPHYMSIPGIGPISAAVIYAEYGDISNFSNPGQMLAFAGIEPGINDSGTESHGGRMVKHGSSQLRYVLLNACLPLIRFDITFATYYAKKRAEGKKHRVAITHVAKKLIRVIYALERQDVDFNVQKLR

SEQ ID NO: 367423 - protein, 338 aa, unidentified
MKAYAGIDLHSSNNFTAVIDDQDQRLFGRRLPNTMDAVVSALHPFREHLEGVVVESTYNWYWLVDGLQAHGYKLHLANPSAIKQYEGLKHTDDKWDSFWLAHMLRLNILPEGYIYPKDKRPVRDLLRRRLLFVRHRTAHILSLQSSITRNCGYTMSARDIKKVDSCDADKLFDNPFLTLAARNNISAIQFLKIRIAEIEKAVKAHIQLTPQFRYLLTTPGIGEILGLTIMLEVGDILRFPKVGNYSSYCRCVKSERFSNSKKKGEGNRKNGNKYLAWAYVEAANFAIRHYPEIQSFYQRKKVKTNGIVAIKALSNKLARASYYIMRDKVPYDEGKFFR

SEQ ID NO: 367424 - protein, 315 aa, unidentified
MTNLKQSKSVVNVGVDVGKFLLDVYIYEKAIHFQEENSPEGIKRILKRLSYYTVERLVMEATGRYEFNLAQAAHQKKLPVCIVKPLRVRRFAGAIEQRAKTDKLDAQLIAEFAVKVQPSITPEKSKNLLAIKDLMARRRQLMTMRTQEMNRTQIIDKSLEVSCKRIVRTLDQEIKRIEKRLAKHIEDQAEWTEKQMILKSAPGVGDTLVYTLLADLPELGELNGKEISSLVGVAPINRDSGKMKGKRRIQGGRYSVRTILYMATLSATQCNPVIKAFYQQLVAQGKHKKVALTACMRKFITMLNAMVRDRCEWAY

SEQ ID NO: 367425 - protein, 338 aa, unidentified
MTVYAGLDLHATNTYVAMIDQENKVLYKQRHRNELPAILAALDPFKKDLQGVVVESTFNWYWLVDGLMAEGYPVRLANPSAIKQYEGLKQIDDKRSSLWLANLLRLGILPSGYIYPKEERPTRDLLRKRLQLVRHRTSHILSVKNILARNLGLRMRSVDVKKLLDSEVKRLFPDKEMRTAVLSSLGLIRHLGEEISTIETMITKKLKVKKEFAKLNTLPGVGTILALTIMLEVGDIRRFPTVGDYSSYCRCVKSTRISAGKITGHGNRKNGNKYLSWAYIEAAQAARRFHETVRSYYEKKMAKTNKIVAIKALSHKLTRASYYVMRDQVDYDPARLFG

SEQ ID NO: 367426 - protein, 338 aa, unidentified
MVVHNVTQRSARGKAEYDHFVALDWSLKVMAIARISGRDEILQVFERPANLKDLKTYLGSLKGRVILTFEESGFAHWLYLELLDEVDRIVICDPFKNKLLFHGPKTDKIDARKLCQLLRAGLLTEVYHSTSGLYELRLLVSAYEDVVRSGIRVLNQLAALKLGHRDNGKAAGFITGILNENTDLYRRSKGEFERRFRDVARRNTLVRFQKGISGIGIIGAVKIVACVVDARRFPHAGKYFSYCGLIKHEKLSGGRSYGRRKPRYSRMLKSVYKTAALAAINGNNPIRDYYDHLLAQGVAEHNARHAVARYIARISYGMLKSGTRYEPYRWRDAHHKSV

SEQ ID NO: 367427 - protein, 437 aa, unidentified
MNNPDPYQLIIGLDRADQKADLHLIEVATRKRRNQTLNTAPESLHEWLAQLRQQYPQARVGLCLEQPAGNLIPFLETYAWITVLPINPITLQKFREAFVTSRAKDDTKDARYLAELVLSHHDKLKPWAPEDAATRLLQQLIVHRRDLVDERTALTNRLQALLKQYFPQALGLCGQELWRPLATAFLLEWPTLQALRKASTKTLTAFYRRHGSHSATLLQERLDLIASAVPLTDEAALLDTFALRVQLLCRELQLVTPTVADYDQRIATAFAQHPDHELFAHLPGAGRVLAPRLLTAFGTNRERFETHHHLQCYCGIAPVTKQSGGMRHVHRRYLCPKFLKQSFHEFAAQSVLACRWAAAYYLQQCNRGARHHVAVRALAYKWIRILFRCWQERTPYSEAIYEAALQRNGSPLVALFAQIEVGKNPFKSQKKKTQKPS

SEQ ID NO: 367428 - protein, 413 aa, unidentified
MRVLNERSAGLDVHKKTVVACIMLTLLTGEVKTSVRTFSTTTAGLLALADWLTTHQVTHVAIESTGVYWRPVFNILEGAFTVVLVNAQHMKAVPGRKTDVKDSEWLAELLSYGLLKASFIPPQPIRDLRDLVRYRKTLVNERADEVNRLQKVLETANIKLSSVATNVLGVSGRAMISALIGGESSAEEMADLARGRLKKKIPELREALLGRVDNHHRVILTHILAHIDFLEGALEELYEQIQPYLAPYEEAVERLCSIPAIGEGSAASILGEIGVDMDCFPSAAHLASWAGLCPGNRQSGGKRLHSKMRNGNARLKATLAEVVWVLSHMKDNYLSAQYHRLARRIGKKKAVMAVSHSIIVIIYHLLRDKVPYSDLGATYFETLDKERIEKAAVRRLQGLGYKVILEPQEEVCA

SEQ ID NO: 367429 - protein, 434 aa, unidentified
MYRIIKIGMDVHSKNYTLCAMEPTIGAEDRIFGEVQVAPDYKEVICFIESLKMKLGFYDEYSIECGYEAGCLGYTLYHQLTGAGIKCVILAPTTMLTQQGNRIKTDKRDARLIAQCLSYGGYHPVYIPTGEDDAVKEYLRMRDDHKLALKKLKQQIHAFVLRHGYQYSGTKWTIKHVTWLKKLELDPMYRETLNEYLASYEEQEAKIERYDKRIEEIASERRYQENVKKLGCFLGIRTHTALSLIVETGDFKRFAKGNTYAAFLGLAPGERSSSDNVNRLGISKAGNTHLRCLLIEAAKGICKGAIGHKSKELRARQSGQPAEVIAYADKANTRLRSKYYKMIRHGKKTNVAVAAVARELACFVWGMMTGNISIRPTTAGTSMPAVLKNNQAAISSRVQLAARTITIEYLSVSVRSCDHCKVRAICVISMLAPW

SEQ ID NO: 367430 - protein, 368 aa, unidentified
MKKSIIFVGLDVHKNSIDVAIANTGRDGEVRHYGTIGGNVEDLLRAVKKIKSSNMDLRFVYEAGPCGYDIYRSLTEKGFECAVASPAHIPKKPADRVKTDRRDAISLARLHRAGELTYVFVPRVDDEAMRDLTRSREDAKKAQAVARQQLGGMLLRLGFRYPGENWSKAHFGWLADQKMPTPVQQVVFQECINAIDETTARVERLTRQVEALASCWRMAPVVTALQALRGVSLIVAATTIAELGDLARFEHPKRLMAFLGLVPTEHTSGPKKRQGGITKTGNGHVRRVLVEAAHAYQHPARITRPLLKRQEGLSKEIRDIAWKCQVRLCARFRRLIAKGKSRNAVVTAVARELAAFLWAIAKQIPVPA

SEQ ID NO: 367431 - protein, 433 aa, unidentified
MTRYVGIDLHKHLIVGHVLDAAGTKVDTFRYESVDAATLEHIGRNRLRPEDEVVLEATTNCWAVVRALEPFVARVAVSNPMATKAIAKAKVKTDKVDAAVLAHLLRLGYLPEVWQPDLATRGLREWTIRRSRIVGQRTTAINRLRSTLAQRLLHCPYDMSSPVARDWIAGQTVDEDTRWLLESDLRLMDSVQAELDAMDQLLAQRGYVDPRVKLLMTLPGISQHSAQSLLAAIGDITRFRDADSLASYLGLVPSTRQSANHCYHGPITKQGRSHTRWMLIQAAQSVRLHPGPLGHFFRRLKRRKPYNVAVVAVAHKLVLLAWHVLTKQEPYRYALPQATENKLRRLRIQATGLKRPTGSAPGTKKSPAKLPGGSQRIKPLAEVYANEQVPAARPAPAGELRRLDELELTDFADSLQHEHIVPRRRRNSAASSG

SEQ ID NO: 367432 - protein, 415 aa, unidentified
MEPVLDSCAGMDVHEKKVDVCIAHGPLEKSPKFEIRTFSTMTSDLEDLKSWLKKYNVTTIGMESTGVYWKPIFNIMEGEFTIVLANAQRLKAIPRKKTDIMDCKRIAKLLRYGLLPNSFIPPREIRELRDLNRTRRKLVGMMTSEKNRLTKVLESSNIKLSSVVSKISGVSSMAMIRSLLEKDRLSKEEISQLTKGSLKKKVDLLEKALDGKLTDHHRFLLKMHMENLDHLARQIAKIDEQIERKMIPFQKESNLIQSIPGISKVSASAILAEIGTDMSQFPDEAHLSSWAGVCPGNNESAGKKKSGKTQKGNSFLKGTLAEAAWAASKVKRSTYNAFYQNIVRRRGKKRALVALAHRMLMDIYRVLKTGAPYQDTGAEEANERATKRKERSMIRLLEKAGYEVVRTCTSEIAAA

SEQ ID NO: 367433 - protein, 324 aa, unidentified
MNDTGRIVREVKVASEPEALLAVLKNPAYHFERIGLEAGPLSQWLFSALAEAELPVVCVETRHMQAVLKAQINKTDRNDARGIAQMIRVGLYRPVHVKTLRSQKLRMLLTHRKLLQSKAMAIENDLRGTLRNFGLKVGMVGKVRFEARIQELVENLPDLAELVEPLLIVRRALREQIVILHRRLLAIVRDDEVCRRLMTTPGVGPVVALTYRATVDVPARFRKSKSVGAVFGLTCSKYQSGEIDRSGSISRCGDEMMRVMLYEAAQSMLRSKKWSWLKAWAMQIARRRGMKKAIVALARRLAVIMHRIWVDGTEFRWTREAAAA

SEQ ID NO: 367434 - protein, 345 aa, unidentified
MATISVLGVDLGKNVCSVVGLDASGAVVMRRKVRRETLIGLAAKLPPCMVAMEACCGAHHLGRVFAAHGHDVRLMSPEYVRPYIKAQKNDDRDAEGIAEASTRPTMRFVELKSQDQLDMQTLHRSRDRLVGERTALINQLRAILLERGMVAPQGKRKLEQFLIVLMDEQGGAGLSPRMILLVEDARTQWAELDRRIAAFDAEFIRWAKENEDARRLTTIPGVGAIIASALVAAVGHAESFDRGRDLAAWLGLVPRQFTTGGKPKLLGISKRGNRYLRRQLIHGARAALPYVAERDTPLGRWAKALMARAHRNVAVVAFANKLARIAWAVLRRGEPFAATGIPAAG

SEQ ID NO: 367435 - protein, 355 aa, unidentified
MNSSKYIAMDVHTATISVAVRDAVGKLIMESVIETKTSTILQFIQGLRGDLHVTFEEGTWAAWLYDLLKPYVTNVVVCNPRRNALLKEGSRNDRIDARKLAELLRTNLLRPVYHGEKGLRTLKELARAYLTISKDLTRVMNRVKAIYRSWGIPCGGQSVYNPRHRKEWLSKITQASVRRRAELYYEQLDALVLLRKQARQELLAEGKKHQAWKLLRSIPALGPIRAAVLMAIVQTPHRFRTKRLLWKYSGFGVVTHSSADHRYVKGQLERSKKPVSVRGLDRDHNHQLKDLFKGAAIQASTRKGPFREFYEALVAKGMRPEMARLTLARKIAVIALTVWKKGGAFDAKYLKPQTA

SEQ ID NO: 367436 - protein, 453 aa, unidentified
MDTLHRVGAGLEVHTDPVVACVRRLDDRGQAHQPVKPLGTTPPDLLALLDGRLEQQVPIVAMASTGVYGKPVFNLLEGPVEVLLVNPEPVKKVPGRKTDVKDCQGIAQRRQHGLLQASCVPPRPIRELRDRTRQRTQRVGEKARGSNRIQKVLEDATLKLGSVAAEVRGVRGRDRLRSRLAGVDRAEALANLARGRLRDKLPQLRKALTGRVTQPPRFLVGMHLDPLTHLEARLGRLDQRIHQEMDKDRPPEPPQPPPPGVAAATASAEKPGMPADGEESAAPGSGRRGRWPSLWLLVTIPGINRRTAEVVRAEIGSDRSRFATPPPLASWAGLCPGNHERAGKRRSSRTRHGNRWLRSILVQAAWAASHTRATYRSAPARRLPRRRGKKKALGAVAPTLLGRCSEVLRKGEAYQERGADYLDRLEPARRTKQLVRHLEKLGHKVTLEPQTAA

SEQ ID NO: 367437 - protein, 369 aa, unidentified
MKKKILYIGLDVHKFTIDVALSESGTGTVRSYGQIDNRFSVLDKVVGKLQSKGSELRFVYEAGPCGYQLYRHLSAKGFFCAVVAPSMIPKRSGDRIKTDRRDAINLVRLFRAGELKSIYIPTEEDEAIRDLIRCWDDIRRLERKARQRLLAFLLRNGYQYSATKHWSKAHFRWLDTLKFAHRAQQIVFQEYLDAANECTDRIKRITEQIHSQVNDWSRAPFVRAYQALRGVSLIVAATMVAEIGDMRRFKNPKELMGYLGLVPSEHSSGKMIRRGPITKTGNSHARRVLVEAAWTYKMVPKRSQLLIKRQQGLPKSICDISWKAQLRLCNRYWRLLMRGKKKQTVITAIARELSAFIWAIDREVQLQAV

SEQ ID NO: 367438 - protein, 341 aa, unidentified
MAITTVAHPALARITVGVDTHGEVHVAHAKDGLGRRLATVSVPTTPHGYAGLLAWARGLGQVEAFGVEGTGSYGAGLARFLHAAGQVVLEVNRPDRSARRRHGKSDPLDAEAAARAVQAGEVSVIPKTGDAIVEMIRSLRVVRATAVKARTQASNALKGLLVTAPPELREQLRELSTIQLVRAAARLTPGTLDTPLAAAMLALRTLAARHAALTAEVKALETELDRLTARAAPGLVARFGVGPEVAGALLVAAGDNPGRLRSEAAFSMLCGSSPIQASSGKTTRHRLNRGGDRQANAALYRIVIVRLRHDQRTKDDLARRIQQGKSKREVIRCFIGRVSVL

SEQ ID NO: 367439 - protein, 304 aa, unidentified
MNEKKVYCGVDVSKKHLDAFNGKTTRRFDNTCEGVTTLMNWAGNAHYVFESTGGYERLAAWRVMAADGTASIVNPSRVRHFALGMGQIAKTDPIDARMICDFASHTEPKPSKKPSATQRRLTALVDRRVHLNDMHTAEKNRLGTADEPEMIRLIKQHLKWLEKQLEKIEAKITDTLAEDATMTRKAKSIQSIKGLGIVNAVTLLAHLPEIGTLSRREIASLAGLAPFNRDSGGKSGRRHVCGGRRRLRSCLYMAAMNARTYNPVLHEFYQRLVNENHRPKMVALTAVMRKLLIAANSAVKNAEI

SEQ ID NO: 367440 - protein, 354 aa, unidentified
MKIEVIGIDLAKNVLQVHGVDEHGQVVLRKQLRRNRAMEFFAQRLPCLVGMEACGSAHEWARRLTQLGYTVKLMAPQFVKPYVKANKNDAADAEAICEAVGRPNMRFVPIKTLEQQAVLSVHRARQGFVRQRTAQANQIRGLLAEFGIVIPQGIQHVHKCLPEILEDAENRLPGMFRQLLQQLGEHLKALDTLVQEMEKQIQRWHRENEASRRLAEVAGIGVLTATALVATVGDARNFRNGRQMAAWLGLVPRQHSSGGKPTLLGISKRGDRYLRTLLIHGARSVIQAVERKARSSAEGNMGTVSSQDKRWLQALMSRKNKNVAAVALANKNARAIWAMLARDQHYQPSLAAVA

SEQ ID NO: 367441 - protein, 363 aa, unidentified
MTTKLMAGIDLHSNNLFCGIVDLAGKRVFEKKLPCELPAVLQALKPFKKRLETIAVESTYNWYWLVDGLQDHGYRTVLANPAAMEQYDGLKHGDDKSDAFFLAEMLRLNILPTGHICDRELRPVRDLLRRRMGLVHKRTSLILSLKSLYTRMTGQSMSLGRLKQLETQEAEKLFDHPADQLITRLDLQLLEQLDASIAKIEKTILAVVKLLPNYQVLQTLPGVGIILGLTITLETAGSARFASAGDYASYCRTVHSQRLSNGKKKGENNGKCGNKYLAWAFVEAANFAKRYDQQSRKYFDRKAAQTNRIVATKALACKLAKAAWHMMSQNTPYDAGRIFPGGGDNLGRAAGSQVQVLAKSPEN

SEQ ID NO: 367442 - protein, 323 aa, unidentified
MGASVTAAGFDVGRDFLDVCVAPVNACRRASNTDAGIASLLALLRRHRVTRVVLEAIGPYAARLVQALVAGQFEVAIVDPRRIKGWRTAQGGRAKTDKVDAKLIASFALVMPDVFRPLPDADTLRLRGLSTRRRQLTEMMAMEKTRLKQALDPVVATSHRDMIELLKSQRAAIEAEMLACIDKAGLTERFDILMSAPGVGTAVALTLVADLPELGELDRRSIASLAGLAPHISQSGLDRGKAAISGGRPCVRAALYMAALVASRSHPPIKDEYKAMVSAGKPPKVALIAIARKHLLALGAHLREGRKWGTRPHKNDTQPLTPT

SEQ ID NO: 367443 - protein, 405 aa, unidentified
MIDILNPFGNKVSYAACIGLDWGHFNNCFHLLAAGSNRIERIEVAANPASMATLIGQLRERFPQGKIGLVSEQTKGALVNQLLDYPFIELMAVNPHALAKFRRSLHPAGCKTDPIDSSALLRMIFTHRDRMPIIARADAATRRLDACNQHRRKLVEQRVKISNRLGSLLKEYYPQALAMLGANTWHPLSLAFLRRWPSYSALMKCRDSTLEKFYHTQGSRSKAAIQKRLASRRASAALSSDEVLEELGEMQLSDYVEQLSLLNKQIAHLDQLLCKAFREHPDMAPRLAAAFGSDRNRFRSCSQIQAYVGIAPIKVQSGKTEHTSMRRHCPKFLRQSFHEWAGLSAQYSPWAKAYFQMLLERGKKVGEAKRALAFKWIRILYRCWKDHQPYDETLYVKSLIKRNSP

SEQ ID NO: 367444 - protein, 335 aa, unidentified
MKFEKFVGIDISKDTLDLAILTKHGELFNLQISNERQEIEQRVPQWLSEHDAQSSATLMCAEHTGHFGMKLIEISLKLGWNLWMESPYKIVHSQGLIREKNDKIDARRIARYANRYQDLATLVAVSNKSVQILSHLNAEREILVKDRAKYEGQIKQEEGFLDAIYFKSKKKRVEKAIQWLTKAIKEVEAEMDKIINSDPEIKKNFQAITSINGIGPQTAIATILATDNFNKFDDARKFACHAGCAPFKYSSGTSKNSKHKVSHKANKNLKRLFHMAAVSSLRMKGEMKEYYDRKVGEGKNKMSVLNAIRAKLIARIFALVKSGRKYEKNYNAMLV

SEQ ID NO: 367445 - protein, 453 aa, unidentified
MAQRNCSLSRKADKCRQALTITHPNSAGIDIGSASHYVAVPPDRDDEPVREFASFTADLHRLADWLAACGVDTVAMESTGVYWIPLYELLDARGFTVLLVNARHVKNVSGRKSDVLDCQWLQQLMNYGLLRGAFRPADEVCALRALARQREMLLKSQARHVQHMQKALTQMNLQLANVISDVAGETGQKILRAIIAGERDGHVLAALKDTRIRASNEQIAKSLQGNWRAEHLFALKQALASFDFYATQLAECDHEIEQQLQRLHVHRGECAKGRKRGRTRNAPKFDLRAHLFKLCGVDLTRIDGIDVTTALAVISEVGADMSKFPSVKHFTSWLGLCPGTKITGGKLLSGKTMRVANRAAQALRLAAAALRSSHSALGAYFRRLCSRMDKPKAVTAAAHKLARLIYTMLTKGEEYTDQGQDYYEERYRERVLRQLSKRAQKLGMKLVVSEQPA

SEQ ID NO: 367446 - protein, 338 aa, unidentified
MKITTIGLDIAKSVFHAVGVDKAGKLIKKKMLRRKDLLPFLAQIEPCLIVMEACSGANYWAREFELLGHSVKLIAPQFVVPFRQGNKNDYNDALAIAEAAQRPNMRFVKPKSVEQQDVQLLHRMRERLTKQSTALINQVRGMLAEYGIVIAKSKSAFKVQFPDILADETNALTTKGRAIFYQLYEEFSDIEKRLKGCDAKVLTETKNNVICQRLETIPGIGPVTATAFYAAAGDGKDFTNGRHFSAWCGLVPKQHSSGGKDNLLGISKRGNAYLRTLFIHGARAVLQHSQNKQDKFSCWAIQLAERRGFNRACVAVANKLARMAWVIAAHDEEYRLPV

SEQ ID NO: 367447 - protein, 429 aa, unidentified
MNIKPIAGIDVGKFFSEMVIISPSNELFARMRIHHDSNADMRRAIELLKKAEKDFASRPFIVMESTGHYHKILFHFLQKSGFEVSTINPIQTNCIKNFGIRKVKNDKVDARKIALLYRFHELKPTSISNEDIDCLRSLCRQYYKLSDELTAYKNRFISIVDQLMLNFKEVFPNVYSKTAIAVLEECPTPTAIIEADRDKLISIIQNNSRKSLEWATKKYELLVSKAREFEPLSINNAANVTMLGIHIAMIKTLQENLDKVLKAIHQLIADDLSKDLPVMALTIQLLQSIPGVGFLSAATIVAEIGDFNAFSKPKKLVAYFGIDPSVRQSGEFTGTHNKMSKRGSRLLRRVLYTIALANIRTKRNNEPCNPVLMEFYKKKSQNKPKKVAIGAVMHKLVFIIFAVLRDRKPFELRSPEQHAKILAKNRTVA

SEQ ID NO: 367448 - protein, 362 aa, unidentified
MDVHTTNYTLCCYSMEDDRFFAEVQVEPDAKNILKYLARIEKQQSRDCRIVCGYEAGCLGYSLYHQLHAHGIDCVILAPTTMMTKPGKRIKTDRRDARLISKCLAFHTYSPVYIPTEVDDAVKEYIRMRDDANSALARVKQQIIAFCIRHGKIHDGKSYWTNKHLEWLSSLDLGNKILSEVLQEYLIRYYQLREQVDMYDMRINELAQAEPYRQKVEKLGCFRGIAAHTALSFCVEVGDFRRFATAQQFASYLGLVPGECSSGDKQQYTGITKAGNSHLRKLLVETAQVFGRSATKSGKSVALKERQAKCDSLTVAYADKANARLKKKYFKIAMRSKVNIAKTAVAREMACFIWGMMTDEIA

SEQ ID NO: 367449 - protein, 390 aa, unidentified
MNREQEVVLKPRNVDMERFKHWAEENLRNTDEVVLEATTNTWDIYDIVVLLVKRVVVAHPAEVKQIANARVKTDNQDVNRLIRLLIADLVPEVWVPPVAVRELRALISYRWRLVKMATAIQNRLHSLLHRHNIQAPKGKIDTGKNREWWEQLKLSELETLRLKQELQALRMVREHILEVEKALGCLSTSQRWSAQATRVMQLPCVGIVVTMTILAAIGDICRFATPKSLAGYAGLGAGVHDSGQTHREKGITKAGRKELRWALVEASWQAIRSNPRLRAQYDELCKRKHPNQAIVAIARKLLVTLWYLLSKKESYLPASDEDLAYKMLTWAWHMDQSAKRGLTNQQFAKYGLLQLGRGEQLTRIVKGGQPRRIAPKEEVLVLMPELSSKE

SEQ ID NO: 367450 - protein, 320 aa, unidentified
MKPQNHEIFVGIDVAKAHLDIAVCGAEVAAWRVRSTPAGLKKLGERLQALAPTRVVLEASGGLEREICNALTEYALPLVLLNAHRVREFARATGQLAKTDEIDARLLADFAQKLRPEVRPLPSREQQALDALLTRRRQVVDMITAEKNRRQQATPPIAREIEEHIAFLESRLAALGGELHAQIQKNTEWQMRAALLRSVPGVGPILSLTLQASLPELGTLDRGKMAMLVGVAPVNRDSGTSRGRRITWGGRGDVRSVLYMATLSAVRFNPVLRAFYEQLVARGKLKKVALVACMRKLLTILNSILRHNTPWSPNFVPASV

SEQ ID NO: 367451 - protein, 427 aa, unidentified
MRFIALDVHRDFCEVAIKDESGLRLAGKVRTAVAELQLFAESLAPDDQVALEASEPALQIARILEPHVGGVAIANTRKLRAIAESKVKTDKLDASTLCELLAAGFLPAVWSPDEFTRALRRRLQRRAKLVRARTRAKNECHAVLARHLKGKPPMSDVFGKKGRRWLAALELAADESETVACCLREVDFLHSEIGLVERELAAQALGCEEIRRLMTVPGVSLVSAATFVAVVGDVRRFSSPKKLVSYVGLDPRVRQSGEAPARHGRISKQGSPEARHMLCEAAWVLIRTPGPLRAFYERVRARRGAQIALVATARKLSVLFWHLLTREEDYAFQRPTLTRRKLLGLELKAKDGRRSWPSGHSVGTKQDREREREYAKQVETAYRRLTADWQPRAPRSGAGATRGRAFSSHLLGEETATRQGTAPEPAL

SEQ ID NO: 367452 - protein, 387 aa, unidentified
MYFVGIDISKFKHDCAIIDELGDTVTPSWSFSNDWEGFSHLKALLDSLEGEMKIGLESTGHYGQNLKLFLESNGFTFMEFNPLLVSRFVRSKSLRNTKTDSIDALSIAHYVMTVEYKPYPPSFYHLDKLKSLTRFRDSLVRQRSHQLVGLTNVLDKLFPEFKPFFKGKLSVTALYILAHYQTPERIANMNARSYEALRKLSRGKFALSDFVQLKALAKNTVGTQSEYLLDQMNILLGLYSQLDSKVDELDAQIKEYVRGIDPPCLSIPGIGELSAAVILSEFGDFCKFQNPSKMLAFAGLEPGYFQSGQSEYTGHMVKHGSSRLRYALMNCCLPLIANEPVFAEYYAKKRAEGKPYRVALTHVAKKLLRVIYTLQTKNIRYDPTVIR

SEQ ID NO: 367453 - protein, 401 aa, unidentified
MSSDFGVFLGLDVGKQAHHAVGLAPDGKRLHDAPLPNTEPKLRALFAKLAQHGTLLVVVDQPATIGALPVTVARAAGHQVAYLPGLAMRRIADLYPGQAKTDARDAFVIADAARCLPHTLRPVDVDDDTLAELDVLVGFDDDLAGEATRISNRIRGLLTGLHPALERAIGPKISHPAVLEILSRCGGPAGIRKTGRRKLTAIAKAHAPRMGERLVEAITTALAEQTVTVPGTAAADTVLPRLADSLKTVLQQRKQVAEQVEGILDAHPLAGVLTSMPGIGVRTAARILLEIGDASHFASSAHLAAYAGIAPVTRNSGTSIKGEHPARTGNRKLKRAFFLAAFAAMSDPTSRTYYDKKRAEGKNHNAALICLARRRCDVLYAMLRNGTHYRHPEPVSTPAAA

SEQ ID NO: 367454 - protein, 390 aa, unidentified
MLQHFGFDPSRSLTALEQERTIIAVIEMSQTKWLVAAVVPGVERQPLKKLDADKEALLKLLQRWRNEANRAGHEIKRIVIAYEAGRDGFWLARWLLRRDVETYVIHPTSIAVSREHRRAKTDRLDTELLMRAFLGWLRGERRHCSMVAIPTIEEEDVRRPNRERKNLVTEQTRIVNQVKAIFARFGIRTLRPTQRKVEDRLEGVRTAEGTLLPENTRAELRRHLARLRVVREQIRAVEHERRRNLATPVAEKGSPAMVHLIVRVLGIGVETADMLVNEILSRHWRDRKAVARYAGLTGSPDESGSRRRERGLARSGNARVRCGMIQLAWRFLRFQKNSALAQWFTARTADGRGGTRKTMIVALARKLLIALWRLATTGQVPQGVGLRPVP

SEQ ID NO: 367455 - protein, 339 aa, unidentified
MQVSTLGIDLAKNVFQLHGVDNSGKTVLRKRLTRNAFLPFLAQLPPCLIGMEACASAHHFARRLMQYGHQVRLMPPSYVKPYVKRDKTDARDAEAICEAVARPNMRFVAVKSETQQAILALHTERDLLIRERVASTNSLRAMLAEFGVVMETGLSALYKTLPVILEDGENALTALTRRSAARQLTHLRELEHQIAEVERELNAWFHSQEACRRLEKVPGVGMLTATYMVAAVGDGSQFTSSKQFAAWVGLTPKEHSSGGKQWLGPISKRGDRYFRYLLIHGARALAAVIERHRDKQTWFYSLLKRKPFNVAVVAQAGRTARILWSMLRCGSEYREIAPV

SEQ ID NO: 367456 - protein, 387 aa, unidentified
MYYCGIDVGKGSHTALVIDDDRQVVVPAFSVANDRAGLEKMATVLSRYQSQLHIGLEATGHYWLNLYSVLSGQDFVLTVINPMQVRAFHKTDIRRRKTDRIDAFWIADFVRFSHPNPSTTETPNLLQLRELTRFRFRLTQQIGDCKRKIISILDRVFPEYEKIFSDIFLQTSRRLLQEAVTAADFTDLDLAELEGILSRTSRGRFGREKAAQIHDAARQSIGVSFLTDAVRVEMRCLLQQIDLLEQQRATVDAQVERLMADIPQHILSIPGVGEVTGAMILAEIGDITRFAGPEKLVAYAGIDASVYQTGQFEGDQMHMSKRGSHYLRYALWQAGMGCLLHNSELSAYYRKKRAEGKAHGVAMGALCRKLLGRVYIILKENRPYQTR

SEQ ID NO: 367457 - protein, 432 aa, unidentified
MTNRLQVGIDFSHKRADMCLLGSNGELLQEHVACANSGPGFQQAKALLLEAMTCDEFDGIDISGEATNYYWLPFFQQLSNDTELNRHDLDLFLLNPRWVKWFKKCFAPDDKTDQKDPFYIAERTRTHRPQIAWQPLSTLPLRFYTRYRFHLAQDLSREKNYFLALLFLKVSAYSHFKPFADTFGVTSGHILSQELDLAKLAALPVADLADYLAQLSHTLPDPHGNAHRLKQAIQHSFPLPAELARPVQDVLNASLAHIRFIQQQQQQVETQIKMLLPHYPAIQKLATIPKVGLILASGIGTEIGDTQRFLQGRKWDKKRKRYRPRTLRDAEDAVAKIAGLWWPQNASGDFEAQDRKMSKAGNAYLRYYIIQAANLMRQHIPEYAQFYDRKFHQVSKHQHKRALVLTARKSVGLFVGLLHRNEAYRSKEERMP

SEQ ID NO: 367458 - protein, 435 aa, unidentified
MEEVTDEPLYRDRVCGIDIGKAQMVATIRVPSDKDPARRAQETRSFGTTKKEVLALADWLRCWQVPAVVMESTGDYWKGPLYRLEAEGFECVLADARQVKNLPGRPKRDPSDSRWLAACFERGAVTSCFVATPEFRLIRLHTRYRRELTEERGRDKQRAEKLLESSAIKLSSVVTDLHGVTGRDIMDHLIAGERNPKTLAQLARARARRKIAELEEALEGAEFFTAEHAALLAAMLARIDRVNTEIDELTAVIERLLAPYEEQLQQAESMPGWGRRSAQDAVAETGVDMTRFRTGGHLSSWAGKTPLDNQSGQRTGRAKSKKGNRYLAAITGETAAAVSKTQTREGARYRRLARRRGKAKALAATGNTQLKVYHKLLSNPGMRYQDLGADYYERQRDVRRQIAHHIGKLGALGFEVTLCRIPEPQLDGTGQTRAT

SEQ ID NO: 367459 - protein, 371 aa, unidentified
MGDGIRFVGLDVHKRQTVVALADCGREGEVRHYGAVETDRSSIEKLARKLARGGKPLRFCYEAGPCGYGIQRWLTGLGHGCEVVAPSLIPCRPGERVRTDRRDAIKLARLHRAGELTAVWVPEPAHEAMRDLVRARAVAVYAVRRARQQLSGFLLRHDRIYSRKAWTGAHRRWLAELKFEHAAQRIVLEDYINAVGTAEQRRDGLTEQIRELLPSWSLAPIVEAVQALRGVAAIVAIIIVAELGDPRRFDSPRQLMAYLGLVPSEASSGEKVYRGGITKAGNRTARRALIEAAWTYRFPARRSKHLLARCETVPPAIQAIAWKAQLRLSARYRKLVARGKLPTVAVTAVARELVGFIWAIARELPAIPARA

SEQ ID NO: 367460 - protein, 319 aa, unidentified
MTQNDLVVVGIDVAKDKVDACIRTVTERRTFPTTASGRRSLIAWLCKHQVGKAVMEASGGYERVWAKALRQAGLEVRIVDPKRVRSFAESAGRLAKNDKIDAEMIAWFAETFSEAPSQVEDPAHEEIKALVKGRQSLINLRARLEMQKEHETPPLVRKAHALLLKKLAGEIAAIETAIGAKIKATPAFAVRAEIIESVPGFAEATALTLLAGLPELGQVSNEVATALVGVAPYDDDSGKRHGQRCIKGGRRWVRNALYMPCVGAATLNNPVFKAFYQRLIGKGKAPKAALIACMRKLIVILNTMIARGEKWDPKRYRVA

SEQ ID NO: 367461 - protein, 341 aa, unidentified
MPVMTVGLDLAKHVFQIHAIDETGGVVARKKLRRSEVLEFFQALSPCLIGMVACGSAHHWGRELTALGHDVRLMPAAYVKPYIKRGKNDAVDAEAICEAVTRPTMRFVEIKSAEQQSGLMLHRTRELLVRQRTALINSLRGQLGEFGLIAPKGVWSIPDLHALAKNATSAILPDAVRGCVELIMGQIDDLQTRIRTIEKAIRVQVRASEVSQRLKTIPGIGVITASALTATIGDIKAFKSGRHLAAWIGLVPRQSGSGGKVHMGSISKKGDAYLRKLLVLGATAVIRYCRNKPELAGWINALLQRRPARVVTIAVANKMARIAWAIMSRGETFRQAASAIA

SEQ ID NO: 367462 - protein, 344 aa, unidentified
MSKVIIIGLDIAKHVFHVHGADERGRAIFSKRISRGKLLDFFAAQPSCTVALEACGGAHHWARQLTQLGHEVRLIPPAYVKPFVKRQKNDAIDAEAICEAAQRPSMRFVAVKSEQQQAAGLVFRTRDLLVRQRTQLINAIRGHLTEYGWVAPKGPSHVAMLADLIEEDEMASSLPKAAHAMFRLMLDLLAGLNGKIADLDKEIARRAREDEVSRRLMTVPGIGPISATAIAALAPPAETFAKGRDFAAWLGLTPLQRSTGGKQKLGATSKMGERTLRCLLIIGSSAVVQQASKRGAPRGSWLEQMLARKPRMLVTVALANKMARIVWALLVKQENYRAPVAAKA

SEQ ID NO: 367463 - protein, 346 aa, unidentified
MEIIRVGVDLAKNVFQLHGVDEHEKPIWKRSLRRGQWLRELQRRVAPGAEVGMEACAGAHHWGRELRSRGYRVKLMAPQFVKPYVKSNKSDRNDAEAICEAMSRPSMRYVELKSAEQQDIQAVHRVRAELIKQRTGKANQIRGLVGEYGLVAPVRIGHLRKALPRWLEDATNGLSDRFRRLLAGLAEDLRGLDERIEALDEEMAGIVRETPAAQRLLALRGVGPTTATALVAALGTGESFARGREFAVAVGLTPKHHGTGGKERILGISKRGDAYLRQLLVHGARAAVRTAKGKPDPLSRWINALLAHKHSNVVTVALANKTARMAWALIRHDVDYDPRLAAYGSA

SEQ ID NO: 367464 - protein, 464 aa, unidentified
MAVRGSPPVLASHARRLIRTSPRWLIEARRHAAWPLYREGGHQVKKKVRIVGFDCAEDEHAAVLLDVSGEFERRVDVINERGQIQESLAELMLSVGPNAQLVVVVESKRSHGRIVADVASELGCEVWQVNTVALNHYRDLEGQPRKDDEWDAYLGARMVFLRMGGCREAVETTEEERALSRLTRTHSRLVEDRKRHVARLRAVLLELAPEMLHSSWEGPQPGSKAMLYLLERWPGFEGLERAQMRSIEKILHRCRYGSKTPHVAKLIRKMARGISVAIEERSALTLELGLLVQQIRFCNESADQVYTKITHHVEHHPLGKKLLEMHGNGPVITGVLVSELLPVARTSTEPKSATYAGVTPLSRKSGKSLDKDRLTQGVNKRVLHALYTASVVAIKNSAVDRAYYQKKLRDYAGHPKPHVAAFIALSRQRHKLVYKLMTTDARYDKEILIATHLARLEQERTAAA

SEQ ID NO: 367465 - protein, 371 aa, unidentified
MKQSSTTLYVGLDVHKESIAVAYAADTREAEIISLGTIGTRQCDIDKLIRKLRAKSPHLVFVYEAGPCGYWLYRYLTRKQLTCRVIAPSLIPKKPGDRVKTVRRDAATLARLMRSGDLTPVYVPDVADEAIRDLARAREDALKDLKSAKFRLKAFLLRQDIRYEGKANWNPAHLRWLSEVVCYTPAQQIVFQEYVRAVSEQQNRLQRLDAELQEQAQQWRLYPVVEAIQALRGIQFLTAVSVIAELGDLTRFDNPRQLMAYLGLTPSEYSSGAQRRQGGITKTGNSHARRNLVESAWAYRYPAKVSRQLQVRLEKLSPTFQDISWQAQVRLCKRYRTLVNKGKHQNQVTVAIARELAAFIWAIARKTPLAA

SEQ ID NO: 367466 - protein, 323 aa, unidentified
MTTAPNNVYCGIDVAKKSLDAFVLGQSRHEANDPSGWKKLVTWVTKISPHAVIVCEATGGYERRMVRAFQQAQYRTCVVQPYRVRQFAEAMGCLAKTDKIDAKIITRFAEACKPLESAKPTAAQDRLRSLVNLERQIKLQITALENHITLVEEPLVKASARRLLKAHKNEIQRIEKALSALVKKEPELASKVEKLTAFQGVGKTTAFALLAYAPELGTLCRGQISALAGLAPYNRDSGTLKGKRSIRGGRAELRTALYMASLTASRINPVLSTVYKRLRAAGKPAKVALTALMRKLLIALNACLAKPDFQLVLASPVAPQTAS

SEQ ID NO: 367467 - protein, 354 aa, unidentified
MTSTKYIGMDVHKESISIAVMNAVGKIVMECVIETKANMILQCIDGLRGDLHVTFEEGTSAAWLYDLLKPHVAELIVCDPRKNASMREDNQNDKIDARRLAELLRIDHLSPVYHGEHGLRTLKELVRSYLTVTKDLVRVMTRVKAIYRSWAIPCNGKEVYAARHRAEWLEKIKELGVRRRAEFYYQQLDALRVLRQGVRRELLAESKKQKAWKLLRQIPAIGPIRAAELLGILQTPHRFRTKRPLWKYSGLAIETCSSADHRSINGQLQRSKKNSVRGLNQNCNHDLKNLFKGAAVIAASKPGPFQEFYAALLAKGMRPEMARLTLARKIATIVLIVWKKGVCFDAQHLKPQTA

SEQ ID NO: 367468 - protein, 343 aa, unidentified
MKIYALGIDLGKTVFHLVGLDSCGQVVVRKRCSRTQLLAFTGNLQVQLIGMEACSGAHFLGKALRAQGHDVRLMPAQYVKPYVKTNKSDYIDAEAIAEAVQRPRMRFVPIKTEEQLDLQALHRVRERWVMRRTAVVNQIRSLLLERGLTLRKGRSRLEQMLPRILEDAELKLSGAFRVLLAQLKLELEQLAARIEQMDMVIQQEARENESCQRLTTIPGVGPVTATALIAAVGNGSAFGKGRDLSAWMGIVPGEYSTGGKQKLLGISKRGNKYLRRLFVQGARSVLQHRDKQAPGLSCWLAQLLARTHQNVVVVALANKLVRIAWAVLCKNEHYRAPVLAATT

SEQ ID NO: 367469 - protein, 347 aa, unidentified
MRFYTQQHQYYCGVDLHARSMYLCILNQAGDVLLHRNLRATPEAFLHAVAPYRDDLVVAAECMFTWYWLADLCAQEGMHFVLGHALYMKAIHGGKAKNDRIDARKIAILLRGGMLPQAYVYPPAMRATRDLLRRRLHFRRKRAELLAHIQHTTSQYNRPGFAKPLTYRANRTGVVDHFAEPSVQRSMQLDLDLLAHYDGVLRELDACILRTATAHDPQTLARLRSVPGIGKILSLVILYEIQDIARFARPQQLASYARLVRCAHESAGKIRGAGGRKMGNAHLKWAFSEAAVGFIRLSPGGKRYYARLERKHGKGKALTVLAHKLARAVYYLWQRDQVFDEGKFLAA

SEQ ID NO: 367470 - protein, 375 aa, unidentified
MKEKVRFLGLDVHAETIAVAVAEPEGEVRSLGTIPNRAESIRKLIKKLGPAAKLRACYEAGPTGYVVYWQLAELGVECEVVAPTLVPVKAGDRVKTDRRDAEKLARCYRSGDLTAVWVPDEGSEAIRDLVRAREAAKQDQTRARHRLSKFLLRSGQRPPTGVRPWTRPYLIWVAQLRFTQIAQESTRQDYLHEVEHMRERVSRLEQAIMEAVKLASPALKQVINDLQALRGIADISAVTIASELGQVSRFESARQLMGYCGVVPSEDSSGKRTRRGGITKTGNAHLRRIVVEAAWSYRRPPAIWYGLRRRQESISEQTKEIAWKAQHRLHKRYMKLGAAGKDQRKIVTAVARELLGFIWAIGTRAETVVSQQVAA

SEQ ID NO: 367471 - protein, 327 aa, unidentified
MMFIGFDISKDKVDLCWLRDPITNKKKTKVFKNNHLAFKEIKQWLLSTTKTIAEEIVITVEPTGVYHEPLMYFLYQQGFNIILANPSKAKKYAEALNVVHKTDRSDAIMLASYGYAKQSTVNFWQPEAKEIRELKALLRRLDALEPNKQREQNRLEASEFNATSERVTQSLKETINFLDDEIKKLKSDIDSHINSFPDLKKNRTLLETIPGIGPVMSRELTYIFAAKNFSRAKQAAAYCGLIPRLHESGKMKGRTTMSKLGPSKIRSKLYMAAVVAGQWNYKIQQQKIALLNNSKTSMQIIGANMRKLIHICFGVIKNQEAFKIQES

SEQ ID NO: 367472 - protein, 342 aa, unidentified
MEIPLYGGIDLHANNSVVVLLNEQDQVIYQKRLPNHLPTILEPLSLHHGEIEGLVVESTYNWYWLVDGLMEAGYRVHLANPAAIQQYSGLKYSDDHSDARWLAHLLRLAVLPEGYIYPKAERAVRDLLRKRAHLVRQHTANVLSVQNIMARNTGARFSVKRIQELTKQELQSLLTEEPQVLAVTSSLAVLDCLKHQIKTLEQTVHKRLNHTPSYEQLLTVAGIGTILAQTIALETGDIRRFPSVGNYASYCRCVDSNKISNGKRKGTGNVKNGNPYLAWAYMEAAQFALRFQPAAQRFYQRKLAKSRNNTVLARKAVAHKLSRACYYLMRDLVPFEETKAFG

SEQ ID NO: 367473 - protein, 339 aa, unidentified
MKYSAIDLHSNNSVVVVTDEQDRVLAQKRLPNDLSVIVAFLAPHQSELVGVVVESTYNWYWLVDGLMAAGFVVKLANTAAVKTYDGLKHSGDEADARHLAQMLRLNILPTGYICPPAKRALRDLARRRLQLVRNRTLHILAVENQVTRQTGRNIRSNDVKRLTAEAVDGWKLPPDVATGIKANVAIIGVLNTEIDKLESRLDAAIAATDEWKLINTVPGIGKTLARVILLEIGEIGRFDDVGCFASYARCVDSARMSNGKKKGEGNRKNGNKYLSWAFVEAAHFAARFYPEAKRFYQKKLANTNGAVATKALAHKLARASYHVLKTGKSFEMQRCFAGM

SEQ ID NO: 367474 - protein, 394 aa, unidentified
MEQDQGGSTDQATAFYVGIDVATAWLDVAVRPSGETWRVSNTEAELPALVERLGQVTPAAVVLEATGGYERAVVAALAMAGLPVTVVNPRQVRDFAKAIGRLAKTDALDAGVLAHFAEAVRPAPRPLPDAATQTLAGLVERRHQLVTMLTAEKNRRQQALPAVRPLVQAHIQWLEQALAELNQNLDQTLHTSPLWRERDQVLQSVPGIGPVVALTLVADLPELGTLTHKQIAALVGVAPLNRDSGLLRGKRLVWGGRARVRAARYMASLAAVRWNPVLRSFWLRLPACSSPSSTRGCVTSARGSHPRLTLPDNTVALCLCARLHTADLRACAAFGHGYAAHSRTTHGGCCLAGGRTGQGAYLHHVSPGTQSSRVVAATPEPDSAAAAHHGVSHA

SEQ ID NO: 367475 - protein, 341 aa, unidentified
MPAIGIDTHKRTLAACAVDDVGSVIDERTFDCDQAGFIELAAWAGGAAPEATIGVEGSASYGAPVAHHLVAAGFVVREVPPHLSRRERARSRRPGKSDPGDALAIARVTLREPDLPPVRLEDRSTELGLLADARDDLVHAQTRARNRLHAHLVILMPGYGRTTAQLVSGRQLETIERALGGSTGVRAELARALLTEVRALGRRASELERSIAALVAGHPLLGLPGVGALTAARLVAETGDVARFRSPAAFAMLAGVAPIPASSGESRRMRLNRGGNRRLNRALYTIALSQAWHHEPAKAYIARKRASGKSWAEALRCLKHRVSRPVFRLLQAGQMDWARAA

SEQ ID NO: 367476 - protein, 349 aa, unidentified
MEHYAGIDVSLELSSVCVVDAKGKIVKEAKISSDPVALVTFFRGLGIAIERIGLEAGPLSQWLHAGLTQAGFEVVLLETRHVKAALSAMTVKTDRKDARGIAQLIRMGWFRPVHCKSVGSQEVRALLVGRKLLLGKLLDVEFSIRGILRGFGLKMGMVTRRNFEARVRELCAGHSMLEQICAAMLAARSALQTEYTKLHKAMLTIVRKDEVCRRLMTTPGVGPLVAITFKTGIDDPSRIGKSKAVGALFGLTPKKYQSGETDVTGGITRVGDEMVRTALYEAANILLSRVTRFSALKRWGMDVAKRRGAKRAKVALARKIGVILHRMWVDNTNFRWTKEAPNAPRLIQA

SEQ ID NO: 367477 - protein, 350 aa, unidentified
MKIIGCDFHTRYQQIAMLDDETGELIERRLEHENGEAHKFYRDLSKPVRVGVEATGPLHWFERLLAELGQELWIGDSAKIRASEVRKQKTDQRDAQLILELMLANRFPRIWVPTPQERDLRQLLWHRHKMVRMRTMLGNQLHFLAMSQGLCRKKKLFTEVGRSELSHLPLGPWASRRRAELLDLLDQLDPAIDELDRAVMQEAKLRQDAARLMTHPGIGPVNALAFVLTIGPVSRFHRSKQIASYLGLNPSEHSSGGKRRLGAISKQGNTMVRWLLIESVHHVVRLDPEFRQDYQRLKSRRGNAVAKVAIARKLAVRMYWILRSGADYARLVRMQASPGPTLVNASSSLG

SEQ ID NO: 367478 - protein, 430 aa, unidentified
MKSNTQNAKIEAITEKTLVLGIDVGSEMHYARAFDYRGIEYSKKPFKFSNTEAGFVTFKEWILNLKERHEKDKVVPGMEPTGHYWFNLGKFLQDNEMKPVLVNPHHVKKSKELDDNNPTKNDRKDPKVIAGLVREGRYMIPYLPDGVYADLRTASNIRFQLQAELTRIQNRISRWFNIYFPEYKTVYGKPDAKSGMLILKAAPLPEDILTLGIDGVNQIWRDAKLRAVGKARAKILIEAAEHSVGSKEGAVSARMEIRMLLEDYESRNTRLQEVMVLIEELIRKIPMAEKLLEIKGVGIRTVSGFLAEVGDISRFNNPKELQKLAGLALVENSLGKHKGETTISRRGRKRLIYLLFEVAMSLVSKNQEFRELHNYYTTRRLNPLKKMQSLMAIAAKLIRVFYAILTKGVDYDPKKMVSDIKRPAVYLQAA

SEQ ID NO: 367479 - protein, 397 aa, unidentified
MSAVVGIDVGAYKHAAAVCRTGEREAERSVFRLSADRAGFDELDRWLERQAPVERVVMESSSHYYWPLASHLYRGGYRVAVVNPLRAKYFAKSRLQRSKSDPSDARTLAALGMSEEPRVQDPLLGAEAKEAARFWGGLVKEQGQVRQKLLRLVEIGFPELKECFEDPLCETALAVLREAPTARAASRKRVSTLAETARPGGRRRLGENKARRIHELAKQTVAPPELDAQISFEVGVLIQQFDLLDKQIEIAEQRVGEVLDSELARRLRTIPGVGPALAATFIAEIGDIWRFEDFDQLAAYAGVHPKEQSSGTKGQSPETSWHMAKTGNAYLRSAAYKMAVVGTQHNPVIRAHYLRKRAQGKSAMNAIGHCMSKALAIIWGVWRSGVDFDPTVGGPKT

SEQ ID NO: 367480 - protein, 451 aa, unidentified
MAFLKMKVMAAKKMTMNVVNAHAAGIDVGSRSHYVAVGQGADQVKEFSVYSRDHQLMIEWLRAHQVVTIAMESTGNYWQTLFAALQDAGFEVLLVNGRHTQNVRGKTDVKDCQWLQQLHSLGVLRGSFLPSAAVDQMRTLQRHRNWLIEQCAALSNKMQKSMRLMNIRLDIALSDILGKSGRSIIEAIVNGERDGQQLALLVNRHVKKSPQQIADALTGNWKPELLFELQDCYELYQVYEQRIARTDRELEALLKQLKPTATAPAPVLKRKRSYRNQQQFDVALLSYRYLGVSLFDIDGISHATVMSFLTEIGLDIYKFPTAKAFTHWLRLAPNNKITGSRVVSSRTPKGKHPFALVLRNAANSIGLSKTGTLKSFFARIAFKKGRAAAITATARKLAVIIWNMVSRQQCYTPITEDRYAQKIRVSVLSNIKKKLQKHNLSIPDLQAVMTS

SEQ ID NO: 367481 - protein, 345 aa, unidentified
MNHYAGIDVSLESSSVCLVDATGKVVAEAQVMSEPEALVAWFGARPEQMAGIGLEAGPLSQWLFGALEAAGLPAVLLETRHVRTAFKTMPVKTDRKDARGIAQLMRLGWFRPVHCKSLAAQETRALLTARKLLQAKRYDVEMSLRGVLRGFGLKVGSTTPKTFEARVRELVEGHPTLETVAAALLAARAELLDQFKVLERRLMAVGRADPRVRLLTTVPGVGALVALTFTAAIDDPGRFRSSRQAGAHFGLTPRRYQSGETDVTGRISKVGDHGVRVALYEAANVMLTRPVKGSALKDWALAVARRSGPKKAKVALARKLAVVMHRMLADGTCFEARPVAAAAAA

SEQ ID NO: 367482 - protein, 343 aa, unidentified
MDQYVALDVSLQKTAVCVLNVSGRVLIEADVPSEPAALIAFIQTHAPGAARVGLESGPTSPWLWHSLKAAGLPVVCMDARHAHAALSVRPSKSDRNDAHGLAEMVRMGWYREVQVKSLAAHERMALLGVRRRLVDMRVEIDGQIRGILKTFGLVVGSGNKGAFAQRARMLAQDHPVLSALIDKLIEVREVAVAKVAALDKEIRRFVRDDLTLRRFMTVPGVGPVTALAFRSTIDEPNRFKRARDVGPYLGLTPRRYQSGETDRHGGISKCGDRFTRTCLYEAASVLLTKVQRWSPLKAWGTRLARRIGSKKARVAIARKIAVILRCIWTDGTEFWWTKETATA

SEQ ID NO: 367483 - protein, 409 aa, unidentified
MIMLDRENKKPCVALDVSKGSSHVQGFLSCGAKASEVSVIQHTRSGFAQLKAIIEGLEEVTNRKIAIVFECTGAYSKPIEHFLESIGRRFYEIPPLLSAKVRKSDIRPTKTDKRDCETIANVYYLKRLREHISVKPPYGKLKPLCSYYLFLVARSASDKIKYRQFLDIVYPRIDTCFNIDATYFLELIEKNPNPKKLKGKGRKSIATFFKKTPYCGEYKANKLTTLLIDYLSDAALNIPDDDASIDVLASAARMLSEDKRRAALLLEEIVLLGMKTEEYPYLVTIPGISKQSAARIATEIGGIGRFDTPSKFVAYIGIDPSVHSSGKMLSDHLSITKKGNQRLRSLLYLVASGTSKSKAQGNPVRDFIVKKQSDGLPYRAAVIAGCNKLARIIYAVCSKRQPFSFQSQN

SEQ ID NO: 367484 - protein, 325 aa, unidentified
MKELIRIGLDTSKSVFQLHGVDAGEQPVLRKKLRRSRLLDFLRKLPRTRIGIEACGAAHHWGREFAALGHDVLLLPPQLVKPYVARNKNDAADAEAICEAMSRPRMRFVPVKSVEQQAALMLVGMRDQLIARRTQLSNMIRGHAAEFGVVAAKGHEKIKPLLTRIAAHEGVPELAKQLFATLGEDYAGVTARLGSIEAKLVTWQRGNEMSRRLAEIPGIGPIGATLLVMKVIDPKAFRCGRDFSAWIGLTPKDHSTAGKKRLGVITCAGDEALRSTLVVGATAVVQQINKDADMPRPGSSRSPNASRRNSPPWRSPTRARASLGN

SEQ ID NO: 367485 - protein, 343 aa, unidentified
MEHVAIDLGGRESQVCIRSEKGEVLLERRVTTSSLAKLLKLRPKSRVVVETCAEAFHVADSALELGHEVRVVPATLVRTLGVGARGVKTDERDARTLSEVSTRIDLPSVHVPSQASRERKSLCGMRDALVGSRTQLINTVRGWMRGRMLKPRSGKTETFAARVRQAVADKMELPTYVMRQLEAIEQMTVHILAADKELEALADKDPTCPRLMSVPGVGPVTAIRFVAALDMIKRFASVAQVQSYLGLTPGENSSSERKHRTGITKAGPPALRAALVQAAWAARRARGDHPMVRWSLEVEKRRGKHVAIVALARKLSAILFAMWRDGSFYNPKNDVGESAMTTP

SEQ ID NO: 367486 - protein, 319 aa, unidentified
MTKMVAKIFVGVDVSKDHLDIFLLPSGKHMRIKNNSDGLDYLLRRLKNLPVSRIVCEASGGYESLLVSTMSQAEYAIWRIDPKRIKAFIASEGVKAKTDSIDAAMIALFAQQKQLAEYARIKLQKIDAEKLKAIVKRKETLTRIAAQEKTRLRHPQQSFCQEEIEDHVTFIAQQIKALEQEIDKIIKNDDDWQKKSKIIISIPGIGESTTASLIAHIPELGTIGNKQVAALVGLVPYTRQSGNHTKESRIREGRSAPRKALYMAALSAVQYNHDMKIFYNRLVGLGKKKKVALIAVMRKLIILVNVLLCENRVWKALNV

SEQ ID NO: 367487 - protein, 435 aa, unidentified
MEEVTDEPLYRDRVCGIDIGKAELYATIRVPSDKDPARRASETRRFAATKRGVLALADWLRCWQVPAAVMEATGDYWKGPFYRLEAEGFECVLADAKQVKHLPGRPKRDPSDSSWLAQCFERGAVRPCFVPDPEFRIIRLHTRYRRDLTDERTREKNRTEKLLESAAIKLSSVITDLHGVTGRDIMDHPIAGERNPKVLAQLARARARRKITELEHAVEGAEFFTAEHAALLKAMLERIDGLTAEIGKLSEVIERLLAPYEEQLQQAESMPGWGRRSAQDAVAETGVDMTKFPTGGHLSSWGGKTPLDHQSGKRAGRARHKKGNKYLAAVTGETAVAAGKTATREGARYRKLARSRGKAKAQVAVGNTQLKVYHKLLSNPGMRYQDLGPDYYERQAATRRKIAYHVREIEALGLDVTLARIPEPDPDGPASTQAA

SEQ ID NO: 367488 - protein, 337 aa, unidentified
MRIIRVGLDTAKHVFQVHGVDEREQVVMRRQLRRSEMAKVFGRLAPTRIGLEACGAAHYWARVLRGLGHEAVLLPAQYIKPYVKRGKNDAIDAAAICEAMSRPGMRFVPIKSAEQQAALMLLKVRDLLIKQRTMVINALRGHAAEFGVIAAKGRVKVAELLQQAHAEEAGVPVLALEMLSVLAGQLDALDGRLKGLEAELMALHKADPVSQCLATQPGIGPIGAVSFALKVSDPKTFASGRHFAAWLGVTPKESSSGGRHRQGRISRQGDEGLRRLLVLGATAVIRFAKPGRASPWLIDLLARKPKKLAAVALANKMARILWAMMVSGEVYRRPLPA

SEQ ID NO: 367489 - protein, 343 aa, unidentified
MELYVGMDVSLKETSICVVDDEGEIVSEGTVISEPEAIVRYIKAKAASAKRIGLETGPTTTWLWHELRAAGLPVICIDARHAKAALSLQINKSDRNDAVGLARIMQAGWYKEVQVKSLPCHEVRAVLNSRAQLVKAKRDLENQIRGLLKNHGLIIGKAGGNVFHHRAQELAGEHGLLREAIRPLLAVRETVRREIVGLTRKLLALARNNEESRRLMTVPGIGPMNALAFCAAIDEPSRFRRSRSVGAYFGLTPRRHASGEADWTGRISKYGDRLVRTYLFEAAGVLLTRVPRWCRLKAWGLRLVKRIGPKKARVAVARKLAVILHRMWRDRTDFIWSSKEAAA

SEQ ID NO: 367490 - protein, 398 aa, unidentified
MELLHRRCCGIDVHKETVVACLRLVSDSKVTTEVRTFQTTTADLLRLSEWLAANECTHVAMEATGVYWKPVWHILNDGDFELVLANAAHVKNVPGRKTDINDAMWLAELLAHGLIRASFVPDKQTQEMRNLLRTRKQLVREQSSHVLRVQKTLEDANIKLDSVLTDLMGKSGRAMIEALIAGETNPVKLAGLADRRVKASPEEFRDALRGRVTKHHRFLLRLHLNQIEVEANLGPFRTAVDLIGSIPGIKNLGAHVIVSEIGIDMSRFPSAAHLISWACICPRNDESAGKRRSNRVRKGSTWLKTTLVQCAWAAVKKKDSYLQAQFHRIKARRGPKKAIMAVAASILTTIYHMLKNGTTYQDLGSNHFNRRSTDQQKTRLLKRLADLGYAVEIKPLAA

SEQ ID NO: 367491 - protein, 351 aa, unidentified
MTSHHDQPTQTFASIGIDIGKDVFHIVGFDTSGKVVLRKKFKRLALETELTKLPRSIVGLEACLSAHFVSRTLRRLGHSPRIIPAIYVKPFSKGQKNDYNDAEAIAEAALRPNLNVVREKTQDQLDLQALHRVRARLVSRRTATINQIRAFLIEHGIAVRTGAHALRNSLFAILEKRADELSPRMISIIQGLRDDWRHLDERIDAITSEIEEVSHKEKNCRRLMSVPGIGPMISTAMVAAIGAGDAFERGRDFGAWLGLVPRQYSTGGKPILGRISKRGNKYLRTLFIQAANVILMRPQNWERFSFGAWLTNAATRMHRNKLATALANKLARIAWSVLRHRTRFDEALTAV

SEQ ID NO: 367492 - protein, 401 aa, unidentified
MWFAGIDWADRHHDTFVIDEAGRKVAQLRVDHTPAGLKKLVGFLREIAPLDQIACILETNHGLLITALLEAGLALYPVNPKTIDRKRAASGAKTDLIDAYLLAKHGRAEWADLRRLDPDSPKIAELKALTRDQESLIQSQTRLVNQLTACLKAYYPAALQLFTKLQQHSALVFLQTYPTPQAAKPATVAQIEETLRKGQHTHPTTVAPKNYEVLHQPHLRADEVTTRTKTRLMQALVAQLLPLLEQIAAYDKEMTELFLTHADSQIFASLPGAGKRLAPRLLAEWGDDRRRYADASSIQALAGTSPVPFESGNYAKVHQRLACLKPLRNALQQFAWQSTQQEGWAKAYYDCKRKAGKSHSMAVRALANIWVRIIFAMWVKKELYERTTFVAAQRRHSSRAA

SEQ ID NO: 367493 - protein, 311 aa, unidentified
MEASELYVGVDVSKDRLDVSVRPSGGSWSVPRDDKGIGELSDRLAAMNVELVVLEATGGLARPVAVGLAGAGVPIAIANPRQCRDFAKATGRLAKTDTLDAEVLAHFAEAVQPRAWTPPAAALAQLRDLVVRRRQLVAMRTMEQQRLHTVTGATSKRGIDKHIRWLRKEVAGLDEAIETLLAEHPVARERQSLLRSVPGIGPVAASTLVAQLPELGTVNRKQIAALVGVAPINRDSGQFRGRRMIWGGRAAVRDSLYMSALVATRHNPIIKAYYCRLVSRGKEKKVALVACMRKLLTILNAIIATRRPWRA

SEQ ID NO: 367494 - protein, 347 aa, unidentified
MLADELDYVIGVDPHRDTHALAVVDVRSGGVVFEATAVADGEGYERVLRLANQHAPGRRAFAVEGTGSFGAGLARFLVSHEERVLEVARLRRERQSGKNDALDAIRAARSVLGQTRPAQPRAGGEREALRALSAAREGAVTARRAGLCQLRGLLVSAPEPLRAELRSLTRAQLLRRLAAVRPEGRQDPELRGTLLALRALARRVKALTVEERELAREIETLTRKLAPQLLEQPGVGPLAAAQVLISWSHRGRITSEAAFARLAGCAPIPASSGQTVRYRLDRGGDRRLNRALHMILVTRRRAHAPTIAYIERRIHEGKSRREAIRCLKRYLARNLYRLLENGPPLPT

SEQ ID NO: 367495 - protein, 378 aa, unidentified
MVNYNNKTVYLGIDVHKKTYSVTAVCEGQVVKKDTLKADPSFLLSYCRKYFSGAMIETAYEAGFSGFHLHRYLEEHGIKNYVVHAAGIEIASGNRVKTDKRDSLRLATQLSVGRLRGIFVPSKEREDARAVTRLRESLIKKRSSTGTQLKALLFQHGLIPYNSRQKVSARWIQNLTKMTLTPGLGFTINQYSEMWISINSQIKMIEKEMIKQAQEDSQLERLYRSVPGIGPVASRTLANELGDMSQFKNERQIFSYAGLTPSEYSSGEHVRQGHISRQGKSVLRKILVQAAWVAIRGDDNLAKIFERVSARAGSKKAIVAIARHLIGRIRACIRTGNSYNSMPKKRKRIESELIPAPYPIEQIGDSSDRACQVQVGEI

SEQ ID NO: 367496 - protein, 404 aa, unidentified
MNNVAGVDVSKGKSMVSVLRLFGEVVTKPFSVGHTGSELKELANYLKSLDGETRVVMEHTGRYYEPVARFLHEEGIFVSAVNPKLIKDYGNNSLRKVKTDKADARKIARYGLDNWVELRQHTPMDTIRMQLKTLNRQQGLYSKTKTMMKNNLIALLDQTYPGVNALFDSPVREDGSQKWVDFATTFWHVDCVRNMSLTAFTERYRKWCKRHGYNFSQSRAIDVHTKAQDLIAMLPKDALTKTMVQQAIDALNAVSASLERLKTEMRTLAAQLPEYPIVMAMRGVGDSLGPQLMAEIGDVTRFTHRNAITAFAGVDLGADQSGTHEAKSARASKSGPPELRKALFLVMDCLLKTMPQDDPVYRFMDKKRAEGKPYLVYMTAGANKFLRIYYGRVKEYLASLENSD

SEQ ID NO: 367497 - protein, 414 aa, unidentified
MDTIFKNVAGLDVHQKTIVACVRKFQPQGGTEEEVRTFGTMTGDLLQMSDWLAKAGVTHVAMESTGVLWKPVWNILDGHFELLLVNPRELKRVPGRKSDVSDSQWIAHLMQCGLLKSSFVPSRPQRELRELTRQRTQLTREQTRIVNRIHKTLEDANIKLGAVASDIMGKSGRAMLEALVAGERDPAKLAELAERRMRVKIPALKQALQGHLTEHHVFLLKTLLAHLHFLEQQMAALSERIDVCLRPFLTPEQISRLDQIPGVNRRTIENVIAELGSDMSRFPDEEHLSSWAGMCPGNEESAGKRIRHRTTKGNTWLRSALTEAAWAAGRTQKSYLGAQYRRLAARRGKKRALTAVGHTLLVIFYHMLKAEVTYKDLGPDFFNKLKPEQYRRYLVKRLESLGFTVELKPKDAAA

SEQ ID NO: 367498 - protein, 387 aa, unidentified
MTRNARIPVPTTALDQDSTLVVVLELSAKSWLVGARVPGLSRLSRYALPPSVAELSELLGKMTERAATQGKTVGRVVLAYEAGRDGFWLARYLEARGIEVYVIQPSSVLVDRRARRAKTDGLDVEMLMRTLLAWLRGEDGVCSMVPIPEEAEEDGRRPTRERQDLVTERRALANRIDGLLATLGISGYKPLRRDRRARLEELRTPEGTALPANAIARIGRILDRLELVMTQIVELEEARNTVVTKAAAEGEAEKMIRALARLKAIGPELATLLVWEAYIRSFPNRKALGSYAGMTGTPFQSGGMDREQGISKAGNRRLRAALVELAWMWLRYQPDSALSKWFLARVGDAGGRMRKVMIVALARKLLVALWRYCRLGVLPDGAVLKTA

SEQ ID NO: 367499 - protein, 357 aa, unidentified
MESQEVKYVGVDCGKKSIEVVRINSENSLERRQFSTTESGINNLLQWLTLNDIVGLEAGSQSFRIAKSILNKGVQVIVLNPGNLATIYQSLKKTDKEDSLKIARLIQRHPIEELPTVPIPNDEEEDNRRLCSEHENWTKQLTQGKNRLHSLFTQAGLTQITKKHLRTKVSREASVTLLSDRYQKEAERILKVLDLVELNLKLIEEEIQEALKKNKAYVQTIMSMPGIGMITSLAIMSYMGDCKRFSSAKQAAYYAGLVPRVDISGDTVRYGRIINRGCHSIRRVIVQAAWSLVRCQHGGKVKEFYQRLYLKKGAKKSIIATSRKMIEVLYVMIRTGKLFDSMPENILNRKLTQYGLM

SEQ ID NO: 367500 - protein, 405 aa, unidentified
MNAVGIDVSKGHSTVTVLRQFGEVVMSPFEVNHTADELKALAKTLKKLDGEIRIVMECTGNYHLPVARTLQAAGLFVTTRNPILLHEYGNDTIRKGKSDPADSIKCANYCLDKWLKLTEYVPEEEVRQSLKAITRQHTKYAKIKTMLKNNFISLLDLSFPGLNELFTSPVRDSDGHEKRIDFACEFWHSDCVAKLSLKAFTERYRKWCKRSGYLAVNVSKIHAFARSCVPVLPKNDSTKLLITESAMQINFICETLNIFAKEMKRLAELLPEYSVAISFFGVGDILAPKIIAEVGDIRNYPKKSSVVCFAGLEPVDNSSGDFHGDKKISKKGSPHLRKALFQIMNTLIQNAPADDPIFQFLDKKRSEGKHYYSYMCAGSAKFLRIYYARVKEHLSKLESNLPCQG

SEQ ID NO: 367501 - protein, 373 aa, unidentified
MNTIYIGVDFHARQQTICYLTTETGELVTAALKHEPKTAVRTFYEQFSGHVIVGLEASGYSPWFERLLEELGHQVWLGDATEIRRRARWRQKNDRRDAELILDLMLHDEFPRLHRPSLQSREVMRMLRYRQKLIKMRTMSKNSLQSLALQSGIARRGHLFTREGKAELDAAVMSPAMEWQRAHWWQLLEPLNQQVWEAMTWLKAASQNDVSIARLRTHPGIGLLTSLCLVHTLQPVARFGNTRKVAAYAGFDPMERSSAERKHFLGISKAGSRVLRYLLVEAANTAVRKDEELKRFYQRLAQRRGRPKAKVAAARKLLIRAYIMMRDEIDYAEFRRRAVAARLARLRQGPQIPAALIGQPASTARQEFLPRGK

SEQ ID NO: 367502 - protein, 359 aa, unidentified
MTIVAYSHPFVVGVDTHARSHTLAVVVAVTGELIATDQFPATDAGMDRAVAWAARRTGGDLATLWVIEGVATYGARLAAAVTRFGYEVVEAARMDTRAHHGTGKSDLLDAHRIAAAVLSLHPHQLRRPRSDGLRAALQILVTARDHMTTERTATINALIALVRVVGLGIDARKPLTAKQVADIARWRARVEDLATATARAEAVRLAKRVVELDQEIAANQAQITDLIHHSQVSSLLDKTGIGPVTVAVALAAWSHSGRVRSEAAFAALAGVSPIPASSGNTVRHRLNRGGDRRLNRALHMAVITRMTHDPDTRAYVARRRAEGRTTKEIRRCLKRYLARQLYRAFQTLHTTPEIEPSTA

SEQ ID NO: 367503 - protein, 392 aa, unidentified
MRKANDMSRCLAAFNQDSTLVAVIELGLKSWLVAGIVPGIERHPLKKLKPNEGALLALLYRWCDEARTAGHPIKRVCVAFEAGRDGFWLARWLRSRKIEAYVIHPTSVPVSREHRRAKTDRLDTGRLMRAFIGWLRGETDHCSMCAIPTFEEEDDKRPNREHQHLVGERTRIINRLKSCMARLGIRDFNPASRKAPERIAKVRTPEGVPIPANTLDELKRDMTHLHLIDDQIDEVEKARLARLRKEPNKKSHAMVLLLARVRGLGIETADMLTHEVFLRDLRDRRAVPRYAGLTGAPDESGERRQEKGLARTGNARARRGMIELAWRFLVYQKESALAKWYWTKTADRRKDIRKIMIVALARKLLIALWQMVTTGEIPEGVELHPQDYRLRA

SEQ ID NO: 367504 - protein, 344 aa, unidentified
MKALKSHVAGIDVHKEMLAITVLIGELDREPKEYQFESSTFTDDLMALGLKLKEMGVTDVAMESSGIYWKPVFNVFNPLGLKVVVANAAHIKNVPGRKTDMNDSRWIAELHRFGLIRASFIPDGEFQRMRLLSRHRTNLTEDLARVKNRIQKVLEDGNIKLSIVVSDIFGVSGLKVLKQIAGGYTHPNILITEVTTKIKRMEEMKKALTNCLTTEHCFVINVLMKQYEELKNRIEEGENELCKKVEPYAHLVEELDKIPGIDAILAMGIIAEASANMSSFKDERAFAAWSAVASGNNESAGKKKRAKCRKGNPALRKMLIQAAQKATTARNPFIDLNTTNSAFA

SEQ ID NO: 367505 - protein, 465 aa, unidentified
MRTDKKLWRNRKARKELARRLHSENPGLEVVHPHAAGIDVGNGAHYVAVRPDRDPQPVRRIECFTADLYRLAGWLQSCGVETVALQSTGVYWIPLYDILEEHGFEVYLVNARHTKNLPGRKSDVQESQWLLKLHTYGLLNNSFHPPSKIRTLRTYWRQRLQHVTGAATCVQRMQKALTQMNIQLANVISDLSGVTGQLIVRAIVAGERDSWKLAELSHPRIQASRAEIAKSLEGNWRPELIFVLQQELEMYDTYQRRIAECDEQLQKHLARFADTVALPRKEDLPPKKKKKQNKNNPHFHLADELQRITGVDLTRIDGVDVFVAQTIISEVGLDMSRWKTEAHFASWLGLCPDNRISGDKVLARGTRHVLNRAANALRLGASTLLKSQTYLGAQYRRLRSKLGAPKAITAMAHRLARLVYRMLNYGQQYVDKGAEYYERRNRQQQIEFLRKKATRLGLQLTPAHS

SEQ ID NO: 367506 - protein, 341 aa, unidentified
MQTKKYFTGLDLSADDFSASCITSPDNPVFSTQKFLNNFDGFNEFLSLLSKHSIKHSEVIICMEATGVYSENLSYFLASKGLSLCIEAPHKIKNKTKDSPRKNDFIDAVSIAEYAYRYSDKLTFWKPKDEIIEQIQVLLSTRELLSVQMTANQNALKTLRYKYYQTPLANQIYEKTIGKFKEHIKQIDQEIKSLIDKDDSFKNKISLAKSVPGVGLLLAANLLVLTKGFTEHLNYKHTAAYTGICPYEQKSGTSLYKPPRSRKCGPAKLRKLLYLAALSVRTHNQTFKKYFLRKVAEGKNKRLVLNNIENKLLKIIFAVINSGVAYTYNYKSINPALLKTA

SEQ ID NO: 367507 - protein, 419 aa, unidentified
MSFKILKNNCCGLDVHKTWIFACIGITDSHRRTEYKQARFSSFTKGLQELCDWLAKYNCTDVCMESTGKYWIPVFNVLEKNNIWVTLSHPKYTKPQKGNKTDRKDAKWICDLYMCCMVKPSFIPPADIRQLRDLVRYRFKLTCMITNEKNRAHNCLTISNFKLDEVFSDIFGKSSRSITEQILQHPGETFDVAQFVDGRCKTPIEEIQAAVDGAISTEQAVKLRQCLNHIDELEKHQAEIEREIFRLSDKYEEVLNLIRTVPGFDKNPMTAIQVLSEIGGDMSVSPTAKNLVSWAGCCPRNDQSNQKIKSTRISRAGSYFKPVLVQVANALIKSKKHPEFTTRYRRIKARRGHKKAIIAICRMILTAIWHILTDLKPYTTEGFLESRPVNDSKILTTSQALNLLKQRGYVIKDDIVSVP

SEQ ID NO: 367508 - protein, 433 aa, unidentified
MKYKLKQKQNQRITRITESTLVVGADIAKKVHVARAVDFRGIELGKDCVFHNDQEGLSKLATWMKELGQAHGKTNIVFGIEPTGHYWFPLAAYLQEQQQIQVVVVNPHHVNKTKELEDNSQTKSDYKDAKVIADLIRNGKYSEPKLPTKEYAELRILMNLREKVSASLTQVKGRISNWFDRFFPEYACVFKKWEGKASLMTMRAFPTPADIVGKGARDVLVHWKTEVKRGVGIKRAEKLVAAATASIGLTEGSMAARVELSTLLGQYDLFSSQLEEIMDKVLEILEHIPGTKEMLTVPGVGAITVAGFLAEIGDLNNYDHGQQIIRLAGLNLKENSSGKRKGKTGISKRGRSRLRALLFRAVMPMVAKNEEFKTLHKHYTTRSQNPLKKKQSIIALCGKLIRVLHTLGTKQREYSAIDVMGPVRQFQIQQEAA

SEQ ID NO: 367509 - protein, 416 aa, unidentified
MKKHNNSGKKSELTSKRAKSRGPVQRDTKEVLAELVGKLKEKLDRKKVAARSAGEEHSGGELRPNLDRLTVGVDLGDQGSHYCILGLEGETLAEGQLRTTQEDLATFFQGLNAARVVVEVGTHSAWVQEVISGCGHEVLVANPRLMDGSKRRKRKNDRIDAHKLARLGRVDPESLHPIQHRSREVRQDLVMLRARDALVAARTELINTTRGLVKSMGTRLPKCSSQSFAQKGEETVPVEIREALLPLVRLAAALSADIKEYDKKIETLGREKYGHTALLRQVKGVGPITALAYVLTLENPQRFVKSRDVGPYLGLVPKQEDSGESQPQLGISKAGDTMVRKLLVGSAQYILGPFGPDTDLRRYGLRLCERGGKNAKKRAAVAVARKLAVLLHRLWVSGEVYEPLHYAMSAPIAAAA

SEQ ID NO: 367510 - protein, 346 aa, unidentified
MIAIGSDVHKGRCVFAMREETGKVKMLEPIECTREAWLKRLGELPPEAEIALEVSTSGYFVMSVLEEAGWLKRAHWVHTAGIDSLRKQKTDRLDARRLARKLAANTADPLPEAWFPPPPIRQLRMLARQRCRIARLRVLTKNRLNSLLQMHGLRPDKSPIRAAGRDWIRQQPLPAPVEQCFEQLFRLYDFLHSERETSEQNLAAHAALFPEVKLLRTIPGIGHILAAIIWGEIGTLERFPCAASLVNTTGMVSSLYESGEVSIQGHITRQGSAWLRWALITAANCLTRSKSPLGQRYWSLRRAHKKPNVAKTAVACSVARCVYGVLKHGEPFQAERWGRRSGKLEP

SEQ ID NO: 367511 - protein, 360 aa, unidentified
MDSVYYLGLDVHKKTISYCLKQADGRVLREGSVAARREPLAAWAALLPKPWKGALEATLFSGWIYDFLLPHALSLEVAHPAMIRAIAASKKKNDRVDARKIADLLRCDLLPVCYMAPAEFRELRRLLRYRNLMVREAVRMKNKSAGLLMEAGAEYNKGRLDSRGYFQELLASVEHVPESVKELLRMSRAARDLFEQAQRRLVLGLLNNPLLKERVARLRTIPGVGEVLALTWALEVAEPQRFPTVGQAVSYCGLTSAQVSSAGKEHRAPISKQRNKHLQTVLVEAAKVAPLWNRRLKEVSERERGRGNANRATLAVARKLVAYLLAVDRSGKPFQECATGMDTANTTENEIKEVVAMATL

SEQ ID NO: 367512 - protein, 355 aa, unidentified
MSAKTRQDFSAVAVIWMDIGKDVFYLVGFSSDGSLVLRQKIKRLALVATFQTLPPCIVGMEACLSAHFVSRTLRGMGFEPRIIPAIYVKPFNKGQKNDYNDAEAIAEAALRPNLRTVSEKSQDQLDLQALHRVRSRLVSRRTATINQIRAFLIEQGITIRKGLRAVRNSLLSLLDERQDEISPRMRHIILDLHDDWMRLDARIEAVSDEIEGIGQSEAHCRDLRTIPGVGPIISTALVAAVGKGEAFESGRDMAAWVGLVPRQYSTGGRTTLGRISKRGSRYLRTLLIQAAKIILMRPHNWPGLSFGAWLAEADLRMHRNKLAVALANKLTRIAWAVLRYGRGFDARRDTVAEAL

SEQ ID NO: 367513 - protein, 377 aa, unidentified
MKRKKSNSTPKRKGKSTKNLPVLNPHAAGIDIGAEHHWVSVAPEQDPQPVRRFGCFTSDLYALAHWLKECQVETVAMESTGVYWIPLFQILETQGLEVQLVNAHHVKTVPGRKSDVLDCQWLQQLHSYGLLSGCFRPENQICVLRSYIRQRENLIQSASTHILRMQKALTQMNLQLHRVLSDLTGVTGLAIIRAIVAGERNPQVLASLKNPRVKSSVEEIAKALTGDYRVEHIFVLQQELQLYDTYQTAIAECDRQIEQCLTQFSDQVDVEVFPPTPSRYRCNKPQDNQPAFDLRTHLYRISGVDFTRINGLGALTVQTILSEVGLDPTRFPTVKHFCSWLGLSPGSCITGGKVKTSRTRQVVNRAERCFPNGCSRS

SEQ ID NO: 367514 - protein, 395 aa, unidentified
MEFLKYGLGIDMAMEKFDACISIIDQQQHVMIRAQCGFNNNKKGFEAFILWVTKNTRLAIPAVYLMEATGIYYEQLAWFLHIKSCSVSVVLPNKAKKYKEALGLKSKNDRIDAKGLAQMACEQSNTSWKPLTGNIYLLRLITRQIQSVSEQSTVLKNQLHALQYGMYRDNAIEKMHVRQLDLLQKNKKSLQLRVEQIVESDEILKRKFIHIGKIKGLGLQNLAVIVAETNGFTAFENIAQLVSYAGYDVVENQSGKRSGKTKISKKGNSHIRRCLHFPAFNMITYEVAPFKNLYERVYEKSKIKMKAYTAVQKKLLEFIYILWKKDEAFDPNYQDKKSGNVEPVPSFASVPQEPSLACGNKEKKLKLITQKITPAITRATQDKHPSKYRRMPSFA

SEQ ID NO: 367515 - protein, 390 aa, unidentified
MIYVGIDIAKDKHDCYIVTSDGVLISDNLRITNTLEGFNTLYSIISSNCQVASDVRIGLESTGHYGINLENFLRTKGYQLTVFNPLAVASFRKSQTLRKTKTDKVDAKFITTLLFNSDQTPTALVSDEIRELKSLTRHRYRLIGQCAKLKVSVSRLLTILFPELGTLIWSIHQKSSYAMLLEFPSAHDISNCHLTKLTNLLSKTSKGKYGKDKAIALKNLASKSIGINSSGTSFELQQTIRIINYYLDEIYILDKKIKELLIQMKTPLISIPGISYTLASIILSEVGDISRFQTPAKLLAFAGLEPSVYQSGKFQATGTSMVKRGSTYLRWAIIQAARLVAMRDPTFKLYQEKKKNEGKHHYVAISHTSKKLLRVIFHLLKNNINFVPQN

SEQ ID NO: 367516 - protein, 344 aa, unidentified
MTNSSKPEVQVFAGIDVSARELIVVVHCGTEDRETVTTFRNNAAGHKALLAYLLRGNGRARVCLEASGNYSLDLALTLQAHRQVEVSVVNPRRARRFAESLGERSKTDPVDAGVLCEYAARMPWVAWQPPSSLALRLRAITRAIESLGVMHTQEKNREHALASSQALPAMVIQEMRRHQRYLEHRMERLRREALRLIARDRELDRRFRLMLTVPGIGETSALQILGELVVLSNTLDARQWVAFSGIDPSQFTSGTSVQKRPRISRGGSRHLRRALYMPALVALRREPHLRAFYQRLLSRGKARLQAVVAVMRKLLHALFAMFRSNQSYDGSKLCPIELTKKLAA

SEQ ID NO: 367517 - protein, 437 aa, unidentified
MPLSTNHRVLYFFRPPPAASFADHLEETMRRIHDRVAGLDVHKKSVTACAECFDGKEVRTEKARFATTARGVRELAGWLEARSVSRVVMESTGVYWKPVFYGLEDRVEVVELVNAHHVRNVPGRKTDMADAAWLADVAAHGMVKASFVPPQPIRELRELTRYRKQQIRMRVQEIQRLEKLFQDAGIKFTSVASSVWLKSSQAMVAALIGGERDPAVLALLAKGSLRNKTEALTEAMENRWGDHHRVVAERLVAHIVELDAAIAVLGTEIARRCEPWAHEIELLCTVPGVGARIAEVFIAETGGDMSVFATAHHLASWAGLAPGNNETAGKAKPARARFGNSTIKATMIEASKAGTRADGFLRARKARIARRRGPNKATVAVARSQMIAIWHMLSNDEPWQDLGADYNLKRRDPRHQVNSHVAQLQKLGYQVQLTPQA

SEQ ID NO: 367518 - protein, 419 aa, unidentified
MSFKILKFNCCGLDVHKTWIYACIGITDSNNRTEYKQTRFSSFAKGLNELCDWLAKYNCKDVCMESTGKYWIPVFNILEQHQIWVTLSHPKYTKPMKGNKTDRKDAKWICDLYMCGMVKPSFIPPADIRELRDLVRYRYKLTCMITGKKNRAQNCLTVSNLKLDDVFSDVFGKSSRSITEQILQHPGEMFDVTPFVDGRCKTPIEEIQAAIDGVISKEQAVKLRQCLDHIDELKKHISQIEQEILRLSDKYEAALNLIRTVPGFDKNPMTAIQVLSEIGGDMSVFPTAKHLVSWAGCCPRNDKSDRKIKSTRISRAGSYFKPVLVQVANALIRSKKHPEFTDRYRRIKVRRGHKKAIIAICRMILTAIWHILSDLKPYTPEGFLEYRPVNKEKVLTTSQALNLLKQRGYLIKNDPLPTS

SEQ ID NO: 367519 - protein, 428 aa, unidentified
MLKINPLSTLYVGIDVSSKSNYVCALDFYKNKYINSSFANNQPGAEELAEKILECLKQHPELNTIVAALESTSVYSIHIANFLSSCEELMHFKPYVFVLNPKCTANYKKSYIGLGKSDPIDAFVIADYARAGNIETEPWRGSQFLALKRLTRHRLHLVECMTREKTYLVSNLYLKFSELQMLEGDDQPFCDIYGATSSSVLTEYLSPEEIIDSSEEDLISFLAGKSRNRIKDISKTAELLRKAARDSYRLDKALYEPLNVSIASSFNCIETFKKEIKLIDTAIEREIRGLNPNAFIILQSIDGIGPVFAGGIVAEIGDISAFHSSDALAKYAGLMWKSNQSGDFDGEDTPMSKAGNRYLRYYLGEAANSMRKHNVEYGAYYRKKYNEVPKHQHKRALALTSRKFVRLVYGLLARNQLYSGVSLDTSNE

SEQ ID NO: 367520 - protein, 337 aa, unidentified
MKRYVGVDLHRTQFVVCTRWENGEQEIRQWRIGELPRFVKQLREEDQIAVEAMGTTAHFYDAVVGRVARVVVVNPHQFKVISESVKKTDRHDAQALALYLEKDLLPEVRMKPKQNRELMHLAETRDLLVKQRSALKGKINNLLAMQGIELKREALSSKIALERILVLPVSGMVKVELRILVEQIRSLSESIAELDERLEEEGQQLPGYENLTSIKGIGSLSATVLLTVIGKISDFADENKLAAYLGLVPKIANSNESERSDRITKQGNKLARTALVQCGLVAKRYSPYLQRFYERIKQRRGGGKAKIALARKLVKIVYDTLKNQWVFEDFPSFTLAA

SEQ ID NO: 367521 - protein, 416 aa, unidentified
MSVTDPAEPVEGPRPTGGVDWATDDHAVSVVAPDGEQILRFSVTHDAAGLRSMVKRLRAAGVAEVGIERPDGPVVDALRAAGLLVYVIPPGQLKNLRSRYGSAATKDDRFDAYVLADVVRTDRRRLRPLLVDTPATTALRQSVRARRDLVVHRVAVANQLRAHLQICFPGAVGLFRDIDSEITLRFLERFPTPERAAWLSVKRLTAWLASIGYCGRTPPETLYQRLTTAPAAATGADADTAAAVTAAFVAVLRTLTTQIEALAARISEQLDLHPDQAIFTSLPRSGRVRAARLLAEIGDARGRFPTADSLACLAGVAPSTRQSGKVEVVSFRWGADRQLRDAICDFAGDSRHANPWAADLYQRARNRGHDHPHAVRVLARAWVDIIWACWTSHSPYDPDRHGALQRILNQDQPAAA

SEQ ID NO: 367522 - protein, 316 aa, unidentified
MSKQNSPTAAIGIDVSKGHCDVCFLDEKEDIKHQGQYPEEKYKALVKKIAKAKPQIVILEATGGYERSLAALLLASAVPHRVVNPLRARQFAQAIGLLGKTDSIDARMLALYALRNKLEPAAVPNAKTQEMRALLERRRQLVALRVSEKNRQHLEANKTAAKSIQSLLSFLTEEIEALDKALDEIVGGDDDFRHKSEILTSVPGVGEQTARTLIGAMPELGSISRGEAAALAGLAPFAHDSGKLRGRRMIRGGRAHVRQSLYMAAVSAIRYNPQIKALYERLVCAGKAKKLALTACMRKLLLLLNALLKKDEIFTA

SEQ ID NO: 367523 - protein, 349 aa, unidentified
MSERRARVWAGIDAGKGHHWAAAVDETGSTLWSKKIDNDETAILTAMGEILDLADKVSWAVDISGTSSALLLALLAAHGQQAVYVPGRTVNRMSGAYRGEAKTDARDAYIIAETSRQRRDFAAIDVPAQLAADLALLTAHRSDLVADRVRMINRLRDVLTGVFPALERAFDYSSQKGALVLLTGYQRPAALRRRGQARLTAWLANRSVRGADTVAATALEAAQAQQTALPGEDIAAQIVADLAAQILALDNRLKRVDKQIRDTFRGHPQAEIIESLPGMGPILGAEFVVAAGDLSAYADAGHLASAAGLVPVPRDSGRAPATCTAPSATAAACAGCSTCPRRPASSARG

SEQ ID NO: 367524 - protein, 392 aa, unidentified
MIYVGIDVASKKHDCYIMSDVDENSNLLVTINNDIEGFTKLKETIYDFMSETNDKVRIGLEATGHYSHNILHYLVREGFDTMQINPLLTNMERKASSVRKTKTDTIDAKSICMFLTRNKEFKPYTIKQYHNAALKSLSRRRISLVRQLSKQKVQLHMLITLTFPEYLKVFSSLYVNTSLELLHQYSIPSVFAKTRIDGLTNVLRKSSKGKLGIQTAARIKELAANTAGDKNEFYAIQIKLAVEMIRFLNSQIKTYNDEIKSIVDENCPIILSIPGISYVTGGIILGEIGEISLFQSPTKLLAFAGLDPNVYQSGNYSANNLKPSKRGSSYLRWAIHVSASVIIHNDNTFASYYAKKRKEGKHHLVALGHVSKKLIRVIFSILKYDSAFIPNH

SEQ ID NO: 367525 - protein, 411 aa, unidentified
MDALYERCCGLDIHKRTVVACLIVPEPGGPPRKEVRTFGTMTEDILALGDWLAAAGCRHVAMESTGVPWKPLYNLLEGAFELRLANARHIKAVPGRKTDVRDCEWIADLLRHGLLPASFVPDRPQRELRELTRYRTTLVRERTAEVNRLQKTLEGANIKLAAVASDVVGVSGRQMLAALVAGTTDAAALAHLARGRLREKLPHLARALTGRFGPHQRFLVAAQLAHLDFLDDAVARVSAEIAARLRPCAAVLERLDTIPGVGRRTAEVLVAELGTDMRRFRTARHLASWAGMCPGNHESAGKRKSGRTRKGSPWLRVALTEAAHAAARTKRDTYLKAQYRRLAARRGKQRAIVAVGHTLLVIVYHLLTDGTPYRDLGGRYFDDRDRRALERRLVHRLQGLGYRVSLEPTAA

SEQ ID NO: 367526 - protein, 372 aa, unidentified
MSQNVVYVGVDVDDVRCHGSALHKYTGEVLDFQCRPTFKGLVGQLGKVQEYFGCVQLKLCYEASYVGFSLQRDLNDRGYHCEVVAPSSIPRRAGKSVKTDRIDATELAEFYANGLLTIVTAADAEVEQDRDLLRSRQQLMQQQGSLRRHIRSLLRRNGFHYKAETQRKTHWQPPHYGWLDRTIDGCSGSLKVNLSLLVRQLKSLDDILAAYGEEVDALAATPRYREPVKALTCYKGIKHLFALTMITEIGDVKRFAHPRQLVSWIGLDIREYASGGKSNCLGITRQGNRYLRTAFVEANQRGYRTARLGKDIKARRVKSGPEYIAIADRCLRRLNKKGYRLLLVGKHPNKVKVACAREMVGFVWESLNCAAA

SEQ ID NO: 367527 - protein, 321 aa, unidentified
MDKDKKIYGIDISKNVFDVYTQQTGHHQFKNDEKGFVLFAKRLKKGSVVVMEATGYYHYRLAQYLYKKGILVSVVNPLSIKRFIQMKLAKVKTDKSDAKAICEYGQSNELSMYTALTDVQSECLQLFRLLDTYLKKRTATKNKIHGEKVLGEPSKYVFNSLKRDLKHLNKEVKGIEDRLLKLVKKEQQDQLTLLKSIPGMGMKTALFLIVVTDGFKKFDNASQLCSYVGITPTIRQSGSSVKGRSRISKVGNKKLRNLLFLCAFSACKYNKACREIYERIVNKGKSKKLALIAVANKLLKQAFAIAKSGSPYDEKYVSKLT

SEQ ID NO: 367528 - protein, 399 aa, unidentified
MIATGLDVHKDTIFCGIHNGKKNLDVKEFSTLTHDIRNLGEYVRSLGGHTIAMESTGIYWIPIWNILDEMGFELILVNPYLIKQMPGRKSDVKDAQWIATLLQKGLLRASFVPDKKIQELRTITRKYMKLQQRRVTIEQNMERILEICNIRITSLVSNISGKSIYRIIESIVNGVDAPDELEKLVHGRIKNKHKEKVRQSLEGHIPEYHRFNLSLSFEEFNLNLSQVNRCLEKMEELCNKEFSKELELLQTIPGVSLISAMILIAETGADMRVFENSGKFTGWIGLRPRNDESAGKYKSTATTKGNVYLRATLVQIAWAATKTKGSYFKEKFNRLAMRKAKKKALIAIARKIAVVIWNVLNDMKKYNPNLLPILDPQKLMASLNYHQKELERLNKLVER

SEQ ID NO: 367529 - protein, 400 aa, unidentified
MLSIGIDVSKGKSTVCGMKPGGEIVYAPFEVQHTREEMLELVSLLRSSGEEVRAVLESTGSYHCPVVAALLENGIFVSVVNSLRMKRFCSQSIRKVKTDRIDAMQIALYGLAYWQELQPTRLPEDTYRELQLLARQYYQMTSLLIKAKVDFNAICDQVLPGMQELMSDHAGRHKLSDFVLRYRHTTHILEMGETRFRKDYCKWAEKKGYRNCERMAALIFATAQNGIPVLPNAPSTQIVITEAIRVLHTVEASRDAILTQMQALAKTLPEYSLVREMPCIGDTLAPRLIAEIGDVRRFHSKRALIAYAGIDAPPYQSGKFCANNRHISKRGNRYLRKTGYEVMQSYVMHKPANDPIFTFIEKKSSEGKNGKLAMVAGLNKFLRVYYGKVTELYRSLPAIE

SEQ ID NO: 367530 - protein, 341 aa, unidentified
MEQVSTIGLDIAKHVFQVHGADAAGHVIFRKRLTRVKLLGFLAVQTRCVVAMEACAGAHHWAREIAKLGHHVRLIPPAYVKPFIKRQKNDAADAEAICEAAQRPSMRFVPVKTEEQQANGIVFRARDLLVRQRTQCVNALRGHLMECGHVFPKGITHVETLVALVEDLQSPLPDSVRVILKLLVDTFTALEAQITALDAEINQRSKSDPTARRLMTIPGVGPIASTAIIALVPAAEGFPAGRDFAAWLGLTPLQKSTGGKQKLGAVSKRGERTIRRLLIIGASAVVQQASRRGAPKGSWLAQMLARKPKMLVTVALANKMARIIWALLVKGGTYRTPVAVA

SEQ ID NO: 367531 - protein, 367 aa, unidentified
MEWPAPSVPQLKAKLAWQSEEEWKMQIAVLGIDLGKNSCSLAGLDNAGRVVVRRRLCRESVIKFAASLPPCIVAMEACCGAHHLGRILRSQGHEVRLMSPEYVRPYVKAQKNDDRDAEAIAEAATRPTMRFVELKSEAQLDMQTLHRARDRLVGERTALINQLRAVLLERGIVVPHGRRKLEQHLAAMLDEGEGLPLSPRVRALVADMRAEWRELDRRIGAFDDEFAARARSDEAARRLATIPGIGVLNATALLAAIGTGEAFRRGRDLAAWLGLVPRQASTGGRAKLLGISKRGNKYLRKLLIHGARSVLRPLSRSATPLGAWLRGLLARAHVNTAVVALANKLARIAWAVLSRTRTFNAGAVMVA

SEQ ID NO: 367532 - protein, 361 aa, unidentified
MIVIGADTHKRTHALAAVRAATGAVMAQRSIAADEPGHLSALRWARELDGDRVWALEDCRHVSRRLEQALVAAGERVIRVAPQLMGQTRRGERQPGKSDQIDALAVARAVLREGVERFPAAFLDERAMAIRLLADHRDDLVAERTRVQNRLRWHLVAICPELEASLPSRCLDRAVWLDRIARKLGRLATSNTRVRIARQLVSAIRQLTRQAEAIEAELRVLVRTYHPRLLAETGCGALTAATLIGRTAGAERFATDARFARQAGTAPIPASSGKRNRHRLHRGGDRQLNRALHTIAITRAARDPETRAYLQRKIAEGKTRKQAIRCLKRHLARRFHRLLTAPIPDAPTVTINARVHAPCLT

SEQ ID NO: 367533 - protein, 463 aa, unidentified
MGGDQLHIGGERAAAFRELVDDLDPRRVLLVGIDVAKASWFVLGCDLYGNVVIDGTKVAADRAGLGQLAGLLGQARARVGAQLVVVGVEAAGHYHQTLAAHLADRDDLLLRLINPAAVAAVRKTQLNRRRKTDWLDAAAICDLLVRGEGSRFLLGDDPATALRPLWSGRKDLVDARTRLRLQVLALVDCLWPGLTAHDTALGVRPVLRNLFTTKAGRILLGLLAQDWSPERIATHDTARLKALFARHGCQLKVTVAARILTRARESLRPHPAATAGKPVLLAALLATLETLDRQVAELEVEMAGLLPHTEGAKLTQIDGIGTVAASGFVAFVGSARRWGDWSKVWRGAGLDPARSQSGPIDVNFSISREGSAWGRRAVLDLASAACRKPGRWRDAYQRRINLDRKPPLVALTATGNSVGRTCFALMLTGADYDPGHEATRRRRHCPTSVSAELAVGKAGGQAG

SEQ ID NO: 367534 - protein, 389 aa, unidentified
MSYYVGIDIAKFKHDCFIVTGDGEVVRASFSFPNNEDGFKELKAALDQLDHSQKIKVGLEATGHYGRNLKLFLTSIGYEYSELNPYLVKKYSESITLRRTKTNKKNAMLIAKYLQFEASKSNQELSYTIYDLKTLTRSRDKLVRTRSNELVIITNCLDRMFPEYKSFFGRKLGKCALTILEKYQTPDKIAKMNDSTIVKMHNISRSISVNKLIRLKNLAKVTVGHSSKSDVFIMGQSIKRFNMIDEDITEIEEEIKAMMKEIKSSIETIPGIGTISAASIIAEFGDIKRFSNSSKMLAYAGLECSKHQSGQEDFKGKMVKHGSEHLRYVLTNVAVTVKNFSPTFASYYLKKRDEGKCYRVALNHVVKKLLRLIFKLTSTDTQYNLSLSK

SEQ ID NO: 367535 - protein, 315 aa, unidentified
MFVGIDVSKDWFDAAWEVDGQLRTQQFAYTDEGIEQLMEQVPSQAVCVMEATGTYHARLALKLFEAGRGVSVVNPLVIKRYGQMKLLRVKSDRADAQLILGYAQQERPALWQPASEQVQELQQAHGWLNDLIGQRVRLLNRQHAVSYRAKPSAFVVGQMAAQLQQLNERIDECERHLEVLVKKSFAELYERLLTIPSIGAKTALELIIVTDGFTRFEDVKQLGAYIGVSPTTLRSGSSVKGKGSIAKLGQGRMRQLLYLCTWTAKSCNPACKKLHQRLKAQGKPAKVINIALAHKLLRQAHAVATKNVSFSAEMA

SEQ ID NO: 367536 - protein, 377 aa, unidentified
MSKVIMIGCDLHDRSMLTRFAVDHNEPRQASFSNDALGRGRLLEKLQKEAAEHQVTRIVLAYEASGQGFGFSDFLHDHGVECYVLSPTHLPKTPKSAKQKTDAKDAQMLLEQLRGFVLAGNKLPVVWTPPQRLRDDRELIRARIDAADDTTRIKLQILSLLKRYGLARPYKSKSWTKEFMKWLRETAAELDPCLAPVLTSLIDRYELYREEVAKLDKAIKALSRTDRYRNACEELRKLPGVGLLTAMTFLTEMGDLQRFHNRREVAAYIGLCPSSFESGEAEDRKGRITRQGPARLRKLLCQAAWIAVNRCEDTGAAYHRIKGNKSNRTKKALVAIMRRLAIKMWHRALSTGPVIEFRGRGGPHVEIRPPTPVQLVA

SEQ ID NO: 367537 - protein, 363 aa, unidentified
MRVTHPKRKEQMTMTTIARRITGGVDTHLDVHVAAALDERGAQLGVESFAATAAGYQELLGWLESFGTVELIGVEGTGSYGAGLTRHLLAHEVVVVEVDRPNRQRRRRTGKSDPHDAVAAARAAQGGEATGSAKTRDGNVEAMRVLRVARRSARGNRTQAINQMRSLISTAPEELRAELRNLSIYNVLTLASAFRHTGRTDVTTVTKLTLRTLARRALSLEEEVKEIDRLLKTLVAETAPELNAIDGVGTDVASAILVAAGDNPERLKSESTFAKLCGVSPLDASSGKQQRHRLNRSGDRQANSALWHIVFTRMVKDPRTKHYIERRMKEGRTKKEAIRCLKRYVAREVFAALPRSQFALDSP

SEQ ID NO: 367538 - protein, 339 aa, unidentified
MGEVSTIGLDLAKSVFQVHGVDRHGAVVVRRSLRRGQVLAWFAKLPPCLVGIEACATAHYWARELRRLGHDVRLIPPAYAKAYVRRNKNDAADAAAICEAVGRPSMRFVTIKSERQQAAAGLHKVREMLVKQRTMLTNQIRGLMAEFGIVAAKGTRHFGELVAQLAIPDDQRVPAPLRQALLGMAEILRTVAKKIEGIEQEIVAAGGDDATYRHLITAPGYGPILSSAMAAMVVDPAVFRGAGDFSASLGLVPRQEGTGGRIKLGRISKRGNGYLRRLLVNGAMAVLGSRRARQDPWLAKLLASKPRKVVAVALANKMARIGWALMMRQEDFRARPAAA

SEQ ID NO: 367539 - protein, 407 aa, unidentified
MIFVGVDWAEAHHDVHVQDEDGKRLGGGRLPEGVEGISRFHELVGAHAEDPAEVFIGIETDRGLFVAALVAAGYEVFAVNPMSTSRYRDRHSTSGAKSDPGDAKVLADMVRTDRHNHRPVAGDTEGVEAVKVLARAHQSMIWSKGRQTNLLRSTLREFYPAALVAFDDLASGDALEVLKVAPTPTLGAGLSRSKIAAALRRGGRKRRVDERTSEIQDALRSPQLQASAVVASAMGSSVSASVAVIATMVAQIAELAGELESGFDQHPDAEVVRSLPGLGTILGARVLGEFGDDPNRYATAKCRKNYAGTSPITRASGTKRVVLARFARNQRLADAIYLWAFAALTASPGARAFYDSHRDAGDTHHAALRALGNRLVGILHGCLVHHSTYDETIAWGHRSQNNLTAAA

SEQ ID NO: 367540 - protein, 444 aa, unidentified
MGRKSKGQWLRVVHPDCAGIDVGSREQWVAVDPNCCEQPVRRFTSFTDDLEALADWLTSLEIKIVAMEATGVYWIPLFELLEARGFQVVLVNARATRQVTGRKSDVLDCQWIWQLMTYGLLRGAFRPADAVCALRALVRQRAGRVEEQSRCIGHMQKALTQMNIQLDNVVSDLMGKTGRQIVRAIVAGERDPHALAKHRDRRLRADEATVARSLHGNWRSEHVFGLSQALAHYEFLEQQIGACDQAIEQALGRLPTLCEETAAPVKSLRSAGRNAAARGQLHQALQQVLGVDLTAIPTIGLDTALALAGEIGPDLSRFPSEGHFCSWLTVAPPTRISGGKPLPGRAPKVFNRAGHALRQAAANARRSHSFIGACHRARLARMDAAKAIKATAHQLARLIYALLTKGQAYVEQGVAAFEARRQDRQLRALERKARKLGLALVAAA

SEQ ID NO: 367541 - protein, 393 aa, unidentified
MDYVGIDVHKKPSQICPCTAAGEMLHQRIETQRERCAAVFTTRPQVRILIEASTASAWVAHCLAALGHEGIVADPHDAPLDAQRRRRVKTDRRDAEALAQACRLGAYRPAHRTSERQRQVRAVRTVREAVGQSRTRWISGVRALRRHHGSRLRRGATESFLDRVAALARPADLQAAMEPLVRAMQSVNAPLAALAQRTETMAQDDEVVERWRTAPGVGPLTARSFVATLDAVERFDHAHQVESSRGLVPREWSAGEQQQRGTITKQGSGQMRALVVGAAWRIWRRQGVVGSTLRHWAEPIAARRGKRIAVVALARRLAGIRYALWRAGSVDDAARVGQRQRAVALTVSSPKRRDAPEPRCAAGWSSPGAVSASISLAAVTAVGEMAPRPDVSP

SEQ ID NO: 367542 - protein, 349 aa, unidentified
MIVIGIDPHKQTHTAVAIEQATGEVIAELTVRARTPGFERLVDWARGLGAERLFAIEDGRHVSGALERYLIDRGERSVRVAPRMMGESRRADRIGGKSDPIDATAVARAALAHPDLPVATLAGPEREIGLLAAHRESLVAERTAAQNRLRWLLHDIDPDLAPPARSLDRFRTLGRLEGCLAGMEPSVQVRICLELITRCRQITRRVGELEREIEKLVKACAPALLQIPGCASLTAAKIVAETAQVDRFPTEGHFARYAGTAPVPASSGATHRHRFNRRGNRQLNAALHRIAVTQLRIHEPAKLYLAKKRSEGMSKTEAIRALKRHLSRVVFKTMTSMNQPADGLTAVAA

SEQ ID NO: 367543 - protein, 355 aa, unidentified
MNSNKYVGMDVHTATISVAVRDATGKLIMESVIETKASTILQFIQGLRGNLYVTFEEGTWAAWLYDLLKPHVTNVVVCNPRRNALLKEGSRCDRIDARKLADLLRTNLLRPVYHGEKGLRTLKELARAYLTISKDLARVMNRVKAIYRGWGIPCGGKSVYHPRHREEWLSKITQASVRRRAELFYKQLDALVLLRKQARQELLAEGKKHQAWKWLRSIPSLGPIRVAVLMAIVETPHRFRSKRPLWKYSGFGVVTHSSADHRYVQGQLERSKKPVSVRGLDPDHNHDLKDLFKGAALHASTRKGPFLEFYEALVTKGMRPEMARLTLARKIAVITLTVWKKGVAFDAKYLKPQTA

SEQ ID NO: 367544 - protein, 394 aa, unidentified
MNCNTQNAKIASITEKTLIVGIDVGSETHFARAFDWRNYEYTKKPLEFSNTEAGFMMFKAWVEDIAEKQGKTAVIPGMEPTGHYWFALGKFLQDSGMKPVHVNPHHVKKSKELDDNNPNKNDRKDPKTIAALVNEGRFSYPYIPTGIYAEIRNLSNLRFQTQEELTRIKNRIARWFAIYFPEYKDVYGDLMAVSGRMILKEAPLPEDIRILGVNGVNQIWRNAKLRGTGMKRAKILVSAAEHSVGSKEAPEAARIELKNLLNDMDVYVSRMEELLQTIEEKLKTIPYVDKLMEIKGIGLITVSGFIAEVGDIGRFDNPKQLQKLAGYAIVANDSGKHNGESRISYRGRKRLRYVLYEAAISLVGKNAEFKEIHEYYRTRKENPLKRMQIGRAHV

SEQ ID NO: 367545 - protein, 387 aa, unidentified
MQKPRDDSKACLTAFVQDNAIVIVLELSLSSWLVAGMVPGLSREPLKKIAPDPEVLLRLLHRWRDEAVKAGKEITRIAVAYETGRDGFWLARWLRARGIDAHVIHATSVAVSREHRRAKTDRIDTAMLQRGFLGWLRGERGHCSMAIVPTVAEEDGRCPHRERETLIKQRTSTANRMKSVLIQFGVRNFNPSLRKAPKKLDSVRTPEGIPLPSNAVAALQRHMERFRIINEQIKAIERTRLQRLQRDPAEKFNAMVFLLVRIIGLGVETAEQLVREILSRNLRDRKAVARYAGLTGSPDESGSMRREKGLSRSGNGRVRNILIQLSWRLLKFQPQSDLVLWFKNRTANAQGSRKPMIVAFARKLIIAIWRYVNTGVVPEGFQLRSAA

SEQ ID NO: 367546 - protein, 316 aa, unidentified
MRKHTMICAGIDTGKRKLDVAVEASSEHHQVQNTPDGHAALSRWLRQRGVERIGIEASGGYEQTVVARLRQDGFVVIVFQPAQVRAYAKFRLQRAKNDKIDAALIAACTAATKTIRAAPDPRLAPFAAHLTLIEQLTEDIAHLETRQETCRDERIRRIWKNEMARLGALLKAELASLVAAIRQHPDLSDRLDLIASVPGVGLRTAVAILVRMPEIGQLSREQAAALAGLAPYDDDSGDRIGARHIDGGRERLRGSLYRAALAASFRWNPALIALYRRLTDAGKPHKVALVACARKMLVFVNTVVQRGTPWITCPAV

SEQ ID NO: 367547 - protein, 421 aa, unidentified
MAPQLMQQFAAYVGIDWADRKHDFCLQAGGEDTVEFGCLPHRVECIDEWARALHQRFGGPIAVALELAKGPIVSALQKYDFFTLFPINPSTLAKYRLAFKPSRAKDDPSDAELALDLLLRHPERFAPLKPQSVGMRSLTVLIEQRRQLVDDRNRFTNRLRSALKEYFPQTLDWFEDIDTMLFCDFLSRWPTLSAVKRASSKTLDGFFRAHNCRRATLIDQRLKSIRSAVALTEDPGIVTPYRLHAVTLVAQLRTTLAVIDVFDQEIAALVRTLPDFALFDSLPGAGPHLAPRLLAAFGEQRERFRSAVEVQQYTGIAPVTERSGKKSWVHWRWQCPTFLRQTFVEWAAQTINKSFWAGAYYRQQRAKGSSHQAAVRALAFKWIRILYRCWQTGKRYDESVYLNALRRRGSPLLGKLSLSDG

SEQ ID NO: 367548 - protein, 410 aa, unidentified
MEVVHAHCAGLDVHKDTVVACVRHMTDGKVTTTIKTFNTATQELLALSDWLSAENATHIAMEATGVYWKPVWNILSDGEFELVLGNAAHIKNVPGRKTDVKDAAWLADLMAHGLVSGSFVPDQTTQEMRDLLRTRKQLVRERTSHTQRIQKTLECANIKLDSVVSNVVGVSGRRMLEALIAGQTDPKELAAMAHGRLQATPAELEAALRGRVTAHHRFMLRLHLDQIDSFDEAIARIDKEVKDNDKNFRAAVELLKSVPGVGSLAAEVIVSEIGIEMTRFATASNLVSWAGLCPKNDESAGKRRSNRLKAGAPWLKTTLVQCAWAAARSKGTYLHAQYVRIRARRGNQKAICAVAASILTTVYHMLKDGTFYEDPGPDYFDKRNKDQQANKLVNRLQNLGFNVTIQPAAA

SEQ ID NO: 367549 - protein, 420 aa, unidentified
MELKDCAAFVGIDWADQEHAVCLIDSEMQTPELSVLAQAPEAIDEWVAEIQRRYPGQKVAVCLEQKKGALVYALMKFDCLMLVPINPKQLSRFRDAMGPSGAKDDPRDASLLAELLMKHSEHLRAWLPDNVETRRIRLLGEDRRNLVDARTALTNRLKSLLKQYFPLALLVSGTRIYGELACQLLMRYPSLDKLQAASDDELGAFYHEHHCYRPQLVAERLQLIRQARPLTTDPAILEASVLAVEILLKQLVTLNQGIDQYDMRIATGMEVHPDASIFESLPGAGAAMAPRLLAAMGSDRERLTSAQEVQQLSGIAPVTKQSGKTCVVHRRWAASKFLRQTFHEFAAHSIKHSAWAKAYYDMMRARGNKFQAAVRALAFKWIRIIFRCWKDRTLYDEGTYLTALLKRQSPILKHFASSEK

SEQ ID NO: 367550 - protein, 392 aa, unidentified
MPDEDRPQRRLQEVETYSTMTRPLLGLAGRLRCFGVTRVAMEATSDYRKPVFYLLEAHGFQAWLDGARDVRHLPGRPKTGKLDAVWLAKIAERQMIRPGFVPPPQIRRLRDLTRYRAGLVAARTAEKQRAEKLPVDAQIKLSVVVSGIFGVQGRQMLAALIRGQRDPKALAQLARGVMRRKITTLQEAFTGYFTDHHAFPLATMLARVDAIDTDLATLDATIEQMAAPFTAAVQRLAEIPGINATAARAILAETGTDMDRFPTAGHLVSWAKFAPGVRESAGKKKGKGTTGHGNRYLARVLGNAAASAGRTDTFPGERYRRIARRRGSKKAVAAAGRSMLVIIWHPLADPGTRYTDLGSDFHDTRINPERRKRNHIRQLEAPGYQVTLEPAA

SEQ ID NO: 367551 - protein, 367 aa, unidentified
MKKHSSIDQSLSSTDLSACTTLAADLAKQVFQVAGEDVLGQVRFEQRIKSREAFYEFLQKLPPHVVVLMETGPGAQAWARQLQDQGNSARILPAGLVAKHRSGPKNDRNDALAILRAGRDEKICAVPVKSVAALAMQALHRARQGYVRRRTAVSNQMRGLLLEHGVALAQGDVAISQKIPRVLEDATQPVPALLRELIDELLAEWRHLGERISVLTGRLEVAANADMTAKRLMTVRGIGPVTATALVAKETKPERFPNARKFAAYFGMVPDQHSSGEKIRLGDMTKRGDAYLRSLMIQGAHAVLQQLRPDSQQPDDRRLLHWMSRLGRKEAAIRLANRNLRIVWVLLQNDQTYRRHAGDGQQATMSH

SEQ ID NO: 367552 - protein, 352 aa, unidentified
MHDSSPSDVILGVDTHLDIHVGAVINGAGKLLGTLAVTTDAAGYQALVAWAKTLGHLQRAGVEGTGTYGAGLVHVLREQLIEVLEVNRPDRRQRRLKGKSDPLDAENAARAVLAGHATAIPKQQSGVAEAMRIVSVARRSAVKAKTQAINQLRALLVSAPADIRVRLWRSKPADCVSACSCLRALGTTTHLKMLTTTLRALAKRWRMLAEEVEAHDKTLDDLTQQHAKRLRAQFGVGPQTAAILLSVAGDNPERLKHEAALAALCGVNPLPASSGKTIRHRLNRGGSRVANNALWTIAMVRMRSEPRTRAYVARRTAEGLSSKEIHRCLKRYIVRELYPLILADLAESARFS

SEQ ID NO: 367553 - protein, 369 aa, unidentified
MPHVTSIGLDVHARSVAAAAFNPFTGEVVHRDFGTDAAEIAEWALGFEEPRACYESGPTGFHMARELRALGLDCAVAAVSKMQRPAADARRKNDRRDAEFIARMLATHNIVEVPLPDMAVEAARDLDRALDDATRELRRSRQRLNMFLIRLGHVWDERNADGARKKAWTRAHWRWVSEIRLEGPQRDALEYYVTAARCAESDRRQLERRVVALAGTDRWRATVEALSCIKGVDTLTAFRLAAEAGSFSRFRSAPAFASWCGLIPSEHSSGESERRGGITKAGNALARTALIESAWHYSTCSPRPKAPAPGTDVPPVIRSRADDCTARLHRRREALAAAGKSACKANAAVARELACWVWEIGCRSEGTVL

SEQ ID NO: 367554 - protein, 454 aa, unidentified
MMKGDKKSVEQLADIHPNAAGLDIAAREIWGCVPADRDTESVRAFGTFTPDLQRLAEWLMACGVDTVAMESTGVYWVPVFELLEARGLKVYLVNARHIKNVPGRKSDIQDCQWIQKLHRLGLLASSFRPDAEICRLRAYLRHRAQLIQHRAPHVLHIQKALQQMNIQLTQVLSDVTGLTGQAILRAIIAGERDAVTLAQLRNPACKSSEEMIAKALTGDWKAEQLFVLKQSLALYDFYTVQIAACDVEIQQQFSVMKPRWTTDSLVTADSQPQPKPKRRHKHSPDVDVQTAAIRLTGIDLVAVDGLSAALVQTILSEIGTDMSHWPTVKHFASWLGLAPHNAISGGKVLHSQTLPTKNRAGQAFRQAAITMARSPSAFGAYYRRKRAQAGPMFAQVATAHKIARTVYYLLKHQVPYEDIGATTYEQKHQEREVIALRKKATKLGFSLTISEPVT

SEQ ID NO: 367555 - protein, 408 aa, unidentified
MEILYPRCAGLDVHKDSVVARIRCVSEPVHDEVKTFATTTSALLELNEFLSAQGVTHVAMEATGVYWKPVWHLLEGDFELILANAQHIRNVPGRKTDVSDAGWIADLLAHGLIRSSFVPPAPIQELRDLTRTRKQLVREVSQHSSRIQKVLEDANLKLGSVLSNVLGKSGRAILEALIAGQSDPERLADLAQGTARKKRAELIEALHGRIRPHHRGLLKVHLKLVATLEQAIADIDATVGKALASVHESARLLSTMPGISDVTAHVIVAEIGVDMTRFASDAHLRSWAGFCPRSDESAGKRRSTRVRKGAPWLKTTLVSAAWAAVRVKESYLQAQFHRLRARRGAKKAILAVASSMLTAAYHMLKNGVEYQDLGASHFTRRDREKIILRLVRRINDLGCQVQLVPQAA

SEQ ID NO: 367556 - protein, 343 aa, unidentified
MQGVTTVGLDIAKSVFQVHGVDARGNVVVRRQLRRRQVLPFFKKLPSCLVGVEACATSHHWSRQLRALGHTVRLMPPAYVKPYLKRQKNDAADAEAICEGVTRPNMRFVETKTPEQQSCLMLHRTRHLFIRQQTAVINAIRAHLAEFGIVAPVGRNGVEELLDVVADPNDDRVPEVARECLAGLGAQLRMLKAQILEFDRCIVAWHRSNETSKRLDEIPGVGPALATALVASVADPRAFRSGRDFSAWVGLVPKQNSSGGKEKLGSITKRGDRYLRSLFTAGALAVIRYAKIHGTKHRPWLTALLGRRPTKVAAIALANKIARMAWAMMAKGERYKEPAALAA

SEQ ID NO: 367557 - protein, 322 aa, unidentified
MNKYNETFGVDISKDVFDVHGSNKGHDQYKNDEIGFKKFLKELPEVALVVMEATGYYHYRLAQFLHKNEVVVSVVNPLSIKRFIQMKLAKVKTDKSDAKAICEYAQINEVPIYNALTDTQSECLQLFRLLDTYLKQRTATKNKIHGEAVLGIPSKFVHRSLIRNKKQLNKEVTAIESKILSLVKEDQQEQLTLLTSIPGIGQKTALFLIVVTDGFSKFETASQLCSYVGITPTIRESGSSVRGRARISKVGNRKLRNLLFLCSFNACKHNKACREVYERIVNKGKSKKLALIAVANKLLKQSFAIAKSGRPYYETYVSILPR

SEQ ID NO: 367558 - protein, 271 aa, unidentified
MTFRPHALHLKAELFVKSSRVHVRDDGFTRCNFHLKFFIMVYRGIDISKSSFVAAYPSTNGNPTKTFPNTTAGMRELIGTLAVAEHHCVMEATSNYGCCCTCYIRTVLPSVLPPPPQKKQIKHFSRMMMPVTKTDEKDAYMIAMYGEKMNPPIYKMPSQATIRILTTEGFTYFDNAKQLSRFIGICPTYQQSRTSVNIREHINRNDDERLRSLLYIAFWTALRYNSRECYIRLKANEKPFKVALIAVTNKLVRPVLTITTINSIYRWICPG

SEQ ID NO: 367559 - protein, 358 aa, unidentified
MTDETREVIGGVDTHRDTHVAAALSPVGQVLGTRSFSATAAGYRELAGWLVSFGAVGHVGVEGTGSYGKGLARSLHEAGVTVIEVNRPNRQKRRRHGKSDTADAIAAGRAVLSGEADARPKSGTGPAEGVRVLRMARDSATKARTQALNEIHALVVTAPAALHDELAELSISKLATYIEALTPEADGYTVIALQSLVARCRALSAELKALAADLHAAVAAAAPPKLLTEIGVGDYVAASIVMAMGDNPERLMRGDGCLAKLAGTSPKDASSGLQERHRLNRDGNRDLNSAIYRITIVRLRYDQATKDYLARRMSDGKTKKEAIRCIKRYITRDIWKIYRDHLTEHETMLSARADRIAA

SEQ ID NO: 367560 - protein, 357 aa, unidentified
MSIKRILVNTIDTDLEYEVIGIDLAKNCVSAILLTTDGEIFGIDRLDYQELEKSAQELSPTIFAMEPCTEMNYMVQKLEDWGHHCIVISGKNVKDYVESHFSNQKTDLNDAQALAFLTKDTQLRTVKAKDPEQLKYASLTTLREQYVKQYRQTMVSLKGICQVWGLSISKGISGKARLKDMIENHAAFPAELRTALVGMVAHAQAVQKDLKSVTKILEELAKKDKACQLIQTVPGLGTICSCRLRATVGDIQRFKHPKDFPAYYGLVPRSMATGHNEKKGKITHRGDKTMRSLMVQGAGIVINQATKGNLHSKQLTKWILKKQKEKIPWGKLVCAVAAKLLRIVRAILISGKPYNPK

SEQ ID NO: 367561 - protein, 359 aa, unidentified
MAVIEGRERHIVGGVDTHKDLHVAAVVDEQNRILGTRSFATTRQGYRQMLAWMRTFGELQRIGIESAGSYGAGLLRFMQQAKVTVLEVTTPDKQDRRRRGKNDDLDAQNAAYAALAGQRTVTPRSRDGMIESLRILMACRKTAVSARRVALQMIHNTIVCAPDGLRDQLHSLTRMQLIRTLASWRPDLTAYRDLESAYRIGLKSLARRYLELHDEIADLNAMIAAIVDELAPNLVARNSIGHIGAAQLLLTAGDNPERLRSEASFAALCGVSPVPASSGKTIRHRLNRGGDRAANSALHIIAIGRLRTDQRTKDYVARRVAEGHSKLDAIRALKRYLAREVFTLITQRRREINATRIAA

SEQ ID NO: 367562 - protein, 369 aa, unidentified
MPHVTSIGLDVHARSVAAAAFNPFTGEVVHRDFGTDAAEIAEWALGFEEPRACYESGPTGFHMARELRALGLDCAVAAVSKMQRPAADARRKNDRRDAEFIARMLATHNIVEVPLPDAAVEAARDLDRALDDATAEYRRARQRLNMFLIRLGHVWDERNADGARKGSWTRAHWRWISGIRLEGPQRDVLEYYVTAARCAESDRRQLEKKVLALARTDRWRPAVEALSCIKGIATLTAFRLAAEAGSFTRFRTAPAFASWCGLVPSERSSGETERRGGITKTGNRLARTALVESAWHYLTCTPRPKAPAPGADVPAAIRARADDCTARLCRRREALAAAGKSSCKANAAVARELACWVWEIGRRAEGTLG

SEQ ID NO: 367563 - protein, 338 aa, unidentified
MKFYAGIDLHSNNNYVGIMDDQAKRIFDKRLPNDLALVLKTLERFKNELYGVVVESTFNWYWLVDGLQKNGYKVHLANPAAIKQYEGKKFTDDKWDSFWLADMLRLDILPEGHIYPIEGRPVRDLVRRRLLFVKHRTAHILSLKGMISRYVGKNISKNKIYQLEKSDIEELFDTFHLRYIAQKHVEAIHFLNNTAKEIEKEVLSQVKLKPEFKNLLTIPGIGNILGITIMLEVGDIRRFKKVGNYSSYCRCVKSERLSNDKKKGKGNTKNGNKYLAWAYVEASQFSRRFSPLAQRFYQRKMSKSNRILATKALCNKLARASFYIMRDQVPFNPKKLFI

SEQ ID NO: 367564 - protein, 346 aa, unidentified
MTEAYDGRQVAGMDLHRRRSVLVRMTEDGRKLGTTRITNSPAALRKAIAEAGEAPRVVLEAAYGWYWAGDVLEQAGAEVHLAHPLGVKAFSYRRVKNDQRDAADLADLLRMGRLPEAWIAPREVRELTRYRHKLVKLRTSCKDQVHGVLAKLGVPVTHSDIFGVHGQAWLDELKLPQPYAGKVASLRMLASELSREIGLLELVTADLLDRHDGYRAIQALPGIGPVLAAVIVAEIGDITRFRRPEQLCCWAGLTPRHYESDTKVIRGHVSKQGSRLLRWAVIEAIQRQPAGSRPRAVRDQIIARRGKEAKNIAKAAAARELLTLIFYGLRDGRVRHLAAPPPQLAA

SEQ ID NO: 367565 - protein, 391 aa, unidentified
MVCVGIDVAKDKHDCCILDSDGMVRADCFTIPNNMDGFKQLLQTIRNCTKKSDKIKVGLEATGHYSYNILGFLLDNDLAVYVMNPLHTNLYRKSLSLRKTKTDRVDARTIATMLLSDVDLKSYTDTAYHNEELKSLTRYRFDKVQERAKLKQSVSRLVTILFPELEQLVSSIHGTSIYALLSEYPGAKQISEAHLTRLANILVTTSRGHYRKDRATHIRDAARTSIGSVMPAKSLELKHTIKLIQELTSEINEIEDAIRKIMDELKPPILSIPGMGFYSAAMILAEVGDFSNFNSPDKVLAYAGCSPSTYQSGKLTNCYAHMEKRGSRYLRYALYTATKYVCYWNPVFTEYLTKKQAEGKHYNVALSHATKKLVRLIYALQKSGKAYLAIT

SEQ ID NO: 367566 - protein, 340 aa, unidentified
MEKAAVIGLDLAKSVFQVHGVDDEGEVVLRRRLGRAKLLPLFAGLPPCRIGMENCASANYWARELMALGHEVRLMPPQYVKPYVKRSKNDASDAEAICEAVTRPTMRFVGAKTLEQQSVLVLHRTRLMLTRQRTRIGNAIRAHMAEFGIIAPVGRQGLDRLMATIDDEGDDRIPPMARACLAMLANQYQHLVANLLDTERAIRADSRATELGRRLQEIPGVGPLVASALIATVPDPHLFKTGRGLSAWLGLVPRQNSSGGKERLGGITKAGDTYLRTMLFVGAMAVIRHAERYGTRKAWLVKLLERRTPRIAAIALANRIGRIAWALMTSGERYREPAVA

SEQ ID NO: 367567 - protein, 377 aa, unidentified
MKIAIGIDVHMEKCAACAVYAGIDKPTQKNLEYLEKFNTDFRRFPSDATGMIGLMNRLQGQDAYILIENSTKAHDVYWMLTNLGLRVTVAHAADLFNITKSKTKTDDNDAAELAGYMRRKLMGEIEFAVSHIPSREVLVQRELCRFDLNDRSELSALKRQIRSHLLIRGMKLSCNYSDITSVQALMELKATKDHILMMDAAKAESIKARKSQTEKMIRYRMEGNRMFDIVWSIPGFGVLSAAYLTCMTDDMTRFLDGRALSASTGLTPKLNESADRPKNCGISRRGDPELRRLLCQATFVHITHTDSFISEKYKRLRAKGKHHNEALVACANSMARMIWSMVTRDRKYSADPTMMAMTRYLADSDGIEDEMEAAQKE

SEQ ID NO: 367568 - protein, 353 aa, unidentified
MNNQLSQSEVILGVDTHLDTHVGAIVSSCGKLLGTLAVATDTNGYLKLLSWARSFGDLIRAGVEGTGTYGAGLACVLRDHGIDVLEVNRPDRSKRRLRGKSDPTDAENAARAVLSGDATAISKTHSGAAEAMRQISVVRRSAVKAKTQAMNQLRALLVSAPQDIRERLWKTKPGDCAKACARLRSLGDTLLLNTLTISLRALAKRWLALADELRELDAVLEDLTHQHASRLRAKFGIGPQTAAILISVAGDNPERLRSEAALAALCGVSPLEASSGKTVRHRLNRGGDRCANNALWTITMVRMRADPRTQAYVERRTQEGLSAKEIQRCLKRYIVRELYPLIVADLACSAGLP

SEQ ID NO: 367569 - protein, 385 aa, unidentified
MANQNDLSRSLVAFEQDNTIIAVIEMSLNSWLVAGIVPGIERRPLKKLSCDEQMLLQLLYRWRDEAVKAERKITRMVVAFEAGRDGFWLARWLRSRGIEAYVIHPTSVAVSREHRRAKTDRLDTELLIRAFIGWLRGEPDHCSMAAIPNLQEEDAKRPTRERENLVGERTRIVNRMKACLIRFGIRNFNPILRRATERLNALCTPEGVSLPPNTLAELRRDMARLRFVMDQINEIEAARLRRLEQAPAEEPHAKVRLLARVIGVGLETADMLVHEVLSRKLRDRRAVARYAGLTGAPDESGSKRREKGLAKAGNARVRRGMVQLAWRFLLFQKNSALSQWYRTRTESAGKKRKTMIVALARKLLIALWRLVTTGEVPAGVVLRAV

SEQ ID NO: 367570 - protein, 343 aa, unidentified
MQIRSVGIDLGKTTFHLVALGDNGKVLLKKKFTQRQLIIFTANLQATLIGLEACAGAHFLGRALREQGHDVKLIPAQFVRPFVKSNKNDFLDAEAIAEAVDRQNMRFVPIKTDDQLDLQALHRVRDRLITRRTSVINQLRAFLPERGLVFAKSPAKLRERMPEILENAEEDLTPRMRNLLALLWNEWKGLEQQVVDLNHEVELIASSDAACLRLRQIPGIGPLVATAIVASIGNGAAFHKGREFAAWMGLVPKQYSTGGKAKLYGISKRGNRYLRKILIHGARAMVLRCKRDRVPMGAWMTALEARAPRNVLIVAAANKLARIAWAVLSSGQDYRAVQEPVAA

SEQ ID NO: 367571 - protein, 355 aa, unidentified
MKIMRIGIDLAKHVFQIHGVDAAEKVVCQRQLRRHQMAGFFHKIEPCLIGLEACASAHYWARLLQNMGHTVKLIAPQFVKPYVKTNKNDANDAAAICEALSRAHMRFVPVKTVEQQDLQALHRIRTELVHQRTAKVNQTRGLLAEYGVIVPPSVQQLRKALPELLEDSCNSLTVRFRQLLAGLQQDLRYLDERISQLDYAIQREATENPAARKLQQLHGIGPITATVLVAAIGDASVFKKGRDLAAWLGLVPRQHSSGGKERLLGISKRGDSYLRMLLIHGARAVIKTASDKKDRLSQWIQLLCQRRNKNIAAVALANKTARLVWALLVRDNNYDPEYRVHTQPPTDLVGSDMSA

SEQ ID NO: 367572 - protein, 466 aa, unidentified
MKHNRRRSTGKPRVSPTVLDRINPNVAGIDCGAAEHYVAVPPDRDPTPVQSFTTFTTDLLRLADWLTACGVRSVAMEATGVYWIPVYEILEARGFEVLLVNARHLKNVPGRKSDVSDCEWIRELHTVGLLRGSFRPADSIVALRGYLRHRQTLIESAGTYIQRMQKALVQMNLQLPLVVSDITGLTGLRILRDIVAGHRDPAELAAHRDPRCHASKAEIIAALTGNYRPEHLFALQQNLALFDACQAQLALCDRAIDTHVQTLTAHVPSPASPLPAPRVTKKPRDNEPRFEIRAPLYQLTGGVDLTQIDGIAPYTALKLISEIGTDMSRWPTEKYFTSWLTLAPKNKISGGRLLSSRTQPSANRAAAILRMTAMSLGRTQTALGAFYRRLAARIGKPQAITATARKVAILIYRALKGELTYRDPGADAYDVQQRTRVLRRLRQRAATLGFSLVNRETGEILEPAIS

SEQ ID NO: 367573 - protein, 407 aa, unidentified
MKPLFVGIDVSSKSNVVYFMNSDGTKHSSFSVQNNLNGATILSQKVVSAMSDFDNVIFGLEATSVYGDNLVCFLKEDYNLSKFNKKIHVLNPKQVKKFKDAYADLPKNDFVDAFIIADNLRFGRIAKEVYMDDYRYKALQNLTRARFFAVQNLTKEKQRFLNYLFIKFSSFKEDKIFSNTFGATSLAVIEEFLTVDEIANMSLEELVDFINVKGKNRFPDSEATAKALKAAARSSYRLPKTVNDSVNQVLAISISSIKALETQIKAFDKAISEQIKVIPNTLTSISGIGPVFSAGIIAEIGDINRFDNQAALAKYSGLAWSQYQSGNFEAQHTRLIKSGNRYLKYYLVEAAGALARCDEEYRRYYNLKYKEVNKYQHKRALALTARKLVRLVFALLKTNRLYTASGS

SEQ ID NO: 367574 - protein, 407 aa, unidentified
MDVLHPKCAGLDVHQQTVVACARTGAGKAVTYDVRTFGTTTAELLALSDWLTAHGCTHVAMESSGVYWKPVWHVLEGHFELVLANARHIRNIPGRKSDVNDAPWIADLLAHGLIRGSFVPPEPIQELRDLTRTRQQLVREIAQHTLRIQKTLENANIKLTAVLADVLGSSGRAILRALARGERDPERLAELASDRVKASRAELVAALHGRVPPHHRFMLTLHLTQIEALEAAVREVEARLGDALAPFRAALDRLITMPGVSETVARVIVAEIGFDMTRFPSAGHLVSWAGLCPRLHESAGKRLSNRTRSSNPWLKTTLVQAAWAAARKKDSYCRAQFLRIKSRRGPKKAVLAVAASMLTAAYYMLKHGVDYRDLGADHFDRRDKAKLAKRLIARLHDLGLTVEVRAA

SEQ ID NO: 367575 - protein, 564 aa, unidentified
MIGTAIPKARPLEGRSRQQRRHGYAARFDRQPRGRPGDSNQAPSPAHTLGPTDHIGEITLDGHSNRPEEDHRHAPPALSADHRPGSFLPADPAVQCSRQLSRLAGHRIGQYAHLQQCWRLVVLALILGREDGFRASGPASVVLWWSGRRVGAWVPAWPANRLTPFGLSCESICRPGPRFCGTHRQHRPDLPVLCKRPGFTGPAASGCVPSLNHRKGTAMTIVEDERAITGGVDTHADMHVAAALDPIGGLLGVQEFPATTAGYAGLLGWLGGFGTVALVGIEGTGSYGAGLARHMAAAGVQVVEVDRSDRQDRRRQGKSDPLDAVSAARAAQSGRAAGAPKGRDGAVEAIRALMVARRSARNERTQAINQARSLIVTGPDDLRARFARHTPAQLVTGLAALRPRPGDVPGYATRIALRELGRRAQFLDAQIVYLDELIVPLVTARAPSLLALYGVGADTAALLLIAAGDHPERLRSEAAWAHLCAVAPIPASSGKVRRHRLNPGGNREANHALWRIVITRMSAHPATRAYVDRRSKEGLSKKEIIRCLKRYAAREVYRHLRAGG

SEQ ID NO: 367576 - protein, 428 aa, unidentified
MNEIESIRLEQFRQLKKDIRGSKNYLIVGIDVAKDKHNAFFGTATGKTLLKRLVFENTIEGFGRLRARTEAIKVQHCLNKVVYGMEPTANYHKPLAEYLIKCGHHVVLVSGTAVNKNRELLDGRWDKHDTKDSANVADLISQAKCLYYDYPSTRLRDLRNLLSLKRRLKKQEHSVKVRIRNHLLAQYFPELDRYFGKRCSESLAIVRWCVNPSMIAGMEYDEFVQLVAPRLKSIGQEKRVQTIWKMAIDSIGCEVGHEIDFEAKLMVEELQRLRDTIQAVDEHVEDICIVFPEYSYLLTIPGFGPDVSSKVLGAIGDPFRFRNGKQVLKLTGYDLSAIRSGKTSDTSVPVISKRGKAYVRYALYQAAFVASTNNPHFIVYYTNKLRGREKERGIKTKMRVKLAAKMLIIAWTLMKKKEPFNPEYLKTD

SEQ ID NO: 367577 - protein, 526 aa, unidentified
MASSNKHSKLRACDEGRYTSDGLKNVTLDDGTRVITSPSNDIKRPVCGAVDVHKSVLMAAACVTDGESLSAVFYVRQFTASNSDIRLMAEWFVSYGVQDVCMESTGKYWIPVYDILEHNGLKPILTHPKYVKQAKGKKTDFRDAIHIANLFRMDLVVASFIPPADIRDLRELCRYRLKLTYIRTSEKNRFQNSMTISKVRLDSVFTDPFGKSASDIMSYLIHTDPDEVSDEKILSFVRHGVKASTEEILDSIHGYEFIGAQRDKLEVIQTHMDDLNKCIDMIDEKLSYYRLKYSKVIRHLVTMIGISEESALYILGEIGADMSVWRNSDSLASWAGLSPANNSSAGKKKTTKIGKGGHYLKPLMVQCALAAIKSTKKHPYFYYKYLTLKKRRGHKKAIIAIARKMLVAIYHMIRDDKDFAPIDYEQVVTRKQSQKELNLTNIIEFLGEHGVDPETIRTVETQCSQASQAGEGAKTDKPKKSPQKKQPKSKTAATPTEQKPAKRRGRPPKSPQTKSQSSTQPAPATA

SEQ ID NO: 367578 - protein, 388 aa, unidentified
MYNTQHPFYCGIDLHARAMYVCILNQAGETLLHRNMKTTPEAFLKAIAPYRPDIVVAVECLFTWYWLADLCADEEIPFVLGHALSMKAIHGGKAKNDKIDSQKIAVLLRGGLLPQAYVYPAEMRATRDLLRRRMHLAHKRGELLAPVQNTNSQYNLPALGKNIAYKANRDGVAERFADPAVQKSIEVALSLVSYYDELLRDVALTIVKTAKQHDANTLYRLQTVPGIGKILSLVLLYEIHHIDRFPRVQEFASYCRLVKCAKESNGKRSGTSGAKIGNAHLTWAFSEAAVLFLRENPAGQKFLARLEKKHDKGKALTILAHKLARAVYYMFKRKVAFDMKRFLNDEGRGVGERDVSLDNHGMNLILATLSNASMTASLNAYERLGHYP

SEQ ID NO: 367579 - protein, 524 aa, unidentified
MVGGVRRNRRGSDESQKATSPAVSKDLHTETTASGEARVGGAAASKTPRRRGGGLQRRQPGASAAGAKAEPRLVRARSSSTGAYRGRALRPPTVPGLSRSGLGGSGAQASEPPATRSPRSNELVREGKRREVRRQSENATNEKGRNQRGSPGRKMGHRQLREGTTHLAEERMRYVGIDLHKRSLTVCVIDKRTGETFDRRFQCSEEAALRKFFGELGPFEAVIEASGTYEWLWELLEPLAKRLVLAHPKKLRIIAESMKKTDRHDAYLLAWLLSQDAIPEAHRPTPHQREYQLLVKHRHFLVQSRTKCRNQLRSLLAARNLDYTGLFSAKGKARLASLALKPAERFRVEQLLKLHETLEEQVKTAAKELSKFRKEAPEAEKKQHAIVTSVPGVGNVTADVVLSTLGDVSRFGSQQKVTAYSGLVPGFRESASKRRELGITKQGPRLLRWVLVEAAWQATRYSGHWREVFERIAERRGRKKAIVAVARKLLAVIYSLLKKGESYVEKLVIPKRRLRVSAAGIMKT

SEQ ID NO: 367580 - protein, 418 aa, unidentified
MEVWFGRLSCLLSNTFQGGAALSALYIGIDVSKDFSTAQAIDGNGNKCFYLELAMTADGFSQLLKAITSHGKDIAQVTVAMESTGCYHINLFSFLTYKGIRCVIINPLLTANFARLSLRKTKTDKKDALTIAQFLLVHKDSLLKTDLSPDLQDLKDLAREHESLTNLIAGMKNDIRRMLQITFPELESICNIFSETILDLLRQFPSARLIKIAKPNTIAKALLHEDKRKKTSVSAEDIIKAAKASVASHGAAKEIILPEKISTLQHLIEKKGRMKKVLVEACEAMMVEDIEIITSIGGISNITASRLLAEIGDYRAFSTYKHLIAFAGLDPSVHQSGKFEGISRISKRGNRHLRYIIYLMTTCVVRGNNIFRSYYDKKRAEGQPFKKAIMATAHKLIRVLFAMLSKRTTYKSKEVNAI

SEQ ID NO: 367581 - protein, 360 aa, unidentified
MTGTMTCAAMDVHARSTYAASLDVMSGELCRQRFYTGAVEPVVGWLAGLPGPVRACYEAGPTGFGLYRAARAAGIDCQVIAPSKTPRPSGDHNKSDRRDTDLLLRQLMAGALTPVAVPSATFEAARDLARAREQVRMDLMRCRHRLSKLLLRHGRVWDRTAWTQVHRQWLSAQTFEHQNTELAFIDNLAACDGLTARRQALDERLSRVATDPEFWPVVRRLRAFRGLDTLSALIIVLEVADFTRFPRAVQLGSWLGLVPSREQSGETDRHGSITKTGSKYARRILVEAAWHYARSPRIGRTLYERQQGLPDHIVQIALRAQHRLHRIHRRMRERKKPGNVIVVACARELSCFLWVAATAA

SEQ ID NO: 367582 - protein, 391 aa, unidentified
MVCVGIDVAKDKHDCCILDSEGTTLVDCFTIPNNMDGFKSLLQTIQDCSQKSDKIKVGLEATGHYSYNILGFLLDNDLPVYVMNPLHTNLYRKSLSLRKTKTDRVDAKTIATMLLSDVDLKSYTDTAYHNEELKSLTRYRFDKVQERAKLKQSVSRLVTILFPELEQLVSSIHGTSIYALLSEYPGAKQISEVHLTRLANILVKTSRGHYRKDKATHIRDAARTSIGSVMPAKSLELKHTIRLIQELTSEINEIEDAIRKIMDELKPPILSIPGMGFHSAAMILAEVGDFSNFNSPDKVLAYAGCSPSTYQSGKLTNCYAHMEKRGSRYLRYALYTATKYVCYWNPVFTEYLTKKQAEGKHYNVALSHATKKLVRLIYALQKSGKAYLAVT

SEQ ID NO: 367583 - protein, 346 aa, unidentified
MKKAKSILKISYGIDISSDDFSASYGVFYSDLEREVTNIKKFKNTKRGFDKFLGFTKKHQSKINPDGSIQTWYVMESSGVYYENLAYYLNDKGLNVHVALANKVKSFIKTLENKSKNDELDSIAIAQYGLEKQLLKWMPPSPEMKELKELSRELSALKDMRTVAKNQSHAKNKAHEINNSSIKRIKELIRYLNKQIKKVEKELVTAVKENPELKTFIEDVTILKGVGFQTVVLVIAETNGFEGILNRRQIASYVGLDIRENQSGKKAGKSSISKHGNKYIRKGLYMPALSCKKHDKKMKDLYERILERHGGKNKKIAVVAVMRKILHIIYALWKNRTKYDPNYGIA

SEQ ID NO: 367584 - protein, 329 aa, unidentified
MAKRSMFVGMDVHKASIDVSLAEEGRDGEVRHDGVIAGDLEAVAKVVRALRAPTRRLRFVYEAGPCGFGIHRYLTAPGEDCVVVNPSSMPKRSGDRMKTDRRDGDAVARLPRAGELTAISIPTPDDEALRDLVRGREDAVGLSTQANHRLKAFLLRQGRRYPGRAGWTRLYRRWLADLSVPLAPQHIALQEYRDTIDETDRRVERLTDPLRPRTPAWRWAPVVDALQALRGVSFVTAVGLVTEIGDIRRFAHPRELMAYLGLVPSEYSSGPSVRRGGITKAGNPHARRLLAEAAWAYQGVPRIGRQMLYRQEALCRRSSVTSRGRRSYA

SEQ ID NO: 367585 - protein, 339 aa, unidentified
MELYAGLDLHSRNTYIGIMDKSFNRVFKKRVPNHLEHILQTLAPFRDQIKGFVVESTFNWYWLVDGLMDAGYSSVHLANPSAIKQYEGLKHIDDKHDAFFLAQLLILGILPQGYIYPKKDRPVRDLARKRMFLVQHKTAHVLSLQSLIQRCCAMKIRTNDMRHLTVKELEAWLEEEYLVLSAQANLDSINFLKQRIQGLEKAIRKKVRLKKAFHYLKTVPGIGDILALTIMLEVGDINRFPKVGNFTSYCRCVPSRRLSDGKSKGHGNRKNGNRYLSWAFTEAAHLGRRYNERFKRYYNRKVAQANTSLATKALGNKLARICYYIMRDQVPFQEELFCH

SEQ ID NO: 367586 - protein, 331 aa, unidentified
MLYAAIDIHKLVFQAAVLESETGELSEQRFAAERGALDDWAMRWQGQLAAVAVEATTGWRWVVARLQAHGFEVRLVDPGQASALQGRRRRPKTDRLDARWLALLLSRQLAPEAWIPPAEIQHLRDQTRLRKALSDERRRWAQRLHALLLQEGWPCARGRLLTREGQRWLQALKLAPEARAYVESVLAVMAALEQQLQTLEGELRRFARSDRRCQALQTIYGVGPIIASHLLAEIGDVGRFRAPRQLVRAAGLDPVVEESGERRRRGKLSKQGSPHLRWALVEAAQHAHRTTSPDRALQRAVAARAGGGRAKLTVARKIARRAYHVLQAETA

SEQ ID NO: 367587 - protein, 387 aa, unidentified
MTVSKVNNLPAAAHGETVRCLFAIELSKQSWVIGFTTPLSAKISRRILSGGDWKGLLELIEEVRARVSREIGRPVEVMSCYEAGYDGFWLHRQLEAHGVRNYVIDPASLQVDRRMRRAKTDRIDTERLLRSLMAYLRGDPKVWSVVQVPSVAAEDARRLHRERDRLISERVQHVNRIKGLCALQGIYDYHPLRPQAMAHLEQLRTAQGIALPPRLKSEIKRELHRLKLVVEMIATLEAERDAIVENEASTHVNAEKIQALHKLKAIGPEFATVLVGEIFHRDFNNRRQLASYVGFAPSPFQSGNVAHDQGISKAGNRKGRTTGIELAWLWLRYQPDSDLSAWFRARVGTVKGRIRRIAIVALARKLLVALWRYLETGLVPRGAVFKR

SEQ ID NO: 367588 - protein, 342 aa, unidentified
MEEISTVGLDLAKHVFQAHGADSSGAVLVRKRLRRDQVLTFFAALPPCTVAMEACAGGHYWGREIAKLGHTVKLIAPAYVKPFVKRQKNDASDAEAICEAAQRPTMRFVAVKSEEAQASAMVFRTRDLLVRQRTQAINALRGHLAEFGAVVAQGPVHVPKLIAIVEDPASELPETARVILALLVDQLRALDERVAQLDRDIARRAKEDTIARRLMTIPGVGPVTATALAALAPPVETFRRGRDFAAWLGLTPLQRSTGGKQKLGATSKMGERTLRRLLVIGASAVVRHAARRGSPSGSWLARMLQRKPRMLVTVALANKMARIIWALLSKGGVYKAPVVLAA

SEQ ID NO: 367589 - protein, 320 aa, unidentified
MSATLVVVGIDVAKAQVDVVVLGAMLETKRFDNEVEGHSALAAALAPLGVALVVMEATGGYEAALACALQAAGLAVAVVNPKQARDFAKSLGKLAKTDRIDARMLAEFAAVLVRRDDLAHFIRPLANSEQQALAALVTRRRQLLTMLLGERQRLQLAMALVRPSIEAMIAAIRAQLDDVEAQMVDHVREHFAELDQLLQSARGIGPVASATIIAELPELGRLNRREIAALVGVAPMANDSGTSRGRRHVRGGRFEIRRVLYMATLSAARHNPSINAFYVNLLAAGKFPKVALVACMRKLLTILTAMVRHNKPWDPSLHNA

SEQ ID NO: 367590 - protein, 364 aa, unidentified
MTVLLSILYIRVPPPMRNPTARPSMFRKGVGEENKMLGIDVSKSKLASSLVDPKSLLAISSSVITNDATGVDSLLSSIDPKIAWVVEPTGRYSALVVKQATEAGRRVLLAPPRAAKLFLKSNNPRAKTDKIDGRGLALFGLSRPLKPFPQKSENVEHLDQLLSARKGLSRARSSLTQQKNELPYAADALTKAINAVHEQIGQLDKAIHKQVTIHPEFSLVNTLMQIPGVGELTAAAVASRLVSKAFPTPDAFVAYVGLDVGVRNSGKSIGRVKLSKQGDAELRRLLYISALANLRCKKSVFKDRYNQEIARGRKPTAALNIIARKIAHICWALQKHPGPFDASRVYRGQQSVSGNQNLDNQQED

SEQ ID NO: 367591 - protein, 436 aa, unidentified
MTLINFVAANQKYYAFNLLSVFIMVFWSVQYLLQHLLVQTQVSHQLLQPLILILQLPQTPQFRHARPGKFFLPVNGMDYFLPLRLTVRNVLTRRITMNIVFLGIDLAKNVFQLCGLNQAGKPVYTKRTGRKELLQTLANIPACLIGIEASTGAFYWQREFEKLGHKVKVISPQYVRPFVRGQKNDGNDAQAIAVALMQPTMQFVPPKSPEQQDIQALHRARQRIVNHRTATVCQIRGLLLDRGIPIGSAVSRARRAIPLILEDAENGLSSRMRRTIAELYDLFNDLGRRIHFFDKEIETVFRQSEACPRIAKVKGIGPKMATAVVAAIGKGTEFKNGRHFAAWLGLVPRQHSSGDRQVLMNMTKKGDKHLRTLFIHGARAVVRVATNNNDGHMNQWVNQLKERRGFNKTTVAVANKNARIIWSMLRNDTGYQVVCN

SEQ ID NO: 367592 - protein, 343 aa, unidentified
MEYYVGLDVSLKQTSICVVDQAGLVVREGVVDSDPEAISVYVTSRAPNAVRIGLETGPTSTWLWTELKRLGLPVICIDARHAKAVLKMQINKSDRNDAIGIARIMQTGWFKEVHVKDIDSHSVRALLASRALLVKIKRDLENHVRGLLKNLGLVIGRAKFNVFAVRAEELIERRPELVAAIRPLLEARSAVEQQVSELDRKVMKLARHDTQVRRFMTAPGVGPITALAFKATIDDPTRFARSRSVGAYVGLTSRRHASGEVDWTGRISKCGDAMLRSYLFEAAGVLLTRVPKWSAVKAWGVRLAKRNGLRKAKVAVARKLAVILHRMWIDGTEFNWSKKEIAA

SEQ ID NO: 367593 - protein, 364 aa, unidentified
MHYVNNTELSSLEGTRRQFNGGRCAIKLGIDVHQDFYVVVAQVGGSNPKPPQRFQKEAFLHWAARLKRKSGAEVHAVYEACGFGFALQRQLSALSIQCYVVCPQKLDEHNRRVKTDGLDAKALCPKLDRLVQGNRAALARVRVPSEAEEQLRAIHRQREQLVKARKQLEAQGRSLMVNHGVEPVQNWWKPRTFAALQVSDWMKQLLQNSQPILIGLQEKIAALTGQLQRAASPDQPRGLGKMTSVIIDREIGDWHRFRNRRQIASYTGLCPGEYSSGNTRLQSCVTKHGNPRLRAALVELAWRLVRFQPNYHPVRKWRAVLAKGALATGAARKKAIVAVARQLAVDLWRVRTGRLSAETLGLIN

SEQ ID NO: 367594 - protein, 412 aa, unidentified
MEVLHPRCAGLDVHKETVVACVRIVSGGEVSRAVRTFETTTARLIELAEWLEASGCTQAAMEATGVYWKPVWQVLAGGGFGLVLANASHVKNVPGRKTDVNDATWLAELLAHGLIRASFVPGPEIQELRGLLRTRKQLVREKASHVQRLQKTLEEANIKLESVLSDVMGRSGRAMIQALIAGETDPAKLAALAHPKVRAPQARLREALRGRVKRHHRFLLDLHLQQIDALDAGIAAIDREVDAGLASFRDAVKQLSTIPGVSELSAQVIVSEIGIDMSRFATAAHLRSWAGLCPRNDESAGKRRSTRLRTGAPWLKATLVQCGWAAARTKATYLNAQFVRLRARRGPKKAVCAVAASILTAAYHMLKDGTFYEDLGPAHFDRRRPVAQARRLVKRLADLGFSVELKPAAAVS

SEQ ID NO: 367595 - protein, 409 aa, unidentified
MNAVGIDVSKGKSMVAIMHPFGEVVAAPYEVMHTDIELRELANSLRSLNGETKVIMEYTGCYFQPIAYALHEAGLFVSTVHAKLIHDYGNNTIRKVKTDKADAVKIAQYGIANWPDLPAYMPEEDTRRMLKTFSRQYEKYVKLKTMLKNNFIALTDQTFPGVNELFTSPPRKSDGHEKWMDFAFKFWHCECVCALTPKTFANRYRMWCKKEGYIFNQAKADDIYASACGHCSVMPKNKTTQLLITQAIKQLNAISENIAVIACEMKRLAEMLPEYSVVSGFFGVGDITGPMLMAEIGDVYRFRKKESLVCFAGLEAPPYQSGKFESKDRSISKKGSPHLRKVLFRVMECYLQCKPANEPIFQFLDRKRAEGKHYYCYMTAGCAKFLRIYYARVKAYLDELFFDPEGPES

SEQ ID NO: 367596 - protein, 388 aa, unidentified
MRPISQTTPQKPSHRRPDDTTLYASLELSQATWLVTALSPGSEKMSKYSTLGGDGAALLGLLRRLQARAERLAGGPVDTVVIQEAGLDGFWVHRLLSANGIQSHVVDPASIAVPRRRRRAKTDAIDGETLLRTLLAWQRGEPRVCAMVVPPTPEQEDRRRTSRERAVLLQERVRHVNRIKGLLASQGITDYEPLHKDRRARLATLKTGDGQPLPMRLKAELLREIELIELLIRQIAEVEAERDTAVELDVEGNQSPVALLARLKAIGPQIAAVLYFEGLYRSFANRREVAAYAGLVPTPGRSGTIDREQGISKAGNRRLRHIMIELAWLWVRHQPTSALSCWFRARVGTERGRIRRIAIVALARKLLIALWRFVTHGEVPEGAVFKAA

SEQ ID NO: 367597 - protein, 388 aa, unidentified
MIYVGIDIAKLNHFASAISSDGEIIIEPFKFTNDNDGFQLLISKLESFDKNSLIIGLESTAHYGDNLVRYLVAGNYKVCVLNPIKTSTMRKNNVRKTKTDKVDTYIICKTLMMQDSLRFVTFYDLDLMDLKALGRFRQKTIKQRTRLKIQLTSYVDEVFPELQYFFKSGLHQKSVYALLKEAPTPEAIASMHMTHLTHLLKVNSHGHFDKEMAQQLRVLAQKSVGASDSALSIQITHTIAQIELLDSQLERVEAEMTDIMKFNDSVIMTIPGIGYINGGMILGEIGDIHRFSSSNKLLAYAGLDPSVYQSGNFQAKKTRMSKRGSKVLRYALINAAHNVVKNNATFKAYYDAKMAEGRTHYNALGHCAGKLVRVIWKMLTDEVEFNLE

SEQ ID NO: 367598 - protein, 342 aa, unidentified
MKQRYYVGLDVSRDVTAICVRCANGVVERRCETVTEPEAICAALVDLRDGLERVVLETGRMANWLHGELTRRSLPAICVDARQAHAVLSQMHNKTDANDATMLSDLARTGFYRKVEVKSRDGQERRALLAARDAAIGARRNAENTIRGLLASFGLRVPGRPRTYEARIRAVLEGQDALAPIILPLLAIRTEALRQAAALTKELVRQVKSSDACRRLMTVPGVGTVTAATFVATIDAPGRFSKSRSVGAYAGLTSRRHQSGAVDYGGRISKRGDRLLRTMLYEAANSLLCRVKPGRGQALKDWAMAVKRRTSHKKAVVALARKLAVMMHAIWVSGGVFEEREA

SEQ ID NO: 367599 - protein, 329 aa, unidentified
MSPNTIKIMPTAPVTVYAGVDVAKASLQLHLQGRQAEFPNQPAGLVQLCRQLQAIPHVHVVCEATGGYERSLVQAMHQAQIPVSVTNPAQVRAAAQAQGQRAKTDRIDAALLTDYGQRYQPKPTPPTTPSQDQLVALTQWLTQLVQALALAKTQAEHHEAAFVCKQHAKLMAHYQSQIVAVEKQIRALLAQDAVLQQRVECLDQIKGVGPRTAWLVLAHLPELGQVNRQEVAALAGLAPWTRESGTMKGMRCIGGGRPEVRLALYMAALSATRCNPVLQPFYQRLRAKEKPAKVALTAVMRRLLVYMNHRTKELADESATAKTEKGEKT

SEQ ID NO: 367600 - protein, 356 aa, unidentified
MSHEVKYIGMDVHKEAIVIAVLNGSGKLVMETVVETKASSILEFIHGLRGELHVTWEEGTWAAWLYDVLQPQVQHIVVCNPRRNALLKEGSKSDKVDARKLADLLRTGMLRPVYHGENGLRTLRELGRSYQTLSQDLTRVMNRLKALYRGWGIPCAGTQVYAPRYREEWLSKIVQAGVRRRAELLYQQLDGLQALRRNLRPEFVAESRKHKATKLLRQIPCIGPIRAARLIALMQTPHRFRSKRQLWTYSGLGIETHDSAQFRFVRGQLQRSKKPQQLRGLNRNHNHEMKEIFKSTATRASCGIGPFHEFYAALLAKGMKPEMARLTLARKIAAITLTLWKKGERFDAEQLKTQAA

SEQ ID NO: 367601 - protein, 332 aa, unidentified
MYLGIDVHKRYAQVAVVDEAGEIVEEVRVENANLDDLAQRYAGAEAAIEATSNYYHIHDTLSEHLDVTVAHPKELNQIADTDKKTDRVDAKELARMVRLNSVPESYVPTDEVREARALVRGRQTLVENRTKYANKIHGLLSDHGIIEDVKPLTIEGREFLRELSIPSPWDSLLESYIELIETLTEEIQNLEEAIEERAGSLKETQLLMTIPGVSYYTALSIYAELGEISRFDGDKSVVSYVGLNPVIRESGDSRIEGSISKRGSGRVRWLLVQAANTAVHTCNDEYLSRFYERLASRKNSQKAIVACARKMLVLIYHMLDRGEVYDPPDVSA

SEQ ID NO: 367602 - protein, 386 aa, unidentified
MQTLNDLSRAPVALEPASTLIAVIEMSLSSWLVAGVVPGIGRQPLKKLAVDEGALLRLLHRWREEAEKAGCRIERIVVAFEAGRDGFWLARWLKARGIEAHVIHAASVAVSREHRRAKTDRLDTELLKRAFLGWLRGERDHCKVVAIPSLKEEDAKRPNRERESLVCEQSRIVNRMKAALIRLGIRGFNPKLKRAAGRLDSLRTPDGEPIPPNTLAELRRDMERRRFVSNQIRQIEDARLERLEQAPDDEPHAMVRLLARVIGVGIETADMLVHEVLSRNMRDRRAIARYAGLTGSPDESGRKRREKGLARSGNARVRRGMIQLAWRFLTYQKESALAQWYRARTQNANSARKPMIVALARKLLIALWRFVRQGVVPDGVVLRPAQ

SEQ ID NO: 367603 - protein, 317 aa, unidentified
MERTFVGIDVAKDQLDVHVRPSDERFQLGRDDAGLAELVARLQPLGPRLVVLEATGGYEVPVAAALASAGVPVAVVNPRQIRDFARATGQLAKTDALDARLMALFAEAVQPEARPLPTAAAQALGELVARRRQLIEMLGAERNRHHQVRDPRLQRRIATHIGWLTKALAELESDLDDTIRSSPLWRAKDNLLQSVPGIGDVTAYTLLADLPELGQLDRRKIAALVGVAPLNRESGQWRGRRMIAGGRPAVRSVLYMATLTAIRFNPVLVHFYQRLTAAGRPKKVALIAAMRKLLTILNAMLRDLIRARAGPQSDDSR

SEQ ID NO: 367604 - protein, 605 aa, unidentified
MLPHSGSPSQLSTPPADTGGSPNPTRIGVGIDTARYGHYAVFLRADLQPAAADLAFAESGAGYAELRTRLEQIAQRHAAVAWHVRIDAAGQYADNLQHFLHFLAAAAPSDRSTFTLSLGDPQRNKNYRAAIYGSKKSDPTEAAAAARFALTERPAGVPPMSTELRTLRQVAGRLQATVRQRTRLINQFHKLLALVFPELALLTKDVAAGWVLELVHRFPTARRLAAATPDQLQDIPYLAHDRIDTLLTHARTSVASLHDAALQELIRDQVRQLRDVHARQKRLENTLIAVYRRLPQANHLDTIPGIGPVTAAVLTAFILDIDRFETPGKLVAYFGILPIQAASGIDRDGKPRGPKRYVMSKRGNDLVRRYLWMAGLCAVGHNPAVRPLYARVVARHPQHKAIAIGHAMRKLLHLAFAVWKSGKPFDPEHYPWGEASAASDEAAAEDARLRVPKSNPNDMPLSPKQPAAGLTLSAKPAQTEVTAAGNANGSPTPPRREPLVDFDHLKKQLPMTRLLDHLGLTSRLKGAGLQKRCTCPIHRGDARGRTFSVHLGQNVFQCFDQACRHKGDVIDLWAALHGLSLRQAAVDLIATFQLEAAPPTEKRNG

SEQ ID NO: 367605 - protein, 314 aa, unidentified
MEESVFVGIDVSKARLDIVMRPSGSRESIANEEAQIAELVKQLSTLPTALLVVEATGGLERRVVRALAAAELPVIVVNPRQVRDFAKATGRLAKTDKIDAEILAHFGEAVRPALRAVPEPASEDLRSQIARRRQVTEMLTAETNRLGHSAKAVGKRIEAHIRWLKAELDRVDSELDQSIRQSPIWREQEDLLKSVPGIGPVISRTLLAELPELGKLNRKQIAALVGVAPLNWDSGMMRGRRAIWGGRATVRAALYMAALVASRCNPKIREFHRRLRAGGKAPKVALVACMRKLLTILNAMIKHRTRWSIIAETQ

SEQ ID NO: 367606 - protein, 355 aa, unidentified
MSKHSMICAGIDTGKRKLDVALNGRPDRLQVENTAEGHRALWGWLRQHRVKRVGIEASGGYEQEIVRELRRKGFVVVVFQPAQVRAYARFHLQLAKNDKIDAALIADCTAVIKKIHAPPDPRLAPFAQHQTMLEQIREDIAGLKTRLETCRDQRIRSFWKAEIARLKKLEKLELKQLVAAIRQHPDLAERLDLIASVGGIGLQTAVAILIRLPEIGSLTREEVAALVGLAPYDDDSGEHKGTRHIKGGRERLRKALYCAALPAAFRWNPQLIALYGRLIAKGKLHKVALIACARKLLIYANTVVARGTPWVERHAAEAPFSSRGEAHLGLDRLDGKSRARRLVSRTALAAAQRLP

SEQ ID NO: 367607 - protein, 426 aa, unidentified
MEKVNSVMDNRSEEPQFAAFLGIDWADQEHVWCLQACDSEKREMGRVRNRSEEMEAWIGQLCQRFKNRPIAVAIEKCRGTLILLLSRYEQLHLYPIAPQAAANFRKVLHPSGATDDGRDAAALLEMVRQHRNHWQRWSPDTEQTRLIQNLVEERRRLVDQRTQLLNRLTAKLKIYFPQMLEWFDRLDTKLVAALLQRWPTLPQLQKAGTTRLRNFFRKHHCRQVELLERRLQSIRQAVPALEDQAVLQAQVPTVQLLTRLLEILNEGIEDLQRRIEQAVTVHQDFPIFDSFPGAGAVLAPRLLAAFGSQRERYRTASELQNLSGIAPVREQSGRTAWIHFRRSCPKFLRQTFHEWAGHSIAFSSWARAYYQLQRARGKDHHAAVRALAFKWIRIVFRCWQDRVLYDEQRYAASLVKRNSPLSPLSL

SEQ ID NO: 367608 - protein, 409 aa, unidentified
MRYYLGVDWADQTHAVWVVEERGTKVTMHTVPHTAEGLSEWGRELDEWRAQGIELWAAIERPEGRVVDVLLDHGVVVYPVNPKALDRARDRFRQSEAKSDPFDARVLADFLRTDHLHLRALQPSSEAAQELKLLTDDYQRQIRQQTRLVNQLTTTLKAYYPRGLEVAELTTALAREFLQAYPTPAALTALTERQWQRWARAHRLSEARTQELWAVLQRPQLPVPAHVVRAKGRLMQSLVAQLTLVVEVVGAYREAIEDFFARIPAAQWIRTLPIGDHGITAPTLWARLGDAPGRWESFRHLQAQAGTVPVTIRSGKQQVVRFRFACDKSLRYVIDHVAFLSLRWSEWARAYYAEQRARGHSYRQALRALSAKWLKIIFVMWERQVPYDEQYHLAMMTRQQLRQRQKKVA

SEQ ID NO: 367609 - protein, 337 aa, unidentified
MQHVAIDLGGRESQICVRAPDGKIIEEKRYPTRLLDKLMTRWPQSRVIVETSAEAFRVADAAKAAGHEVRVVPATLVKTLGVGARGIKTDQRDARTLSEVSCRIDLPSVHVPSELSRELKTMCGNRESLIECRTRLINNVRGWLRTQLWRIRTGATTSFPARLRESSSSNQRSLPEHVEETLQIIEQLTVQIRSATARLEEIAEKHPVCVRLMSVPGVGPVTAVRFLAALDEASRFRNAHAVQSYVGLTPGEHSSSDHQHRTSITKAGPAPLRRVLIQAAWTALRTRPNDPMVIWATKIAARKHKFIAVVALARKLTGILFALWRDGTSYQSQRAAM

SEQ ID NO: 367610 - protein, 331 aa, unidentified
MNYSHFVGLDVGKKTFDASLMSADEKELSHKSFDNTPTGIQSLLDWIAGYHLSLSKLLFCAENMGSYVTELSVSSVSMGFSLALVCPLTIKKSIGLQRGKNDRIDAKRIANYAVLHYRKLELYKLPDKDLVRLRGWIIIRDNLVKQKVSSIKLLETFSWMAKLADVTESISFLEEQLKSIKERILEVEEDMEQLIAASTSLYTNYLLLRSIKGIGIINAIVLLCVTDNFQRFDNPRKFACYCGVAPFEHTSGISIRGKTQTSSLANKEVKVYLPRAAITAISWDPQMKAYYKRKIAEGKHKASVINAVRAKIIARSFAVIRRQTPFVTLAV

SEQ ID NO: 367611 - protein, 428 aa, unidentified
MDFTQNQRLAQMNDRTLIIGVDVAKHKHVARVVDDRGRDLAKRLVFANTMPGFSELLSWVRDLSEEHDRPDIVIGMEPTGHYWLNLAYHLKARGIHTVVVNPMKVKRFKEMDDDSPTKNDTKDAKVIAQIVRDGRFHEPTLPEDVYAELREGMKVYDIMQEDLSSIKAQMQNALDRYFPEFLQVFKDWTGKAALHLLEKGFLPEDIRQASEEALLAEVKTAAKRAVGIKRIQALKQAAETSVGLTVGLRMAREEFRYLIDQYKRIEERLVALEAQLEELVLHVPGADQMIAIKGVSALTVAGFFAEVGDLANYRDPRQIIKLAGLNLKLNQSDTFKGQTTITKRGRKRLRSLLFQVARPLSCHNEAFRKLHEHYRYRATNPLTGKQSFVALSRKLVKIFYVLGTRKCTFSETRMIRDIPGISGLQEAV

SEQ ID NO: 367612 - protein, 369 aa, unidentified
MEKGTTYVALDDSKRKIVAGILRPGDTQPELREIANDPRHIRRLFERLKREGPVAACYEAGVSGYDLHRQLRALGVAGDVIAPALTPRRPGQRIKTDRRDAAKLVRLFRAGELTAIHVPDEAEEAVRDLVRCRDDIRRDVLRWRHRVLKLLARHGRAYLTGKNWSQAHWRWIREQRFDLPPLQRAFEATVFALEQALARQAELDKGLEVVAATAPYREPVGWLRCFRGIDTLSAIILLAEVVDFQRFHRPRELMAYLGLVPSAYSSGETQRRGALTKASNSHARRVLVEAAWHYRHRPTIGRALASRSHGQPDEIVSQAWRAQQRLHRRYRHLVGHGKRTPVAVAAVARELVGFIWAAMTRHESRRAAA

SEQ ID NO: 367613 - protein, 323 aa, unidentified
MIKDIKYFGIDISHLVFDITDSDGNYYHFKNNISGFKKFVKILGVDSHCVMEATGYYHYQLAYYLLESGMKVSVENPLAVKRFIQMKLSKIKTDKSDSRLICEYAGQVKLKLWQGNSKHQIECLQMTRLLSVYTKQSTMLKNKLHGEAVLGNPSKFVIGSLKRSLKQVQKELKTLEEKLLILVKQVHQDVLTRLKTIPGIGDKTAVMLVVLTDGFNRFTSGSELCSYAGLTPIIRQSGSSVKGRPRISKIGNQKLRNLLFMCSFNACKCNRACRALYERIVAKGKSKKLALIAVCNKLLKQAFAIAKSGLIYDDTYRSTLVKN

SEQ ID NO: 367614 - protein, 500 aa, unidentified
MKTKNSPALAVGIDVHKKRHYARVKIRETRETISPILKIYNSKRGLDFLLEKVNHLMEKYQAKGVIFALEPTGIYWKPLGYALHDRGCLVHLVNPVQVHYKRKEEDPAANKNDKIDPGLICDLVCDGKSNPARFMLGIFRLLQKTVRSRRDIVLELSSKKIKLKTVIYELCPELVDAFTDIAGRVSMAILRFSPSIDLLESTPLEELSSIFRIYGSHKTKISPEKLLSQIRFSLGIRNDNQAHIKQIQMILEQIDLLKRQISILEKDINGYLKELGQTLTSIKGIGPILAAEVIAEVGDINTFSSGRQLVKLAGLDTVESSSGETKRRRYISKKGISSLRTTAILAAFSLIKSCPPFTDYFLYQTKVLAKKRMQAIIAVADKFLRVCFYMLKNKTSFDPKRIGTGNLRTKAKFLNQSLEVSLDSKEIANLDLNLLDIFSKSPKVVLFDEEDPTWVKIRVNSKVETFDLEEPRGRILALLNAFIIAFKIEVGYPGLFLSKR

SEQ ID NO: 367615 - protein, 337 aa, unidentified
MEQYVGLDVSQETTSISVRQDGRRVWRGKCPTDPKALSEVIRKHAPHAVRVVFETGALATWLYHVLQAENLPVVCIDARHAKAALDMAPNKTDANDADGLAQIAEIGFYREVRVKGYGPMLTRTLVGARSQLLRISVQLSNQIRGIMKTFGLILPKGAGRIFERNARALLETNEAVARVVLPLLETWRVVRARAAELDRQLIAAARTGPSYRLLMTIPGVGTITAVSFVAAIGVPENFKRSRAVGAWLGLTTRRYQSGETDYDGHISRRGDRYLRALVYEAAVAVLTRTRTDCALRSWGLKLKAKVGFKRAAIAVARKLSVIMHTMLKTGAAFAAAA

SEQ ID NO: 367616 - protein, 371 aa, unidentified
MEEFIKYVGMDVHKETIAVSVAPSNAAEVRYVVEIANTAQAIEKLVKQLRKDGADLKFCYEAGPCGYGIHRQLSEQGWDCQVVAPSLIPKKAGDRVKTDRRDSLSLARLHRAGELTAVWVPDGAQEALRDLTRAREDMKHLQRQAKQRLLAFLLRHGRSYSGKSNWTQAHYRWLEEVKFEQPVQQIVFQEYVDTVKALSKRVDALDKQVESAASDSAFWPVIQGLMALRGVSLLTATTIVAEIGDLKRFTSAPQLMAYLGVVPSEHSSGATKSRGGITKTGNGHVRRVLVEAAWTYRHPARKTATLQRRAEKTPEAIQEIAWKAQKRMCGRYKLLEGRGKLKVQVCTAIARELTGFIWAIGQAMPQPPVKA

SEQ ID NO: 367617 - protein, 426 aa, unidentified
MICAAIERCAGIDVGKRFLAVCIMTGALDAEPRVEKRRFGTMTAELECLRDWLKAENITQVVMESTGSYWKPVFNVLEGSLKVCLANPQEVKNRKGHKTDDKDGWWLAHLLRHAMIYPSFIPPRPIRELRDLTRRRKRLLGDATAEKNRVQKVLEDGNVKLGNVLTDVFGVSGQLMLDALLEGKAQPAEIAQFAKRGAKKKIPEIIQALEGHRLSDHHRRLIRYSLNHMMFLEEQIAEIDRDIAAKIHEAGLDEAVQLMQTVPGIQDRSAANILAETGADMKQFPSAKHLSSWAGVCPGNNRSAGKNKSSHTTGGNPWLRSALTECAWAASATKNSSLRDKFWRVTSRSGGQKAPALIAVAHLMLTLIYRTLETRQPFEDRKAPPLGEPQKQRMIRHHIRRLGKLGISIHRISSVPAGNQLAASTD

SEQ ID NO: 367618 - protein, 341 aa, unidentified
MSSYVGLDVSLSETSVCVLEADGRVRFEGRVLSQPDALVRCLRERSADAQRIGMETGPTAGVLFRAVQAAGLPVVCLETRHAHRVLSARSNKTDRNDARGLAELMRVGWYRAAWVRGASATYIRSLLQGRRLLVHAKRTLENTLRGGVKRFGLIMSKTAGRTFTHRAASVLDRDPHYAAFAEPLLAVLRTILDQIRSYDRQLRAIARSDETAARLMTTPSIGYLTALAFISTIEDPKRFRRSTDVGAYLGLVPRVHQSGEIDRMGRITKAGDNLTRSYLVEAANVLLTRIERPCALRQWGLRIMQRAGLKKAQVAVARKLATMLHAMWTDGTEFEWGSEMA

SEQ ID NO: 367619 - protein, 409 aa, unidentified
MDPVLTHVAGLDVHQATVVATVRVPGPDGTRLVRTETFGTMTPDLLGLREWLQAYAVTHVALESTGVYWKPVYYVLEDAYTLLLINMHQLRHVPGRKTDVKDSEWLAQLLECGLLRGSLVPPPAIRELRDITRYRVQQVRDRSQEVNRLCKVLEDAGLKLSSVASDVLGVSGRAMITALIQGTTDPAVLADLARGRLRQKLPALRAALQGRFRPVHAFLLEQILAKIDFLDETLGRITEELDRRLGPFAPVLTHLDTIPGLDRIGAISVLAETGGDMSRFPTAGHLCSWAAMCPGHDESAGKRRSGQTRDGNRYLRATLIQAALGAMRTKGSALQARYHRIRRHRGHKKAVVAVGHQILEIAYYVMRDGVSYHELGADYFERRHEERAVRRHVSHLRALGYHVTIEKAA

SEQ ID NO: 367620 - protein, 343 aa, unidentified
MEIRSVGIDLGKTTFHLVALGDNNKLLIKKKFSQKQLIAFTANMQTSLIGMEACSGAHFLGRTLREQGHDVKLIPAQFVKPFVKSNKNDFIDAEAIAEAVTRENMRFVPIKTDDQLDLQALHRVRDRLIARRTSVINQLRAFLLERGLVFAKSPAKLRECIPETLEDADEKISPRMRNLLSLLWEEWKDLDQQLEDMNHEVERIASSDPACQRLRQIPGIGPLVATAIVAAIGNGAAFRKGRDFAAWTGLVPKQHSTGGKTKLAGISKRGNRYLRKILIHGARSVVFRSRRERIAMGEWMNTLETRSSRNVLIVAMANKLARIAWAVLSSGQDYRAVQEPIAA

SEQ ID NO: 367621 - protein, 417 aa, unidentified
MSDARDVLYVGVDWADTAHRVIVLNAARQVLHDWAVPHSGEGLTTLAARLVALTDGDASRVAVALEMPRGPLVDALLERGCHVFAINPKQSDRFRDRFSPAGAKDDRRDARVLADALVTDRGAFRALTPEDPLVIRLRELSRVDAELQQELRRLTNRLRAQLQRFYVQPLALCSAADEPWLWALLALAPTPTAAARLREPRLARLLRTHHIRRVTAGEVRAHLQRPALPVAPGVTEAASNHVAVLLPQLHLLQQQRRACAPQIEQLLQQLAERPDSAEPQREHRDVPILRSLPGVGRTVAATMLAEASGPLAARDYHALRTQTGVAPITQASGRRRVVQLRTACNRRLRQAVYHWARVSTQVDPLSRAHYTALRGRGHSHPRALRGVADRLLAILIAMLRTGTLYDASYRRAATLGA

SEQ ID NO: 367622 - protein, 338 aa, unidentified
MEIEVLGIDLAKNVFQLHGIDRRGRPIYKRRVLRDQLLSVVGEIPGCTVVIEACTGAFEWARQFEALGHRVKIISPQYVKPFVRRQKNDGNDAEAIVTAASQPHIPQVPKKTIEQQDIQALHRVRQRMVKHRTAVVSQIRGLLLDRGFAFAKSITRARRAIPALLSDANNGLTAMAREAITELWDLMCDLDRRVSVIDKKIDAVFKADPACQRIARIKGVGPKTATAMVAAIGDGAAFKNGRHLAAWLGLVPRQHSSGDKRTMMGISKRGSQHLRSLLVHGARAVVRTAPNKHDPHHQWVNDLRERRGFNRATVAVANKTTRIIWAVLRTGEPYRAAT

SEQ ID NO: 367623 - protein, 354 aa, unidentified
MKTLTFSNLHFYIGIDTHLKNWRVTIRNSGLELKTFSMNPSADELYRYLIKHYPDGIFFIVYEAGFCGFWPQRRFSELGISCIVVNPADVPSSNKEKVVKSDPVDSRKLARELENGSLKAIYVPDLYAEQLRSLMRLRFRLVQNQTRIKNRIKMLLYNYGIVIPKEHLSNSRWSGYFIHWLKSVKLSSSAGQFTLDNLLLQLCQTREHLKKLLRQLRLEAKTDNIAPTINSLISVPGIAFITAMSIYTEIIDIKRFNTFEQLCSFVGLVPSVYSSGETEYSRGISFRHNKFLRPILVEAAWTAVKKDPALTLRFSELIKQMPKQKAIIRIAKKLLRRIRHVWINQDCYVKALVA

SEQ ID NO: 367624 - protein, 386 aa, unidentified
MIEAVIERCAGIDVGKKFLVACVMTGPLESEPKSEIRKFGTIVAELELLRDWLIREGCSHAVMESTGSYWKPIFNILEDSVEVVLANAYDVQNRRGHKTDPNDSRWLAHLLRHGMIRPSFIPERAIRELRDLTRRRRQLVGEKARERNRIQKILEDANIKLGDVLSDVLGLSGRLMINALLEGVLPAEEIAQFAQRKAKQKIPDLIAALRRNRLTDHHRFLLRHALRHLDFLAVEIDTLNIEIRSRLSTEQFRQPHALLQSIPGIKEEASAAILAEVGPNMAQFPSGAHLASWAGLCPGNHESAGVRKTGRTNRGNNWLRSVLAQCAWAASNKKNSVLRSFYARLSSRCGRKRAIIALGHRLLRVIYYVLLRSQPYQESTGRFISA

SEQ ID NO: 367625 - protein, 318 aa, unidentified
MAEVVTFEQIVQRGCGLDVHKQTVVATIDGAGIKRETREYSTTTRSLTELKEWLVSNGITHSVMESTGVYWKPVYHVLEPSGITVWIVNARHVKYVPGHKTDKRDSQWLCKLLLAGLLKPSYIPPREQRELRDLTRYRRKLIQQIASEKNRIIRILEDCNIKLSSVLSDTQGVVGTKLIDKLCASGKVSMADIEEVYHGRLQASREEICEACEGVVTEHHVFMLQSIKEDILSCEAIISKITLRIKEMLSPYENVLELLKEVPGLGAKSIEDLIAEIGLDMHVFPTEKHLASWAGVSPGNNESAGKKKVDALPTETNR

SEQ ID NO: 367626 - protein, 318 aa, unidentified
MSQNFSIFVGIDISKDKFNACAIQNPNSIIFESAFDMSKQGFSSFVQKLSVFPKSSVLIAMESTGCYHLNLLSFLSLNDFSCVVLNPLLVNKSLPVGLRKTKTDKIDARSIALTIFYTHHILPTSSFLNSDFRDIARKKESITHQISRVKNDIEKLLSLLFPELEKVTNIYNDAILDLLSSFPSAKAIQKASIDSLRVFFSKTTGRKLKLTPETLKELANNSIAQYWPVKEKILIQTIKELRFLQEQLNEFDEMLKEYCKCASLNQDVEILTSIDGIGENSALYFLAEVGDISRFSTYKKLIAYCGLDPSVDESGRHK

SEQ ID NO: 367627 - protein, 417 aa, unidentified
MDSDKEIVCGADIHRDFLIATMISRSGLKLQERFNMNQDGLLAFRSWIINHRCLRLAVESTGGFWYPIFIILEGHVEFILANAYQIRNIEHKKTDKLDSERIAIYCLNNLIKPSRIYPKDYRDLRSITRAREALVNARSKVKNQIHQSLSTCCIKLSSVISDSFGKSGRYIIDRLLEGKTIDQIISGIPSKRVKKKEDELREAIKNGIDPVQVFLIKANLEVIDDISKKIKILEAEIAVRVKPFEEDLKIALSVPGVGFISAATIIAEMGEYRDFSSADKMAKYFGIVPSVYQSAGKLRTGKITKTGSKHMRRILVEVAKAISRTKKNSKLKRFFQRIFARCGKKNIAAVALARKVLCILYHLLMNHENYQEPEVKKTKPKIPSSVSPISMMDIDEMIKIISQAGYFVEKDLKEGCG

SEQ ID NO: 367628 - protein, 316 aa, unidentified
MDGTNQVSIGIDVAKATLDLHLLPSGQTQTLPNTKAGCEQLKKALPDPATCLIVLEATGGFEREVVADLTDAGYRVAVINPKRARDFAKALGMLAKTDRIDARVLALYAEKVQPAPIEKTPEKQVEIQQLVARRRQLIDLRTQESNRWDVTQAKAARKSIQAVINTLEAEIRGINKLIEALLESDDDWQNKIRLIQSVPGLGNVTAATVVADVPEIGKLNRQQISALIGLAPFNRDSGAMKGKRSIGGGRKSVRCVLYMAAMTAKRFNPVIKAFAARLTQHGKPHKVIITACMRKLLVILNSIIKSGRPWMAQTTS

SEQ ID NO: 367629 - protein, 347 aa, unidentified
MDTIGLDLHKRESQLCIGHEDGSVEERRMVTSRERFTAVLGARGRARILLEASTESEWVARHLESLGHEVIVADPNFAAMYATRSRRTKTDRRDARTLMEACRLGAYRPAYRVSDARRHVRAELAVREALVRTRTRYIAVAKALVRRDGLRVAGSDAEHVAQHLAALELSAVLASELRPLVTVLAPITEQIAAADLRIAALTEADAAVALLATAPSVGPITAAAIVATLDDITRFRSAHQVEAFLGLVPAERSSGEKRRIGRITKAGNARARYLLVEAGWRLLRSRADEAAALRAWGRAIAARRGNRIAAVALARRLAGVLYAMWRDGRPYDAAKLRLPQTRTPQAA

SEQ ID NO: 367630 - protein, 273 aa, unidentified
MEYFAGLDISMKETHICVMDRDGKVALEAKAATSAAAIAAELAKAPTAQRIVFETGRMATMLYHSLAALGLPVVCIESRHAYQALKSLATHKTDRNDARGLAHLARAGFYKAVHVKSLPAHAVRALISARKKLVGQRVTLENQIRGLALVFGVRLPRGLSPAFAAQVTSNSSEVPALSGALRGLLVARDALLGAITAINRDIKRLARSFEVCQRLMTIPGVGHLTALAFVAAIDEPDRFRSSRDVGPYLGLVPRRWKSGEIDYTGSISKVCFL

SEQ ID NO: 367631 - protein, 315 aa, unidentified
MSDMPCFVGIDVATAQLDIALRPSGERWAVPNDASGVMTLVDRVQALHPTLIVLEATGGLERAVTSALATAGLPVVVVNPRQVRDFARATGQLAKTDALDARALAHFADVIRPTPRPLPDAQTQELRALLGRRQPLIGMRTAEQNRLAGTNARLTKDIAAHMTWLNAAIATLDDDLETILRASPLWREHDDLLQSAKGIGPVCARTLLLELPELGTLTRQQIAALVGVAPLHCDSGTLRGRRMIWGGRAHVRTVLYMGTLVATRFNPQIKVFDERLLAAGKVKKVALTACMHKLLTILNAMLKHRTPWQPQEVQS

SEQ ID NO: 367632 - protein, 464 aa, unidentified
MPDARRRPPRARRSSAVLDHLNPNAAGIDCGSASHFVAVPVDRDPTPVRSFPTFTADLHRLADWLTTCGVTSVAMEATGVYWIPLFEILETRGVTVLLVNARHVKNVPGRKTDVSDCEWLRDLHIVGLVRGSFRPADAMVTLRAYLRHRASLVESAGAHVQRMQKALVQMNLQLPLVVSDITGATGLRILRDIVAGQRDPHQLARHRDYRCRASAAEIAAALTGNYRAEHVFVLHQHLALFDTFQQQITACDTAIEAHLTALVAQTPAPTTPLPPARPRQKPRDNQPPFDVRTPLHHLTGVDLSQLDAIGPYTALRLLAEIGTDMTRWPSPHHSTSWPTLAATNKISGGRLLSSRTQPSANRAAALLRLAAMSLGRTQTALGAFYRRLAYRIGKAKAITATARKLAILVYRMLKGELVYHDPGAETYDAQHRDRLLRRLRQRAATLGYALVDLSTGALVEPAVS

SEQ ID NO: 367633 - protein, 413 aa, unidentified
MKKNHLLGLDIAQKSIEAQLIRVDGSRCWRGSLPTSQTGWRQLEETLAAHHVRLADMLVVIEATGVFHLGWAERLTRAGAEVYVLNPLLSARLDSAANALRGHKTDRVDAAKLCEIGRLYTAELARFRYRPAPARQGLRQLDHARATLRSLLTNAKKSLKSHLELVFPALAGAGIGADSVRAGAILAKAPTAGAWSALPQAERETLAGTKCAALDQACAETLADEALAQACVPAMRALLATMHALETQLHACEQDVLPRLPGDRVALIASIPGFGERTAAVMATYLPEDLSQWGPRKKTVARLQALFGTDPRLRSSGTWAGKVKLSKRGIASARTALFQAAFCSLHADPENAAYYKRLRDLEKKTHKEAIVDVMRKQLRRLVAVLRNDRPFEARLPSTVTKRKLPRQPSPSAA

SEQ ID NO: 367634 - protein, 451 aa, unidentified
MTGQQVSKVKLSTQHFGDGPTMTKRSSTPADAVLVAIDMSKHRQEVLIERPEGGRRRRMTIMATKADYDRLADELSSIGRPIVVGFEATGNYHRTLAHRLLSAGFELRLISSVALARTREALHNGWDKNDSKDAQVILHMLRIGATQRYVDPLAAGINDLQEMSKTHEAISKAKTQTWHRILTHYLPLYFPEIERFAGNSRSDWFLALLERFPTPASMTALGQEDFTREAWSLVGRKVSKARLINDIYETACASVALPVEEDSVAIAMFRMVIAQARSLIRQRDEIERTAHALLSENRDYQLLRMIPGIGPINALTILAEAGDLRRFAHHRQFLKFCGLDLATCQSGTFRGRTKLSKYGNARLRRTFWMATQVAIRQRDNSFRDKLGRYVAGHGNDPDRRRKAMTALTAKMARVAHAVIKTGTEYRPFVERADTRWKDPSLSCREGATATL

SEQ ID NO: 367635 - protein, 335 aa, unidentified
MNQARMHIGVDVGKGSLDICYPNGNKEHIKNTKRCRAKLIKEAKRLGAIISFEATGPYEESLEVDWLSAGVPAVRLDAWKTRKYAESQGILEKTDAIDCEMIRDYAASLRLEKLHFVREMSEGYRRLKRASGVRRNLIKAKVLIANQLESVMDADIKASIVRIVDSIDRQIEKMDDACSAAIASDEKMNALSKRFEQVVGIGPVLINTVFATCPDIGSFTAKGIAKFAGVAPLENKSCTIKKKPKPRRGRRDLRNALYMAAVSACHSNHLLQSMYKGLLARGVPKRVALVALARHIIILMNYIAKYPDFNPAIVPKKAAILASPKRKPGRPRKNP

SEQ ID NO: 367636 - protein, 471 aa, unidentified
MSSKPQSHPTQVSKSGSSKSIKAPQLDSLAQINLNAAGLDIGDSQIYVCVPEGRDTDSVRVFPTFTVDLYALADWLTDCGVTTVAMESTGVYWIPIFQILEARGFEVFLVNAQFIKNVTGKKTDILDCQWIQQLHTYGLLHASFRPEEQICVLRSLVRQREMLLHYRASHIQHMQKSLQQMNLKLTNVLTNLAGTTGLRIIRDIVAGVRDPQQLAKHRDHRCGKSEVEIAKSLVGDYRSEHVFALQQALELYEVYTEKLKACDAQIEQQFAQCTPQVDVVEQPLPTPTRRPSNPVKNHPGYDLRLALYQLSGVDLTQVDGLQVLTIQAILSEIGTDMSKWQTVKHFTSWLGLSPQNDKTGGKVFRTKTKKTDNRANLAFRQAAASLVHSKSALGNFYRRMRAKLGTPKAVVATAHKLARIVYHMLKYRVPFQAVPPEQADAQYRERAMRQLQRQAKQLGATVIFESATKPA

SEQ ID NO: 367637 - protein, 468 aa, unidentified
MRNDSTVYVGLDVHKESITVAYAVDAGEVESLDKIGTTKTDIDRLCERLRSKARHVRVVYEAGPRGYGLYRQLVQKGFDCMVCAPSLIPRKPGERVKTDRRDAIKLVRALRAGDLSAVYVPGTEDEASRDLTPAWASARDDLRQARPRLKSFLLAHGVRYTGSANWGPAHRRWLSEYSFGNEWQQLAFDEHRRTIEDRLAQCDRLEAALREAVVNWRFYPAVLGLQAMRGVQFVTAVGMLSELGDLSLFEHPRQLMAWLGVTPSEHSSGSKRRLGCITKTGNSYARKLLIEAAWSYRHPARVSRDIQCRHEGIPKALIDRAWDAQIRLPQAPAEQPVERVDQLDVTRRESRLASRDPACVRPRIDEMRLRIAAGKIQADHAALFSDSGYTLAHWSPGSLSSRACAARLVSVWLCTALSDLLSYDRAVLPEPRLLRKTAFLTKPIITASVRLPDRPGDPNVFNARLSRS

SEQ ID NO: 367638 - protein, 389 aa, unidentified
MKIYVGIDIAKLNHFAAAISSDGEIILEPFKFTNDADGFQLLVSKLESFDKNSIIIGLESTAHYGDNLVRYLVVEFYQVCVLNPIKTCQMRKNNIRKTKTDKVDTFVIAKTLMMQDDLRFVSFYDLDMMDLKALGRFRQKTIKQRTRLKIQLTTYVDQVFPEIQYFFKSGLHQHAVYALLKEAPSPKEIASMHMTHLANLLKVNSHGHFTKELAKELRVLAQKSVGANDSAISIQITQTIQQIELLDSQLEKIEAEMTDIMKFNDSVIMTIPGIGYINGGMILGEIGDIHRFSNPNKLLAFAGLDPSVYQSGNFQAKTTRMSKRGSRVLRYALVNAAWNVVRNNATFKAYYDAKRAEGRSHYNALGHCAGKLVRVIWKMLTDEVEFNLE

SEQ ID NO: 367639 - protein, 427 aa, unidentified
MTTHADQKQENSFAAFVGIDWADQKHDVCLMEAGSENIESGTLNHKPEDLENWVAQLRGRFGGRPVAICLEQTRGSLVYALMKYEFLVLYPIAPKRLARYREAIQTTSGAKDDPTDAALLLDYLTRHRDQLVAWKPDDVQTREIALLVETRRKFVNLRTKLSNALKSCLKTYFPQAIELLDGDVTTRLACDFLKRWPSLETLQRAKPETLRKFYYGHNCRRGDRIEARIATIGQATLLVTDEAIVGNGKMTVQGLVAQLRPLVDTIATIEKRLKELMANHPDAALFVALPGAGDVMAPRLLAAFGSDRNRFDSAASIQALSGIAPVTKRSGKRSSVQRRLACPKFLKQTFHEFADHSRKKSHWARAYYDMQRAKEKGHHATIRALAFKWIRVLQRCWKDRTPYDESRYLEILQKRNAPLLTFLASNT

SEQ ID NO: 367640 - protein, 391 aa, unidentified
MGSRDSKAPRNERLSWDEAAGHPLRVVAESPHKDDSRSCDTPHSSEGGPAAMDNIGLDLHQRETQLCILTAEGEVVEQRIRTSRERFSEVLGERGAARILLEASTESEWVAQHLESLGHEVIVADPNFAPMYATRSRRVKTDRRDARTLAEACRLGAYRPVHRVSLQRRHLRAELAVREVLIRTRTRYVQVIRALVRRDGLRVPSCEPEHIGAKVAALPLAPRTSTELAPLVALLEPLSAQIAAADRRLAALAAADPVVTRLQTAPGIGPLTAVAFVATLDVVGRLATAHQVAAYLGLTPRERSSGEQQHRGRISKTGDQRMRWLLVEAGWRLLRSTQPAAAPLRAWAERIAARRGGSIAVVALARRLAGILYAMWRDETEYRAAAIKAVA

SEQ ID NO: 367641 - protein, 427 aa, unidentified
MYCTQNEKINQVTESTLVVGIDIGSKTHYARAFSWRGIEFTKYLRFDNTAAGFKVLDQWILNLQKKNHLSEFLIGAEPTGHYWYALADHLKANQSSLVLVNSTHVKQSKALDDNNPSKSDQKDPKVIAKLGIDGRYNNPYLPEKEHAELRVAHNNYLRVKGDISRLKNKVQRWLKIYFPEYKEVFKDPFGEASVEVLSRLALPSHIMKMDAESINEIFRSVNIRAVGIKRSQRLIEAAKGSIGRKTEPVAAAMEIEMLIEEYRLKTKQIDKAEQFLESICARIPSAEKLEEIKGIGPISAAGFLAEVGDISRFQSPKQIQAYSGLNLKETSSGAHKGKTEINRRGRKRLRTTLFQAVLSLVSNNDAFKALHHYNINEKPNPMKKKQSIVALSCKLIRIFYAMLTKGVSFDPEKMLKDIQRPTFLAAA

SEQ ID NO: 367642 - protein, 366 aa, unidentified
MGWTPPRRPWCARVVVFVTTEQEASVSEVSTIGLDLAKHVFQVHGADASGKVVFRKRLRREKVLEFFAGKPACVVAMEACSSAHHWARELTRLGHIVRLIPPAYVKPFVKRQKNDAADAEAICEAAQRPTMRFVAVKSETAQANAVVFRARDLLVRQRTQAINALRGHLGEYGLVVAKGPGHVIKLVEHVEDPDSNVPDAARLVLRTLVEALRFLRERIDLLDREIARRARENNEVRRLMSIPGVGPITATALAALAPPADAFRKGRDFAAWVGLTPSQHSTGGKQKLGTTSKMGERTLRRLLIIGASSVVRKALRQGTAAGSWLGRMLARKPRMLVIVALANKMARIAWAVQAKGEVYRAPVVAA

SEQ ID NO: 367643 - protein, 404 aa, unidentified
MYYVGIDVAKEKHYVSVLGEDRELATKPFWIYTDILGLQKLEKRLAELSLDRDDFLIGVESTGAFSENLYEYLTDSDYKVVLLNSYQTAKFRDFSTMKKIKNDAIDALVIAELLSTGKYKESHISNDVYHSVKVLGRLKASLDKKIKSIKREISTVMATVNPEISKVFPNIFTKTALAIIKAYPTATEVQKATPKKLTRLFRHIKGNNFSEDKAKLLIELAKSSVYAGRACGARSLMITTNIRILELYCQEKKEIEAQIKELINSEIDAIDNTIENIKSIPGVSDKTIASLLGECGDIRRFDSAKAFIGYLGLYPTQYQSGNSLSVGKLAKRGIPIAKHALYMASVSSVLHNPQLNKLFRDKISVGKSKKEALIILSKKLATIIYSIVKHNTPYQPNRVFIPQR

SEQ ID NO: 367644 - protein, 310 aa, unidentified
METNIFVGVDVSKDSLDVAIGEQKEIITFVNDQKGVDALVKKLKRIDVQLTVFESTGGYELLAASCLAEAGLAVVIVNPRQVRNFAKATGILAKTDAIDARVIARFAEALKPEVRPLKDRQTSELTALVARRRQIIEMIVAETNRLRLANKRNKKDIKDHIRWLQKRLDKIETDIGKMIQSSPIWRCKDDILQSVPGIGPITSATLICDLPELGVLSPKKIAMLAGLAPLNCDSGKFKGRRRIWGGRGSVRSILYMATLAAIRCNPAIKGFYQRLIAAGKCHKVAATACMRKLLIITNAMLRDQTLWQQN

SEQ ID NO: 367645 - protein, 422 aa, unidentified
MTDAISELIVSLDRSDKTAALALLHVQTGTVEQSVISLQPEDLEGWWTQLQAKHPKARLIVAFEQPAPNLVAFFAARQPAAIYALNPSATWAYRQSLVVSRARTDRSDAYHQALYILNHRHDLKPWAPCPGHVEQLDRLCQGRRKLVDTRTGLTNRLQAVLKRYYPQALCLMHEDLWRSMNLAFLRRWSSPQALKKARLSTLKAFFHQHGSRSQARWETRQSIVQNLVPLTPQEPLPDLLEVSAIVEQLEVLNKSLRRYDQTIAEHFAACPDHALIQALPAAGPALAPRLYVAFARYADHCALAEDFASAVGVAPVTDQSGKMRKVHRRLRCDKHTRQSFVEWAKETIKHSAWARAYFEQRKAAGHGFQATLRSLAYKWIRILWRCWKEHTPYDETLYLAKLRTKASPLLKYLPELNTPKAA

SEQ ID NO: 367646 - protein, 385 aa, unidentified
MTTLNLADTPAAGEYATVYVAFELSKAKWKLGVMLPGSQRVSCFTIDGGSLVALSARLVAWRAKAEATGKLVRIVSCYEAGYDGHWLHRWLTNQGVINYEIDPASIQVNRRARRAKTDRIDLEQLMRTLLAYLRGEPRVCSMVRVPSPEDEDRRRASRERDRLLKERSSHSNRITGLLHAQGIRDAMPLKRGFIASLDSVRTGDGRPLPARLKEEIVREHERLCLVHKQIIALEAKSKAEVRAAVRGSVEEKIKDLIDLKGLGVVSAQKLMHEVFYRSFDNRRQVGSYFGLTNSAYDSGDSHRDQGISKAGNRRGRTLAVELAWLWLRFQPGSELSRWFNERVGSIKGRIRRITIVALARKLMIALWRYVTTGVVPTGAVLRQSV

SEQ ID NO: 367647 - protein, 381 aa, unidentified
MRQVCGLDVHKDSVFACIINENGVILQEKFGVLTPELEHLAAALQENDVGEVCMESTSIYWMPVWRVLEPYVAELKLVNPYFIKQLPGKKSDVKDAEWIATCLLKDLIRGSYVPADIIQQLRQYDRRISDLNAECVRKLGKLDAALQRCNIRISNYVATTDGKSYKDVVRLISEGIRDPAELIKVIHGRITNRVGKDVILASLTGVISDTDIDVIRQLREEVDLAQRHKDECQSKMDAICQQYFPEQLKNLKTIPGVKGRSATAIIAEVGSDVSSFQDAAHLVSWCGLKPRNEESAGKIKARSITHGNRYLRKTLIECSWAASKTQNCYLNRFSYYQTIVRRKNKMKVQVAIARKILTSVWYVLHDKVAYRDYTSDIDPAA

SEQ ID NO: 367648 - protein, 413 aa, unidentified
MADNLKNSSVKVMIAIDIAKTSHDAVILWPSGRTKTFKLPNTLVGYQNLINAAEVPAEDILVAFEPTADFHRNIAYWLRSQGALCHMVSSLACARAREMLFKSWDKNDKKDARVIMYLMQQGMMQPFYDPLVNEMLDIQELANTYYQISLARSRCQHSLFNHYLTLFFPEMERFFNSTRAVWFCRFLLKFPTPQSITRYKKTTFVQRAWEVVGRKVAKQRFLEEVYEVAEQSIALPVPLNSPAIATFKLQVRRYLKLTEQRQQIEEAADQLISHRDDYQRLRTLPGIGPIIALVIIAESGDLKRFCHYRQYLSFCGFNLSASQSGKQQGHYRLSKRGNARLRYAFWLAATVAIRQRENTFRQKYERYIRATPDDPDIKRKARVAVAVKLARVAHALIKTGSDYRGYYEFGCET

SEQ ID NO: 367649 - protein, 388 aa, unidentified
MRRSNQDRIVGLDVHPDSFAGAILQGIDPWKARVVSTSTRVALPLLEKWALRHTREEDILVMEASGNAFCVAERLRALKRKVVILESHRAGKVGKTYCATDRVDAIKIARIYLSALSPVVWQPDAKTRERREVFSAYQAVVKEGMRLKQQIKSMLNEHCVRLEKGFRLSHPSALGRLLRRRKWTEAQKMLLSQLHAGLVGARVRRQRLRHYMAQEILAEKELLRLTRLCGINLITLYGLIAAIGDIQRFANARKLSTYFGLNPTVEQSGNYEGSGALKRHGRGAIRALLVQSAKKLLQVDNPLQKWGLALAARRGRNKATVAVARKLCVAVWHVMQGHVIGAIERMDTLHTKLHKLATELGVPTIKQLGYETKEAFVQNKLYLLRSYA

SEQ ID NO: 367650 - protein, 369 aa, unidentified
MIYVGVDWSDKSHSFCVLDSEGRRLDAFQIPHAQAGFEKAHARIAKACSSLHDAAVAIETRDSLIVDFLSEVGYTLYFLNPRQTDRFRDRHRMSHSKSDYFDAFVLADALRTDPHLFNALSPLDEGSLKLRVLTRTRKSLVERKVAIQNELTSALKRYFPAALELFDRLDHPAAISFLLQYPTYDQACTVSQRQIEAILKNNKFSAKQAAERARGVRAKLREPQPKPTPAIASAYPLAGKSLLVELQSILDRLTDLDKEIAQVYNDHPNKDLIESLPGFGITLAPVIAAEVGADPMRFSSVKTLKPYAGTIPVTKKSGKCCRVHFRRACNMHLRRALHLAKPDSTQPVRVGTRALRPAQSHGKVAWSGA

SEQ ID NO: 367651 - protein, 322 aa, unidentified
MSQPNPLCVGIDVSKATLDIAASSDVAQFTVSNDSDGFNAIITGLRRHSVALVLMEGTGGLEVAVACSLQAEGFEVAVVNPRQARDFARAMGYLAKTDRIDARVLTQMAEVINRHPERKRFIRALPDAERQALAAMVVRRRQLIAMLVAERNRLYPSHPQNKKSINTIIKALEDELARLEKDMNSHIRNHFKEIAERLSSIKGVGTMTVSAMLAEIPELGTLSRREISALIGVAPVNRDSGTMRGRRTIFGGRAGVRSALYMAALVATRFNPVIKTFYVRLLAAGKAKKVALVACMRKLLTILNAMLRKNEEWDESYHHVAP

SEQ ID NO: 367652 - protein, 426 aa, unidentified
MSERDYSKQVARRQRIGSTTLVVGVDIGCASNAVGFMSKEGRVLGSYPNMPNSREGFEQFVKMAEGLKAKHGLSDVLIGMEPTGHYWRKFAYFAKAKGCEVRFVRTTALKHHRELDESSSAKSDQRDALTLTNITREGKYIDTVIEDGRMRQLRTLVKVREKIQKRNVSAKNSLHAALDDYFPELKEIFWSMHARGLWALLERCPFPVDVVSLKVSVLKELIGRASRRRLEASRKATAVYQAAKESIGLRQIGSADRYRLKMCLEEVKRTELMIKDIEREIKRTLKEIPDAQYLLSIPGIGPISAAVFLGELGDPSYFQRAKQVVKYAGYDPQENDSGYRVSRKFISKKGRWLLRKHLFLMSMRVVVLSRYFQEYYQRKLQTKNRFGQLPRKKEILCAVAIKLIKVIFALLRDKRNFEDAVACSVQ

SEQ ID NO: 367653 - protein, 408 aa, unidentified
MRIIGLDIHRAFAEAVACEDGQLTRLGRVDMRRERLAAFAQKLSPDDVVIVEATGNAAAVAAVLTPHVQKVVIANPKQVRLIAHAKIKTDTIDAGVLAQLYASGFLPEVWIPDEPTQALRRQVTRRNQIVRQRSRLKNIIQSILHAHLIPSCPHQDLCGPRGRTWLADQVVPEDERLAIERHLREFDRLGEDLKTIERDLARSALADESVRRLMTIPGVDMVVALAMSAAIGDVERFGSPQKLVSYLGLNPSVRQSGPGPAYHGRITKQGRGHARGMLVEAAWAAARAPGPLRAFFLRVRARRGQHVAAVATARKLAVVIWHLLSKGESYVWARPSLHAKKLRDLELKAGHRAARGQKGAAHAYNIKSHRDEERRWVEQAEVAYARFVTGWNPRGPKGRIGAAKEERP

SEQ ID NO: 367654 - protein, 423 aa, unidentified
MKFKSQARQNQLIEKITAQHLVVGIDIAQQTHVARAVNFRGIVVGNPLSFSNDEEGFNSLLRWIQSLQNAHAFTAAIVGMEPTGHYWLNLSRWLSNRQFEVALVNPHLVKKNKENRDNTPSKSDKKDALVIADMVKNGYYSFTRNTPEAFEELRVFLSNRDSVVTRLVSAKNQIHRWVDIVFPELRQVFKNIMCTGSLATLRLFPTPEELGKLQPQDILRGWKSLMKRHSGDRKARALISLACRSVGSKRATHAYKLHLKQLLDEYDLACLQLQTVETEIIAVLERIPFAGSMLAVKGISAISLAGILGEAGDLSGFVHGNALLRHAGLNLAEASSGKWTGQMKISKRGRSRLRRFIFMMTMSLVANNSEFKAMHAYNVQIKKMKKMRSIMKLCGKLARILVGMARSGEAYNPPKTLPIQLAA

SEQ ID NO: 367655 - protein, 341 aa, unidentified
MQIAVLGIDLGKNSCSIVGLDASGAVVLRRRMRREGIIKLAAKLKRCVVAMEACCGAHHLGRVLRAQGHEVRLMSPEYVRPYVKSQKNDDRDAEAIAEAATRPTMRFVELKNEEQLDMQTLHRARDRLVGERTALINQLRAVLFERGIIVAQGRRKLERQLTVMGTQVEALSQRMRMLIQDMRSQWHELDRRIAEFDKELADWARDDEAARRLRTIPGIGVLNATALVAAIGHGESFARGRDLAAWLGLVPRQVTTGGKPRLVGITKRGNKYLRKLLIHGARAALPTLLESPTPLGGWLRGLMARMHKNADVVALANKLARIAWAVLRHGESFSIELSTTA

SEQ ID NO: 367656 - protein, 347 aa, unidentified
MDVHKETISIAVMNSAGKVLMESIIETKASTILQFFSGLEGDLRVTFEEGTRAAWLYDLLKPHIRHIVVCNPRKNALLKEGNKSDRIDARKLADLLRLNYLKPVYHGENGIRMLKELSRTYLTINRDLVRVMNRLKALYRGWGIPCGGKSVYSPRNREDWLNKIKETGVRRRAEHYYQQLDALQQLRREVRRDLLQESRKHSAAKILRGIPAIGPIRSALLVALIQTPNRFRTKRQLWAYSGLALETHDSAQYRCLDGQIIHSQKPQQVRGLNHNHNHDLKSIFKGAAQNATAGSGPFRDFYERSLQKGTKPSMARLTLARKIAAITLTLWKKGARFDPEQLKSQAA

SEQ ID NO: 367657 - protein, 424 aa, unidentified
MKPRRQTTKVRMEKLDDLYPHCAGLDVHKAVLTVCLIAGGTEGELAEYETSTGELRRLRDWLIEKGVTHVVMESTGVYWKPVWQILETGRFQLLLANARQVRNIPGRKTDQNDAVWLATLLRKGLIPASFVPPAEVRALRDLCRSRASLIHDRTRIVQRVEKVLEEANLKLDTVVSDLMGISARRMLDELGKGNNDPAALAELAVGRLRSKIPELIPALEGSFLPHQLFVLQELLQHHDELSSRIERFEQEIDRYAPPFEKAVERLIDIPGLDRRSALAVLAETGQDMSVFPSPQQFARWARVCPGNQESAGKRKSGRTGKGNSWLRAVLVQCAWAASHTKNTYLSAQFKRLVHRGSKKAAMGVAHSTLKIIWYLLHNQTRFKDLGADYFAKRNLEGQTRSYVNRLKKLGYEVTLTSMAAGAVA

SEQ ID NO: 367658 - protein, 340 aa, unidentified
MRIATIGLDLAKSVFQAHGVDENGATVLVKKLHRKQMLPFFSKLSPCLIGIEACGTAHYWARTLAEMGHEVRLIPPSYVKAYVKRGKSDALDAEAICEAVQRPTMRFVPVKTVEQQAILMTHRARSLLVRQRTMLANALRAHLAELGFVTNPGIANLAKLTDQVLANKDAFPSYASAAVEILIRQIMGVSSQIAVLDQQLAAWHAESEASRRLAAIPGLGVITATAIAAIVADPDQFRSGRQFAAWLGLTPQQHSTGGKTRLGGISKQGDRYLRRLLVVGATAVMRHIKDKPTPMADWIRKLSEKKPFRVVSVALANKLARIAWVVLTRKEAYGPYQLTT

SEQ ID NO: 367659 - protein, 346 aa, unidentified
MKYYAGLDVSQQTTSICIVDDEGKIVAERKVASCPDAIGQALEPFSVTRAGLETGPLSVWLWNGLKDRGIPIVCMDARHASAALKMMPAKTDRNDAIGLAQIVRTGWCKSVHVKSTASHEARALLAARSQFVRTRCDLENQIRGVLRTFGILFGKRVGGFARRAEEIIDGELDASLTIRAVVEALMRARANILEQIRHLEATVRSLARQNKVVRRLMSVPGVGVITALGFAATIDDPTRFKRSSSAGAYLGLTPRIYASGETMRSGRVSKRGDDFLRRSLYEAANALLTRIPQFSPLKSWGLRIARRGGYRKAKVAVARKLAVVLHAMWISGEPFRWSSLKPSELA

SEQ ID NO: 367660 - protein, 356 aa, unidentified
MIVGAFDVHRRQITYDWVDRETGEARRGQIAPATREGLRGWLGELPPGGGDFAVEGCTGWRFVAEELGAAGLTSHLAEPADTATLRGRKRRAKTDRGDARHLRELLEQERLPESWIPPAHILDLRELVRLRKTLIDQRTQWKQRIHAVLFHHGLPTPPGALSTQAGPAWLGGVCLPPPSRLLVDVGLSEIDTADAWLEPIAGWLRAYARRQPGCCALMRELYGVGSLCAPTILAELGDARRFAGGDAVVRYAGLDVTVYASDGKRSPGHLARQGPEVLRWALFEAAKSSARRTAPDHAYYQQVKDRLTANRATLSTARKLARHARHVLVELGEQALAPVCPDQLPPLLAAPLPEAA

SEQ ID NO: 367661 - protein, 346 aa, unidentified
MDQIIRIGMDTSKHFFQLHGVDASERPVLRRKLRRHEVLVFFAKHPPTIVGMEACGAGHYWARELCKLGHEVKLIAPQHVKAYIKRNKNDGRDAEGLCEAMSRPTMQFVAVKTEEQQAALMLAGVRQQLITRRTQLGNAIRSYAAEFGLITAKGLVKVEPLLAQIAQDESLPALAREMFTLQGRDYARLQVELKAVEARLMAWHRANPDSRRLAKIPGIGPIGATTLVMKVPDPRLFPSGRHLAAWIGLTPKDHSTAGKTRLGKITRAGDEMLRSVLVAGATSVIQQAKKGRGRPSPWLVALLGRKPPKLAAVALANKTARIAWRLLMTGESYDGARMPVASAPAA

SEQ ID NO: 367662 - protein, 354 aa, unidentified
MEREKRYVGIDLHKNMFVVCYLEAGEEELKRYEFSKEGIEEFKKDLRETDELGVEATTNARYLVREVEEGVERVVIINPLQFKVISTSVKKTDKEDAKVIAKYLSKEMVPEVRMRSKEEQELSSLIVTRDKLTKLRAVLKNKLHGIMNANGYVSKKEQFSSEKSLERMMELKISDTSKLEIKIIIEQIRSLTKSIEEITKGMKERGEKLKGYKGITSIKGIGDVSGTIILNAIGEIKDFKKEDSLSAYFGIVPRVNNSNETIRQGRITKRGHKIGRTALVQSTLVAIRYSPYLRSFYDRLKKNKGSGKAIIATSRKLLGIIYRVLKYELEYEDFSQYKLKEYCRDVKKYKLAMI

SEQ ID NO: 367663 - protein, 421 aa, unidentified
MNRLTDTQYTAYVGIDWAAAKHDICVQAAEGGRREFARISSQPEGIEAWAQDLYRRFGGPIAVALELSKGPIVSALQKYDFLVLYPINPSTLAKYREAFTPSGAKDDPTDAELAVDLITRHPERFSPLKPQSVGMRKLIGLVEQRDKFLSDRGRLVNRLGHALNQYYPQVLEWFSEHHTAVFCDFVNRWPTLNQAKRARKASLERFFKSHHVHSVPLIQKRITAIKAAMPLTLDPAVIDPHRLQVEILIEQLRITIKALKRFDDQITITANKLPDYHLLFSPLPGAAKVLAPRLLAAFGEDRQRYPQADALQKYSGIAPVTKRSGKSTWVHWRWQCPTFVRQTFVDWASQTINKSAWAGAYYRQQRAKGCSYQVAVRGLAFKWIRILHRCWQDRTPYDESKYLEALRRKGSPLLKYLAEPV

SEQ ID NO: 367664 - protein, 319 aa, unidentified
MYRIIKIGMDVHSTNYTLCAMEPVIGAEDRIFANIKVTPDYKNVLMFIENLKLKLGLNDTYDIECGYEAGCLGYSLYNQLTAAGVRCVILAPTTMLTQQGQRIKTDARDAVMIAQCLSYGGYHPVYIPAEEDDSVKEYLRMRDDHKLALKKVKQQINAFCLRHGHRYEKTKWTIAHLKWLKQLELSALYRETLDEYMASYDEQTAKIERFDKRIEELASQERYQKKVKKLGCFLGIKTHTALSLIVETGDFERFAKGNVYAAYLGLAPGERSSSDSINRLGITKAGNQHLGLLLIEASGGICKGAVGHKSRDRMEIQQM

SEQ ID NO: 367665 - protein, 453 aa, unidentified
MTKPKTGDHPELKMVNPAAAAIDIGSTMHMAAVNPDTDIMPVRAFGTFTQDLHDLADWFRSCGVTSVAMESTGVYWIPAFEILEAHGFEVILVNARYAKNVPGRKTDVSDAGWLRQLHSYGLLRGSFRPDAEIATLRAYMRQRERLTEYAAAHIQHMQKALMEMNLQLHHVVSDITGATGMKIIRAIVAGERNPDVLADYRDVRCKSSPETIRAALVGNDRAEHVFALAQSLDLYDFYKAKIAECDLRLEEAVAALSVKAGEDLPPLPKARIKGRQVNAPAFDVRAALYGVLGTDLTQIHGLGPSLALKLVAECGTDLRAWKTAKHFTSWLCLAPGNKISGGKLLSSKTRRSSSRAAALLRLAATTIGRSNTALGAFYRRLSARIGKQKAVTATARKIAVLFYNTIRHSMSYQDQGAAAYDERHRQRVLANLQRRAKTLGYTLAPVSSEPAVS

SEQ ID NO: 367666 - protein, 345 aa, unidentified
MSYFCGIDLGAKRSQVCIIDNDQKVLVNRKVANDIEVIHRLIRPHGRVPTVIESTFNWYWIVDGLQDRKVPVTLAHSLKLAAISSAKVKTDKRDALVLAQLLRANMIPTSYIYPAEQRPLRDLLRQRWDAVALRADEYRKMRGRLYREGITTVGSNEVRLMGAEEVNELIDHPLIRRQMMANIERVELLTRQIKAFEKELLAQVKTRPDFTNLKTIPGIGDILALTLLLEIGEISRFPKARQFASYCRVAPGCADSGDSHRRGRGNKQGNPYLKWALTQAAEYARRFDRQFADHFDAVLRKHPGASGTIITHCIVAHRIAFAVYHILKDGVPYNPEKLFRSNPES

SEQ ID NO: 367667 - protein, 311 aa, unidentified
MDKTIEFAQVVDRCCGLDVHKKVIVATVEGTGIARQTREFESTTRSLTELKEWLLELGVTHVAMESTGVYWKPVINILEPAGFTLLVVNAQHIKYVPGHKTDKKDSAWICKLLRAGLLKGSFIPDRAQRDLRDLTRYRRKKVQEVTAEKNRMLKVFEDANLKLSSVFSNVNGVTCTRIIDEILKGNTDPDYLASLCTHGKLKSSKEQIRDAVEGVFTEHHKFMLKAIRRSIASLEEEIAELETEIDRRCEPVQEEIERLCTIPGIDKTGAKELIAEIGVNMEVFPTAANLASWSGVSPGNNESAGKKKART

SEQ ID NO: 367668 - protein, 454 aa, unidentified
MDDKKRSPVVSYSTAYKAKAGTLKIESFFQEAKTLTEGGIPAMKKHTYRTKKVNDIDWAQLKERINANEAVFAIDIAKEKQFALLSTADDEVSQLVCWNHPEQTQELLAQLKNLGCPLTVVMESTGTYGDALRHQFRGLGFEVFQASAKRVSDAREIYDGVPSLHDAKAAVIITRLYRAGLTKLWRESTESERNLDALRREYDLHQSHYQRNQNRLESSLARHWPEILYLLSLDAVTLEGMLIEYGSPQRLAEDAQAAQKLKAWSKGMIQNDKIAQIIQSAEHTLGQPCLESERRYLQALAEEMRHSRQQQKQAKQALEAIVNADTGLKEIALTIGLVTTAVLLSSRLDPRHYTNARSFQKALGLNLKEKSSGRYVGQLKITKRGCSIVRRYLYFAALRLIKNDPLVKAWYQAKVDARAKNKTVIALMRKLAKALWHLALGERFDARKLLAVRV

SEQ ID NO: 367669 - protein, 349 aa, unidentified
MAHFVGLDVSVKETSVCVVDDAGKVILEQKVPTEPDDLIALLASLGVTYGRIGIEAGPLSQWLVNALTAVELPVICVETRHMKALLTAQQINKTDRNDARGIAQMMRVGLFKPVHVKTLVAQEQRMLLTSRKLLQRKLLDLECDLRGTLRNFGLKVGVVSGSRYEARVREIVEGFPRLGAIAEPLLNVRRVMRQQLAVLHKMLLDTVRDDPVCRQLMTAPGVGAVVALTYRATIDQPQRFVHSRAVGAHVGLTPKRYQSGETDYDGRVSKCGDALLRTMLYEAAQVLLVHSRKWSWLKAWGMRVAQRRGLRRAIVAVARRLAVVLHRMWVDASEFRWSKNSAVVAPTIA

SEQ ID NO: 367670 - protein, 322 aa, unidentified
MKKTVEYEQVFERGCGMDIHKDSVYATVMGEGINTETRVFKTTTRGLRELGAWLTELDVKAAAMESTGIYWKPIFHVLSEFPIELMVVNASHIKNVPGRKTDKADSQWICKLLISGLLKGSFIPPADIQKIRDLYRYKKKLVHYISSERNRIIRALEDANVKLSSVISDTSGVMATHIIEGLLAGRKDLKNLVMERYHHRVKASPEEIVEAIDGKITPHIRFLINCIQKHISALHQQIAEVDAEIDKYVKAYETQIELLESIPGVGREAAISIISEIGVNMDFFPSEHHLASYGGMCPGNNESAGKKKVVERAKGINILTHI

SEQ ID NO: 367671 - protein, 314 aa, unidentified
MASRPERFVGIDVHKDTLEVHLEGQDERWEYSNDTAGIGDLVTTFGPLSPTLVVVEASGGYERAVVSQGYAAGLPMVVVNPTRVRRLAEAMGIIAKTDAIDAQVIARFASVVHPPVREPQSARQQHLNALVTRRRQLVAMRTAEKNRLSTCPALVRAGVERHVAWFDAEIEELEDEIHDMLVHDPSWHELVELISSVPGIGEVTAATLVAELPELGTISRQKIAALAGLAPYNRDSGPRRRTRRIFGGRAQVRCVLYMATLSATRHNPVIRRFYERLIERGKEQKVALTACMRKLLVIVNAMVRKQEHWQYDPA

SEQ ID NO: 367672 - protein, 348 aa, unidentified
MDKIIRIGIDTSKSVFVLHGVNAADEPVLRKKLRRRQMLDFFRIMEPTRIGLEACGAAHYWARELMALGHAVVLLPPQYVKPYVQRGKNDAADASAICEAMSRPRMRFVPGKTAEQQAALMLMGVREQLIARRTQLANMIRGYAAEFGITAARGLDKIEPLLARIATAADVPELAKELFAALAEQYGELKPKLRRIDAQLLAWHRQNELSRRLAQVPAIGPIGAALLAMKVPDPRAFRTGRDFAAWLGLTPKDHSTAGKQRLGVITRAGDEALRSTLVSDATAVIQQVSKARGNPSPWLIALIKRKPPKLAAVALANKTARIAWKLMVSGEPYDRNHGAAARTVGIAA

SEQ ID NO: 367673 - protein, 391 aa, unidentified
MIYAGIDIGKNKHEIGLVNEEGVRLGKSLTFTNTTEGAKRMFAYIHSLIPKDEKIVICMEATGHYWMALYSFLLKENLDIVVINPIQSDSFRNFYIRKAKTDSVDAFLLAEIMRFGNYTKTPLSDEKLAALRQLSRFRMSMVDTCSSFKCQAVALLDQVFPEYAALFSDVFGKTSRELLLQFTTPEEILAVDTDKLTGILLKVSRGRLGKGKAEEIKQVAKTSFGVTYAKDAFTFQLKLILEQIQFIEKNIEELDNKIEKYLSGINDVVTTIPGVGSVLGAIIVSEIGDISRFNDCSKLVAFAGLDPSVRQSGEFSGTKNHISKRGSPYLRRAIWTAAMVAAFHDPVFSAFYQKKRAEGKAYGTAIGAVARKLTFTIFAVLRDNKPYEVKQ

SEQ ID NO: 367674 - protein, 373 aa, unidentified
MPKYSTAFGMDVHLRSTTVCALDADTGEAVARRFPGNPWGEIAGWMDGFPGPSLAAYESGYLGFAPQRELAGLGVECVVAAVSKIPRSAADSASKSDRNDAARMAKAILAHDISPVWVPSPEVEGIRDLAGAYDGATARLATAKQRLLAFLAKRGFAYGGTTPAGKPRKYWTYDFLRWLDKVRPEDDGGIRTLAALRNEVEAAAEARADLLSEYRAAVDASPIAAEVAALQSIKGCAFALAAAFSAEVGDFTRFRSGRQVTAYFGLAPSQRSSGDSVRLGGISGAGNALVRKLAVEGSWCYAAARHQPKLMPRDTGVPLEIRMHGRKGSERLLRRREEMLARGMPAAKANAATAAELVRWLRALGVMCREGAE

SEQ ID NO: 367675 - protein, 308 aa, unidentified
MTCTGIGIDVSKATLDISVHRHKKSLRTTNDPAGWKQAVAWMQPFEPNQVVLEATGGYEQDALDAFYNAGIPIIRVNPRQARDFAKAIGQLAKTDHLDARMLAHMASVIELHRYQPRTDQAQELHAYHQRRQQLVQMISAEKQRRRLTRNAVLLEGLERHIAQMECDRAKLDKIIAGLLQGTVQAQVASTIKGMGPVAVSTLVCEMGELGYLNRKAIARLYGMAPLSKDSGQFSGKRTTWAGRRAPRSAMYMACLSAVRYDPVLKPFYQRLVANGKPKKVALVAAARKLVTMLNARMREALKAGAHLA

SEQ ID NO: 367676 - protein, 333 aa, unidentified
MVYAAIDIHKRIFQAAVLDAETGELVQERLPATREALNDWATRWQGKLEAVALEATTGWRWVARELQTRGVDVGLCDPGEARALGGSKRRPKTDRLDAAWLARLLAKEMLPEAWLPPEEIQYLRDRTRLRHALARDRNRWAQRLHALLTHEGWPCGCGRLLTVSGQRWASALSLPAPARASVEAMLAIIRALEQEIELLDGELRQLARSDQRLQALCAIFGVGPVLAAHILAELGDVRRFRRARQVVRLSGLDPVVSESANVRRRGRLSKQGSPELRWALAEAAHHACRRRSPDHDLYRAVKGRRGGQRATLTVARKIARRAYHVLNELEQAA

SEQ ID NO: 367677 - protein, 320 aa, unidentified
MMAQNNLVVVGIDVAKDKVDVCIRPLPLRRTFASTAEGRRELVSWLRRKKVGKTVMEASGGYEREWAKALRGAKIEVRIVDPKRVRDFARSAGRLAKNDTIDAEMIAWFAETFGEAPGQAYDAERDKLAQIVNARLGLLDIQTEILNRGEHAGPEAVQKMQARMLKNIAVEIAKLEAVIAAMIEATPNFAERAEIIESVPGLARTTSATLIAKMPELGQVNGKIGAALLGAAPYDDDSGRRRGERHIKGGRRKVRNAFYMACLGAATRHNPVLKAFYDRLIAKGKEKKIALVACMRKLITILNTMIARRQKWDPSRYALN

SEQ ID NO: 367678 - protein, 424 aa, unidentified
MGDRQQWYAGVDWGSQSHHVVLTDGDGRKIGERSFKHGGEGLAEMAAWLMAASCAAEPGQILAAIEVPHGPVVETLIERGFKVHAINPKQMDRFRDRFTMAGAKDDSRDAEVMASALRTDPRCFRPLAAADPIIVELREWSRIAEDLGVERNRLVNRLREQLWRYFPALLELEDDLGAEWLLELWEAAPTPDTASRLREATIAKLLKRHRIRRFDAAFVVNMLRRPPVRVAAGTVEAASAHVALLVPRIRLLNRQIKDAHSRIDGLTARLMPAQEAEPGQKKQHDAEILASLPGVGRTVLATLLAEASDALQRRDYAALRSLAGVAPVTKRSGKSCIVVRRQACHDRLANAVYHWARVAIQHDPRSRAKYAELRSRGHSHGRALRSVADRLLNVACAMLKSGVAFNPSQPLKNKLDKRWGVPSP

SEQ ID NO: 367679 - protein, 321 aa, unidentified
MSESYNVGIDVSMDRLDVEIRPGGRGFCVVNDAAGWIELVARLRQCAIVAIGLEPTGGYERGVVRALLAAGFSVRRINPNKLRQFARARGALAKNDRIDARLIAEYVALMPTRAVQRNPVVERLAEIVTMRRQLCEEHVAIENQASHLEDAVLRRMAKRRLARIEADIALLGKRLAEHVAAEPVLARRFDLLCSMPGVGATLAYTLLALLPELGGIGRRQIAALVGLAPYDFDSGKFRGQRHIYGGRMPVRNVLYMAALAAFRFNPVLKAFHRRLVGAGKKPKLAIVAVMRKMIVALNAMLRDGTQWADRHSSGRHTVPAT

SEQ ID NO: 367680 - protein, 367 aa, unidentified
MKKVSTAAAKQSSNFSQQKLTIGLDLGDRSSWYCVLDEAGGVLLEQKLSTTPKAMKEVFGAMPRSRVALETGTHSPWVSRALSELGHEVIVAHARNVRLIGESRKKDDRLDARMLARLVRIDPQLLAPVKHRSAQAQADLMAIRARAGLVRARTSLINTARGVTKSYGERLRGCNPRNMNPEKAQELSPELQAALGPLLGEVESLSERIGEYNERIEQIGKESYPEVARLKQVKGVGTLIALTYVLTLEDAHRFGKSRDVGCYVGLQPGRRNSGQSEPQLHISKEGDRYLRTLLVQGAHHILGPFGADSDLRRWGLKLAERGGKNGKKRAVIAVARKLAVLLHRLWVSGEAYEPLRNQREVALPAAA

SEQ ID NO: 367681 - protein, 341 aa, unidentified
MKNKSFIGIDISKNVIDASIFCEGTPIKDFPHAVFNNSRKGFGEMCTWLKKNHVVLSNCLFGMEFTGSYSMELEKFLNTRNYQFCMLSTHVVKHYPMGPKDKSDKIDSAKIADFLYRYNGTECVKPYNMPDKTMQRLKALMNERKFLVEQRTCFMNRRQLCITKEDAQLYDGYIKKISRDIENIELEEQKLLATDDSLLSTYKNLLTIPGIGFVNAINVIVITRNFTAFETARQYASYVGVAPHFRTSGTSVKWRPRPSARCDGQAKADLSMAATVVVQYDAELQSFYNRKLGGKQDSDTKRKALNAVKFKLVLRMFAIGKQNREWEPLDSKSSNEKLAIS

SEQ ID NO: 367682 - protein, 466 aa, unidentified
MRQRKQAVKRSMTTTPSNPLELLNPNAAGIDIGAAQHYVAVPAGRDSDGQDVRCFSAFTADLHALARWLKACGIDTVAMESTGVYWIPLFELLEAQGLQVHLVNPRSVKNAPGRKSDVLDCQWIQQLHTYGLLSGAFRPEEQICVLRSYVRQRAMLISSAATHIQHMQKALDQMNIKLHQVVEEITGATGMRIIRSILDGQRDALSLAQLRDARCKHDVATIAASLHGNWRKEHLFALKQALELFDFYQSQITACDSVIEEHLHSFDAEHRSPPDAPGAAGKGSKHPFGFDAHGHLQRISGVDLTRIEGINVTTAMGIIAETGVDMNRWPSEKHFGSWLGLCPGTKISGGKRLSSRSKPTANRAAHLFRLAAYSLHRSKGAIGAFLRRKKAQLGAPKAITATAYKIARIFYNMLKHGTEYFALGQDYYEKRYRDRLLNNLKRNAQTLGYQLIQLTENTKEMVNNPV

SEQ ID NO: 367683 - protein, 331 aa, unidentified
MRWKDRTVIDGILGIDVSKNTLDVSIAICTKVRSKSFANSSDGWRLLLDWLIAQNIQRVHACLESTGRYSLGIAYALYEAGHVVSITNPAQIRDFARTKLGRNKTDGVDASHIREYCELFKPSPWEPPTQAHRRLGELQTIRAGIIAGLTEWKNRKNSGIVDVEAQALADATISHFTSQLGAVDEAITLTIDNDCDLRSKRDLLLSISGVGETLAGVVLAELPGPDVLRSSAEVVAYAGLNPRQYQSGTSVVRATRISKIGNAVLRAALYMPALSAMRYNPAVVALVTRLKSQGRLKPKQIVVAAMRKLLVLCFGVLKTRRPFDAAIAMGC

SEQ ID NO: 367684 - protein, 315 aa, unidentified
MSEVDCFAADVSKRELVIAVYPGEVGVKRIANQDAAISAWLDTLPAGSVIAMEATGTYHRRLADLAHGRGLVVYVVNPRNVYYYVRGMGARGKTDPSDAKLLARYVAHERAQLHPYVPPSALCERLTTLLERRAVLVRSRQALTQSLAELPALGREKRNLFKAIATLLSGIDRELAALTSSDASTATLVTRLKTISGVGPLVASLLCALFKRFAFRHADALIAYLGLDPRPDESGQHRGRRRLSKRGHPEWRRLLIAAAMSAARTKIWRDYVTLQRAKALPATAVHVILARKMLRTAFALFKNGQEFIPPRVRPT

SEQ ID NO: 367685 - protein, 401 aa, unidentified
MCPPVSNLWRIMVMARESVPNTRPIALDYDSTLVLAIELSNTSWVLAAQVPGLPRVKAKQSIEPTAEALLAAIDGYRERARAAGRSVERVVATYEASWSGFWLARWLLRRGVETHVVQPSSVPVDRRARRAKSDGIDAELLLRTLLAWLRGEPRVCSMVPIPDEADEDRRRRVREREDLVTERVSLVNRISAVLATLGVGDYNPLRRDRRERLEALRTALGDPLPPHAHARILRMLDRLELVCAQIAELERERDAVLEEEAPDKAEEMIQRLAGLQGIGVQSATVLVREAFVREFANGKALGSYAGLSPMPFSTGGTEREQGINKAGNRRLQTVMIELAWLWQRYQPGSSQVIWFRERVGSTGKRMRKVMVVAMARRLLIALWRYATQGVVPEGAVLKPMP

SEQ ID NO: 367686 - protein, 412 aa, unidentified
MDVILDRCAGLDVHQATVTVCVRLPGEGGARTEVLQTFATTTPALLTLRDWLTAHRVTHVALESTGVYWKPVYYALEDAFTLLLVNAAHMANVPGRKTDVADCTWIAQLLECGLLRGSFVPPPAIRELRDLTRYRKALLQDRTREANRLHKVLEDAGIKLATVASDVLGASGRAMLTALVAGTTDPTVLADLARGRLRAKLPALQQALTGRFRGHHAFLVSHLLAHLDYLDETLAGLSTAIEAQLAPFAAAVAQVQTIPGVKQRSTENILAEIGLDMTRFGAADHLTSWAGICPGNNESAGKRRRGRTRKGDRWLRTALIEAALAAIRVKGSALAARYRRICRHRGHKIAIVAVARAILEIIYHILATGRPYHELGADYIDRRDRDRATRRYVRLLEHLGHQVTLGPASVAA

SEQ ID NO: 367687 - protein, 342 aa, unidentified
MDHIGIDVHKNASQVCIRTETGQLIERRIRTDRDSFVKWLGKRDKARILVESSTESEWVARCLEELGHEVIVADPNFAPMYAQRSRKVKTDRRDARALCEACELGAYRPAHRSSEASRALRAQVAVREALVQTRTRHISLIRALLRQHGYRMRSGGGATFAERVGELELPEALQDQMAPLLEVMRSVNAQLKAADKALAEQAKSHEVAKRLCTAVGVGPVTAISFVATIDRVERFAHAKQVRAYLGLVPRELSSGEKQRRGHITKAGNRRMRALLVEASWLVLRSQRADTEALRTWANRIALRRGKRIAAVALARKLAGILFAMWRDGTDFGQTRTSAAHAA

SEQ ID NO: 367688 - protein, 429 aa, unidentified
MTRISVGVDVPKNRSTVCIMDQDGKFIMRPFLVWHSTEELDFLADTLKRLNGEVRVIMESTSVYQYPIALQLKERGLFISIVNAYEMKQFANIDFRGGKTDKKDSRTIASYGISYWDKLVEWQIPKDTYFNLDLLNRTYMNAKKHRQIILQELQHYIDCAMPGMDKELHSLNLNTKKDFMLDFVEKFWHRDEVVNMTEAEFTEVFTAWAKEKGYRPGKGKAAKIYAIAKSCIPYYPANPTVKTILQCIVDKLSGVNRTLVTIVTQMIEEAKKLPEYQIVREMPGVGDPLAARFFGSAGDIRRFKNSKALVAYAGIDSPPDESGDFSSTHRHITKKGSKVFRDTGYEIMMALRAQKRTWEKVRKNPEVYDYMLKKKAEGKPRKVAKIAALNKFLRIVYARIKELYDNMALAERAKTKTRSKTRAKTKVTA

SEQ ID NO: 367689 - protein, 402 aa, unidentified
MNCVGIDISKGKSMIAVMRPFGEVVVSPFEVLHTDSELSKLAKLLKSLDGETRVVMESTGNYHAPVAWLLHDAGLYVSVVNAMLVHDYGNNSLRRAKTDKKDAVKLANYGLDHWLTLPRYVPEEDTRLMLKACYRQYQQYSKVQTMLKNNLISLLDTTFPDANRLFTSPPRDDGREKWIDFVATFWHRECVCDLSEKAFAAKYQKWCKKYGYNFSEGKALDIYAAARGHFGVMPKTDTAKLLVEQAISQLRATSAALAALKQEMQALAASLPEYPVVMEMFGVGPALGPQLMAEIGDVRRFHSKKSLVAFAGIDAPPYQSGQMDIRSRSISKRGSASLRRTLFLVMGVLLQCAPMDEPVYQFMNKKRSEGKPYRVYMMASANKFLRIYYASVKAYLDSLEHN

SEQ ID NO: 367690 - protein, 375 aa, unidentified
MTNNTIKYVGLDTHKDTIVIALADERRSGEIRNYGTIPHTIEALNKFLRKQISQGVELRCVYEAGPTGFGLYHYLKNNGIDCIVTAPSMIPKKGGQRIKNDRRDAAELARLHRSGDLGAIYVPEPEDEAMRDLIRCRDDARIASRKAKQRLLSFLLRHGRNYSGKSRWTRPHYNWLSEIKMEHPAQQIALEEYIRTVQETNDRVSLLTREITKLVKEWRLEPIVTAIQALRGVSLLTAATVTAEIGPLGRFAKPTELMGYVGLVPSEHSSGPNIKRGGITKTGNGYARRALVEAAWSYRFPARVTRHLLKRSRQLPKTIRDIAWKAQLRLCGRFRRLFAQGKPKQVVTTAIARELIAFIWAINNEVVSIKEGMRS

SEQ ID NO: 367691 - protein, 401 aa, unidentified
MISVGVDVSKGKSTVCILKSYGEIVCSPFEIQHVEKDLEDLDSLLKKLTGEIRVVMEATGIYHLPVLTFLQGKGYFVSVINPFAMKKYVKDNSIRGAKTDKLDSIMIANYGIDKWFKLQKHEGDEETYAELKLLGRRYRYYMELHVKALQELTHILDYTMPGIKKLFNSWDEASGKDKLSDFVERFWHFDIITAHSLDEFVEEYLIWAGKKKYHRSRSKAETVYELASGGIPTLSSSTPSTKMLVQEAVTVLRAVDNSLSNILSRMQELAKSLPEYSTVRAMGGVGDVLAPKLIAEIGDVRRLHSAKALIAWAGIDPPPYESGQFVGSKRRITKRGSSTLRKVGYEVMRVLKSHKAPKDDTVYNYILKKESEGKSKKHAKIAGLNKFLRIYYARVMEVYQQ

SEQ ID NO: 367692 - protein, 382 aa, unidentified
MNKLLKFSVGIDISKDKFDACVSVIDDQQKVTIRASRTFKNNFKSFKDFLTWVNRHCKQDLPVYHVMEATGVYYEKLAILLFNNQCLISVVLPGKSKYYLKSIGLKTKNDKIDAKGLSRMGAEQKLDQWEPFSKYAYSLRSLTRQNESLNNQKTVLINKLHSIDNSGYSNNKIIVKQLKQFVKLIDKQLSEISKEIEETINKDIVIKEKVDRICKVKGLGLLTVATIIAETNGFILFKNQRQLVSYSGYDAIENSSGKHIGKTKISKKGNAHIRRILHMPSFTVTKYEPHFKLLYERIYKRTKIKMKGYVAVQKKVLILIYTLWKNDLEYDPNYNKISGNDEPKLLFSLGFEKSEKKVALKKSKATLDKLPCKESPEVLFSL

SEQ ID NO: 367693 - protein, 340 aa, unidentified
MKTYIGLDAHSTSSTFVALNEKGKEVLCTQVPTNERQFKEVLRGIKGEKYLAFEESNLSRWLYVLIKPEVEKLVVCAPQFFRKKSGAKTDVRDGRYLANELRNENLVEVYRNDTDELLELRSLVSSYDSIVRDLVRSKNRFKALFRSQAITEYGSKIYSNIEAIDQLENRWDQFNADSLMFQIQMLEETKKRYVDEFKRNITKHKVLKLLTTIPGIDVVRANQIAAITCDAKRFKNKHRYWSYCMLVKHKQISNNQVYGQKFAHGRSELKGIYMGCALSQMAGTSSFRKYYDALLSKGISEKKARKALARKTASVALAVMRREKKYNDNWEKDLEKISSL

SEQ ID NO: 367694 - protein, 412 aa, unidentified
MDVIHPRCAGLDISKKDAKVCVRINGAGRRKTSETVTTFGATTRQIMSLRDHLAAQQVTCVVMEATSDYWKPFYYLLEDLPGVEVMLVNARHVKNLPGRKTDVADATWLAQLGAHGLVRGSFVPPEPVRQLRDLTRTRTAVTRERTREIQRLEKLLEDAGIKLASVASDLTGVSGRAMLEALIAGQSDPAAMADLAKKRMRVKIPQLTEALHGRFTSHHAFLTRMHLNLIDQHTAAIEQLTDRIEVVIEPFRSFRDLICTIPGIGGRTADIIVAETGADMTRFPTAQHLASWAGTTPGNNESAGKVKSRRTRPGNPYLQGALGTAAMSISHTHGTYLAAKYRRIATRRGPLKANVAVQRALLVAIWNTAMTNTTYHDPGGDYFTRLNPQRARNNAVRQLEAMGYHVTLDKAS

SEQ ID NO: 367695 - protein, 370 aa, unidentified
MNKKLLSRPLGRCIGLDVHLDFIEIAICEEGQVYSAGRVPCTPEGIGTLIDSLLPSDRVALEVTGSSREIARLLEPHVKKVIVVSPGDTGISQARAKTDRLDARTLAKLLWTGELEAVWIPPDWTCRMRRRLARRDQLVRARSRVKNELHAVLIRCLKGRPPVSDLFGVRGRDWLRGLELPEVEEETVNAGLRHIEFLDSEIEQVERLIAKDALRSPQIKRLMTVPGVNVICAAIFLAAVGDIHRFKGSRPVVAYLGLDPRVYQSGSAAARGGRISKQGSPRARWALVEAARSVAHQPGPMHALYERIRARKGHNAAVVAVARKLAVLFWCMLTREQDYAHQQPSLTAQKLRRLEVKAGDPTRPGKPTRV

SEQ ID NO: 367696 - protein, 343 aa, unidentified
MYYIGLDVHKKTISYCVKDAAGRVYQEGKMGSTRRELDGWIRTMPQPRMIAMEATIFTGWIYDHLLPHAEKVKVAHPLMLRAIAAAKKKNDKIDAGKIADCLRCDFLPECHMASTEIRNRRRTLRYRNLLIKQMVQMKNRVSGLLMETGVSYNKQRLHKVGYFAELMSTNEEVNESIRPLLKLSREMICRSQKLDYALVSSLERDPLLKERLRRLRTVPGVGPITALTWALEIGDVTRFTSIKQAISYCGLCGDEKSSADKVMRMPISKQRNKHIQRVLIEAAKLAVRECHELAVIRARELERGNPNRATLAVARKMVCYMLAVERRHQDFVPAEKFSRTPAA

SEQ ID NO: 367697 - protein, 425 aa, unidentified
MKISQKGQKIKLNHVMDISVDVHKDVLNFFFETGDKEYSDECNNRTTVVMGRLEAYRRIASAQGMETLRILCEPTGQYHNKLLRIARQMGFLTCFVSTESVARFRVIETNDTGKTDTKDPRVIRTLGLLDKVITHRMMGDEYMMLRKLGTMYDEVDQTITRLRCRIDRLLVDLFCDYSFKKDFLYSHSGLGLIEAYGCNPYRIVKAGYGKFSARMMKAAPRIRKQTLTRLWDDAQSSVRNEQPDGYIAAMETHLRQLIDDWAVQIRRKEEVVRSMIEILHRLRDDDPRIPPSTPGVINDKNMARLLGETGPLRDFAHWRMLMRYGGLNIRMRQSGKYQGLNKISKKGRPLLRKVLQHIVLPLVREGYLYGAYYSRKKDQEKMPGNKAMTCVARHFLKKFYGWYKSGEAFCHERFFSCETQCTKVA

SEQ ID NO: 367698 - protein, 318 aa, unidentified
MSEAVFIGIDVSKDTLEVASSAQASSWQAVNDTAGIEALSTQLLAMGPALVVLEATGGYEFEAACALQAAGLDVAVVNPRQARDFARAMGALAKTDSLDAKMLAAFARVLHQHPERSRFIKPMADEALQRLQALVLRRRQLVGMLTSERQRLRMSHASARPSIERTIEFLKAQIHDMEAEAGEHVRAHHGALAAALSSVKGVGAATVSTLLAELPELGQLCRRRIAALVGVAPLNRDSGQMRGQRSIWGGRADVRKTLYMATLVAVRHSTVFKTFYERLVTAGKPKKVALVAAMRKLLTALNAIAKSGKHWEEPVHAA

SEQ ID NO: 367699 - protein, 392 aa, unidentified
MIVVGIDVASQKHDYFMLQAETGMVFRSSSVTIQNNEEGYKKLHKDIQTFCGATGDFNVRIGLESTGIYSTNITTFLFEQDYKVMMINPILTNMTRKASKVHSPKNDNLDSQTICKYLVDNKDSFTPYTSTLYHNQVLKSLSRKRYFIVNDLRKAKLSVNNLIQLIFPEFKELFSNIYGESALAVLKKYGSPAKLSKARSDKVASLLHGRCRCTAAQLIDAAKHTIGLKSDHYEFELADAIEELEHIQRRIDSYDAQIKKYVDMICPNLLSIPGVGYVTAGLIAGEIGDIERFHSVGALISFSGTDITVFESGKYKAQHCMPSKKGSKYLRYATFQVARVIWQHDPVFNAFYHKKLDENKHYYVVLGHIQKKVIRVIYSLMKSGSHYVVNNI

SEQ ID NO: 367700 - protein, 416 aa, unidentified
MELVVERAAALDVGKDEVVACIRVPDPGGAGRGRGRRRQEVRTYPTFTSSLEALADWLQAEGVTQVVMEATGQYWKPCWYVLEERGFQLLLVNARHVKLLPGRKTDVGDAAWLCELLECGLLRGSFVPPPQIRQLRDLVRYRKRLIQAHTAEVQRIQKTLEDAGIKLDSVATDVLGVSGRAILKALVAGERDPKTLAELAKGKLRKKLPQLRQALRGRFGEHHALLVGLALGHLEHLEGAIAALDGRIDEVIAPFAVARDRLDTITGVGKRAAECIIAEIGVDMTVFPTAGHLASWAGRCPGNNITGGKRRSGKPTKGNRWLADVLTECAWAAARSRDTYLAAQFWRLARRIGKKKAAVAVGHSILVIAWYLLTEDCDYRDLGGDFFIRRDSDRARQRAVAQLQALGYEVTLQPAA

SEQ ID NO: 367701 - protein, 358 aa, unidentified
MEVYVGMDVHRKRSQVALLDHDGGQLLNRNLPNDPAELTPILGALAPGTPVAFEAAYGWGWLADLLEELGLEPHLVHPTRCKAIASARLKNDKVDARTLAHLLRADLLPEAWIAPPQVRDQRALLRHRAALVRTGTALKNRIHAVLADRGVRVPQRLWSKAGRAWLAALDLPPAPRMIIDDCLAVLDQLTPIITRMERDLLAHARPDPRVQALRELPGVGRITAMTLVAEIGDITRFPTARKLCAWAGLTPQVRNSDRTIRHGHITKQGSAAVRFVLEEAAERAKTRPPFAGFYVQCAARRGRHIATVAVARKLLARCFHVLTQLDNHQHNHADHASEKVTSPGALEVPHVPATRPFN

SEQ ID NO: 367702 - protein, 405 aa, unidentified
MNAVGIDVSKGKSTVTIRQPGDKVVLAPRDYRHTQSSINDLITTIKCLEGETKVCMEHTGRYYEPVASWLSAAGIFVSAVNPWLIKDFGNESIRTPKTDKADAKKIARFALDRWAKLPQYSRMDELRNQLKTMNRQFGFYMDQKTAMKNNLIALLDQTFPGANSFFDSPARSDGRQKWVDFVYTYWHVDCVRSKSLEVFTEHYKNWCKRKGYNFSAAKAEEVYLAAADLIAVFPKDDYTKLLIRQAVAMLNVASETVETLRIKMDQTASQLPEYPVVMEMDGVGATLGPQLIAEIGDVTRFKHRGALTAFAGVDPRPNESGDYKRASNPTSKKGSPHLRKTLFQIMDGLIQRSPADNPVYAFMDKKRAQGKPYYVYMTAGANKFLRIYYGKVNAYLSPTEGAEDS

SEQ ID NO: 367703 - protein, 410 aa, unidentified
MRIIALDVHRSFAQIAILENGKIRDAGRVDLERSRLLQFASKLKPDDEIIIEATGNTSAIVRLLSSFVARIVIANPILVRAIAWAKVKTDKIDAAVLAKLHASGFLPEVWMPDEETETRRRVVAERTQLISQMTRLKNRIQSVLHANLIPPYKGTLFSKRGRAWLETQPLAQDQRRVVLRHAGELDRLGAELADVDKSLAQKALAEPRIKRLMTITGVNVTVAMSVLAAIGDINRFSSAQKLVSYFGLNPRVRQSGDKPAYHGRITKQGRAHARSMLVEAAWVISGVPGPLRGFFIRVRDKRGKHVAAVATARKLAVIVWHMLTKDEDYTWNRPALLDWKLRKLELKAGHPSRRGGKQKGSAAAYSDKSVRDSERETIGNAEQAYTRFVANWKQHLSKGRSSAANEVRLS

SEQ ID NO: 367704 - protein, 337 aa, unidentified
MVYGAIDLHARMSQIRVVDGAGQVLREVRVPTSAEALIGAFRDVGAVRILLESSTESEWVAQALEAAGFAVIVADPNFAPMYGERHRKVKTDRRDAAVLADANRRECYHAAYRRSATQRTMQQRLKARRLLVGARTGVISETRAILRQLGLRLGAGGSADIARRLTRLSLPPAVERMLAPLARVVTMLTQEIAVLDAACATAAAGDPVVPRLQTVPGVGPVVAWTFRAFIDDVFRFGHAGQVSAAIGLVPREDSSGERRHRGHITKAGPSELRSLLVQAAWACSHSRRSGPLRRWREAVAHRRGPRVAIVALARRLSRILYALWRDGTDFSVASLAA

SEQ ID NO: 367705 - protein, 376 aa, unidentified
MIAMTRPWPSVNESRLYVAFELSAKSWKLGITSGFGVEPWVQTVQAGDLKKLAQVLRRGRVHFRLGADAPVASCYEAGRDGFWIHRALTAMGIDNQVIDSASIEVSRRARRAKTDKLDALMLARMLVRYWMGEREVWRVVRGPSEADEAARHGSRERTALVKEQTRIRNQIRGWLATCGATLPRSQTATWWTRIETWCGTALPVPLQDRIARAEARRQLLAEQIAALNALQRAAVAAAPADSARARLVRLKGVAATSAATLLEEGLVWRNFQNRRQVGGILGFTPTPHQSGDVVRDRGISRAGIAPLQAISIQLAWNWIRWQPSSALAQWFEQRFAHGGPRARRIGIVAVARRLLILLWRVATTGVIPAGAQLKPV

SEQ ID NO: 367706 - protein, 382 aa, unidentified
MKGNVCGLDVHKDNVFVCILKENGEKILQRVGILTPELDALRDMLVSHGVGEVCMESTSIYWMPVWRVLESDFHLWLVNPLAIKQLPGRKSDVKDAEWIATCLKKDLVRGSYVPEEVIQQLRQYNRRVFDINKETVFLHNKLDAALQRCNIRLSNYVSNVDTKAYREVVEDLSKGVTDPGTLLGHIHKRTKNKWGEDVLRSALTGVVSEVDTELIGMYREELELLRTQKAKCLSRMREICQKHFPKQMKDLQTMPGVREQSATQIIAEIGVDMRTFLTAAMLVGWAGFKPRNDESNKKLKSRSITHGNKYLKKLMVECAWGATRTQGCFYSQFSYHQTQVRKKNAMKVRVAVARKQLVGIWHILSEGCTYKEYSEKKEEGES

SEQ ID NO: 367707 - protein, 313 aa, unidentified
MAFLHQQPQLCLGFDIAKDTITVSDGAITRTIANQRRAIRALLKGYKHIDLVVCEPTGGHEGLLLEECLRAGIACHRADTLKVKSFIRSYGTHGKSDAIDAGMLRAYGRERWAKLGLWQAPDADETDLRALVRRPQELISMKVAEKNRAKAPGGRKLASSFEAVIKVVERQIKVIDAAIRELIANSRTLKFRAAVCTAMDSLGPIVAAKLLAILPELGSMTRRKAAALAGLAPHPNDSGQKHGYRKIRGGRPDVRTTLFMPALRAAAGKGEFAAFYKRLVANGKKPMVAIAAVMRKIIVTLNARLRDAIIPQS

SEQ ID NO: 367708 - protein, 399 aa, unidentified
MSMAELRVALDIGSKQHRVGIGTADGKLLEEFEISHDREGFELFFSRISIYEKRLGLPVVVAMEGVGGWARPLDRMILRHDYQLLNVNNVKLARFKEIFAAPAKSDKIDTRKMLELMRMREVLPLAKAVVHRVGAIPSENEQLKRFTRRRRLLVEEKVRVVNRLQSDLHALSPGLLEITVAVDNLWFLNFLTCREDLTKLAGLKRASLLKINGVGKVYAAKIEAWQKHATFAEETAWVGEMVIADTQRVLDLVRQIHALEERIETISASSEIATRIRTIPGFGLVSSATLAGEIGTLDRFAFETSLALYSGMTRLDNSSGNYIGTKNTRQVNSQARAAMMTATARHIVNSPESKTYYDKKRAEGKTHNQAVRALGRHLIRVVWSMITHERDYIQKGPIT

SEQ ID NO: 367709 - protein, 389 aa, unidentified
MSLDHPFDGPTAIRTHIAAIFVSLELSRSNWLVTSLSPGKGEKMSKHSVAAGDTAELLALFAELRRKAEVRTGQSYPIVTIQEAGLDGFWLHRVLQQNGIESHVVDPASIATPRRRRRAKTDRLDGETLLRALLAYKRGEPRVCAMVVAPSPEEEDRRRLCRERRTLIEERITHVNRIKGLLFAQGISDYAPLRRDRRARLEALRTGDGRELPSHLKAQLGRALDRIELLVDQIKAVEAGQEALLAAARKPASEEAVPDPVTMLLALKGMGANFAAVLWSEAFYRQFANRRQVAAYAGLAATPWQSGGIRHEQGVSKAGNPRLRTTMIQLAWLWIRHQPQSALTRWFKERSQQGRKRAIVALARKLLVALWKYVTQGVVIEGAVMKPAA

SEQ ID NO: 367710 - protein, 468 aa, unidentified
MLDQHKKVNKNDRTRSLHSFKTIEPNAAGIDLGSREHWVAGPPRDDDRPNVARFGTTTPELVRLADWLKEQGVKTVAMESTGVYWIPLFEILESRGFKVVLANARQLRHVPGRKTDMIDCQWLQLLHACGLLRGSFRPSDDICRLRSLIRERNMMVSQRSDWVRRMQKGLDQMNVCVHHAVSDITGATGMAIIRAIVEGERDPQVLARLRDPRCRKTEAQIAEELTGNWRPEHLFNLSQSLRMYDQLCSVIDDYDREIITYISTLHPEEAKDIIVPPPVSKNKAKNIVKLGQESLRQALCRLCGFDLTTIDGIGVDTASILVSELGPRFAMFPDEKHFVSYLRLSPNLSISAGKKVPDKHKASTCTRIGSALRMAASTLRKSRSALGAYYRNVAWRKGASVAVFATARKLAQLVYRLVRYGQAYIDTGAQAYEDRVNQRRMKFYSKTLKAMGYNVEPAASGKELPALC

SEQ ID NO: 367711 - protein, 345 aa, unidentified
MERYIGIDVHRDSSTICVVSAAGKRVSQEVLETNGQVVVRYLKQLRGPLHVCIEESSWSEWLHEILSPHVAGLVVYQSQWTPGAKNDAIDAHGLAEKLRLGQVGPGVFKSPNRYRELREWARVYQALTRDVVRAKNRLKSQLQRRGVCCVGASVYDPQQRDSWLRQLPAAMRPTAQLLGLELDGLVDLRAQAEVELLEESHRHRIAKILETAPGIGPIRAALLMATVVTPHRFRSKRQFWSYCGFGVVTRSSADWVQTESGWVKAQSVQTRGLNRNHNPTLKGIFKGAAMTVIHQAQAGHPLKRAYARLLEGGTRPPLARLTIARKIAAAVLAMWKTEEAYRAGS

SEQ ID NO: 367712 - protein, 353 aa, unidentified
MIVIGVDPHKSTHTATALDPATNSDVGSVRIEASLAEYQRLISWAKAWPDRTWAIEDADGLGHHLALWLLARGEVVLDIPTTATARVRELSRGGRRKNDRIDAAAAASVAALQGDAREVYAETTADSLALLDERRVNLSHSRTRTVNQLHALLRDLMAGGAPTSLSPASATAALRGFRPRTGPDRTRVALAKELIADVRRFDEQLAANAKTMTVLLDEHGTRLREVDGVGPVLAARLLGRSGSPKRFASAAAYANYTGTAPVQIASADSSQHRLSRYGDRQLNSAIYTVAMIQIRMPASAGRAYYDKKIAEGKSPRYATRALKRHLASHLWRVMLADESRTVRIPSETAAIPS

SEQ ID NO: 367713 - protein, 398 aa, unidentified
MKTSGLDVHKDSIFCAIYDGKSHSEVKEFSTTTNSIRIMGEYLQSKRVKKVAMESTSTYWVPVWDILYEMGFDLKLVNPLHIKQMPGRKSDSKDAQWIAELLHKNLLRSSLVPSPLIQELRTYTREYRILTQEVTKVLTKIDRILVMCGIRLSSCISNMHSKSAIQIVDALIRGETNPDKLVGLVYGNRKNKESGKLKECLTGNMKEYHRIKLMTCKQQYDLLEQQIALYLSKMQEICSEHFSQDIANLTTIPGVSQISAMIIIAETGGDMSAFENSGKFTGWTGLRPRNDETAGKFKSTATTKGNKHLRAIIVQVGWGASRNKGSYFMDKFQKLAMRKPRKKALVAIGRKILVIIWHLLKEKTQYKPNLVHIYDPVKVEHKIKYHEREIEKAKKLIA

SEQ ID NO: 367714 - protein, 351 aa, unidentified
MKILSLDLGKNKTVGCEYERESGQHRFQTAFSTRSGLQQMVKEIKPDRVVIEVCSIAGWVCDFLREMGIEVQVANTSDDAWRWRKVRKKNDRLDALKAAQLSAVNQLREVHVPRIEVRQWRALITFRQHLVRRRTKVKNHIRDLLLREGEILPPRQKCWTQMGMARLEAMARPLSELGLNEMWRGELDIELRQLRAAQQEIEVVEEQLDAIAAADPRVQLLRTIPGVGPRLSEAIVALLDRPERFRKASEVSAYIGMVPKELDSGETRRRGRITRQGSRLVRTLLVEVAWTGLRHNAWVRETYQRIHGGKKSRKKIAIVAVGRRLLVRCWAMLRDGTAWQWPESAAGAGTK

SEQ ID NO: 367715 - protein, 389 aa, unidentified
MFYLGIDIGKNTHVASLVDDKKKVIFKAFSFSNSIDGAESLILKLEAFKNELEVAMEATGHYWLSLYSYLVEKNFTVRVINPIQTDGWRQGIEIRKRKTDVIDSLLIADLLRYGDFVETSLSNEDYLSLRNLSRFRSYLISSIGDLKRKTIALLDQVFPEYASSFSNIFGKTSKEILSNFSTPSDFEDINSDDLNTFLESVSKKNYASKKIDELSKKASSSFGINFCLDSFSLQIKILIEQISFIQNQVSDVENEIELLLEKLNSPITTIPGIGSVNAATILGEIGDIKRFSNPSKLVAYAGLDASVSQSGEYESTYNHMSKRGSPYLRRALFQSALRAEFCDPVFSAYYQKKISEGKHHLVATNAVARKLCHTIFAVLTKDEPYQVQN

SEQ ID NO: 367716 - protein, 388 aa, unidentified
MIYVGIDIAKLNHFASALSSDGEILIEPFKFTNDNDGFHLLLSKLSSFEKSNIIIGLESTAHYGDNLVRYLVAENYKVCVLNPIKTSVMRKNNIRKTKTDKVDTFIICKTLMLQDSLRFVTYYDLDLMNLRTLGRFRQKTIKQRTRLKIQLTSYVDEVFPELQYFFKSGLHQKSVYALLKEAPTPKEIASMHMTHLAHLLKVTSHGHFDKETAQQLRVLAQKSVGASDSALSIQITHTIGQIELLDSQLERVEAEMTDIMKFNDSVIMTIPGIGYINGGMILGEIGDIHRFSNPSKLLAYAGLDPSVYQSGNFQARKTRMSKRGSKVLRYALVNAAHNVVKNNATFKAYYDAKMAEGRTHYNALGHCAGKLVRIIWKMLTDEVEFNLD

SEQ ID NO: 367717 - protein, 373 aa, unidentified
MQYFVGLDVAMISSSICIVNEKGRIVCESSLPTKAQSIHEYLSSKKIKIDKIALESGSLSHFLAKEIAALGWTITCMDARSLAPFMNRTNKTDRNDARGIAEALRTDSKKVKYVYQKSEESIDLGVLLAARRTLVRQRTMLSNTMKGLLKSFGIILPPSGVTTIAPLIREKLEELWPSTKPENQDEEASKDLTSSKKFTPTYLPIALESLIRSFTGLTQELDAVDALLLNLSRKDPIIKRLMTMPGIGFLTAITYKTVIDNPLRFRKSRSVGAYLGMCSTQYSSGQVKRYGRISKEGSKELRTLLASAGICLLRRCKAPSTLKDWGLKIEQKHGLKKAATAAGRKMAVIMHRMWIENTSFAAESIETTDEPTT

SEQ ID NO: 367718 - protein, 455 aa, unidentified
MPGKKTRGTSAGRLSTINPDAAGIDIGATFHVVAVPGDRDHQPVRTFRTFSGDLHQLADWLRAVGITTVAMESTGVYWIPVFEILEVRGFEVLLVNARDVKHVPGRKTDVNDAQWLQQLHQHGLLRGSFRPRDEVVRLRAYLRHRERLVDYAAAHIQHMQKALMQMNVQLHHVVTDITGLTGMRIIRAIVAGNHAPEHLAAFRDRRCHASEDTIREALIGNYRPEHVLALRHALELYDVHQAKVAECDVEIEGVLSGLNAQRVTPDAPLPAVRHAKGRNEPAFEVRPALYTLLGADLSQIHGFGPYTVLRLVAECGDDMTKWPTAKHFTSWLSLAPGNKISGGRLLSSKTRRSSNRATAVLRIAAVNIGKTQTALGAFYRRLAARTGKAKAVTATARKLAILFYNALRFGMTYVDPGVSSYEERYRQRVIHNLQRRAKSLGFSLVTASPETEGVS

SEQ ID NO: 367719 - protein, 412 aa, unidentified
METLIRRCAGLDVHKASVVACARVIDENGELQSHTQSFGTTTSDLLKLNDWLMSYSVTIVGMESTGVYWKPVYTLLETEFECWLLNAQHLRNVPGRKTDVADAAWIAQLVAHGLVRPSFVPPKEIRELRELTRYRKTVIQERSREAQRLHKSLEGAGIKLSCVASDILGVSGRDMLQGLIAGTHDPDVLAELARGRLRKKLPALRKALTGWFSPTHRVIVGELLAHLEYLDESIGRLSDDITAMIAPFVAEIDLLDTIPGVNRRSAEAVLAEIGPDMSRFPSSGNLASWAGMCPGNNESAGKRFSGKTRKGSKWLRTALVESAEAAARTKGTYLAAQYARIKGRHGHKKAIVAVAHSILVIAYHILQRGQPYNELGGDYFIERQNKDAYQRRLVKQLERMGYDVTLGAKPAA

SEQ ID NO: 367720 - protein, 338 aa, unidentified
MHITALGIDLAKHVFQLHGVDARGRAVLSRRVKRSQLLHAVASLPPCVIGMEACGSAHHWGRAFEQLGHTVKLMHPKYVKPYVKTNKNDGRDAEAICEAVSRPTMRCVSIKTVEQADLQAVHRTRSLFVKHRTAVINQIRGLLAEYGLVMAQSPEKVRPAVVRFLYDAESGLTAFARDTFSELYEQLTELDSRIERVTHRVARVYRAHPVCQKLAAVPGIGPLTATALLATVGRPQAFHNGRHLAAWLGLVPRQYSSGGKELLGGISKRGSRYVRTLLIHGARAVVQRAERRTDTQGRWLCALKRRKGTNVAAVAFANKNARGIWALLAHDEVYRQPA

SEQ ID NO: 367721 - protein, 381 aa, unidentified
MDKSSTLYVGLDVHKDSIDIAVAGGARDGEVRHLGSVAGGLDAVSKSMRRLLSAGHRLHIVYEAGPCGFVLQRHFSLLGWHCDVVAPSSIPRPSGERIKTDRRDAMKLARLARSNELAVVRVPGPGDEAVRDLVRARDDAVREQRNGRHRLKALLLRNGIAYAGKCSWTAAHLRWLATLKMEHPAQQIGMQEYLHSITESSARIARLEQAMRDTLPEWSLTPLVQALQAMRGVQLIAAITLVAELQDFLRFQTPRQLMAYVGLVPGEHSTGAKRRQGSITKAGNSAVRRMLVEIAWHYQHGARVSAGIASRHDQLPKAVTDIAWAAQLRLSAKFKRLLARRVMKNKAVVAVARELAGFVWAIGREVQTSGWQGIKPEPAAA

SEQ ID NO: 367722 - protein, 402 aa, unidentified
MPNFFAGLDWASRTHTLCIIDERARVQESIEIEHNTTGLAHLKKRLLALGKPPIAIERPSGLLVDTLVEAGFTVVPIHPNVVQATRPRYRSHGGKSDASDAFLLADLLRTDGHRFHPLAPQTDQIRALRALVRGRDDLVATRVQLANQLRSLLESFWPGAAAIFADIDTPIALAFVQRYPTPDSAARLGPKRLAAFCAQHAYCGRRPIPELLERLHSAPPSVCSELEMDAKGELARCLARTLDALVEQIRLLTSRIEHHVASLEDGRILMSFPRAGRLCAAQILAELGSERERFVSDEHLAAEAGVAPVTYQSGKSKAITFRWACNHRLRAALTCMADNSRHANPWALNVYTKARSRGCDHPHAVRILARAWLRIIWKAWIDHKPYDPAKHRSALKLTVQPA

SEQ ID NO: 367723 - protein, 343 aa, unidentified
MEEITTIGLDTAKSVFQVHGVDCDHKPIVRRQLKRRQVLPFFAKLPPCLVGIEACSASHHWARELSKLGHTVRLIPPRYVKPYVKSQKNDATDAEAICEAVTRPNMRFVAAKSREQQAMLMLHRTRHLFVRQRTATINAIRAHLTEFGIVAGVGRNGVDALLKMIADETDERIPELARGCLLALGQQLESVKRQIKDFDVKIIAAHRNNELSRRLEAIPGVGPRIATALVASIADPKAFRSGRHMAAWIGLVPKQNSSGGRDKLGGVTKAGDRYLRSMLMIGALSVVKRVKQLGYTHRPWLAELMARRPVKVAAIALANKIIRMVWAMMVRGEHYREPVALSV

SEQ ID NO: 367724 - protein, 326 aa, unidentified
MSNSLIPLGIDISQAEFHVAVLKSAKRSKYEHFSNDEDGFEQLSQWLEQQGVESVHACLEATSIYGHALALYLHQQEHRVSIVNPLRVKGYGKSQLSRTKSDRADAKLIGQFCRDLKPAPWQPSATEVSQLQGYTRRLDALEHMLTEEKNRLKVTPQDLVADIEAHIQFLQEQAETVKKRLHEHIQAHESLQTQQALLTSIVGVGESTAARVLAEIGSIDHFTSARQLAAFAGLTPQEHTSGSSVQGKTRLCKIGNRRLRKALYFPALTWWRRCPQARAFGERLLAAGKAKMQVIGALMHKLIRVIYGILKSRQPFDPDKLLTRST

SEQ ID NO: 367725 - protein, 347 aa, unidentified
MRFYNTQHPFYCGIDLHARAMYVCILNQAGETLLHRNMKATPEALLKAIAPYRPQIVVAVECMFTWYWLADLCADEDIPFVLGHALYMKAIHGGKAKNDRIDSQKIAVLLRGGMLPQAYVYPAEMRATRDLLRRRMHLAHKRGELLAHVQNTNSQYNLPAIGKNLAYQANRDGVAERFADPAVQKSIEVDLALVSHYDTLLRDVELTILKTAKQHDPNTLYLLQTVPGIGKILSLVLLYEIHHIERFPRVQDFASYCRLIKCAKESNGKRSGTSGSKIGNAHLKWAFSEAAVLFLRDTPEGQKFLSRLEKKHDKGKALTILAHKLARAVYYMLKRKVAFDMKRFLND

SEQ ID NO: 367726 - protein, 291 aa, unidentified
MSQTLKTAIAVVGIDIGKNSFHVVGLDQRGAMVLRQKWSRGQVEARFANMPPCLIGMEACVGAHHLSRKLKALGHDARLMPAKYVRPYSKGQKNDFRDAEAIGEAVQRPTMKFVATKTADQLDLQALHRVRERLVSQRTGVINQIRTFLLERGVAVRQGLRFLRAELPRILGMPPEVLSLRMVRVIEDLAGDWRRLDERVESLSDEIEAVARKDAGCERLMSVPGIGPIISSATVAAIGTGDVFSKGRDFAAWLGSSRSKSRPATAPSSARYRSAAIATFASCSCRRRGLS

SEQ ID NO: 367727 - protein, 341 aa, unidentified
MENIIRQSVGIDMSNDDFHACFYLMNLRGESKRKGKVRVFKNTPTGFKSLVDWIEKNRVASSLELTITVEATGVYHEQLSYFVHDKSYPISILLPNTVKAFAKSLNTLSKTDQIDAQTIARMGVERKLRFWSPMSPLMRDLKGLSRQRQAFIKQKIALTNQLHADEKRAKPVKNNIKRGRKMISIYIKQIEAIEKEMKELLRKDEQLKVSVKRLCTVPGVAFITAATFLAETDGLTLFSSESQLIKYCGYDIKRNDSGTSVHGRTSISKAGNSHIRGSLYMPSMSAMQLEGPFRESYFRVVDRTGHGKMGLVAVQRKMLKVMFACHKKQEDYDPNYSKNRA

SEQ ID NO: 367728 - protein, 367 aa, unidentified
MMGWMAPLRHLSAKLLSDRISSEWEPSMGEVTTIGLDLAKHVFQVHGVDAKGATVLRKRLRRGQVLAFFGRIRPCLVGLEACATAHYWARELTALGHEVRLMPAQYVKAYIRRNKHDAADAEAICEAVQRPTMRFVPVKTTEQQATQLLHRGREQLVRQRTMLVNALRAHLAEFGMVAAQGLRNVGELIAIVRDDGDTRLPGVARQVLQVLANQIEQIETAVAGLERQLLAWHKANPVSQRLASIPGIGPIIATAIATTVADPKVFRSGREFAAWLGLVPRQNSTGGKTRLGGITKRGNRYLRRLLINGASANLLRSKATKADPWVIGLRRRRPPLVVAVALANKTACIAWAVMLRERQYQPRAVAA

SEQ ID NO: 367729 - protein, 396 aa, unidentified
MQKRNGTDMKKHTKNETTKSKRETKKVAEVQQLQTGLAEREANTLVIGIDLGDRSSAYCVRTLGQQIVKEATVATTATAIEEAFRELRRQRFVIETGTHSRWVAQLLELMGHEVIVANARKLKLISENNQKSDKVDARLLSKLGCMDVDWLHPVYQRSQEAHCDLLQARARQALVDARTALINHVRGSVKSFGSRVVKCASERFVEVARGALPEALRPALSGVLAALEEINEQIYGYDCQIEHLCNTKYKESAKCLLQVNGVGPVTTLTYVLTIENKDRFEHSRDVGPYLGLVPKKRQSGQRDPQLGISKAGDEMLRKLLVNCAHHILGVNGEDSDLRRWGLELVRAVERKGKKGARKLAAAAVARKLAVLLHRLWVTGAKYEPLRNRGAQQAPAA

SEQ ID NO: 367730 - protein, 351 aa, unidentified
MLIIGCDYHPGVQQIAFMDTETGEFGERRLEHGAREAEKFYGDLQQAGIRVRVGMEATGHARWFERLLEGLHFELWIGDPLEIRATRVRKQKTDRHDAQLLLKLLLEDRFPRIWVASWENRDLRQLLWHRHRLVQMRTRIMNQLQAVALNEGVRQKKRLWGQAGRAQLESFVLAPWASRRRKELLELLDRLNPSIRELNAAVEQEASRRPEVRRLMTHPGVGSLTALAFVLIIGTPQRFACGKQIASYVGLVPTEESSGGRRRLGHISKQGNSLLRFLLVEAAQATVRSDPDWRRKFLHLAMRRERGIAKVAMARKLAVRLYWMWRKGWDYEQVKRFGSHAGQLGNPLGVQ

SEQ ID NO: 367731 - protein, 338 aa, unidentified
MIVIGVDVHKQSVTAVAVDEAGRMLDEQTVPVGSDELVGWASALAAERLWALEDCRQLTRWLERQLLGQGEDLVRVPPKLMAPQRRAGRTRGKSDPIDALAVARAALREPDLSRPRPEEQVFRDLKLLVDHRDDVVDERRRTQQRLRWHLHQLDPTFQVPLRRLDRPLHLERVRRWLARRDQELQVRLARELVSRCRALTRTISELDRELEQRTAAIAPALLELPGCGALTAAKLLAEIGPIDRFNTDAQLARHGGVAPLEASSGRVQRHRLDRGGNRQLNSALYRIAITQSRYHPAARAYLERKQAEGKSRREAIRCLKRMLVRVVFNTLKASPALT

SEQ ID NO: 367732 - protein, 369 aa, unidentified
MTFFIGVDLHKTQFTVHVRTEEESESLDQIRQYPTTPDGYAEFLARISRYKATGSDVKIGVESTGNTRFFKNQVEKVRAEVRVINTLKFKVINESAKKTDKHDASTISEFLSKDMLPESYLCGKETENIRRLLKSRERLVRSTVGQKNEIHALLVSLGIPDELRSLQSKKGRQKILDTLESNNDYVLEAQSVKLMFEIIERIEESVKIIEKQLVELTKEDEMVNRLLTIRGCGKITAWTIRAYTEDIARFATAKKYAAFCGLVPWVQDSNETIHHGKITKRGPQELRTCFVQLVLGIRRCKDTSDWRMMQRYEYMKTHKGSGKSIVAAARKMAEIVWAMLSDKKDFDAQKMIGKYKPISLAEEALTAMN

SEQ ID NO: 367733 - protein, 342 aa, unidentified
MGRKIGVDLHKNSFRVCYYQNDKKYDFETYQVSVKGLDHFKKGLKKTDELAVESTGNTGHFFRAIEGKVKRIRVVNPTQFKVISESVKKTDDEDALKIAKFLSRDMIPEVRMKSKSESQLGSLIGTRDKFVKLRTALKNKVHNILNANGIVTKTELLTSDKSLDKVLGHKLDETCLFELEIITNEIRNLNEAIKKIDDQIKDKGSKLDGHKNITSITGIGDMSGTILLNTIGDVKYFRDEKSLASYLGIVPRIRSSNETTHMGRITKMGNKIARTALVQSTLIAIRYSPYLRAFYDRLKVKKGSGKAIIATARKLLGIIYNTLKNKWVFEDFANYKLAPQGA

SEQ ID NO: 367734 - protein, 366 aa, unidentified
MISKEYYIGMDVHKELVQMAVFEERGEEPIYERRLKNSTDLLIKEVKAFRRKGETEVAYEAGCLGYVLQRAMEKVGITCHVLPANKVAKNRRDRIKTDKRDARLIGRELRSKSIRPISVPDATDEAVRDLMRCREDVNDDLRRVKQRLLKFLIRHGHLFTEGKTNWTDRHWRWMDKIAFNHEHERLVYEEYRGQIRMHEERQARLDQQIIEVAESSRYKTRVNRLRAFKGIDYIIALSVICEIGDFQRFANAKSFMSYLGFVPSENSSGGKRNQGRITKAGNGHLRRLLIEGAWHYAKSARTGKLLEQRRKDCSARMIEIADRALHRLHKKYVKLVFKGKHTNVAVTAVARELAGFIWAVQASNVA

SEQ ID NO: 367735 - protein, 301 aa, unidentified
MTQNELVVVGIDVAKDKVDACIRTVTERRTFPTTASGRRSLLAWLRKHQVGKAVMEASGGYERVWAKALRQTALEVRIVDPKRVRSFAESAGRLAKNDKIDAEMIAWFAETFSEAPSQVEDPAHGEIKALVKGRKSLIDLRARLEMQKEHEVPALVGKAHARLLKKLASEIAAIETAIGAKIKATPAFATLLAGLPELGQVSNEVAAALVGVAPYDDDSGKRHGQRCIKGGRRWVRNALYMPCVGAATLNNPVFKAFYQRLIAKGKEPKAALIACMRKLIVILNTMIARGEKWDPKRYQVA

SEQ ID NO: 367736 - protein, 374 aa, unidentified
MEWTPPFFGVRLLTQCEWAILPACTRRRQSMKIRTIGLDLAKNVFQVHGVDERGAAVLRKQLKRDQVASFFARLEPCLIGIEACSGAHFWAAKLTASGHRVKMMAPQFVKPYVKTNKNDSLDAEAICEAVARPNMRFVPLKTAEQQSVLTLHTARESFVHARTAQANQIRGLLMEFGLIVPQGIRYVYARVPELIEDASNDLPGRFRLLIDRLLQHLKDLDRQVHELEKEIEQWHRSSEVSKRLETIPGIGPITASALVASAGDPSNFRNARQFAAWIGLVPHQNSSGGKTQLLGISKRGNVYLRTLLIHGGRTLVQLARTRADHAGTWLAKLVGRRHHNVAAVAMANKNARLAWALLSSGKAYERGHVRQVTT

SEQ ID NO: 367737 - protein, 358 aa, unidentified
MSNLKYSIGIDVSKNDFHCCLSVIDTAQSIKIKASHKFANSNIGFRSFVEWLNRNNKENLPISIVMEATGVYHEQLAWYLNSKNLALSILLPNKAKKYLQADGNKSKNDTIDSRGLSRIGAEKKLEVWTPPSKMLYELRCYTRQHQNLTEMSTALNSQLEAITHSQFQNKEVVKQLSKTMRLLKKQLQEMESVIREVIKSDAVLNTHYQNISTIKGIGMLSFAVIAAETNGFTLFKSAAALVSYSGYDVVENQSGKHTGKTKISKKGNSRLRRILHMPAFCAVRDDQPVFKNLYQRVYERTGIKMKGYVAVQKKLLVMAYYLWKKNEKFDAFFDSSEKIIASEQAEATHDKIPNGTFH

SEQ ID NO: 367738 - protein, 349 aa, unidentified
MKIIGCDFHPGYQQIAVLDLATGEMVEKALSHERKEEVRAFYAGLEGPARVGIEASGQSQWFERMLAELGHEVWIGDAAKIRASCERKQKTDRRDAELLLKLLAEDRFPRIWVPTAAERDGRQLLLHRHKLVRMRTQVKNQLQALALNQGVQRKKKLWSAAGRKQLESLPLLPWASRRRAELLQLLDQLEASIAELDRAVAEQAYVRPAARRLMTHPGVGPVTALAFTLTIGPAERFQRGKQIASYLGLIPSEYSSGAGKQRLGHISKQGSPFLRGLLVEAAQSAVQHEPEMHRAYQRLAQRKCRALAKVAMARKLAVRLYWMLRLQVNYAQLIQGSHAGQPGTFRGRG

SEQ ID NO: 367739 - protein, 401 aa, unidentified
MIVGIDVAKHQHVARILFPDGSESQPFGFSNHRKGFETFLAWLSFNQKRAKCDSIIVGLESTGHYWEPLAFFLEEIPGIRVVQVSPKHVKKTKEVYDNSPGKTDRKDAGVIAMLIQMGRFQKLVLPKGPFAELRGYARLRERKIVELGVQRNLLHSLVDWVFPEYGSLFPKLEGKTSLTILKHYTTPEQILRAGFNRLSKAIHQASHGRLSEACAERLMEAASATIGLQEGIEAAAFAIRNIVASVERIQEEIATIEKELARVLDQIPYASQLFSIPGVGKITVAVILGEAGDLRRYHKAQELIKLAGLNLFEISSGSHQGRRHISKRGRPLLRKCLFFAALRTVKTGGAFREIYGRWTQRNQMQKTKALVGISRKLLSLLFALARDNAAYHSPRVELRAA

SEQ ID NO: 367740 - protein, 330 aa, unidentified
MKNYDEVVGIDVSKKSIDAYCYQSQCFKVFSNELAGYKSLINWAKKHAKGGSVFYCFENTGYYSLKLALYLTSQKIVYVEESPLKIKRSSGIVKEKTDRLDAELIARYGWLYREELEPSTVKSNLQLELGRLLALRDQIVRNNAGLKGTLKEMKALLSSPTTDLGCISLKRSIDYLSKQVASIETRILELISQDESMSKNYKLLCSLKGIGLVLACQLIYHTGNFTRFDNWRSFSSYCGTAPYEYRSGTSIHRRKQCHYLGDRKMKSLLSMASISAIQHDSELRLYYKRKIAEGKETMIAVNNVRNKLISRAFAVVKRGTPYVVLDQYAA

SEQ ID NO: 367741 - protein, 377 aa, unidentified
MKRIKFVGLDVHAETIAVAVAEQDGEVRSLGIIPNREDSIRKLVRKLGPVEELRFCYEAGPTGYALYWQLTRMGAQCEVVAPTLVPVKAGDRVKTDRRDALKLARNYRAGELTPVWVPDAAHEALRDLVRAREAAKKDELRARHRLSKFLLRQGRRPPTGVKAWTMKYMEWVKREVHFEQMAQEATLLDYLHEVEHAAARIARLDGVITEAVKCAPPQMRAVIEALQALRGIAHVAAVTVVAELGELSRFARAKQLMAYGGIVASEDSSGERRRRGSITKTGNAHLRRVVVEAAWTYRHRPGVGAALRKRQEKVSEEVKEIAWKAQQRLHERYRKLLAKGKNKGVVVTAVGRELLGFIWAIGIQVETAQKESLGRAA

SEQ ID NO: 367742 - protein, 309 aa, unidentified
MEHFVGIDVAKDRLDIRVRPSGESFTVARDGEGLAVLVERLRGLAPTLVVLEATGGYETVVASAVCAARLPLAVVNPRQIRDFARATGKLAKTDRIDAAAIAHFAEAVRPPARPIADAEAQALGELVARRRQVIEMIVAEGNRRRMASQRRVIRAIERHLAVLQAELSELDRDIDGAIRNSPAWQADADLLVSVPGIGKATLRTLIAELPELGRLTRRKIAALVGVAPINRDSGTLRGRRTIAGGRPAVRAALYMAALVASRRNPVIAPHYAKLRAAGKTGKQALIACIRKLVVILNAILRDRKPWQPA

SEQ ID NO: 367743 - protein, 339 aa, unidentified
MEPTIVGVDIAKRVFQLHWIDRETGEVVDRQLKRGTFLEHFANREPCLIGMEACGGSQHWARRLNELGHQVKLMPGKLVKAFVTGNKNDVADARAIWAATRQPGIKTVAIKTEAQQAVLALHRMRQQLVIFRRSQSNCLRGLLSEYGEVMALGRAAMSRAMPEVLARLESRLPAVLIDSLREQWQRLSSMDEEIARIERRLRAWLQESDACKAIADIPGVGFLTATAAVAAMGDAKAFKSGREFAAWLGLVPAQIGTGGKVRLLGISKRGDRYLRTLLIHEARSVMKLVKDTESWAAKLSRRRPLNIVIVALANKMARMIWALLAHRCSYRADYTAATA

SEQ ID NO: 367744 - protein, 331 aa, unidentified
MKFENYISLDWAQRNMAIAHSTRHSKEISTIDVPSNIKNLKSYISQMKGTKILTFEESSPAQWLYTELKDCVDEIIVCEPYTNHLLKVGPKTDRTDATKLLKLLKTDMLKSVFHCTDEFINIRKLVSGYDDLIMSTVQLKNRKTALFRSVGKRVDGVLETAEEQFVLDGINDLIETHEQTRLKYETQYRRLKKENPMIMNLQSIPGIGPINAVKIAAAVVDPKRFKHASCFWRYCGLQKYDLISGGRSYGRRSPRYSRALKTVFKTAALVCSRVDDGPLKEYFEFLMKEKNYPEYQARHALARRIATLAIGVMKSGKPLDENELYKKDLAN

SEQ ID NO: 367745 - protein, 435 aa, unidentified
MVETRLQVGIDFSTRWVDVCLLNPDDDIPVAQQRFSNSLPGYAGVKQLLLETLATHSYGGCAISGEATGMYWLPFFLHLAADADLQAYEAELYLLNPRWVSWYKKCFAQDHKTDPRDAYYIAHRTRTQSPSVSWQPDTAGLALRSYTRYRFHLVETLTREKCFASAYLFLKANLYRQLKPFSNVFGVTSRALLSDSATFADLTALPVADLAAQLDALSLGKLPDPLHNAQRLQQVVAESFPLDAPLAAAVQHILSATLAHISFLETQIAQAEAWIASALTQYPAIQQLQTIHGFGRTCAAGIGAEIGAVERFLGGTKWDARRRRYRPKNLRDAEDAIAKIAGLWWPRAQSGEFEAEERRMAKSGNAYLRYYLIQGADLLRKHIPEYRDFYARKYAEATKHKHKRALVLTARKSVGLIVGLLHRNEPYRSKEAHQT

SEQ ID NO: 367746 - protein, 320 aa, unidentified
MRNTVGLDISKLTFDATAIVGNAEYSAKFDNDSKGLNQFSDRLKSLGCQNLHICMEATGNYYEEVADYFAQYYSVYVVNPLKISKYAESRFKRTKTDKQDAKLIAQYCRSAKESELVKRQKPTDEQYRLLRMTAAYAQIKSECAAMKNRHHAAKDEEAAKAYAEIIKAMNEQLEVLKEKIKEQTEKPNCKEGVKRLETIPAIGRMTAAVLFHHLTSSKFETSNKFAAFAGLSPQQKESGTSVRGKGKLTKFGNRKLRAVLFMPAMVAYRIRAFPDFIKRLEEKKKPKKVIIAALMRKLAVIAYHVHKKGGDYDPSRYKSA

SEQ ID NO: 367747 - protein, 349 aa, unidentified
MKSIAADVHMSSITFTTLNEAGKILNQKTVATSEKSIREYVAEIKGKKQLTFEEGPLAQWMVNIVSDDVDRVVVCNPRRNALIYKGHSNDTVDSKQLAELLRLGALQEVYHSRDTKRQSFRELMNTYFKINQDITRSKNRLKSVFRMKGILCAGQKIYSKANHDDWKKKLTGWSTTQNIAEIYWSQLSMLENQKSVMLSEIKKQSRPFKEIKEFLKLPGVGLVTASTFSAFIVTPWRFKNKAKVWAYCNLSLIENDTGKKLNKEVEMKRQRKILRRLTRDGNRRLKSVLKTAAGVACHRANDNDYKTMYQSLRARGLDESSAMLTISRKLACQLWGIWKRVETNQPIIT

SEQ ID NO: 367748 - protein, 393 aa, unidentified
MRFVGIDVASERHVVAAVDAQSATVLGSTSFTEDAVGYRKLFELLGPSADTLVVMEATGHYWKNLFAHLTAHGFAAALINPLRTRRYADEDLARTKTDAIDALGLARFGAEKRPAVTVLTDTATEELRELVRHRERLMQDFGDRVRQLHRLVDLGFPEFTRYVRTLDSELATAILHECPTAKSFQSLSRKRLAGMRYDGRHRVGEALAGDLLEAAQVSVGQHHGEAYRIQVRHTCEDLDLWRRRLRDLDRSIEAKLAEHEVGTLLTTIDGIGPHTAARLIAELGDPARFASGRTLAAYLGVIPGLKHSGKRQPLRAGLAPIGHARLRAALWMPTLTAVRTNVWLRRYYERLRARGKLPKVALVACMHKLLFAVHSVARNRRPFLPQLEPAEAR

SEQ ID NO: 367749 - protein, 230 aa, unidentified
MVYRGIDISKSSFVAAYPSTNGNPTKTFPNTTAGMRELIGTLAVAEHHCVMEATSNYGCCCTCYIRTVLPSVLPPPKKQIKHFSRMMMSVTKTDEKDAYMIAMYGEKMNPPIYKMPSQATIRILTTEGFTYFDNAKQLSRFIGICPTYQQSRTSVNIREHINRNDDERLRSLLYIAFWTALRYNSRECYIRLKANEKPFKVALIAVTNKLVRPVLTITTINSIYRWICPG

SEQ ID NO: 367750 - protein, 418 aa, unidentified
MLQTVAGVDPVAFVGIDWASEEHAVCVLGVDGRRQGSLTIEHTKEGFMKLVRRLEALGPAGQVPVAIERPDGRLVDALLEAGHPVVPVSPNAIKAWRESEVCSGAKDDRGDAEVIAEYLRLRSHKLTVLAPFMEETRALRAVVRARDDLVEQRIAAANQLEACLDAFWPGAKAVFTDVWSDIALAFLERYPTPGATRGLGETRMASFLTKHGYSGRRSAAELLKRLRAAPEGIADGPEAEARRDAILGYVRVIRALVASIKNLDRSVAAHLGEHPDGEIFTSLPRSGRINAAQMLAPWGDCRQAYDSPDAVAALAGVAPVTKKSGKHEAVHFRWACDKRFRQAIVTFADNSRHESRWAADVYERAVGRGCDHPHAVRVLARAWIRVIWRCWQDRVPYEPRLHTAAARLEGGETRSSAA

SEQ ID NO: 367751 - protein, 412 aa, unidentified
MQVVYACCAGLDVHKKTVSACISVCEGKHAKQQQTRVFGTFTQDLLKLADWLNEHGVTHVAMEATGVYWRPVWAMLEGHFEQMLVNPQHIKAVAGRKTDTKDCEWIADLLQHGLLKGSFVPPTPIQDLRDLTRYRVELRQSQNRVANRIQKLLEQANVKLSSVVSDTLGVSGRHMLDAIIAGEDDAERLAQLARGRLKGKIPQLQQALEGRVREHHRFLLTEFLNEWDALEERIRRIEAEIDTHARPFESAVTLWQTVPGVDRVTACSLVAEIGVEMKQFPTAQHLASWAALCPGNHESAGKRKSGKTRDGNKWLRRSLCQAAWAASRTKDCYLATQFKRLAARRGLKRALMAVAHSLLVIGYYILKSGEGYRELGAHHLELSHKEQLQRYFVKRLQRLGLRVTLEPLSTAA

SEQ ID NO: 367752 - protein, 367 aa, unidentified
MKKISTVAMERFQIFKESQRTIGMDLGDRTSHYCILNEAGEVIWEGKLPTTPKGIEEVFSRIPRSRMTLETGTHSPWVSRQLTELGHEVIVAHARNVRLIGESSRKDDRLDARTLARLARIDPGLLSPVRHRSAKAQIHLTVIRARATLVSARTALVNAARGLTKSYGARLPKCGSEQMNREIAQGLSQELREALDPLLAEIESLNERIAEYDRRIEKVAKEVYPEAALLRQVKGVGPLIALTYVLTLDDPHRFRRSRDAGCFLGLRPGRRNSGMSEPQMHISKEGDRYLRTLLVQGAHYILGPFGQDSDLRRWGLKLAKRGGKNAKKRAVVAVARKLAVLLHKLWVSGEVYEPLRNNNHKVVAAVA

SEQ ID NO: 367753 - protein, 312 aa, unidentified
MKDKPIVGIDVSKGWLDLCIAGNAKVERLANDEKAIGAWLDRVRPAVVAFEPTGGYERVLVAALRTRAILFVRVHPNDVIAFRKSRAIKAKTDRIDAQLIAAFAAEELVRRGMRPTILGNDLLRALAARRSQLASALHAERCRLALATEKPVRQNLELMIATLGDSLDTIEADIAKAIDRDPQTAQLATLLRTVQGIGPVTAATLIADLPELGLLSAKEIASLVGLAPNTRQSGKARPRAPTSHGRPHVRQVLFNAARAAVRHPSPFKDFADRLVTLNKRPGKVAITAVMRKLLVTANAIARDRQPWKLHKA

SEQ ID NO: 367754 - protein, 404 aa, unidentified
MKAKSTRFCGIDIGKQKHVACVIDADGKPLVRSQSFLNDARGYQLILARLQQCGGPAKVLIGMEATGHYWYALHDFLTRQGYRVAVLNPIQTAQQAAMGIRKNKTDRLDAHHIAVLIKNDGHRPALVPGELAMTCRQLTRLRYSLIRQGSKIKQLLWSRLQPVWPEYEGLFADPFSPTGRKLLAAAPTPADVLAMQPEVLSELIRRASRGKFADAKARQILQSAQTSVGMRRGLAGARLGIQTLLTALDAQRPVRQQLEADIAGLADQLPRHVLTLPGANAIRAVSLYGETDPITNFPSPDQLVAFAGLDCVVFQTGQYEAPRRRIGKRGSPFLRQTLWAMASIAVRTEGPLREFYLRKRRAGLHYLATVTAVAVKVCRISWRILTDERDYVPSACPTRTASLS

SEQ ID NO: 367755 - protein, 407 aa, unidentified
MDLLKTVFGIDVSSRKSNVCIMVNGQKVNDYAISNDMVGFNRLLGDLKQVTKPQIIFEATGVYSRRLQAFLDMHELRYVMMNPLEAKRKTKDDLHQNKTDKLDALYLAKLQSEHPQRLAYVQNKEYQELMANNRIYEQASHDLITNRNRLHKAIQLTFPEIEHLMVNPRGKNYWSIVLRFPHPDIVLETKEADIIDFLKGLTGIGKKRANDIAQSLIRLAKVACPAVKKNSAHIRGLKMAINNILSAEEECQTALQEMAKLAPKRDLEILTSIPGIGENTALRIISELGDIRRFNNPSQLNAFVGVDPQVYESGNLTAHLSISKRGTAIGRKVLYLAINQIQSAKKAGNPCHIADYYEKRKRSSETASHKKAAIASIHKLLRTIFALIKNDQLYSYDVAKHNQRLLS

SEQ ID NO: 367756 - protein, 406 aa, unidentified
MADIFALDVSMGKSYCVWYRGKHCLKEFPLVHTKAGFDALRNMIKKAQKPIIYFEATGIYSRVIEHFCETNGFHFCRLNPLELHLKSEGLRRIKTDQKDAHRIALTVQENAFQLTVPWSKDYLQLHELSRFYNQLNTDWTYRLNHLHTALEQTFPELKQLFVNRTSKLALNVVELFPHPALVSPYSRVKLKNIIMASTDKRISKMKAYKYADQLIDLAQQSYPAVSSDAIQVDEVRYYARQLIALIQKKEEVIKQMESIAQHLPEYVLYCSFPGIGKQTAAQLMGELGDISRFDNANQLNAFVGIDIRRYQSGTYFGQDHINKRGNPVARKLLYFTIGNMIRQQHAKPNHIVDYYYRLKEKRPHPKLNKVAKVACMNKTLKCLLSMIKHHEKYHYRYTDSMVPVKA

SEQ ID NO: 367757 - protein, 403 aa, unidentified
MFARDWGDPSHSMQVFEGCAGWPVSSLMHRETGHGPAYHLRWLDVHKDTIAVAVAEAGKRRDVREYGRIANTPAALKTLAAKLAHGGRDLRLCYEAGPCGYGIQRQLSAAGHECVVVAPSLIPRKPGDRIKTDRRDSINLAKLHRAGELTPVWVPDQAHEAIRDLVRARLAAVRTLRTARQQLSGFLLRHGHHYNRPAWTLMHRRWLAGLRFEQAVHHIVLEDCLAAVEAATERRDRLEAHIVAALPDWSLAPVVRALQALRGMAMVAAATLVAELGDITRFDNPRQLMAYLGLVPSEHSSGKTRRLGGITKAGNGAARRMLIEAAWSYRFPARISRAQLLRQEDLAKPIRETAWKAQERLCRRYRKLVRAGKPPTLVTAAIGRELAGFVWAIAKLAQPTITR

SEQ ID NO: 367758 - protein, 412 aa, unidentified
MELLYQRCCGLDVHKSSITACVLIAQSGKPLKHIRRFGCTTRELRELLVWLQELGVDHVAMESTGVYWKPVWNVLEGHFQIVLANAQHIKAVPGRKTDTKDCQWIAELLQHGLLRASYIPSVMIRDLRDLTRARTSLSQEHSRIASRIQKVLEEANIKLASVASNALGKSGRAMLDAIIGGEESPERLADLALGHLRLKIPQLQTALEGQVRDHHRFLLRSLLRQLQFLEAEIELLDARLDQIGREHPELAEALDRWITVPGVDRVAAWSFIAEMGIDVTQFPTAAHLASWAGVCPGNNESAGKRISSKTRKGSPWLRRMACQSAWAAARTKNTYLSAQFKRLAARRGKKCAIIAVAHSILVIGYHLQQRRCSYTDLGGNYFDQLHAEGLKRYLVKRLESLGHSVSLQPRIA

SEQ ID NO: 367759 - protein, 348 aa, unidentified
MRTEYVITMDAHGRSSDVCIKTAKGKLIRRARVSTGIPQLQALIESVPRPRRVAFEEGAIAGWLYRNLKDNADEMVVCDPRRNAYVAKDRDKDDPINAEKLNDLYRGGFLMAVHQQDRAQKAGIKQLVGIDHERVVHRMGEGCRLLALGRRWGVRLKRSMLLGAEGRRLLASRLEQGAVPARIRSVAEGLRESFEAAVKQEEQRYEQVCELAREDKMMRRVAELPGYGPVRAATLISYLDTPWRFKSQSALWKSVGIGLRRQSSGEGLDVIFVEQACNHLLRNVVIGAAQSAIDQKENVFAERYARWMKAELSFRNARRNVARDPVRAIWGMWKSDKAFDASLLQDQP

SEQ ID NO: 367760 - protein, 355 aa, unidentified
MNGLRYIGLDVHQDTVSAAVLDGAGKLLMQSVFATRAVAILDFLHGIKGTLHVTFEEGVHSAWLYDLLQRRVARVVVCDPRKNKLLKSGNKGDLIDARKLAELLRNNSLSPVYHGGMSALEVQHCTRSYTMLTEDTTRVMNRLRAVFRSQAIRVHGRKLFRSDLRESHLAQLATPGLRQRAESLYRELDALHPLRLQAKREMLAECRKHPAMKWLRSVPFLGKVRTAVLIGRVQTPHRFRTKRQFWSYCGLALETHDSAEYRVVHGQVQRKSRPAQVRGLNWNHNHELKGLFKSAATMAAFRKGIFREFYSGLLAKGIRPEMARLTLARKIAAITLKIWKEGETFNAEHIKPQAA

SEQ ID NO: 367761 - protein, 240 aa, unidentified
MTIIIGIDPHKATHTAVAIGSDESELATVTVRATRQQTDKLLSWAEPFEDRTWAIESAGGLGYLLAQQLVGAGEQVLDVPATLASRVRVLGSGRSNKNDPNDARSVAIAALRSPGPRAVSIADHAEVLRLLAMRYGDIGYTGDVSRFASGDQFAAYNGTAPIEVSSGGRVAHRLSRRGNRNLNHAIHMAAICQIRHSDSEGRAYFDRKVAEGKTKREAIRSLKRQISNTVYRYLVLDAAK

SEQ ID NO: 367762 - protein, 495 aa, unidentified
MLSLIWAVKADKFMGRLIPRLKPANIPRIRDCVIERVWEIIPYKGMIICPYQAETYMKKRRERVCGADVHKDLIVATITGDEVPSIRENFGTTKSELDRFRNWLADNKCEQVAFEATGVYWIPIYDVLSRTIDTIVANPLQIKSIPNDKSDSKDSKRIATLCLNNQIKRSRVFSDEDRELRNLTRARSGYVKTRTQFKNRIHKYLSSNGIKLSSSMDDIFCKSGTHIIRGLAEDKPVEEILKGIPSGKIRKKQDEIRSALANEPSETNRMLISDSLEIMDNVESKIEKTSLNILKKIQNKSKDLAIVMSIPGIAFISGSVILSEIGNYRDFQTPEQLAKWCGLNPGENESAGKKRKCGITKRGSKYIRVVLVEAAQTIANMKNTGLSRFYKRLSKKKEHNVAIVAVARKLICLIYHLLINQEFYQEVDCRKRKKGRNESCHEPSLKDEHLTDKVAAIVDAFYGMSDSSRKKALLRALEDISVNKPDQKRSSDGGG

SEQ ID NO: 367763 - protein, 401 aa, unidentified
MAHVVGLDWGGTSHAVCVIDKESGAVVDRFEAVHDRKGLAEMIRRLARVAPSADLPVSIERPSGLIVDVLVEAGHPVVPIHPNAVKAARPRYRAAGGKDDKGDAYLLADLLRTDGHRFRSLSPLSDEMRALRALVRGRDDLVATRVALANQLRSLLEGFWPGAAAIFADIDSPIALAFLGKYPTPQSAARLGPKRMASFMAQHRYCGRRSAEQLLERLRSAPTGLAGEDEAEAKGEIVRAHLAALAPLVAQIADISARIRHAVAQAPGGDIVMSFPRAGQICAAQILAEIGDDPARFQTADQLAAEAGLCPVTHQSGKSRGVGFRWACNRRLRKALTCFADNSRHACPWAADVYKKARARGCRHPHAIRILGRAWVRVLWRAWKSGTKYDPDLHKAAKAIA

SEQ ID NO: 367764 - protein, 384 aa, unidentified
MRYIALDLDKRNAYLGTFDSETRQRHQERIPLMNDAVNLKQFLSSLRPDDLVAMEAQPGSFYLYDLCKPIVKEVYILESHRLAAFLKLSEAKTDRNDTGTMLDIVRAEVQHTVWVPTPEVRAQRLVATHYKHLHKQRTRCINRIHAILLDHGLAYEATTLLDADAREAVARLKGAMSPAALSILASTLRLLRLVEEELALVGAQLQATEQPLRELAMTLPGLGAVLATAALAAIGDPARFKSADSLSNYTLAPSLWGTGGKTRTGKTKRRGSTLLRWAMVEAANSARRVPGPIRDRYIRLRRRGKGHGTAIVAVARKMLEVLWHMLTRREPYRVPAATEQRKQRRRRRKDAQAQQILKNKPDTIETLRQHISSIREVFQIMASS

SEQ ID NO: 367765 - protein, 341 aa, unidentified
MKKNLFFIGLDISKADFAASIYKTPGQPIVTKEAIPNNPEGFEMLLLWLYDHHMDKKNSRICMEATGVYSQAIAYYLLFQGFPVSVEPPLKVKRAFDPVGHKTDPVDSKQIAEYAYRFQDELTSWKPRDEILEKIRQLLSVREQFTKQKVALDNSIQAYSKQRVQVTLIRKAQKETLNQLKKQITRIDKELANLIKQDPEIFQRANNLDSIPGCGMLLAAHLLVITENFTKIQNSKRLAAFVGIVPYQHQSGTSVYKRAKIRHFGPMPSRKLLRLAAQSVATHNVTFRRYYLRKLAQGKAKPLVLNNIANKLLKVAFTIIRNNTRYIKDYRSINPMYLKSA

SEQ ID NO: 367766 - protein, 341 aa, unidentified
MKLRTIGIDLAKNVFQACGVNEHMKSQFNKRLKRNELLDFMRQQAPTMVVMEACYSSHYWGREMAKLGHDVKLIPAQHVTPFVRGNKNDPNDSFAITEASQRPYIRFVPVKTEFQQEILCLHRIRERLIKNKGALSNQARGLLSEFGVVFPCGHKALLNGLNGVIDNAQYSHRLQNMMIDMLSEYETILKRLKGIEQQLEILVEGSESGKILLSIPGIGIINASALLASIDKGQAFSHPKEFAVWLGLTPKQHASGNISKMGGITKRGDRYLRKQLVHGARSVVSRAAKKTDPLSLWATKLRVTKPFNKVAVAMAHRLARLIWILLTRQEHYSATPTGVSA

SEQ ID NO: 367767 - protein, 338 aa, unidentified
MELYAGLDLHSRNTYIGIMDKEFKRVFGKRVSNNLPLILKTLDPFQDQLEGIVVESTFNWYWLIDGLMDAGYKCVHLANPAAMKQYEGIKHTDDQYDSFFLAQMLILGILPQGYIYPKEDRPVRDLARKRLFLVRHKTSHILSLQSLIARCCGKRVSANDIRTFTVEDLQQLLEQEYIVLSAQANLDTIVFLKQQIRHLEKAIQNKVKLSKAFQQLMTVPGIGLILAMTIMLEVGDIGRFPQVGNFASYSRCVSSQRLSDGKSKGHGNRKNGNRYLSWAFTEAAHLSRRYNEHFKSYYNRKLAQANTSLATKALSNKLARICYYIMRDQVPFRENLLA

SEQ ID NO: 367768 - protein, 345 aa, unidentified
MNYCGIDVAMKSSYIYITDGDGRIKSRGELPTTAEDFRRVLKRFVPGGLKVAVEAGPQTAWIHDLLVEIGAEVNVVNPNKVRLIAESRRKTDKIDAKVLCELLRLDGLPHPVHVPDKETRSLRGLLVARRQLVSARTKVCNVVRGMLRQEGISLPSRFLTSLAAWQRLLEVEFTHSHLRPIVEAYAETFKTLTRSIQALDRELAQREKSDDRAARLQTMPKVGRIASLTFLAAVDDVNRFSSSRKLVGYSGLAPTVRSSGERTEYGSISREGRRELRAVWVQIAQLVAMDTGRDTASLRKWFAKVAFRRGKKTAIVALARKLLTIAYQLLKQQTVYDAKKLRRAA

SEQ ID NO: 367769 - protein, 338 aa, unidentified
MVYIGCDQHKQFCQLAVLNESGTLVEEKKFYHSDRYALREYFASLPPNSQMAIEASGFESWLADFAQELGIRVTLSHPLKTRAIAEAKIKTDKVDARTLAKLLQTDFLPPAYLAPPELRRRRYFLRFRLCLNRYRSSLKNRVHSLLHHLGIQAPAVTDLFGVRGRQFLDSLELDEGYREALHGYLALLDMTEDRINCLKKRLAAYVKESPEAQLLQTIPGIGVLLAQVVLAEIGTLSRFNSAGRLCSYAGLVPSLHQSGQKLYHGSCPQQGNKFLRWAMVEAAQVAVRKDPLLKAFYDRIKRKKGSQKAVVASARKLLVIVYQILLKKEPFRYTAFPR

SEQ ID NO: 367770 - protein, 339 aa, unidentified
MENVPVFVGLDYHSKSVQVCVMDATGRVLVNRSCGNSVMEIGAAVGPGRTVQRAAIESCCGAADLTEALIKDLSWPLSMAHPGYVARMKSNPDKTDYGDAKMLAELSRAGLIPPVWLPPQNVRDLRLLVRLRADLVGNVRSVKTRLLAVLRQQRIVEPKDFGRWCRKWLAWLSGKDCALSEQGKFAVEVYLEELNALRTRIAKVEARLHAATTDDAIVASLLKIKGVGDVTAWTMRALIGRFDRFTSGKQLARFCAVTPRNASSGQRVADSGMIKAGDPQLKSVVIEAAQRLRRYVPRWQELSAQMAQRGKPTSVIIGAVANRWLRGLYHQMKELPMAA

SEQ ID NO: 367771 - protein, 318 aa, unidentified
MTSPVFVGVDVAKERLDVVVRPSGEGWSEANDEAGVAALLARLRGLGPALIVCEATGGFERLAIGTLAAAGLPVVVANPRQVRDFARATGQLAKTDQLDAGILALFAERVRPAPRPLPDAAAQLLDAVLTRRRQLLEMLTAEKNRLGFAPKPLHRGIQAHIRWLERQLDDVTKELAGLIEASPVWRAKDDLLQSVPGVGPIVSYTLLGELPELGTLSHKQIAALAGVAPLARDSGTLRGKRMIWGGRASVRTALFMAALCGRRWNPALKVFYERLIAAGKPKKVAIIACARKLLTILNAMVRNNTSWMTPEAKLQYSC

SEQ ID NO: 367772 - protein, 354 aa, unidentified
MNIMGCDLHTRYQVVARMEEETGEITTRRLEHESEEVRTFYGGWPRGAVVGVEATFPALWFERLLAECGHELWVGDAARIRASVVRQQKTDTRDAEHLLDLLRTNRFPRIWVPSLEERDLRQLLVHRMKLVRTRTMVKNQLHALAISQGVCRKRKLWSARGRAELESLALLPWAARRRKELLEWLQQLDGSVEELDQAVEEAAAGRAEVERLRTHPGVGPVVALAMVLTLGPVERFGNSRKVVSYLGLNPREHSSGGRQRLGAISKQGNSMMRWLLVEAAQTAARFDPELRRTYQRLKFRRVSGVAKVAVARRLAVRLYWMLRARVNYASVSRRIRMSGSPSSAVAPSGSGSKV

SEQ ID NO: 367773 - protein, 414 aa, unidentified
MLKIVYPICCGMDVHKSFVVACIASTDGKGVTTYKSHRFSTFTKGLRELSHWLLQNDCRDVCMESTGKYWIPIYNILEPTCKIVLAHPKYVKSIRGKKTDKKDAKWIADIFKHDLVSGSFIPPADIRQLRDLVRYRFKLTNYTTGEKNRAQNCLTVSNLKLDDVFSDVFGKAASAITERLLLNSEPFDVAPFLTKNMKSSVEDIQLAMDGVMCPEQAEKLRIIRSHMDHLSFCKLNLESLILSVAEKYLPQLNLVLTVPGIQSFSAIAIIGEIGVDMSVFPTSKQLCSWAGLTPQNNESAGKKKTTRITRAGAYIKPLLVQCANAAIASKRHPEVRNRYLALKKRRGHKKAIIAISRMLLTVIYNILKKSEPYNPELYHQSDRPPVHREVSVDEAVYILQRQGYLVSAPQSAAT

SEQ ID NO: 367774 - protein, 362 aa, unidentified
MRYYLGVDWADASHMVWAMDETGDKVLSRTIEHTPVALSEWGRQLDEWQAQGIEVWAAIERPHGMIVDFLLDHGVSVFPVNPKALDRARDRFRPSGSKSDPFDARVLADFLRTDHARLHVLRPSSSEAQELKWLTDDFARLTRQQTRLLNQLTATLKAYAARREALWAQVQALQIPMPATVVRAKARLAGVLVGQLDALVPALAAYQTEIERFFEHMPAAAWARTLPASKTGTTVPTLWARLGDAPGRWSSWHHLQACAGTVPVTERSGKYTGVRFRFACDKQLRTIIDRFAFLSLRTSEWAQGYYRRQRARGHGHRRALRALAAKWLKILFVLWSRQCPYDETHHLATMARQELRRTVVIA

SEQ ID NO: 367775 - protein, 337 aa, unidentified
MSEISMLAIDLAKNSFQVCAVRHDGSVVFNRAVSRPRLHHLLAQQDDCIVAMEACATSHHWGRVAQSHGHDVRLIPAQYVKPFVKRQKNDHADAAAIAEAASRPTMSFVAVKSAEKQGRAVAFRTHQCFVRQRTQLINSLRGHLAEFGLVAAKGPASLKVLENALANPITDIPAQVREMGVIYLAQIVQLTEIIERLAHELQTASKADEELRRLCTVPGIGPVTAGAIAAFAPDLSTFDSGRNFAAWLGLVPRQRSTGGKARLGAVSKMGQCDIRKLLIVGAMSVIRWVVRKGGSENRWLANLVARKPRMVAAVALANKMARQVWAMATKGEDYRMA

SEQ ID NO: 367776 - protein, 338 aa, unidentified
MKKIVIGVDVSKEKLDFFFQQGEKQGKECTLSNSTPAIKRSLKTTLKELGCQTSEVLVCAEYTGQYTYPLSCACEELGLDLWLENPAQIKHSSGIQRGKNDRLDARRIAAYAHRFQDKARLFSIPEKNVASLKHLISERDLYITDKAKYQGQLRDQERFMSTQDYKRKGKRLKELMECLEKTIATIEQEIQQLIDNDDTLSNQHQLLCSIDGVGERTAVKMIVSTNAFKDFNCARKFSCYAGVAPFQYTSGSSIHSKNRVSQRADKGMKSLLHMAALVVATRKKEGELREYYLRKVDEGKNKILVLNAVRAKLVARMFAVIKNNRPYEKNYQFCLQIS

SEQ ID NO: 367777 - protein, 443 aa, unidentified
MKALPVLDPKAAAIDVGSEKLHVSIAGDAPKVFGTFTGELEALRDWFQQQGVQTVALEATGVYWLYLYEVLETAGLEIVVVNGRHVQNVPGRKTDMADCQWLATLHAHGLLRGGFVPPADIRRLQDYQRLRADHLVGAAGQVQKMQQALERMNIKLHDVISDLVGVSGLKVVRAILKGERRPGELLALCDGQIQKKKADRVKESLRGCWKKEQLFALRQALELWEAYQQKIADCDHELEALLHQMAGPLPPPDGAGSPEVKLAPAKPAGKNAPVIEKFQALLARLCGGRDLTQIPGLSVYLVLQLISEVGTDMTRWPTEKHFVSWLGLAGGSKQSGKRKGAVKAQRNRAGRMLCAAARALARSVDKALGGFYRRLRGRIGGLAANVALARKLAQLFYRLLRHGMEYVEKGLKSYEAKVLETETRLLRKLAQKQGFVLMPSSAN

SEQ ID NO: 367778 - protein, 360 aa, unidentified
MRNEITKDSFNGQSFYVGIDTHKKNWTVTILGEQYEHKTYSQNPDSELLAGYLKRNFPGASYHAVYEAGFSGFDPCRKLKQLGVDCIVIHPADVPTTHKEKEQKTDKADSRKLARCLRSNEFEAIDIPDPQLEADRALVRQRFRQVKDVARTKNRIKSLLFQFGIAIPEGFTSGQTRHWSKVYINWLKDLKVEHESLKQAIDNYIRIGEAQRQELLLLEKQIRKLSLSDRYVGNYMLLLSIPGVGPKTAITFLTQIGYIGRFARLDDLCNYVGLAPGMYGSGDKMQVGKLTRRGRKELKIMLIEASWQAVRKDPALMLKFNELIKRMNKNKAIIRIARKLLSRMRFVLLNRQPYCVGVVQ

SEQ ID NO: 367779 - protein, 355 aa, unidentified
MQKYKVSFKGQNIYVGIDVHLKTWHVTTLTESGCKYSFAQHADAKELFDRLNKKFHEAHFKSAYEAGFCGFSVHYALTELGVENIVVHAADIPTTGKEKALKTDAVDSEKIAWALKRDELTGIYIKDRRYMDDTNLMRLRQRFIMDLSRQKNRTKHLLYTQGVTYPERFHNSKTHWSRNFMKWLREEVELLSEEKMALTLLCDQVENTRMAILTVTREIRRLSTTDKYRENFSLLTSVPGFGLITSMSMLTEFDNNPTRFPNERKFVAMLGLIPTCHNSGEKKVSGEKTNRGNKQLGPLIVEASWVAIYRDYQLGAYYSSCCQSMKPHKAIIKVARKLACRAYAVLKTKTSYVLS

SEQ ID NO: 367780 - protein, 397 aa, unidentified
MYIVGIDIAKRKHEAAVIDGEGTVIIKPFSFTNNCSGYNRLLAMLTKAKLPLDEVSFAMEATGHYWLALFTRLQKEGFRVQVINPVQTNSIRSFYIRQAKTDPRDALLIAEVIRFGHFSESTLHPENIYELRELCRGRHAIVSMQADVKRKVVALLDQVFPEYETAFTNMFGDTSMAILQTCPTPKELSEMPFEELCHLIEVSSHKRFRMAKAQELQALARNSFGFAMAGDVFSTMIRLYAKHLVFLKQQVREMDRKIAEIMETLDTPITTITGIGPTLGAYILSEIGDISRFSSAAKLAAYAGIDPTMRQSGEYNGVRNRMSKRGSPYLRHAIWLATSSAVLHDPALKLYFQKKRDEGKPYMASVGHACRKMVSIIYAVMRGNKAYTPCIPNEISA

SEQ ID NO: 367781 - protein, 413 aa, unidentified
MANKTAEVEIQYERCCGLDVHKKLIVACFRDGSGKTVREFGATSKEIVEMTEWLIEVGCEMTAMESTGSYWKPIYNILELLGLDVMVVNAQHVKNVPGRKTDTNDAMWLSTLLAQGLLRPSFVPDREQRELREVTRYRKSLTEERAREINRLGKMLEGANIKLTSVVRDVLGKNARKLLNAALEGESLDELTIEGMVNKQMARKTTLLVDAMDGVVSKTQRLLIRAVLDHIDDMARRIADLDDIIKNEMEKYDAAIQLLDEVPGIGEVSAQVILAEIGLDMSRFPTAGHLAVWSGLCPGNNQSAGKRKRSPTRHGNGILKTTLVQCANAAVLTKGSFFKAQYERLVVRRGRKRALVAVAHSMIIAIWHMLRNGTVFTDLGGDYYNRLNPDKKIKMHLRKLEELGWTPPITATA

SEQ ID NO: 367782 - protein, 344 aa, unidentified
MNITRVGVDIAKSVFHVHAVDSHDRVQWQIKLTRAAWVDALCARVAPGAEIGMEACASSHYWARELRKRGYRVMLIAAQFVKPYVKSNKNDRVDAEAICEAMGRPGMRFVGIKTVAQQDIQAEHRVREELVCQRTAKANQIRGLVGEYGIVAPTGIQKLRQALPRWLEDADNGLTDRFRTLLSGLAEDVRYLDERINALDGQIARHAKEDPVARRLMDLRGVGPLTASALSGALGDGRAFSRGRDFAASLGLTPRQHSTGGKERLLGISKRGDHYLRKLLVHGARAVVRHAKNREDGLSQWVQKLSMRKHANVVTVALANKTARVAWAVVHNDTAYDPTLVASH

SEQ ID NO: 367783 - protein, 346 aa, unidentified
MEHYVGLDVSLKLTAICIVDRTGKIEREGVVTSDPETIAAFVKSHAPHVARIGLEAGATSTWLWTELNKMGLPVICIDARHAKAALKMQINKSDRNDAVGIARIMQCGWYKEVRVKDLDSHAIKALLVSRALLVKIKRDIENQIRGLLKNLGLVIGRAKMNVFAVRAAELADARPAVAAAVEPLLKAREAVGRQIADLDRKVLRLARNNAQVRRFITVPGVGPITALCFFATIDDPTRFKRSRSVGAYAGLTTRRYASGEIDWTGRISKCGDKMLRTYLYEAANVLLTRIEKWSALKAWGIRLAKRSGLRKAKIAVARKLAVILHRMWIEGTEFKWSSKEAANRPA

SEQ ID NO: 367784 - protein, 380 aa, unidentified
MTRATRGGEYSGQTEKILHVSFELGMKDWKLGFTTDLGTKPRLRTMPARELGRLEREIAEAKGYFGLAATARVRSCYEAGRDGFWLHRYLVSRGIDNGVVDSSSIEVNRRMRRAKSDGLDARKLLTMLVRYHAGERKVWSVVRVPTVEEEDRRQLHRELRTLKKERTRTTNRIKGLLANQGIRLEKSGGLSQRLGRLRLWDGSPLPIGLLARLQREWEHAEFLHGKILELERERRQAILEGRSPALEKVRQLMLLKAIGPSGSWVYVHEFFGWRRFRNRKEVGAAAGLTPTPYQSGDGSREQGISKAGSRHIRAVAIEMAWCWLRYQPRSKLSLWYQERFGRGGARARKVGIVAVARKLLIDLWRFLEHGVIPEGATLKA

SEQ ID NO: 367785 - protein, 369 aa, unidentified
MGCFVGIDVGKSRHAYAVVDAAGAELASGEVTGTAAGFEKLKRVLVRFDVEVIGMEATGHYWRNLWHALVHGGYECRLLNPASTVYYRRMSLTKHKTDALDALCIARYLAAVRSDRRGLDVQSQEGLRSLARAQAAIAEQITEAVNRLHKQLDLSFPEFPKLVGRLDSPKALMLLEHYPTASMMSRARKLADRRYGQQNHRIGVPLAQRLQDAARSSFGCAQSSSDALLIRQSVSHIRLLHEQSKELIREMETLVAEQDQDAANLLSVPGIAIKSAAAVIGEIGDITRFETAKKLTGYIGAHPRFHESGNKSAHPRMSKAGNKRLRRILWCQSASNFDVRRGKAAISQWVKVPPGNFCSSRKQSEQSWR

SEQ ID NO: 367786 - protein, 394 aa, unidentified
MIVIGIDAHMRSHTAVAVDAGTGRQLAERSVAADEDGCCDLLAFADGLEVEREWAIEDCRSLSRHLEAALLRSGERVRRVPPKLMSGARKSARTFGKSDAIDAAAVARAALREPDLPVAQLAGPEREIALLLDHRANLVVERTRTQARMRWLLFELDPSIELARRSCGNLRVLERLKRQLAKQPPGILLRVCRELLARVTQLTKQIRALERDLRPMVRRHAGPLLALPGIGILNAARILANVADVRRFSSEAKLALYAGVAPLDASSGRQQRHRLNRSGNRQLNSALHMIALTQVRIYAPARDYVARRREEGKTGKEAIRALKRHLIRTLYRLLNTVANRTAIPINTAPQRTLRHIGVIQVRHVAPSTRHGRFEGRWPARTLDVMWRANTTSLG

SEQ ID NO: 367787 - protein, 385 aa, unidentified
MTATTRRFDPTALANTLCISFELGEGSWRLSFASSFGEKIVRSGVRSRDLEGVVREIESAKGRLGLAPGCRVVSCYEAGRDGFWLHRFLTSYGVENLVVDSSSIEVSRRRRRAKTDRLDGESLLDLLLRHLAGSRKKVWSVVRVPTVEQEDRRHLHRELASAKRDRTRVTNRMKGLLANQGLTLDLKKNVPGQLQALRQWDGTPLPAGLRARLAREWERVQFYAGLIERLEAERRELLREANDPVIDKVLQLNSLRGIGVNSAWLYGMELFGWRELRNRREVGAIVGLAPTPHESGQQERERGMSKAGNRHVRAMAIEIAWGWLRFQPRSELSKWYQRRFGTGSKRVRKIGIVALARKLMVELWRYLETGVLPAGAELKTDVRIR

SEQ ID NO: 367788 - protein, 371 aa, unidentified
MNFIGIDLHTNRFTCCYRNELSSTENTRKGRETKTFDLTECGLTDFYQTLTNDTCVLIEATITTFSFARLIKDRVKDVIIANTYELKQISLARCNTDKIDADKLCRILKAQVLSGEQLISPVVLPPVEIQELRSLFTTYRLYKKQNTQLKNRIHSLLKERLYGFTQEEIFSSKRRELIRKISPGTPMQFQVNQLLDRLERDEADIEELEKQVLLSAEPFMNEIEILTSMKGVSVFIAIAIIADIIDVSRFKDSKAFTSYLRSAPRVSNSNTSVSICGTNKKGRKLSATLITQSLNHVLDASEKLRRWYDRLCEYKKPGLVRTGLRRRVFAEIFQMLKKREYHYARNIAKHELKMNLYRNFLAKRKNLSEFA

SEQ ID NO: 367789 - protein, 389 aa, unidentified
MLHDHPSVGPTAILTQFGAIFVSLELSRSKWVLTSLSPGNGEKMSQYSLTAGDIGGLLARFADLKRKAKERTGSDYPIITIHEAGLDGFWVHRVLQNEGIESYVVDAASIATSRRRRRAKTDKIDGEALLRALLAFKRGEPRVCAMVVAPSPEEEDRRRLCRERQTLIAERIIHVNRIKGLLFTQGISDYAPLRRDRRKRLEGLRTGDRRPLPVHLKTQISRELDRLELLLDQIRKVEAEQEALLAAESKAAPEGEPHNAVAMLLAVKGIGEHSAAILWSEGLCRQFSNRRQVAAYAGLAATPWRSGAVMHEQGLSKAGNPQLRTTMVQLAWLWLRHQPQSALARWFRARGERGRKGSIVALARKLLVALWKYVTHGVIIEGAVMKPAA

SEQ ID NO: 367790 - protein, 355 aa, unidentified
MKTLQTDFSNLQLYIGIDVHKKQWSVSIYTDAAHHRTFSQPATPQALKSYLDHNFSGAKVVCAYEACKFGYWIQRQLTSYGYQCLVVNPADIPTSNKESSEKTDPNDSRKIGKSLRAGLLTSIHIPDQHTEGDRQLFRYRKRLMADLTRVKNRIKDKFLFTGTSIPPEFDNSNWSKAFLNWIKLAALPDTNTRLTVDLLLEQYHFLYRHFLRASIEVRKLQREGRYKNVSKLLRSIPGIGPLTTVELLTEIEDINRFPSFKKFNSFIGFKPRSHSSGEHDWKGRMAYRQHKGLRSSLIECAWTTIGKDPVMLQRYEELTKRHTGKRAIVIIARKLVSRIYYVMKNEKPYELGLVK

SEQ ID NO: 367791 - protein, 341 aa, unidentified
MKNLFIGVDFSKEKVDVAIIFADGLTETAARVFNEFKTTVSGYKQLVKWVEQNSYGIDSSLWLFCGENTGDYSKGLCNFLYGKGYDMWLENAKSIKDSSGLRRLKSDRADASMIAEYAMRNYDRAIMYEPLSESLAQLRELFLYRQMVIRHRCSFQVRRGEKRLTMEKSPVKTMISQSGRHIVSELNKEVEKIDKRIAELIKSDEELTEVFTIVTSVPGIGTQNAVCLMVYTDNFRRFNYDSRKIACYYGIAPFGKDSGTSVHSDPRVHYMANRQIKAMLTQAALVAVNFNPVIARYYMRLVERGKKKQVALNNVKNKLVHLITAMVRNRQTFTPNYKISA

SEQ ID NO: 367792 - protein, 335 aa, unidentified
MKKTNFIGIDVSKKTLDICLVQGNKVVHLMKILNTKQALKKAFSVLKKEFLVDSDNTLCCMEYTGIYNYLLLEFLWANRYQIWLERAVQIKQSSGISRGKSDELDASRIAFYAYKNQQDCKYWEPEREQIITLKSLLSTRNRLIKVQKQLSVPLKEAQGFVDKKTIKLNKDLAQQPLNAIETAIVKAEQQIVALIKEDENLKRLFFLIKSVDGVGPVVAANIIAKTNEFKNYTEARKFACYSGVAPFPHSSGSSIRGRAKVSHMANKTMKTLMHLAAMAAINTKGELGQYYQRKVQEGKNKMNVINAVRNKIIARIFAVVKRNEPYQKILQNSLA

SEQ ID NO: 367793 - protein, 319 aa, unidentified
MLGIDVSKDTLACTLLDPQTQKTIWHRTVPNTTAGINRLLRQTPAQSHWALEPTGRYGLLAATTAHEAGRQVLLAQPKKARDFLRSIQSRAKTDALDSYGIGLFALCRPLPPYPLKSQAVEQLDQLLSVRKSISASLASFGLQARELTHAAPALEPVVAALQTQKKELDRQIAQLTASQQEFSIAAELEKVPGFGKVTAATLASRLAGHTFSHSDQFVAYCGFDVGVRQSGKKNGQTGLTKQGDGELRRLLYLAAQSNLRSKDSPFKAQYQKERGKGLPSTAALCAVARKLARLAWSLHKHRTPYDPNRVHQQNNKPTP

SEQ ID NO: 367794 - protein, 412 aa, unidentified
MDEVVEFCAGLDVHRDTVVATVRFPQGRQRGSETKTFGTDTAELVALGDWLISHQVTRVGLESTGVYWKPVFYLLEDRIEQLWLLNAQHLKNVPGRKTDVVDSAWIAQLVEHGLVRPSFVPSPPIRELRDFTRHRRVLSEERTRMVQRLEKVLQDAGIKLTSVASTVLSKSARAMLEAMLAGESDPVVLAELAKGRMRSKIPALTDALRGSFRVCHHGVLVRQILSHVDFLDAQLAEIDEQITTRVATFEPIIERVQTIPGVARKCAIGMIAEIGVDMSVFATPAHLASWAGICPGNNASGGKARSGRTRHGPVALKTVLTEAAQAAARTKNTYLGARYHAIRGRRGTFKAVGAIRHDILIAYWHIVTADVGYQDLGVDWVARRHSREHQIARLAKQIEKLGAAVEITMPAA

SEQ ID NO: 367795 - protein, 354 aa, unidentified
MSQKPNTAISVIGIDIGKNSFHVVGHDARGAIVLRQKWSRGQVEARLANIPPCLIGMEACVGAHHLSRKLASLGHDARLMPAKYVRPYSKGQKNDFNDAEAIAEAVQRPTMKFVATKTAEQLDLQALHRVRERLVSQRTGIINQIRAFMLERGIAVRQGIGSLRTELPTILATRTDALSPRMLRVIEELAGDWRRLDQRIDGLSGEIEALARQDQACSRLMTVPGIGPIISSAMVAAIGTGDVFSKGRDFGAWLGLVPKQISTGDRTILGKISRRGNRYLRVLFVQAAWVVLVRIKNWERYGLKSWIEAAKRRLHHNVLAIALANKLARIAWAVLAKGRAFELTRTDDAGVRAA

SEQ ID NO: 367796 - protein, 397 aa, unidentified
MALPGLVAVVSARPTGGDPDPPASEEKAITSIAVPIPDVTVTVGVDTHKDVHVAVALDALGRQLGELAVATTTAGYQKLHHWATTFGHVESFGLEGTGSYGAGLARHLRRGGARVIEVNRPDRATRHRKGKSDPIDAEAAARSVLAGTATAIPKAGDDQVEVIRMLKLARDSAVKSQTQAVNQLKAVLVTAPAELRESLNDLGPVALLERCAGLRPGKPSTPVPAAKYTLRLLAQRALTLRTEAKHLREHLDALTAAAAPALRELTGVGPDTAAALLLAAGDNPHRLSSEAAFAALCGTNPVPASSGKITRHRLNRGGNRQANAALHRAVVTRMHWHEPTKTYVARRTAEGKTTPEIMRCLKRYLARQVYRSLLPQVPETANDEHVADKPKDLHLAA

SEQ ID NO: 367797 - protein, 408 aa, unidentified
MKRYYLGVDWADKVHQVHVGDQDGRKIAEMKVHETPEGLAEFGRWLDERRAEGIEVWAAIEKPQGHIVDFLLDHGVKVYPVNPKAVDRARDRFRMSQSKSDGFDAYVLSEFVRTDHAHLRALQPNSEPAQELKLLTRDQHRVQRHNTRLLQQLKVTLKEYYPRALEVFGDLESQIARDFLKRYPTPVALAKLSRKQWQRFATREHHLSESRCNELWETLHKPQLLIPEHVVRAKAQLLEVLLDQLEASIKAVHTYNDKVERFFVSLPAAKFFATLPGGKSGSTVPAICAELGDAIARWESFRHLQAEAGVVPVTRSSGKSHTVGFRFACNKRLRYAMYWFAFVSLNRSEWANAYYRDQRAKGHTHHRALRALGAKWLKIIFVMWQHHKPYDENYHLANIARQRMRQAA

SEQ ID NO: 367798 - protein, 410 aa, unidentified
MEVLHQRCAGLDVHKKTVVAAVRLVEGNKVITEVRTFATTTAGLLALADWLTQNGCTHVAMEATGVYWKPVWHVLSDGEMELVLANAAHVKNVPGRKTDASDAAWLAELLAHGLIRASFVPDDQTQELRALLRTRKQLVRERSRHIQRIHKVLEDANIKIDAELSDILGKSGRAMLNAMVAGETDPVRLAALAHPNVKAPQAKLAEALRGRVTRHHRFLLQLHLRQIDGLDASLGMMDSEIEANLAPFRTAVDIVSTHPGISTLSAQGIVSEIGTDMNRFATAGHLLSWTDLCPRNDESAGRRRSNRLRKGAQWLKTTLVQCAHAAKNKKGSYYQAQYLRLRSRRGPQKAICAVAASILTAIYHMLKNGTVYQDLGADHFNRRSKITQTQRLVKRLEHLGYAVEIQPLAA

SEQ ID NO: 367799 - protein, 382 aa, unidentified
MSQNRKRGGTSISPGANSSCLSLRPPRLRPSQELEQLREAQGSDPKRPRIQDRARARASSRRVSMSGFVGIDVSKDELVVAREGAVDQSSYPNTEHGHRQLAKDLEGSPCELIVVEATGGYERGIITELGARGLPVVVVNPRQVRDFAKATGQLAKTDQIDAGVLADFAARVRPEVKPLESEEQQELRDFLVRYEQLTQMLVAEKSRLLQAQGGSRRVLRKKIKSHISFLERERALLNSDLDDTLRKSSIWREKDDLLQSAPAVGKQTARTLLALLPELGTVSAQEIGKLAGLAPFNRDSGQFRGKRRIGGGRSRVRAVLYMSALVATRWNPVIKAYYAKLLKAGKPKKVALVACMRKLLVILNAMLKTKTRWQAEPSLTTA

SEQ ID NO: 367800 - protein, 351 aa, unidentified
MDATTVAVDLAKDVFEVAVANRGGRIFERKRLTRPQFERFIEGLTPGTDVVMEACGTAHYWGRVCQARNLPVRLLPGQYVRPYVRRNKTDRTDTEALLEANRCGGVDPVPVKTVEQQTLQVLHRVRTQWQGARTARINTMRGILREHGFAIGVGARTALKRIPALVEDPTSALPEVVRRTVEVVFQEVRELETRIATIDTQLAGVVREHAVARRLVEIPGVGVITATALIGAVGHIHAFRRGRHFASWLGLTPRESSSGGRRRLGGISKRGDVYLRCLLTHGARSVLLTAQRKARVGLQVTRFQQWAVDLAARRGHNKAAITVANKLARIIWAVWSRDIDFDATASRKVAA

SEQ ID NO: 367801 - protein, 364 aa, unidentified
MCQAGTGIVPRRSGGVGMFAESVDVVIGVDTHRDSHALALVDAGLGALIAEERVDANREGYRRALKLASDCGRRRLWAVEGTGSYGAGLARFLQQQGERVLELERPVRSGSRGRAKSDALDALRAARAALTGEPLAELRCGGKREALRVLLVSREASVAVRRSGLNQLRALVLTAPAELRERLQGLPKRALVKRCVALRPRSGQPPQLRGTLLALRSCGRQVELASREATLLERELAVLVEQLSPQLLSHYGVGPITAAQLLVSWSHPGRLRSEAAFARLAGAAPIPCSSGKTIRHRLDRGGDRQLNRALHTIVLARRRGDQRTIAYIHRRTSDGKTEREAIRSLKRYTARSLYRLMEHTNRDA

SEQ ID NO: 367802 - protein, 303 aa, unidentified
MASDDGALEARFANDEDGHGQLVMRLRELSPQLVVMEATGNFQLELSIVLASAKLPMAVVNPRQVRDFAKALGILAKTDSIDARTIASFGATVKPEAQPLPDDQALELEAMMTRRRQIIGMIASEKNRLKALVGPAKKSWAEKSIRDTLSHLIKQLNQLDKDLHKRIERSPAWKAKDDLLKSVPGIGKVTSLTLSIDLPELGTLDRKQIAALAGLAPLNRDSGKSIGKRRIWGGRASVRTALYMACVASLRCNSVIQALYARLTQVGRKPPKLALVACMRKLLTILNAMVRESRPWSPALAGA

SEQ ID NO: 367803 - protein, 330 aa, unidentified
MDGMSIGIDVSKETLVIAVQPSGESWTSETTPAAIETVVVRLRALAPTIVVVEATGGYERGLVAACAAAGLPMAVVNPRQVRAYAQALGRTAKTDAVDARVLADFGARVQPAARAIADAETQALAALVTRRRQLIEMLGMEQRRLAQAPPTGRITRDLRTHIRWLERRIADVDDEIGTAIQASPIWRVQDDLLQSVPGVGPTTARTLLAELPELGRLDRRAIAALVGVAPFNCDSGQHRGQRHIWGGRASVRTSMYMAALSAARSNPVLRMFYERLREAGKPPKVALVATMRKLLTILNAMMKHQSRWNAEVASTPASPARLARTATVRA

SEQ ID NO: 367804 - protein, 358 aa, unidentified
MDQQHQPEQHYAGLDVSLDATAICVLDAKGAVVWRGKCASTPEAIRDALRQHAPALVRAGLETGQLSNWLTHGLRRLGLPVVCLDARHAKAALKLQVNKTDANDALGLAQVVRTGWYREVAVKSMDAQTLRMLLVARAQLVSQRQALANTVRGLLKTFGRRVARGSGGLFAPRVREAAEGNDALLAIVEPMLLAWQALREQAAVLDRRILARAKADATARRLMTVPGVGVVVALAYMAVIDDPARFKRSSAVGAYVGLTPKRHQSGEEDWTGHISRCGDGLLRAYLFEAAAVLLQRHPRACALRSWGLALAKRVGMRRAKVAVARKLAVLLHALWRRGGEFRWPEPAAAAPALPAAAA

SEQ ID NO: 367805 - protein, 359 aa, unidentified
MSQHTFIGLDVHARSVWAGVLDGVTGEVRSCSAPVCTSELVPWLRAQGEALAVAYEAGPTGFGLARACEAVQIPCLVAAPSKIARAPGERVKTDRRDALRLAKLLRLGELTAVRVPSACEEGARDLVRAREDARGDLMRARHRLSKLLLRRGLVWEGSAWTQAHERWLAGQRFEERPLQLAYEEAVAAVESVRARREALDRAICEEAATEPWAPVVGRLACLRGVSTLTAFALATEIGDWERFDGRSIGAYLGLVPSESSSGERRRQGAITKTGNAHARRLLVEAAWQQRRPASHPSRELVRRREGQPAAVRERAEAAGRRLRRRWARFDARGKRSTVAAVAVARELAGWCWSLAVMDS

SEQ ID NO: 367806 - protein, 342 aa, unidentified
MDHFAGLDVSVKETSVCIVDDTGRIIREVKVASEPEALLKVLGNPGYRFKRIGLEAGPLSQWLFSALAEAGLPVVCVETRHMQAVLKAQINKTDRNDARGIAQMMRAGLYRPVHVKTLRSQKLRMLLTHRKLLQSKAIAIENDLRGTLRNFGLKVGMVGTVRFEARIQELVENIPDMAVLVEPLLIVRRVLREQIVILHRRLLAIVRDDEVCRRLMTVPGVGPVVALTYRATVDVPARFRKSKSVGAVFGLTCSRYQSGEIDWSGRISRCGDEMMRVMLYEAAQSMLRSKKWSWLKAWAMQIARRRGMKKAIVALARRLAVIMHRIWVDGTEFRWTRETAAA

SEQ ID NO: 367807 - protein, 349 aa, unidentified
MAEVSTIGLDIAKAVFHAHGADPRGQMVFSRRLTRAKLLEFFAAQPRCVVALEACGGAHHWAREIASLGHEVKLIPPAYVKPFVKRNKNDAVDAEAICEAAQRPSMRYTAIKTEAQQAAGMVFRTRDLLVRQRTQLINAIRGHLTEFGWVAPKGPSHINVLASLLEEGEEIGASLPEAARTMFLVMTGQLEQLNEQIKLLDKEIARRAREDEAARRLMTIPGIGPIAATALLALAPPVEGFARGRDFAAWLGLTPRQHSTGGKERLGAISRMGERTLRRLLIIGSSAVVLQASKRGAPRGSWLEQMLARKPRMLVTVALANKTARIIWAVLMKGEDYREGHRAPVAAAA

SEQ ID NO: 367808 - protein, 391 aa, unidentified
MSMYFIGIDISKYKHDCCIISAANQKVVSKVIIKNYKAGFNELLTIIHSLANPADIRIGFESTAHYALNLELFLENSLLTFMEVNPVLISEYKKSKTLRRTKTDSVDCESIARWLMTVEYKPHSKGFYHAYSLKSLTRLRDKLIRQRSFYLVKITNVLDHTFPEFKPFFNERLSKTALYLLENYGSAEKMARMNSASYEKLRSVSRGKFSPQQFLRLKELAVNTVGVNNSIFDVELNSLLSLYKSLVKEIDTIKKEINQLIEEVHPHYMSVPGIGPLSAAVIYSEYGDISNFTNPGQMLAFAGIEPGINESGTESHGGKMVKRGSSQLRYTLINCCLPLIRFDMTFATYYAKKRGKGKPHRVAITHVAKKLIRVIYALESQDIDFNAQELR

SEQ ID NO: 367809 - protein, 343 aa, unidentified
MQVVRTVGLDIAKSIFQVHGVDGAGQVVIRRQLKRRYVLAFFQKLPACLVGIEACASSHYWSRELKALGHTVKLMPPAYVKPYVKRQKNDATDAEAICEAVTRANMRFVATKTPEQQSGLTLHRTRHLFIRQQTAVINVIRAHLAEFGIVAPVGRKGVEALLDVVANPTDTRVPAIARACLAALGAQLCRLKEQILEFDRMIIAWHRSHEASKRLDAIPGVGPVLATALIASIAEPKAFRSGRNFSAWIGLVPKQHSSGGKDRLGSISKQGDRYLRSLFMAGALAVIRYAKIHGSRHRPWLTALLARRPSKVAAIALANKIARMVWAMMARGERYKEPVALAA

SEQ ID NO: 367810 - protein, 323 aa, unidentified
MATEERFVGIDVAKDHLDIAVLPTGERWQVKNAEEGYLSLTQRLVALRPTLVVLEATGGLEIPVVTTLAANRVPVVAINPRQARDFAKATGQIAKTDTIDAQVLALFAERIRPQVRPLPDAETQALGALLARRRQLVEMLTAERNRVGTATPMVRPHIEQHIAWLRRALKDMEKDLRDRIQASPLWREKDELLQSVPGIGPVNSLAFLAELPELGTMGRKKIAALVGVAPLNRDSGLFQGKRCIWGGRSPVRDPLYMAALVATRRNPVIQEFYQRLLKAGKAKKVALVACMHKLLLILNAILRHGTPWNPDYRHPSRILGPCS

SEQ ID NO: 367811 - protein, 347 aa, unidentified
MRSIVKQVVGIDVAQDELVVCFGKMYDDWTPELYAGKTFSNKLKGFEQLLKWVEKLADKSIPVRFVMEATGVYHESLAYYLDHRQDEVSIILPNKISNYVRSLEVKTVTDKTASEAIALFGLERKLSLWVKPKKIFKQLRQLTRERDQLVKERTVLKNQLHAEQAEAEPYQKSIERIKNRISMLDCQGKEIIAEINNLIIENPEVKEKVTLIGSIPGVGLLTTAIVLGETNGFDLIRNKRQLTSYAGLDVQEKQSGTSVKAKPRISKRGNKHLRKAMHLPALGAIRHDERFKSTYVRLVSKHGIKMKAAVAVQRKLLELIYTVYKTQTVYDKNYLINNAIKQVEDNS

SEQ ID NO: 367812 - protein, 348 aa, unidentified
MLADELDYVVGVDTHRDEHVLAVVVAPAGAVVARRAVAANARGYAQALRFADAYASGRRVWAIEGAGHYGAALARYLSGRSETVLEAGRSPRGERRLQGKDDGLDAIRAARAALGHELASPRAGQRREALRLLLVARRSAVDVRREALVQLRSVIVTSPDRLRNELRKLPVQGLLDRCSRLRRSKTATPDELAVRLVLRTLARRIEAATVEATELEQEILVHVRALAPQLLNEPGVGPIVAAQLIVAWSHHGRVRSEAAFARLAGVAPVPASSGQTTRYRLSRGGDRQLNRALHTVILHRRQHDPATKEYIARRVAEGKSRRDATRLLKRYLARHLYRVLDQRTPLIA

SEQ ID NO: 367813 - protein, 320 aa, unidentified
MMAQNNLVVAGIDVAKDKVDVCIRQLSLKGTFASTAEGRRELASWLRRKKAGKAVMEASGGYEREWAKVLRDAKIQVRIVDPKRVRSFARSAGRLAKNDAIDAEMIAWFAETFEEAPCQVHDAEREKLVQMVNARLGLIELQTQMQNRCEHSVPGVVSRMQARLLKKIAAEKAALEVEIVALVKATPRFVERAEIIESVPGLAEITSASLIAKMPELGQANNKAAAALLGAAPYDDDSGKRRGERHIKGGRRKVRNLFYMACLGAATMHNPVLKAFYDRLIAKGKEKKVALVACMRKLIVILNIMIARREKWDAGRYAPI

SEQ ID NO: 367814 - protein, 408 aa, unidentified
MKLFVGIDVSSQRLDVCFLDSEDQILHQGTVPNDINGATKIKDYILDFAKTVQYDAIKVGMESTSVYSFHPATFLAEDANLKELGIEVVVQNPKAIARFKGLFEEDKTDKIDAFRIADFLRLNRYNTSLIKEEKYVALQRLTRSRYQLIQQMTECKQHFLENLYYKCNTLTRDVDTSVFGATIMNLLSDSLSLDEIAEMDLGQLAEILQQKGKGRFSDPEKLAKAINKAARDSYRLGKVLQGSVDVVLATYCMMVKTIKEQIKELDKAIERLLDIIPESQCLLSIPGIGKVYCAGILAEIGQIERFEDQAKLAKYAGLYWKRKQSGSYESERTSLTRTGNHYLRYYLVEAANSVKRLEPVYNEYYKKKYNEVPKLQHKRALVLTARKLVRMVDVLLRNHQLYTPERSV

SEQ ID NO: 367815 - protein, 331 aa, unidentified
MNVCVGLDIGSRTSIVGVRKDGRPAGQWDIAQTPAGRKAAVKKLQALKPKSIVMEATGIYYLDLALELHAADLPVSVINPKSFHNFAKLMLVNSKTDAIDAQLLSEYGERMTPRLWTPPSRVQLELRALGRHINRLVGHRTRAKNELHALQATATTVSMLIEDQEEAIATLDNRIERLRKAGRELIAQCPMLNQQYKQLLAGPGMGEVSALAALAELTTLPPMLKSSQVARHAGLDVRQTQSGTSIDKPGRLGKSGNAYLRAAMYMPALTAVRCDPYAKAFYESLVSRGKKKMQAIAAVMRKYLTGIWACMRGDEPFDTAKLFSSEHLRKA

SEQ ID NO: 367816 - protein, 372 aa, unidentified
MATNSITWVGMDAHKNSIKVAVLLPDQVDPVEWTEDTTAEAVRRLIRRLQRLAPGEVRCCYEAGPTGYALQRQLRAAGVGCTVIAPSLTPVKPGVRIKTDRRDARKLAEYFRHGELTEVHPPSETDEALRDLCRCRDDVRVDLLRARHRLSKFLLRRHLLYRQTKHHWGSRHIAWLEQLRFDDAMSQATFDSYFLGVRQLEERQHQLDLRLSEFGGQEPYREPVAWLRCFKGIDTVTAVCVIAELHDFRRFRSARQLMAYLGLVPSENSSGERERRGAITKSGNRHVRRLLIEAAWHHRHRPALSAPLRARREGQPARVLAIADRAQERLSARYRRMTEHGKVHPKTIVAMARELTGYLWAVLHPAAAPTRD

SEQ ID NO: 367817 - protein, 409 aa, unidentified
MRPILRSCCGIDVHKSMIKACVAKGPLNKPPKIEIRTYSTMTSDLLKLSEWLKDNKVQAVAMESTGVYWKPIFNILEADFPVSIANPKYLKKVPGKKTDVSDSEWIATLLRCGLIPKSFIPPMAIRELRDLNRTRRKMVEHMASEKNRLQKVLEDANIKLTSVVSKVDGVSSMNMIQALLTQDEISREDIAAMVCGKLKNKIDQLVQALHGRLTDHHRYLLRLHLKQIAFLADQIKELDDVIQKKMKAFQKESDLIKTVPGIGDTTSSAIIAEIGTDMSQFPDEAHLSSWAGICPGNNESAGVKKSGKIRKGDKFLKATLCEAAWPASKKKGSAYSAYYNNIAKRRGKKRALVALAHRMLMDIYRTLKTGEPYVDEGAEAVFERNSSGRQKSAIRFLEKAGYAVTKASA

SEQ ID NO: 367818 - protein, 410 aa, unidentified
MELLHRRCCGLDVHKETVVACLRLAADGKVTTEVRTFQTITSDLLRLSEWLAANECTHVAMEATGVYWKPVWHILDDGEFALVLANAAHVKNVPGRKTDLNDAMWLAELLAHGLIRASFVPDTQTQEMRNLLRTRKQLVREQSSHVLRVQKTLEDANIKLDSVLSDLMGKSGRAMLEALIAGETNPTKLASLAHRRAKASPEEFREALRGRVTKHHRFLLRLHLNQIDALDAAMATVDAQVEENLGPFRTAVDLIMSIPGIKNLGAHVIVSEIGVDMSRFPSHAHLISWAGICPRNDESAGKRRSNRLRKGAPWLKTTLVQCAWAAVKKKDSYLQAQFYRIKARRGPKKAIMAVAASILTAIYHMLKDGTMYKDLGCSHFDRRSTDQQKKRLLKRLADLGYAVEIKPLVA

SEQ ID NO: 367819 - protein, 453 aa, unidentified
MKKDKKKEQKVIELDAFEQINHNAAGIDVGAEEFYVAVPKGRAPESVRKFPTFTVDIHRLADWLAQCSVKTVAIESTGVYWIPLYEILEKRGFEVYLVNARHLKNVSGRKTDVLDCQWLQQLHTYGLLRASFRPSEQICAIRSLVRHRDMLVSYRSAHIQHMQKALNLMNVRLTNVLSDITGVTGMKIIRAIVSGERNRKTLASFRDVKCAKSEEEIEKSLEGNYKLEHLFVLKQALELFDFYDQQIKQCDQELETLYNQFEEPDQPGTPAPEERKRKRRKNQPHFELSASLYRMTGGIDLTKIDGLESLTVQEILSETGTDMSKWATVKHFCSWLCLAPNNKITGGRVKSSHTPHTKNRASNAFRIAAQSLMKSKSALGAYCRRMAALHDAPTAITATAHKLAKIFYFMLKRREPYRPLAADYYEKVHRDKVVRSLQRRAASLGFRLETVTA

SEQ ID NO: 367820 - protein, 352 aa, unidentified
MMIIGCDFHPRFQQISFLLEETGEFGQRRLTHPAEAEKYYRSLGGAKVRVGIEATGSYGWFRRLMSELGHELVVGDATQIRASNPRRQKTDKRDAEHILRLLMEDRFPAIWQPPAENEQLRQLLLHRSRLVRLRTRVTNQLDGMAKNEGLLIPGGWSGKRRKAIEALPLPGWYSERRKDLLGLLDRLEERIAPLNKAVSQAAANNAEACLLMTHPGVGPVVSLAYVLTIGNWQRFPRGKQVGSYLGLIPAEESSGDKRRLGHISKQGNTLLRWLLVEAASTAQRYDASWHRQYVRLSMNKHHGVAKVAIAHKLAVRLYWMLRSGEDYQHVRERGSQARQSECPVGRSRRPIE

SEQ ID NO: 367821 - protein, 354 aa, unidentified
MKLCVGLDVGLEETSLCIVDGEGLTVREVKVSTEPDAIRSALESYADRLDRVGVEASSLGIWLYRELQPAGLPIVVVEARHMRVSLSTMRNKTDRNDARGIAQMMRLGWYRAVHVKNIEMQKMRSLLANRKLLKRKLIDLENHIRGTLRAYGLMVGAVGRGGYEARVRELIEHGDPVFSMMIEVMLDVRRSIFEGYERLHKVLLQVVQHDAICRRFMTVPGVDPVAALSFKVGVDDPLRFARSRTVGAHFGLTPRRHQSGTSIDYEGRITKQGDVAVREALCEAAASLLLRVRKWSALRAWGLRIAKRSSMLCAIVAVARKLAGILHRMWVNQTDFHVGFGAKVTQRLRLKPAQ

SEQ ID NO: 367822 - protein, 335 aa, unidentified
MEYKVFIGVDVSKETLDFVVLFEGKKLFHIQVSNNNTGINRFYKRIKQHIKVDQEHWLLCMEHTGIYCNPLLEYSNGKGLSVWLEDASRIRAYHGLERGKDDALDAFRIAEYAYAKKEKTMLYKAPRKIIDKIKTIIKLRERLVTTKTRLLAPLKEEKRFGDKQLAREHEKLLKPVIDKVIKQIQLVEKKIQKLIKEDEHLRRLYGLITSVQGVGFVTAINTLVVTNEFKKITEPKKMACHCGVAPFKYDSGTSIRSKAKVSHRANKSMKTLLHLAAMSAISCNGELKDYYLRKVEEGKNKMAVINAVRNKIIHRMFVCVRENRKYEKIYSPVLV

SEQ ID NO: 367823 - protein, 366 aa, unidentified
MKQVTTFVGIDAHKKDLFIAMLSGDQSTPVTWQLANEPNAVRRLVRKLEREAPGPVRACYEAGPCGYALQRQMTTTRVRCQVIAPALVPRKPGERVKTNRRDARKLVELLRAGLLTEVRPPTPEEEAVRDLCRGRDDARTDLQRCRHRLGKLLLRRGLHYSGRNWTRAHRQWMASLTWTHAAERVVVEDYLLAIDQVAARLSELDVRLTAIAQTDPYREPVAWLRCFRGIDTLTAILILAELHDFRRFQAPRALMAYLGLVPGEDSTGEKHRRGPITRTGNSVVRRLLVETAWHYQHRPAVGVGLARRRKGQPGRVIAIADKAQQRLCRRFRKLAAEHKPAPKIVVAIARELAGFLWAALQPVAAN

SEQ ID NO: 367824 - protein, 318 aa, unidentified
MNNPTFQSINVGVDTGKTQLDIFIRPIGLFFSVSNDDKGIKEAITTIKKHKPERIVIEATGRLEVPFVLACSKAKLPYVVANPINVRRFAGAIGQIAKTDKLDAQLIALYSEKIEPPLSTLKPENIRLMSDLVIRRNQLLSMQTMEKNRLQILPKELAMTIKPILTIFKNQIQKIEEKIIKLIESCDEYKHKNDILQSVPGIGKVAAASLISNLPELGSISNKKASALVGVAPINWDSGSYKGYRKIKGGRKQVRTVLYMAMMSAMQCNPVFKSTYSHLVAEGKPKKLAIIACVRKMVVILNSMVRDGAMWNENHANN

SEQ ID NO: 367825 - protein, 340 aa, unidentified
MFYVGLDIHTKHIALCVLNESGQVVRRARVRGIDEMLVILKGLPDRFEVCYEASCGYGHYHDLLKPLAARVLVAHPGQLRLIFRSKNKNDRNDAERLAKLLYLGETPTVHVPSLDVRTWRELINCRSQVIAKRTRAKNTLRALLRGAGVVPPRHPGLWTKKGLAWLRQLDLPTASQQLRRDLLLEEVEALNRQVRRIEQELNRRAQQTPAVARLRSIPGVGIRTAEAVAAFIDDPHRFRHAKAVGRYFGLVPCQDQSGDKNRLGHITREGPAVVRQLVAEATWQAVRRSPRVRAFFERTQRGDPQRKKIAVVATAHYLVRVMWALLKRGTVWQENEARAQ

SEQ ID NO: 367826 - protein, 351 aa, unidentified
MKYYTTTTEYNCGIDLHARQMYACVMDRPGKVLLHTNIEGNDFAYFLKRVAPWRHDLTVVCECTFNWYWLADACDAAGITFVLAHALYAAHIHGGKNKNDRIDSEKLAHLLRSNLIPPAYRYPAEKRPVRSLLRQRMSYVWNRAELMTKLSMNQTAEGVVPAAKGGHNRDVWQERILAQITNPYHQLSVRCDMDAIRVYDKLIQTLDGTITLHAREHQNRDYNLLLSVPGIGPVLAMTILYEMDTVARFPTVKDFASYCRLVKGSVASAGRLKGLTGGKMGNAYLRWAFGEVAVICKRAHRIITPYAEKLVAKHGTFKGNAILANQIARAVYFMLQSGQAFDAERMVAHRS

SEQ ID NO: 367827 - protein, 344 aa, unidentified
MLHAGLDLSRRRLDVCLLSGAGESIAEFATPADADGLGGLARRVRGQRVRAVIESMNGARFVHDTLEQAGWEVLVADAKKVKGLAPLACKTDKIDARVLAELSWRDLVPAIWLPDPAIRRERELARFRLHLVRHRTTLKNRIHATLITFGHPCPVSDLFGLAGRELLDRLAIPDPWRRNVDMSLELIDELELQIAQLTVELKRQGADHRYIPLLVTAPGFGWINAFTVASEIGDIERFASPTKLCGYTGLCPRVSQSGSSDRRGPISKHGPRYLRWGLFEAAMNACKHPLYAERYQRTKRRLGRQRGPKVAQIELSRKLTEAIWHMLTRNQPFAPAGAGFRLAA

SEQ ID NO: 367828 - protein, 476 aa, unidentified
MIRSVGIDLHQGQHRARCLNERAQPCDSFSFQTTPEGLATLEERVFRDGSNPTIVLEPAGLSWLMVAVYLRSCHPDCRLVKAKTQKVAALRRYLRGPVKSDRIDALTLAKMPFIDPEQMDEIYLPSAEIHALQRLTRQRKRIEQDITGRKVRISAIVDGYLPGVRRTFNDAWSSPLRAFLRSRLNPFIVVRDGEDALHAFLSKASPRSKWSGAQTRLVFLACQSLAAVCELSEPAGTVNEEFFMDLQDEIARELRMLEADEVESEALARRIAELYQKLHPSDNLRTIPGVGEHTAPIFLATMGDPARFHNQSAFANWGGVVPGARQSSNVEAKGLRMTKAGPSIMRMALYQAGDVGRRWDPQLAAVYYRQMVYHGKNHRQAMGAVMSHLGARVLRVLKEDRPYELKGPDGKAISWIEGRKLILSEYHVPEDIRRERRRRNIKNRQSSRIRKSGDSDLQDTRGSEAPQPVKVEAVSR

SEQ ID NO: 367829 - protein, 333 aa, unidentified
MVAGTTGSLDKAGATKMTQTNTLTAGIDTSKAKLDIAVHERSQCWQVANTPRDWRRLAADLLKAGVVRVGIEATGGYERGVVGHLRAAGFTVLILQPIQVRAFARVHRRRAKNDALDAKLIAACAADIEQPKIEPDPRLAELAGHLTFIEQIEEDIARLKTRLEHIDEPRLQRIVRADIAHLKTRRSTELTRIVQALRAHGDLARRLDLVRSVPGIGERTAVAIIVRMPEIGRVSREEAAALAGLAPFDHDSGTHKGQRRIAGGRARLRRSLFAAALPAAFRWNKALIALYARLTERGKAHNAALIACARKLLIYANTVVERGTPWTERPAAI

SEQ ID NO: 367830 - protein, 350 aa, unidentified
MGVHKMKHTIVGVDLAKHVIQVCTVHANKVDSNQEITANDFTTWLAQTKPSTIVFEACGTSNYWKQVASSYGHDARLISAKLVAKIRQHQKTDKNDALAIVQASQLADINFIQGKTFEQQELQAIMRMRELAVKHKIAVGNQLEALLLEFNIKVSPRNGGLSGTVQSILEDAEKGFSMHFRQALSITWKAYLQIVQNIKEKEHLLEQVIKTHPDCEKLLDLEGVSTINAVNLFIAIGCGDAGAFKSGRDAAACIGLTPLQHSSGGKTKTGSIGKGIKNVAVRSYLVNGAMSVINHVDQREPKTKKEQWIKQLLERKSKKCVAVALANKTVRTAFAILTQGTRYKAEPLMV

SEQ ID NO: 367831 - protein, 345 aa, unidentified
MSIVGGLDIHRKQLTFDYLDTVSGEVRRGQIAPADRVHLRAWLARFAGRGEVAFAVEGCTGWRYVAEELAAAGVVTHLAEPADTALARGRKRHAKTDKTDSRHLRTLLAEGRLPECWIPPAQILEYRALLETYHDLRREHTAWVQRIHAVFFHQGAPPLSEGALRTEQGLAALQAAAAAHLSPAGQLQVATALEMIAALEARLHTLRRQLREAAAHLTGAKVLAARLYGVGPVTALAMTCWLAGAGRFSSSRKAVRFTGLDITVWSSDRKGPPGRLSRQGPPVLRWAVYEAGKTHARAAAPDHAYYAAVKDRKNSKRAALSEARKIVRQACHILTELGDDALTAA

SEQ ID NO: 367832 - protein, 327 aa, unidentified
MAQKMDVVGIDVSKATLDAYALTSQQARQFANDPAGHQGLVAWLQELGVGVAVFEASGGYERAAAQSLRRAGLVAHVVDPKRVRHYAQAAGQLAKTDRIDARMIAAFGAAFLLGKPSGVAGGDDPARQDLAELVGTRQVLVDHRTSLQQQADAVTSAIAKKLLLATLKQLDRQIETSDRQIAAAIARHEPFAALARRLDTVPGLGPVSIAALIAWLPELGQLDRRQLAALVGVAPFADDSGKRTGQRHIQGGRMKLRNVLYMATVGAATRHNPVLHARYRRLLENGKKPKVALIACLRTLLTILNAMVAHQQDWNPTRLPATEPVAA

SEQ ID NO: 367833 - protein, 411 aa, unidentified
MIKENYIYVGIDLHKETHTAVMIDCYNQKLGEITFPNRPADFPKLVAKVKKCNTDGKTIVFGLENAYGYGRALAVWLIDKGYLVKDVNTAISHRQAKHRGAMYRKSDSDDAEAIALATLNMLDKLPDAYPNDAYWSLGQLVHRRDNIMKQRTRLVNQLHEQLCIAYPSYKQFFNDISRPTALYFWEHYPSRKYLKGKSVEDLRKELVPVSHNRCSTKNCEKILDAVASDKVKNNAHQDARDMVTLSIVSDLQHYDSQLTEVDKMLEQMYKMLGCTLTTIPGVNVITAVKVLAEIGDIKRFSNANKLAQFAGIASLHLSSSGKGKDVATKQGNRRLQATIYFLAIQMVQLSSKGTPRNPVVRAYYEKRKAEGKTSQQALICISRRLISIIYGMLKNGTEYRMPVVENAGENR

SEQ ID NO: 367834 - protein, 309 aa, unidentified
MEHFVGIDIAKDRLDVHLRPSGESVTVARDGDALATLVERLRALAPVLIVMEATGGYETVVASAIAAAQLPLAVVNPRQIRDFARATGKLAKTDRLDAAAIAHFAEAIRPPARPIAEPEAEALGELVARRRQVIEMIVAEGNRGRRASQRRIIGAIERHVALLQSELSELDRDIDQAIRKSPAWQADAELLVGVPGIGPATVRTLIAELPELGRLTRRKIAALVGVAPINRDSGTWRGRRTIAGGRPAVRAALFMAALLASRSNPVIAAHYKKLRLAGKTGKQALVACMRKLLVILNAILRDQKPWQTA

SEQ ID NO: 367835 - protein, 445 aa, unidentified
MKVLHERVAGIDVHKKMIKAAIRSPGAKAWTRKTEILTFTAFYGVLREMARELRRRGVTHVVMESSGIYTDPVYYALCEEDFTEVLVVNPAHVKAIKGQKTDAKDCARLAELLECGLLQGSYIPPLPLKEVRDLTRYRCKTVQARTSEVQRLDKSLESAGIKLSSVASDITGTGPTAMIEALIDGERRGEVMAGLARGRARTAANLADLSMALEGRFTEHHALMCRLILDRVAAYDTAVADLDDRIRSAVAPWQQQIGLLVTIPGFGEVTAWTWIAEIGPAPHQWSGSKEKLACWTSLAPGNHISAGKRKHSRTGDAGTYIKPALVQAAWAAIRVRGRLQARYNRLVRRFGGEKNPGAKKKAIVAIAHTLLKIAYSVLKSGKPYQEPGEDFYTRRRNPGNRQAWLEAELRKLHPGRPVTVIIGPGDDDSSSPPGSKPLAATAASG

SEQ ID NO: 367836 - protein, 424 aa, unidentified
MKVTYQTCCGVDVHKSFLVATIIKTTAGIEPSYQKKRFSTFNNSILDFKSWLLENECHDVCMESTGKYWVPVFNLLEDQINVTIANPKWVKAVKGNKDDTKDSKWIGDLFRLGLVKSSYIPCRLIRILREYTRYRYKIVSCRSSEKNRYQNALTVCNIALDSVVSDIFGKSSSSIIDYLLEQSGTTINHKEIASKLLKSLKSKEDAVIESIEGYQMTDAQKYRMRLIRAHMDYITAEINDIDKQIESLISSDPDYDKAIRLLTTIPGVKRDSAITIISEIGIDMSQFCNSKRLCCWAGLTPSNNESAGKKKSVRITRAGVYLKPALVQCAHAAVKSDKSPYYKTKYESLVKRRGKKRAVIAIARMILTAIYRMLSTGEVWNPSDLYKIDMPAPLAEKQKAKAIKQAKKLLQKEGLLPPDEPLAS

SEQ ID NO: 367837 - protein, 350 aa, unidentified
MNVNQYIGFDVHKKSVSYCVKIADGAIVEEGKLRATHEALRRWAEERREPWRGAMEATLFSGWIYDALKPYAAELQMGHPAMMKAIGASKKKNDKLDARKIADLVRCDLLPACYVAPPEIRELRRLLRYRNLVVRQAVRMKNRMSGLLMEVGAEYNKQQLHGKQYFMELLNIVEEVPESVKDMLRLSRGAMEMFETTQQQLLVRLKKDQLLSKRVTLLESIRGVGEVTALTWELEVGDPHRFSSVAHAVSYCGLTSALVSSADKQQRGPISKQRNAHLQTVLIEAAKLAPRWNPQLAAVHAREVQRGNRNRATLAVARKLAAYLLAVDKSGQAFQVRNQPAAAMAEEIVA

SEQ ID NO: 367838 - protein, 449 aa, unidentified
MKSQPAKKAVKNKQQSKKVSANPTPGKWDQMNRKQRREMMRKMQNQDLSLEIVHPDAAGIDIGNESHYVAVPPSRDLQAVRCFGCTTAELKAMADWLKQCRIGTVAMQSTGVYWIAVFDILEAAGLEVYLVNARETKNLPGRKTDVQESQWLMKLHTYGLLRNSFRPSPEIRMLRTYWRQRHDLVQSAARHIQRMQKALTQMNIQLANVISDISGVTGQTIIKAILKGERDSRELAAYRDVRVKASEEEIAQALEGNWQDDQLFVLQQELAGYEFCQKQMAECDRQLAQYLGQMEDRSQGATLPTETRKGRRKKKKGNAPQFDLRQDLFRITGTDLTQIDGIDVMTAMTILSEVGGDMNKWKTENHFVSWLKLSPDNKISGGKVIGKGRMPTNNRATSALKMAASTLRESETYLGAQFRRFRSRLGRRWRPKPWLPSWPVWSTACCATG

SEQ ID NO: 367839 - protein, 359 aa, unidentified
MTFVGFDLHKRYITACAMDATGAIIAEIRQLSTAWVTVETWLAACPAPVCVAMEATLYWEWLVTQLQHAGIGVQVAHAHQVKLIWQARAKTDPIDARKLAELLRVDCLPAIWVPDVETRRRRQLLRGRAFLVCQRTAVKNRLHGHLTAENHVCPTTDLYGKGGRAWLMSVPLSPMLSAQRDGLLRLHDFLAAEIKELDREVKGRARGDPIAQELSSVPGVGVFGGLFLHAEIGTIERFPSSHHFAAYAGLVPTTQSSGGKTTHGGLSQHSNHWLKWILVEIVQTLKQAPGPVGDCYRHHLRAKGKPKATVAAARKLSGYLYWMLREGWTYDEWLAQHMKARAVARWSEVRPAQRMGALV

SEQ ID NO: 367840 - protein, 403 aa, unidentified
MEVLYPRCSGLDVHKDSVVACVRCVSPPGHQEVRSFQTTTTGLLALADWLTSHGCTHVAMEATGVYWKPVWHVLEGDFELVLANAQHIRNVPGRKTDVNDATWIADLLAHGLIRSSFVPPARIQELRDLTRTRKQLIREISQHSLRIQKVLEDANIKVASVLSDILGRSGRAMLAAIIAGENSPERLADLAQGTARKKTAELVEALRGRVTDHHREMLTLHLDLIEALESALQKVDAAVGKALAPIQARAQLLTTMPGVSDIVAQVVVAEIGVDMSRFPSARHAVSWAGLCPRNDESAGKRRSTRVRKSGTWLKTTLVTAAWAAVRVKDSYLRVQFLRIKSRRGPKKAILAVAASMLTAAYYMLRDGVEYRDLGPSHFDRHDRAKTIHRLVKRLKDLGYGVEL

SEQ ID NO: 367841 - protein, 373 aa, unidentified
MWLTQNPFTEQRALSSVTVFVGIDYHQDSVQVCVLDPDGEQLANRSVDNDAAEVARVATRHGRPGRVAIEACCGAADMAEELATEQGLPVELAHPGYVARLKRSPDKTDLGDAQLLADLARVNYLPTVWLAPESTRQLRRLVRHRAQLVGRRRDVKLRIRSLLRENRLRCGEAAAWRKAWLIWLTQEAKLPESDRWIMEDHLAELAALAGRIAAVEAKIKAATEGDAIVAQLMEQSGVGLVTAVTMRAEIGRFDRFATGKQLARFCGVTPRNASSGARQADAGLIKAGNPELRVVLIELAHRLIHRVRGRWFDLAAGMLQRGKPKNVVVAAVANRWVRWLHHELRRDAAGLGSGSTKGGPPLPSSPPHRPRTG

SEQ ID NO: 367842 - protein, 348 aa, unidentified
MVIIGGDLHKRTHTAVAIDENGRKLGQRTVAATPDGHLELLRWADEFAERRWALEDCRHLSRRLEADLVRAGESVVRVPPKLMAGARRSGREPGKSDPIDALAVARAALREPDLPVAHLDGPERDLRLLVDHREDLVMTRTQVANRLRWHLHELGLAEPAPRSLDRTHVIESLRVELADQVGTVGRIARDLVERIAALTASINVLEHEIGVLASELGPSLGDLQGCGGLSAAKLIGEAAGISRFRSRAAFARHNGSAPVPVWSGETTHHRLSRGGNRQLNVVLHRIAITGIRLGGLGRQYFEHRLAQGDTKTEAIRALRRRISDEVYRRMRQDEAARAAQRASLAAAA

SEQ ID NO: 367843 - protein, 342 aa, unidentified
MEHFAGIDVSLEASSVCVVDGTGRIVREGKAATTPEALAQFLTASGVTFARIGFEAGPLAPWLFEGLVAAGLPVSCIETRRMKVFTSASPVKTDRKDAQAIAQAMRMGFFRAVHMKTRASLEARLLLTNRSLLLRQRLQIQNTIRGTLKGFGLKLGAASQGRFLAKVRTLITEQPMLQAAIEPLLDAWQALRLAFVRLDRQVHRAALADPVCRLLMTAPGVGSIVALAFRTGVDDVNRFAKSRLVGAHFGLTPRKYASGRIDRDGRITKCGDAMVRGYLFEAANSILSRLRKPCDLREWALELAERTSAKHAKVALARRLASVLHRMWLTGEAFRWPPAAMA

SEQ ID NO: 367844 - protein, 346 aa, unidentified
MIIVGCDFHPAWQQIAVFDSETGEITEYKLINGNGEAEQFYRQLPSAGLIGIEACGNSQWFVDLLQRLGHEIWIGDAAQIRASYVRKQKTDRRDAAHILKLLMEGRFPRLWMPSAEERDLRQLLVHRHKLVSIRTRVKGGLQHLALNRGLQKRSKLWTEAGQKALRELPLGTWAACRREDLLGLLADLDKQISKLDAAVAQAAEDHPQARLLMTQPGVGPITSLAFVVTVGDVSRFKRGKQIASYLGLIPRERSSGGRQRLGAINKQGNSFMRTLLVESAQSVTRLDEGFRKQYVHRCHRMAKGVAKVAAARRLAVRLFWMLRTNTKYPEIVHIESSPALAVVGES

SEQ ID NO: 367845 - protein, 367 aa, unidentified
MMWTASPERHQVPRRDRCRSRIGKPSMRTFIRIGIDLAKNFFQVHAIEREGEPAVTRKLSRGKVLAFFAQAAPCRVGMEACGSSHYWAREIRALGHDVVLIPPAYTKPYVKRGKNDANDAAAICEAMSRPDMRFVPIKSADQQAVLMLHKTRELLVKQRTMAVNALRGHLSEFGLIAPKGIHRVKELLALAQADETLPEEAKQATAMLASHSDGLDEKIGDLEKTIARASGKNQTIRLLDEIPAFGPLIASAMVAFNPDPSVFRSGSDFSASLGITPSQHSSGGKDKLGGITKRGNRYLRKMLVVGCTSVLRVAHKYKGALAEWIAAMRARKPERVVAVALANKLARIAWAMMSTGEAFRTELYTKA

SEQ ID NO: 367846 - protein, 419 aa, unidentified
MEAIIERCCGLDVHQASVVACVLVGPASTTRPRREVRRFGTFTKDLLELRTWLEENHCTHVAMESTGVFWRPVYAVLEGGFDLVVGNAYHMKNVPGRKTDIKDAEWIADLLRHGLIARSFVPPKPIRELRDLLRFRRKLVETRANERNRTIKVLEAANIKLSTVVTDIFGKSGWAMLERLAAGETDTDKLASLGYGSMKKKRAALSASMTGSLGDQDRFLLKLCLRRLKALEADIAAIDKKAAKQLKPYRAEFDALQEIPGVGDSVAATIIAELGVDPATFKSPQHLAAWAGVCPGNNESAGKNLGGRTRKGNPALRTALIEATMGACRSKKSYYRDKYYRLKSRRGHKRARMAIAHKLLIAVYHVLFERKAYVELGAAYLDQLHSQRTQKQLVGRLERLGYEVTLAKKEAERSEVTPA

SEQ ID NO: 367847 - protein, 384 aa, unidentified
MAQVNDLSRSLTAFDPISTLVVVVEMSKASWLVSGAVPGVERQPLKKLEPDATALLRLIERWRNEAVGAGRPISRIALAYEAGRDGFWLARWLIARGIEAHVIHSASVAVSRERKRAKTDRLDAAMLMRVFLGWLRGERGHCGMVAIPTMEEEDARRPSRERENLVNERSRITNRMKSALARLGVRGFKPHLRKAPERLRTAEGTGLPANIIEEFRRDMARLALVREQISSIEKTRAERLERAADTGPHAMVRLLARVIGIGIETADMLVREILSRKLRDRRAVARYAGLTGSPDESGLKRREKGLAKAGNARVRRGLIQLAWRFLTFQKDSALARWYRTRTEGPSGARKTTMIVALARKLLIALWRLVTTGEVPDGVELRPAA

SEQ ID NO: 367848 - protein, 319 aa, unidentified
MAKQTIEYEQVIERGCGLDVHRDTVVATVMGKGIQTETRTFGTTTSSLKEMGEWLEKLKVTEGAMESTGIYWKPVLHILREYPINLLVVNARHIKNVPGRKTDKADSQWICKLLISGLLKGSFIPPENIQALRDLHRYKKKLVGTVASEKNRIIRVLEDANIKLSSVVSDTSGVTATYLINGLIEGRKDLEKLVSECYHKKLQATPKQIVEAINGRLTPHLRFLLKSMQKHIQSVEEQIAEIDVEIETHIKDFEKEIELLQTIPGVGKEGAIGIVAEIGVDMNIFPSEHHLASHSGMCPGNNESAGKKKVQEHDKETNI

SEQ ID NO: 367849 - protein, 425 aa, unidentified
MRTLAPGGDAGQCQQEGSLLVGCDVGYEFHAIAILDKSGEVLEKLPKVYNHRKGFEYLLSRIKHWKNITGARDAIFAFEPTGHYWRPLVHYVHEQGIEVRFIKTTAVKAMRELTDSTPSKNDRRDAVTLALLLKEGRVLKGRPLEGIWRELRDLVTYRQKLHEEHTAYLQRLRAMIDTFFPELVTVFSKTSAVGLWKFLEQSPFPEDLIDAGEVWLLNHLKKWTRKGESAENKAKSLMESARHSIGIPASAGDRRHMASILSLLEIYKKELRQVEREMERALMETEYGAILLSFPGVGVVSAATFLGELGNPQDFETANQVVSFIGIDPSEKSSGKKQSRNRISKKGRPLMRTNAYHMALSAVLHCPELRAYYLSRKKEIESGKLDLKPMQLLFAVAVKQTRILFAMCRDKQVYQPNFLELRSAA

SEQ ID NO: 367850 - protein, 410 aa, unidentified
MNPQNYIYVGVDLHKQHHTAVIIDCWNQKLGEIKFDNKPTAYAALIKVVNKYLKKDMQVIYGLEDIGGYGRALAVYLFEGGYKVKEVNAKLANARRKSHVTVEKSDAWDAECVAKVLRDELPNLPDAKPIDLYWAISQLINQRRWIAKNLTGLVKKLHQQLGYHYPSYKKFFSQVDGKTALGFWWRYPSPDHLEHVHVENLAQFLRALSNNGLSTKKAMQIKELVQTDGSTWRDFQDKRDFIVRSLVRDIRCSERNLARIEAEIQDLMSQLGFQLETMTGVDLVTSAELVAEIGDIHRFANADKLARFAGIAPIAVGSGNKHRNYKSKQGNRELHDIIKALAIRQIAVTRTKKEPRNPYFHAYYEQKISAGKTKQQAIVCIMRKLVNVIYRLMKTKAVYTIPEVPIKQVS

SEQ ID NO: 367851 - protein, 355 aa, unidentified
MQLYAGLDVSMDETSICIVDRDGKIIKQCTAETEPAAIRCALDGYADRLHRVGLEAQAFSPWLFTELRRLGLPAIVVEAVHMQKALSAQRNKTDRNDARGIAHMMRVGWFRQVHVKSSESQHLRVLLSNRRLLKRKFIDIENEVRGTLKAFGIKIGEVSRGKFEARALEVIEGALPLLKDLVHGMLAVRRMLWAEYSRLHNMLVRIVRHDPICRRFTTVPGVGPVTALAFKAAVDDPTRFKRSRTVGAHFGLTPKRFQSGSVDYDGGITRCGDGEVRTTLYEAALALMVRSKKWSALRAWGVGIAKRRGHKRAVVAVARKLAIVLHRMWLDGTEFRWTRADGSHGDTPPAITAAA

SEQ ID NO: 367852 - protein, 397 aa, unidentified
MYLNVGIDVSKNKHDACILNENGEQIGKFMKLTNTKTSLDKFLEQIKLISEKNGAEVRIGLEATGIYWYSLFSKISDDHKISIYNPTQIHAFAKVNVRGSKTDKIDAKTIANMLRFGNAPQTDYSDKQRLELREYVRFHWKLTNNKTNLKKRFKRNLHLVFPGYDQVFKDVFTKTSREILSQSPTPDDILEMGERKLLELMKKASKNHIDEEKARELMVKAEDTIPSEILKESSLFELQIMMDMIENLEKHIDTLETRIFAIWDKVKDKHYIQTIPGISEFRAAMIWAEIGDIENFKHPDQIVAFAGLDPKVRKSANREVIGGPNKRGSSTLRWALGWAVQESKNVNPVLAPYFEKKIAEGKHYNTARCAASKKLIRIIWSVEKNKKPFQIPSNLKS

SEQ ID NO: 367853 - protein, 343 aa, unidentified
MAKVYVGLDMGSSCFHQVAMDKEKVVVQDRKFDTSEANLIRAFEDIKGEVHVHLEAAELAAWVRRVLKGRVARIVVGHPKSSAWIAKDPLKRDRLDAYKLADLLRMDQVHEVYYADEDHRTVFKQIVQHYDDVTDQEVRLKQKIKAALREQGVIAKGLDVYTGGGREKYLTEVPSAAAREAIGQLYGLMDVTLKAQKDARNLMRRESQKYPEIARFEGVPGLGVVLSCRFSAYVQTPHRFSAKRKLWRYCRLGITDRQSDGKPLGRKALDWNGNGRLKDMSRTAFLGAMKTVEENLFQRTYRQTLQRTHNQTHARLTTQRKILAVLLAMWKGGTSYQDNKEKG

SEQ ID NO: 367854 - protein, 428 aa, unidentified
MSPLPEQRFTAYVGIDWADTKHDICVQAAGDTRRESGCIQHRVAAIDEWANGLRRRFGGPIAVALELAKGPIVAALQKYDFLVLFPINPATLAKYREAFQPSGAKDDPGDAELALDLLLHHPERFGPLRPQSTAMRSLMSLVERRRELVGDQTRLTNRLGDTLKQYYPQALEWFDDRGTVLFCDFLERWPTLRAVRLARTRTLQAFFGAHHCRSTRLISERIGSIREATALTDDPAIIGPCRLHVLALVAQLRTVLAAITQFDREIAAVARTLPDYALFGNLPGAGAQLGPRLLAAFGEQRERFSSAEELQQYAGIAPVTERSGKKSWVHWRLQCPKFLRQTFVEWAGQTIGRSFWAGAYYRQQRAKGSSHHIAVRALAFKWIRILYRCWQTRTPYNETVYLNALAKRGSPLLGKQGDSVKMGSCSPI

SEQ ID NO: 367855 - protein, 411 aa, unidentified
MVKENFIYVGIDLHKETHTAVMIDCYNQKLGEITFPNRPADFPKLVAKVKKCNTDGKTIVLGLENAYGYGRALAVWLIDKGYLVKDVNTAISHRQAKHRGAMYRKSDSDDAEAIALATLNMLDKLPDAYPNDAYWSLGQLVHRRDNIMKQRTRLVNQLHEQLCIAYPSYKQFFNDISRPTALYFWEHYPSRKYLKGKSVEDLRAELVPVSHNKCSTKTCEKILDAVASDKVKNNAYQDARDMVTLSIVSDLQHYDKQLAEVDKMLEQMYKMLGCTLTTIPGVNVITAVKILAEIGDIKRFSNANKLAQFAGIAPLHLSSSGKGKDVATKQGNRRLQATIYFLAIQMVQVSSKGTPRNSVVRAYYEKRKAEGKTSQQALICISRRLISIIYGMLKHGTEYRMPVVESAGENR

SEQ ID NO: 367856 - protein, 385 aa, unidentified
MQVLYPRCAGLDIHKDIIVACVRCVSVPEHHEVQSFCSTTKGLLALSDWLAVHGCSHVAMEATGVYWKPVWHVLEGSFELVLGNAAHIRNVPGRKTDVNDAMWIADLLAHGLIRSSFVPPAAIQELRDLTRTRKQLTREIAQHCLRIQKVLEDANLKLGSVLADVLGGSGRAILKAIISGEDDPVLLAALAQGHARRKTSELREALRGRVTSHHRAMLALHLQLIDALEHALTDLDAAVGLALTPIRQHVQLLRTIPGVGDLTARVLVAEIGVDMTRFPDSAHLISWAGLCPRNDESAGKRRSTRVRKSGTWLKTALVTAAWAAVRTKNSYLFAQFNRIKARLKESNHRSRCVDAHRSVAHASQWRGICGSRCRLFYSARHAKHR

SEQ ID NO: 367857 - protein, 355 aa, unidentified
MSEEKYIGMDVHQATISVAVMDAQGKLIMECLLETKATTIVEFIQGVQGTLSLTFEEGTSATWLHDLLKPHVSRLVVCDPRKAALLKEGNKSDRIDARKLAELLRTNQLKPVHHGEHGVRTLKELGRSYLTLTQDVTRVMNRIKALYRSWAIPCAGTTVYAPRHRAEWLAKIGEPGVRVRAQRLYQQLDGLQPVRLEARRELLLESHKHSAVKLLRQIPSIGPIRAALLVALLQTPHRFRTKRQLWAYSGFAVETHDSGEYRCVRGKLQRNRERMTVRGLSANYNKDLKNLFKGAAISASTRPGPLRDFYVALLAKGMRPTMARLTLARKIAAVSLTIWKKGVDFDAKQLDQQAA

SEQ ID NO: 367858 - protein, 374 aa, unidentified
MFAACKPTTQRRNDELINVGIDVGKRFCQAALKAEDGRLLDELRFENTSRGVQELLEHITVHGDEARAVVESTANYWIRIHDMLEEHGVDTLLANPLKTKLIAEAKIKSDKLDARTLATLLQGNLVFESYVPPKSGREHRILARHRAGLVKTRTEIRNRIHALLDKHELQHGYSDLFGKQGLEWLSNLRLEGVDQTVLETNLALLKTLDEQIEAVTLEIAKTACNEEDVRILITMPGIDFYSAMVIASEIGDVKRFPTQWKLVAYAGLAPSQHQSGEYERRGGITKQGSKWLRWILVQAAQQARQRDARFKAYYERVAKRRGKQKAVVAVAKEMLVVIWFMLTRREPYRGQDPELVERKLKRMNTLATSGSHAA

SEQ ID NO: 367859 - protein, 417 aa, unidentified
MSEYAALIGIDWADQKHDISLIDQATGRVEATILRHSSSTIDEWATALRTRFGGRPLAVCLEQSRGPLIYALMKYDFLTLYPVNPSTLAKYREAFSPSRHKDDGTDAAYLAELLAHHRAHLRAWQPDSEQTRTLRYLVEHRRRIVSDRTRISNRMTALLKCYFPQVLQWFPSIRTVLVCDFLLRWPSLDTLHRVRRETLSKFFRSHNSVRKETIEKRVDSIKQSLPLTTDRAVIASSVLMVKALASQMQTTLSAINEFDTEIAALCAVNEDFALMKSLPGAGPNYAARLTVALGSDRERWQSASELAQLSGIAPVIERSGKSCRVRWRYFCPKFLRQSFHEYAGESVKHSFWARAYYDEQRAKGKSHQAAVRALAFKWIRIIFRCWKTRTAYDEVKYLDGLRKKGSSLLNYAANNPA

SEQ ID NO: 367860 - protein, 349 aa, unidentified
MNRTTYGLDIAKNVMQLHWVDGETGEIGRKKLVRAKLGEYFAQLQPVRIVMEGCGSAHHWARVLGGLGHQVELLPARQVRPFVRSNKDDAADARAIWLAAQQSDIQRVPQKTVEQQAVMALHRSRQHWVRVRTATINALRGLLYEFGVVLPGGKKAGLKTLVAHRADIDARVPAPMSRLIDGQLDTLQDIERRIDQLEAEVAGLQKQTGKADKLRKVPGIGVLGASALAATLGDGRGWRSGREFAASLGLVPVHSGTGGKVHMGHLSKRGDPYLRTLLIHGARSVIQHAKLKPQWLEQLLARRPMNVAVVALANKLARTAWALVAHGRDYQREWKSTPPKGCAAHAAAA

SEQ ID NO: 367861 - protein, 343 aa, unidentified
MQAITTIGLDIAKSVFQIHGVDATGQVVIRRQLKRRYVLAFFQKLSPCLVGIEACASSHHWSRELKALGHTVRLMPPAYVKPYVKRQKNDATDAEAICEAVTRANMRFVATKTPEQQSALTLHRTRHLFIRQQTAVINVIRAHLAEFGIVAPVGRKGVEALLDVVANPTDKRVPAIARACLAALGAQLRKLKEQILEFDRMIIAWHRSHEASKRLDAIPGVGPILATALVASVADPKAFRSGRSFSAWIGLVPKQHSSGGKDRLGSISKQGDRYLRNLFVAGALAVIRYAKIHGTKHRPWLTALLARRPTKIVAIALANKIARMVWAIMARGERYKEPVALAA

SEQ ID NO: 367862 - protein, 342 aa, unidentified
MTYYAGLDVSLEQTSVCVVDEAGAVVLERRVATEPAAIATALAALPEAPARVLLETGGLTPWLWHELSARGLVVHCIDARRAKAQLALRPAKTDRNDARGLAEIARMGWYANIRVKSLDHHAVRAKLAARAHLVATARDLGNQLRGLLRTFGLRVGKGKGQAFEQRVRTLVADCPALQPVADALLAARRAVRAEVEHLDRVLLREARGDTTCRRLMTVPGVGPITALAYQSTIEAPRRFGRARDVGAYVGLVPRRHQSGEVDRSGRISKQGDALLRGYLYEAATVLLTRLQRPCALRSWARTLAARIGVKKARVALARKLAVLLHHLWSREEDFRWAQPMAV

SEQ ID NO: 367863 - protein, 415 aa, unidentified
MTHSSPQSPLDPSVYRFIVAIDIGSEQCSFCVFRPDKSLLVKATEMANASAGFAQLHERLSRLGGSPEQVLVGMEATSRYGENLFQFLVQRGYHLCLLHPAQTHWFAKRRGLRAKTDRLDAQTIGHVLLSGEARVGYVPNDLITSYRELVRLHGQLSEDLTRHKNEIHALLQVLFPEFSQVFADPYRQTAIAVLTRYPSAQAIRAAGVETLTQLLRRFAPRNYGRETAERLVYLAQHSVSSPMALEARQLSLQILCQQLTQIQSHLAQLDEELEKLRVRDPESQLLQAIPEFGPQTVAVLRAELGDVARFHRTDQAVAYAGLDIAIKESGKWQGQAKLSKRGSGLLRQMLYLAAVRSVRFEGSAFGIYYRRLVARGMPKGAALVAVMRKMLIVAVHVLKTKEVYDPSKVAAACAG

SEQ ID NO: 367864 - protein, 322 aa, unidentified
MNARIFVGVDVSKDSLDVHLLHVQSNEQRSTSLRVDNSQKGIDELIQKLKDKPVELLVIESTGGYERRALLELLNAGVNVAMVNPTRVRRFAEAFDTLAKTDSIDAAILAQFALRMEPRRSEIPSQNQIVLNELMTRRRQLIVMRTMEKNRAQQAVGKLPVKQIRSLLKLIDKQVEEIDRQLEKLIQADPDWKERAELLDTIPGIGKNTAFRLIAELPELGKLNREQITALAGIAPMNRDSGRQRGKRHIRGGRVEARNALYITAWVAKRYSPKIKAYAERLKAAGKPFKVIMIACMRKLLIIANLMLKSKTPWNENPVLGA

SEQ ID NO: 367865 - protein, 347 aa, unidentified
MLHLGLDLSRKRLDVCVLNEAGTKLAVTQAPPDLDGLRHLAKEVSALGGPVNAAIESMNGARFVHDSLELMGWDVEIADAQKVKGLAPLACKTDKIDAWVLAELSRRDLVPAIWLPDPEIRAERERARFRLHLVRHRVMLKNRIHSSLLAFGKPCPVSDLFGKSGRELLGRLELPDPWTKNIATALSMIDDLDSEIDACEKELRSLGADHPYVSLLQSAPGIAWVLGFTIASEIGDISRFSSPKKLMGYTGLCPRVYQSGGKDFRGPISKNGPKYLRWSLIEAAVHASSHPVYKDHYDRTKARLGRQRGAKIARIEVARKLTEAIWHMLQTGSMFAPARSPAAPLVA

SEQ ID NO: 367866 - protein, 345 aa, unidentified
MEHYVGLDVSLKLTAICIVDRTGKIEREGVVTSDPDTIAAFVKSHAPHVARIGLEAGATSTWLWIELNKRGLPIICIDARHAKAALKMQINKSDRNDAVGIARIMQCGWYKEVRVKDLDSHAIKALLVSRALLVKIKRDIENQIRGLLKNLGLVIGRAKMNVFAMRAAELAEARPAVADAVEPLLKAREAVERKIADLDRKVLRLARNNAQVRRFMTAPGVGPITALCFLATIDDPTRFKRSRSVGAYAGLTTRRYASGEIDWTGRISKCGDKMLRTYLYEAANVLLTRIAKWSALKAWGIRLAKRSGLRKAKVAVARKFAVILHRMWIEGTEFKWSKEAANQPA

SEQ ID NO: 367867 - protein, 320 aa, unidentified
MMAQNDLVVVGIDVAKDKVDACIRRFTLRQTFPNTAQGHRKLVAWLSKYQVGKAVMEASGGYEREWRNVLHSAGIEVRIVDPRRVRSFAQSAGRLAKNDPIDAEMIAWFAETFSQAPGQIPDAAREELAALAKARKALVDVKIRLQAQDEHAAPEPARKAYARVLKSLAAEIDKLEAAISAKVKATPEFAERAEIIESVPGLAQATSAILIAGMPELGQVSDKIAAALIGVAPYDDDSGKRRGERYIKGGRRWVRNAIYMPCLGAATQYNPVLKAFYQRLLAKGKEPKVALVACMRKLIIILNTMLARRQKWNPGGHAMG

SEQ ID NO: 367868 - protein, 347 aa, unidentified
MVIIGVDLHKRTHTLVVVDPAGRQLATRTVPATVAGHLEALRWAQGWAERSWALEDCRHLSRRLEADLVRAGEAVVRVPPKLMAGVRRAARTRGKSDPIDALAVARAALREPDLPVAQLDGVAREIQLLLDHRDDLVAERTRVQNRLRWHLHELDPGNEPAPRSLGRARVLGALEDQLATLPGVVARLARDLVARCRELTAQIKELEGELAAGTTDLAPSLLALQGCGVLSAAKLVGEVAGIRRFRSRAAFAMYNGTAPIPAWSGHERLRLNRGGNRQINTALHRIALTQMRDPGRGRDYFEHRRAAGDTKKEAIRALRRRISDEVYRRLWQDELARSAEAGLKDAA

SEQ ID NO: 367869 - protein, 341 aa, unidentified
MQITTIGLDIAKNVFQVHGIDANEKVVVRKQLRRSQVIAFFKALPPCLVGMEACASAHYWARELRKFGHEVRLMPAKDVKAYVKRNKNDAVDAEASCEAVGRPTMRFVGVKSAEQQGQLMQHRTRDLLMRQRTQVINALRAHLAELGIVAAQGREGLKELLAIIADESDARLPIDARASLIVLAAQLQAVQTLIGSIEKRITAQHRANEASKRLQSIPGIGVIGASAIVSTVTDPNAFRSGRDLAAWIGLVPRQDSTGGKQKLGPISKQGDRYLRRILVVGAHAVLRRAKHNPEKYPWLTQLLARRPFKVVAIALANKMARVAWALLASGGRYRAPRLTAA

SEQ ID NO: 367870 - protein, 339 aa, unidentified
MGKYFLGIDLHKEYAFFSLIDKKRKVLFQKRVPLERKTLLQEIEALPQGTQGVVEPLLSWSVLKELFSKKKKKLFACHPLEVKALSSKKRKNDKYDSLRLAELLRVDFLPKVHIPSKNSQRLKSILMTRELLLKMKHQINQRVSSFYLGLMKKPCFERKLPLFYEKQKEILLLILSLIEKKIKEIEKELKKEYSSQRKVKILLSIPGIGLFCALSFLAWIDDEKRFPHQKAISAYSGFAPIIKESGKIKKKGGLSREGNSLLMRNFYLATLHVSQSWGYLYSFYERLRKKKGKKKARVALARKLFCLCWTLLKKKKPFRKDYPFLKKKKEVKARISTGP

SEQ ID NO: 367871 - protein, 346 aa, unidentified
MDQETGECGERQLNHSDGEAEKFYRELKQRGVSVRVGMEATGHSRWFERLLAELGFEMWIGDAAEIKRQRVRKQKTDREDARLMRKLLLENRFPRIWVPSPENRDLRQLLWHRHRLVQMRTRIMNQLQAVAMNEGYRWKKKLFSAQGRALLEKLSLAPWASRRRKELLELLDQLDPKIAELTAAVEREAHKRPEVVRLMTHPGVGSITGVAYVLVIGTPERFPCGKQIGSYTGLIPCEDSSAGKQRLGHISKQGNTLLRYLLGEAAQAAARCNPDWRRRYMHLAMRRHKNIAKAAMARKLAVRLYWMWRNGWDYSQLVEFGSHAGKLGTEHGVKESVVHMIGHPAP

SEQ ID NO: 367872 - protein, 410 aa, unidentified
MEVLYPRCAGIDVHKDVVMACTRVVHQRKVEQEVRSFSTKTCGLLDLSTWLEQAGCTHVVMEATGVYWKPVWHVLEESFELVLANAQHVKNVPGRKSDVNDAMWLADLLAHGLIRGSFVPPAPIQEVRDLTRTRKQLVRETTQHVLRIQKTLEDANIKLASVISDVLGATGRALLTALIAGETDPQKLVALTVGRRLKASPEDLVEALRGRVTPHHRFLLQLHIDQVDALHKAVAEVDKRMQEVLGPFQEQVELLKTIPGVSDVAAQVIAGEVGMDMSRFPSAAHLISWAGLCPRMDESAGKRRSTRVRMGAPWLKTTLVTAAWGAVRTKKPSYLGAQFLRIKGRRGAKKAVMAVAASILTGVYYMLRDNKPWKDLGADHFDKRDKGRVVQRLVKRLETLGVKVRLQEAA

SEQ ID NO: 367873 - protein, 413 aa, unidentified
MEVFCGIDWAEDHHDIALAGAGGQLLARRRISDDAAGLATLLELLASHGDRAEDPVPVAIETPRGLLTACLRATGRKVYPINPMAVARYRDRHSVAGRKSDHGDAVVLANILRTDAHAHRPLPADSELAQAIAVLARAQQDAVWARTAAHNKLRSQLREYYPGFLAAFADARCGITRPEARAILAAAPTPAAAATLTLSQLQALLKKAGRKRGITAEAARLRTALRAPQMRQLPLVEQAMGRQALALLRQLDAACAAAADLEQATVESFNQHPDAGIITSFPGLGSIAGARVLAETGDDRSRFADAKGLKAYAGAAPITRASGKTTAVLHRRVKNNRLADAGYTWAFAALTASPGARAHYDRRRHAGDRHAAAQRNLFNRLLGCLHHCLATGQHYNETTAFPPPAPTAHAKAA

SEQ ID NO: 367874 - protein, 343 aa, unidentified
MYYIGVDVHKRTISYCVKDAAGHVHREGKIGSTRRELDSWIKTLPEPRMMAMEATIFSGWIYDHLLPHAEQVKVAHPLMLRAIAAAKKKNDRIDAAKIADCLRCDFLPECHMASTEIRDRRRTLRYRGLLIRQMVQMKNRVSGLLMETGVDYNKRRLHKVGYFADLMSANEEVQESIRPLLKLSREHIVRAQRLDYALVSSLERDPLLSQRLTRLRTVPGVGPITPLTWALEIGDFSRFRSVKQAISYCGLCGDERSSADKVMRMPLSKQRNKHIQRLLIEAAKLAPRECHELAMVRERELQKGNPNRATLAVARKMVGYMLAVERRKQDFVPAEKFKCTAAA

SEQ ID NO: 367875 - protein, 375 aa, unidentified
MKNKVRFLGLDVHAETIAVAVAEPDGEVRSLGTIANRAESIRKLIKKLGPIEQLKACYEAGPTGYVLYWQLAELGVACEVIAPTLVPMKAGDRVKTDRRDAERLARSYRSGDLTAVWVPDEGSESLRDLVRAREAAKQDQLRARHRLSKFLLRMGQRPAAGMKAWTAPYMVWVRQVHFTQVAREATMLDYLHEVDHMGERVKRLEQAITEAVKLAAPVVQEVVKGLQALRGIAEISAVTIVAELGSITRFDTARQLMGYSGAVPTEDSSGQRTRRGSITKTGNAHLRRIVVEAAWSYRYRPAIGPRLCKRQEGVPEPIKEIAWKAQVRLHKRSMKLAAAGKDQRKIITAVGRELLGFIWAIGIKAESAVMQKMAA

SEQ ID NO: 367876 - protein, 457 aa, unidentified
MARQSSRSTHQRDKLQVVHPNAAAIDIGSRFHVVAIPPDRDPQPVRRFDTFTGDLRRLADWLAEKNIVTIAMESTGVYWIPVYELLEERGFDVILVNAREAKNVPGRKTDINDAQWLQRLHSYGLLRGSFRPTQELASLRALLRQRERLLEYCASHIQHMQKALMEMNLQLHHVVSDITGKTGMRILRAIAQGQHDSVVLASFRDPRCKASEETIRQSLEGHYREEHLLALRQSLSLYDTYHEHVAECDQFIEATLKRLSLATPMPESSLPAARHRDANPNAPAFDVRSALFQVLGIDLTQIHGLGPYLVLKLISECGTDMSRWPTVKHFTSWLALSPGSKISGGKVLSSRTRRTKNRAAALLRLAATTIGRSQTGLGAFYRRLASRLGKAKAVTATARKIAVLFYNVLRYGWVYQDPGADYYEERYHQRIVRNLQRRAQSLGFELSPISDPGQRVS

SEQ ID NO: 367877 - protein, 402 aa, unidentified
MAAVMIGVDPHKGSHTAVAIGAAEELLGELRVRASAGQSERLLAWAAAWPQRTWAIEGAAGLGHLLAQQLLAAGERVLDVQPKLGARVRLLAAGAVNKNDPNDARSVAVAALRSPAQRSVTADDHAAVLKMWAKRHRDLGRARTQVVCRLHAVLCELVAGGVSKRISAPAAGRLLEGLRPAGAVDAARGELAAQFLEDLRRIDAQMSDAKKKLTIAVRASGTSLTRVFGVGPVVAATVIGEVRVVSRFADRDHFAAYNGTAPIEVSSGRRKIYRPSRRGNRRLNHVIHMAAVTQVSQRHSDGRAYYERKLAEGKTPKEALRSLNAGSATLSSPSSRQTPGGLRRARAEGAREGNGGTTPSPARPAHTPRRRLFGQATPGPCHHPTARPACSSECNKKLRRTT

SEQ ID NO: 367878 - protein, 350 aa, unidentified
MARSIVPEPDDVVVGVDTHADVHVAVALSGVGAWQGSIAVATTPAGFDELLRWASSFGRVRCFGVEGTGSYGASLARYLQELGEVVVEVDRPDRRTRHLEGKSDPVDAEAAARAVLAGTATGIPKAGDGRVEMIRSLRVARRSAMKARTQAANQLTALVLTAPPELRGSLRALPVVDLVEVASRFRPGALTDPTAAAKLALRHLGRRHASLSAEIASLDRDLAILVMQAAPALVALHGVGTDVAGALLVAAGDNPERLSSEGAFARLCGVAPLPASSGKTHRHRLNRGGDRIANNALWRIVLVRMSGEGRTRHYVERRTKEGLSKKEIIRCLKRYVAREVYRSLEGVDGL

SEQ ID NO: 367879 - protein, 338 aa, unidentified
MTYYAGIDVSLESASVCVIDAAGKTIREGKVASEPEALADWLKATGVSLERVGLEAGPLSQWLHVGLRQAGIAAELLETRHVRRAFEIMPVKTDRKDAHGIADLMRMGWFRPVHCKSIDAQETRAMLTARKLVQKQVFEVESSLRGILRGFGLKVGKTTPVKFEGRVKELVAGNPSLERTADSLLATRAVLRREFNGFERQLRGMARNDTRARLLMSTPGVGTIVALTYAAAIDDPSRFTSSKTAGAHFGLTPKRYQSGQIDYSGRISKLGDASVRAALYEAAHVILTKPLKGCTALKSWALRIARRAGMSKAKVALARKLAVIMHRMLANGTTFQSA

SEQ ID NO: 367880 - protein, 390 aa, unidentified
MYFVGIDISKYKHDCFITTEAGEVIKDTFTFDNTGTGFKQFFDVLATLGDPTQIKVGFESTGHYMNNLMKHLSVKGYSFTVLNPIIVARFRSSTTLRRIKTDTIDARLIAQYLPMVDYKSYHLQVYHFPELKSLTRMRDRLVKQRSLYLVMLTNTLDQVFPEFKEFFGNNLKSKTAQYILHKYVIPTRIAMMNAASFDNLRRLSKGNFSYAKFTKLKDLASSTIGCSSETDALLITSNLRLYDQIDEEIKMIESKIESIMLQLDSPTASIPGIGFTSAATIIAEYGDLSRFANDSKMLAYAGLDCGRNQSGTQDFKGKMVKHGSGYLRQALMNSAVSVLIHIPTIYEYYHKKRLEGKAHRVALSHVARKLVRLIYKLETSNTRFDLILIR

SEQ ID NO: 367881 - protein, 410 aa, unidentified
MEVLHPHCAGLDVHKETVVACVRHMVDGTVKREVRTFDTTTTDLLALADWLASEGCTVVAMEATGVYWKPVWHVLSDGDFALVLANAKQVKNVPGRKTDVNDATWLADLVAHGLIRSSFVPDAETQVLRNLLRTRKQLVRERSSHVQRIQKTLEDANIKLDTVISDIIGTTGRAMLQAVIAGETDPSKLAALAHPRTKAPPAQLREALRGRIMKHHRFLLRLHLQQIDAIDTAIAEIDREVGERIEPFRTTVELLTTIPGISELGARIIAAEIGNDMSRFATAAHLISWAGLCPKNDESAGKRRSTRMRHGAPWLKTTLIQCSWAATRKKGSYIQAQFHRIRSRRGVKKAIGAVAASILTAAYHMLKNGTCYQDLGPDHFDRRAKTTKTKRLVARLQNLGYAVQITPLAA

SEQ ID NO: 367882 - protein, 408 aa, unidentified
MADKIAGIDVHKKVLMVVVMDAHAPEAKPERRRFATLPSELRRLSAWLQEQGVEEAVMESTAQYWRSVWLELEPHMRLHLAQAFSNRAPRGRKHDFKDAERLVRRLIAKELILSFVPDGEQRIWRNLTRMKLQLVRDRVRLQSQIECLLEEMRIKLSAVVADLLGSSGLRILHALANGETDSQSLALLGDDRLKCTEEQLVEALTGRSHPLHRKMLAFELERLRLLDEQIAKLNSLIAQTMKPHQDAVIRLAEVPGLGIDSAQQIIAEVGVTASTFSSAAEFTSWVGTCPGKEESAEENHNSRSAKGNKYLRRVLNQAAHAAARSKGTHFQAVFRRLLPRLGYQSAVWAIAHRLCRLVWKILHEGIRYIEQGIESEPKLLIHRAQYLARQLRRFGYNVQITPDNRAPA

SEQ ID NO: 367883 - protein, 367 aa, unidentified
MKKVSTRATKQSRNISQQELTIGLDLGDRNSWYCAVDEAGQIQLEQRVRTTAKALQEVFGAMPRSRIALEIGTHSPWISRMLSELGHEVIVANARKVRLIGESRKKDDRLDAQTLARLARIDPELLYPVKHRSAQAQADLMLIRARAGLVRARTGLVNTARGLAKSYGERLRGCNVRNMNSEKAESLSPELQRALEPLLSAIAELSQRICEYNEGIEALAQQSYPQVALLKQIKGVGTLIALTFLLTLEDPHRFGKSRDVGCYLGLQPGRRNSGQREPQLHISKEGDPYLRTLLVQGAQHVLGPFGIDCDLRRWGLKLAERGGRNGKKRAIVATARKLAVLLHHLWVSGEVYEPLHNSSRTTVAAAA

SEQ ID NO: 367884 - protein, 343 aa, unidentified
MGNVITIGVDLAKSVFQVHGVDAEGMTVVRRQLRRRQVLPFFEKLPPCLVGMEACATSHHWARELEQLGHRVRLMPPRYVEAYVKNQKNDAADAEAICEAVTRPTMRFVEIKTTEQQSVLILHRTRQMFVRQRTTLINAIRAHLAEFGIVAQIGRNGVEALLQTIAERNDARVPAVARSCLEALVAQLHLVKRQILEADRRILAWHRSNETSRRLDCLPGIGPLVATALVASVPNPQAFKSGRDLAAWIDLVPKQNSSGGKDRLGNISKHGNRYLRMLLTVGALAVIRYAETHGTAHRPWLASLLERRPTKVAAVALANKIARMAWVIMARGEAYKEPTLQTA

SEQ ID NO: 367885 - protein, 325 aa, unidentified
MSSHEIIGIDVAARTLVAIGDEVVLQPAYANTPDGRRALVTALGRSKRPVRVVLEATGIYFLDLACELAAAGIEVMVLNPKAAHHFAEAILQRRKDDPVDAAMLREYGRRMAFVRWTPPRPELFAVRALAREAQAQTKAVTAAKNRLHALTAATLTPARLIRALERQIRASEALIDQLIAAARELIAGDGELQRLFERTDSVPGFAAKGAVMVMAELVILPPMGARQWVAQAGLDVREERSGTSLARKPRISRRGNRRLRQALFFPALTAARCCPEAGAFVDRLVARGKTKLQAIIALMRKLLHALHALWRNNEDFNAAKLFAKA

SEQ ID NO: 367886 - protein, 413 aa, unidentified
MPYEWCVGIDWGSQQHQVCVLDRNRRVVGERAVTHDGASLAQLATWLWTLSEGHPQRVSVAIEVPRGAMVEGLIERGFHVLAIHPKQLDRFRDRHSVAGAKDDRRDAFVLADSIRTDLPSFRRLHLDEPQLLILRELSRAEETLLEEFRRSANRLRDQLHRFYPQMLQLGGAADEPWLWDLLELAPTPAHAALRSAAQVQRVLKAHRIRRLKAPEVLACLQAPALPVAPGVLEAAQAHGGFLLPCLRVLPEQLRVCAQQVQALLNTVAEEPGKDGGPSDVAIVQSLPGVGRKITAWLFAEAAQPLAERDYQVLRTHGGVAPVTRQSGKRRQVVMRRGCNPRLRQALYHMARVAMQRDAHFSGVYAALRAKGQRHGQALRHIGNRLLRILVAMLRHRTCYDASRMRREPVVQLG

SEQ ID NO: 367887 - protein, 342 aa, unidentified
MNKVTIIGIDLAKRVFHAHGAAADGSVVFRKRLTRAQVLPFLAGRPRCVVAMEACASAHEWGRAIQELGHDVRLIPPTYVKPYVKRQKNDMADAEAITEAGSRPTMRFVAVKTEEQQARSMVFRTRDLLVRQRTQSINALRGHLAEHGVVAPQGPAHLKTLAAAMDGAGRSLPQLVRDVGGIYLEQIEQLNRRIADLEKVLRREAQFGTETRRLQTMPGIGPITAMAVEAFAPPMATFKRGRDFAAWLGLVPVQHSTGGKQRLGRTSKMGQRDIRRLLIIGAMAVIQWASRREAEAGSWLHRMMERKPLMLVAVALANKMARSIWAMLTKKEDYRNPGNAAA

SEQ ID NO: 367888 - protein, 346 aa, unidentified
MLYAGLDLSRKRLDFHLLDGEGATVEVGAAPPDVDGLRGLTQRLERHGAPIRAAIESMNGARFVHDRLELAGWQVEIADAQKVKGLAPLACKTDRIDAWVLAELARRDLVPAIWLPDPRVRAERERARWRLHLVRHRSSLKQRVHAVLLTHGKPCPVSDLFGVRGRQLLARLGLPEPWQATIDASLRLIDELDREITDCEHELRRLGADHRYVPLLCTVPGISWVLAYTIAAEIGDIGRFPTPRKLAGYSGLCPRVYQSGERDLRGPLSKQGPRYLRWALVEAATHACTAPAYRDRYQQTKARIGKQRGAKVAQIDLARRLSEAIWHMLSRGERFAPKGATDPLAA

SEQ ID NO: 367889 - protein, 386 aa, unidentified
MAHSTNIPQHSIDYDQTLILAIELSNKSWVLAAQVPGLSQTKAKRTIEPEKNHLLAAIEGYRIRAATAGRSVKRVITSYEAGWCGFWLARWLMAHGIEVHIVQPSSVPVDRRMRRGKSDGIDAELLLRTLLAWLRGEPRVCSMVPIPDEADEDARRCVRERSELVSERVGLVNRIGAILATLGADDYNPLLQSRRRRLTELRTGLGDPIPPNALAKITRLLTRLELVLAQIAELELERDAVARTDAPDQTGKMIQQLISLRGIGVQSATVLVREAFVRRFANGKALGSYAGLTSTPYSSGGIDREQGIGKAGNRRLRTVMVELAWLWQRYQPGTAQVAWFRERVGSTGRRVRKVMVVALARKLLIALWRFVIDGVMPEGAVTKPSI

SEQ ID NO: 367890 - protein, 370 aa, unidentified
MVLGIDVGSETHYARDFDYRGIEYLKKPFKFSNTEAGFVTFKEWILDLKERHEKDKVVPGMEPTGHYWFNLGKFLQDNEMKPVLVNPHHVKKSKELDDNNPTKNDRKDPKVIARLVKEGRYMIPYLPEGVYADLRTASNMRFQIQSELTRIQNRISRWVNIYFPEYKTVYGKPDAVSGMMILKQAPLPEDILTLGVEGVNQIWRDAKMRAVGKARAKTLIEAAMHSVGAKEGTMAERMEIRMLLEDYESRNNHLQEVMTLIEELVKQIPMAEKLMDIKGVGIKTVSEFLAEIGNVSRFSNPKELQKLAGLALVENSSGKHKGQTTISRRGRKRLRYLLFEVAMSLVAKNPEFRELHNYYTTRRLNPLKKM

SEQ ID NO: 367891 - protein, 346 aa, unidentified
MAMTIVETRAITGGVDTHLDTHVAAALDSIGGVLGVESFLATPDGYAQLFEWMSGFGPVTRVGVEGTGAYGAGLARFLRRADVEVIEVDRPNRQARRAQGKSDPADAVEAARAALSGRAHGLGKSADGAAEAMRVLLVAKRSARETRIKALNQIRHLSFTAPDELRERFRAIPRSSLASHGAALRPRLGDPVLHATKVSMSTLGRRVLALEDDDARMDALLAELVTATAPSLLELYGVGIDTAAILLVTAGDNPERIRSESAWAHLCGVAPVPASSGKVTRYRLNRGGNRQANHALWRIVLTRMSGHAHTRNYVARRLDEGRSKPEIIRVLKRYVAREVYRHLPRG

SEQ ID NO: 367892 - protein, 364 aa, unidentified
MRPPPSLPPSLLTVEPTSRIVIGGIDTHKDLHVAAVLDPAGALLGTQTFSTTRAGYRALLRWMRTFGDVRQVGIEGTGSYGAGVTRHLHDAGVEVFEVDRPDRSDRRLRGKSDTLDAENAARAVLTGRRTTTPKTKDGLVEALRVLRLTRSTAVKSRTVAIQLLRSHIVSAPEEVRDQVRNLTRMQLIRTCASWRPDATGFRDPVVATRIALRSLARRILELNDEIAELDELIEPLVRELAPALVQATGIGIEIAGQLLVTAGDNPERLRSEAGFAMLCGAAPLPASSGKTQRHRLNRGGDRRANSALHMAVIVRLRMDERTKAYVARRTAQGRSKLEIIRCLKRYLAREVFALLRADQAPTAT

SEQ ID NO: 367893 - protein, 355 aa, unidentified
MEHIGIDVHKRECQVCILTESGELIERRIRTEKGKLEELLKERAKAKVLLESSTESEWVAQCLEGLGHEVVVADPNFAAMYATRSRRVKTDKRDARTLAEACKLGAYRPAHRVSEQRRHIRAQLSVRQVLVRSRVRYINLAGALLRGAGLRVGSGDSRNFPGRVEKLSLPEPLKERVAPLLKVLETLNEQIDELDGVLEQLARQDEQVRRLCTVPGVGPVVASAFVCAVDEPERFSGPHQLEAYLGLVPSESSSGEKQRKGRITKAGNTQVRWLLVQSAMHLLRLRSKPHTAHLRQWAEAIAQRRGKRIAVVALARRLAGILFAMMRDATEFQPPLPRTPQAPAPRPAQSLEAAA

SEQ ID NO: 367894 - protein, 386 aa, unidentified
MKRTVCGLDVHKDSVFCCILCADGRKIQHKFGVLTEELVVLRNLMESEGVEECAMESTSIYWMPIWRVLEGSVKLHLVNPYFIKQLPGKKSDVKDAEWIATCLMNNLIASSFVPDEKIQRLRQYDRRIFDLNTSISRNLVKLDQCVQRCNIRISNYISTTDSKGYRSIVKLISQGVTDASVLVGQLHGRTINRHGRDTLTKALTGVVNDTDIDIIGQLVEEIEMQQRHKDEAQKKMTSLCEEWFPKELGNLQTIPGVKERSATSVIAEVGTDMNHFQTPKKLVSWVGLRPRNEESAGKIKSRRITHGNKFLRKTMIECAWGASRTKDSFFAEFSYRQCVERRKNRMKVQVAIARKMLVAVWYILHDGVPYQKTSDHCSTAAEAVES

SEQ ID NO: 367895 - protein, 352 aa, unidentified
MQELITGFVGLDAHAESTAIAVAEVGRAAPRFVGTVGARLSELTKALSKLGAPQSLCVVYEAGPCGYALARELTSLGYRCEVVAPSRIPRRPGERIKTDRRDALNLAGLARAGELVPVTIPDERDEAIRDLSRARVDAVRARLKARQQLKALMLRHGQRYSGKTSWSAAHERYLARVSFAHPAQDIAFTEYRQAVGEGEARVQRLRESLTREVEHWRMHSLTVVAELGDLRRFAHPRELMGYLGLVPSEHTTGSRRRLGAITKTGNGHVRRVLIEAAWNYRFPARISPALQMRQERQPPDIRAIAWRAQLRLNHRYRRLKARGLQHNKICVALARELAAFVWDIGRHVAPSP

SEQ ID NO: 367896 - protein, 265 aa, unidentified
MPQEGRPAVEYIGMDVHKRESQVCILGDGGEVIERRIRTERGRFAAVLGARSRARIVVEASTESEWVAQCLEELGHEVIVADPNYAPMYATRTRRVKTDRRDARALAEACRLGAYRRAHRTSAAQREVRAGLAVRDALVRTRVRYISLIRGLLRREGIGVPSGSSAAFLRRLEGVAIPVALEATIAPVLGMLPPLNAAIAAAEKRIAAAVAVDAVATRLCTVPGVGPVTAAAFVATLDDVARFRGASQVTAYLGLVPQEWSSGEQ

SEQ ID NO: 367897 - protein, 367 aa, unidentified
MMGWMAPLRHRRAKLVFRRITRNREPSMNEITTIGLDLAKHVFQVHGIDAQGRTVLRKRLRRGQVLAFFSRIPRCVVGLEACATAHYWARELGALGHEVRLMPAQYVKAYIKRNKHDAADAEAICEAVQRPTMRFVPVKTAEQQATALLHRGREQLVRQRTMLVNALRAHLAEFGIVAAQGLRNVGELIAIVRDDGDRRLPDVARQVLQVLAAQLEQIEAAIAALEKQLMAWHKANAVSQRLASIPGIGPIIATAIATTVADPGVFRSGREFAAWLGLVPRQNSTGGKTRLGGITKRGNRYLRRLLINGASANLLRSKATKADPWVIGLRRRRPPLVVAVALANKTARIAWAVMLREREYQPRAVAA

SEQ ID NO: 367898 - protein, 388 aa, unidentified
MPQSNDLSRSLAAFDQDRTLIAVIEMSQSNWLVAGLVPGLERRPLKKLSPDEDALLKLVQRWRNEAAQAGREIKRIVIAYEAGRDGFWLARWLRRRGIEAYVIHPSSVAVSREHRRAKTDRLDTELLMRAFLGWLRGEKRHCSMAAIPTIEDEDAKRPSREHEKLVGDRTRLVNRMKAMLARFGIRTFKPTLRKAADRLDDLRTAEGTPLPENTRAELRRDMMRLRMVREQIKEIEQERLRKLTAAPAEKGPPTMVRFIARIIGIGIETADMLVSEILSRGLRDSKAVARYAGLTGAPDESGRRRREKGLAKAGNARVRRGMIQLAWRFLIFQKDSALAQWYRARTADAHGATRKRMIVALARKLLIALWRMATTGEIPEGISLRAAP

SEQ ID NO: 367899 - protein, 340 aa, unidentified
MEITTLGIDLAKSVFQLHGVDADGAVVLQKKLRRGAVLVFLGKLEPCLIGMEACPTSHFWAREIAALGHEVRLIPPAYVKPYVKRQKNDAADAEAICEAVTRPNMRFVPAKNEEQQSVLVLHRSRDLLMRQRTMILNAIRAQLAEFGIVAAQGPARVFALVRRLSEPGDLTLPAIARSALLELGSQLENLAEGIRNIEQQLLAWHRQNEASQRLETIPGVGIITATALAASVPDPTVFRSGRQFAAWLGLVPRQNSSGGRDRLGRVSKMGNGYLRRLLVVGATSLTRRADTNQTRNGAWVRSLLERKPTRLVTVAIANKTARTAWALLAKGEIYRAEPVI

SEQ ID NO: 367900 - protein, 320 aa, unidentified
MSEQPVVVGIDVAKLHVDVAVLGAPAAAGRFDNDGEGHMALIEALSPLAPALVVMEATGGYEAPLACSLQAAGLAVAVVNPRQARDYARSFGQLAKTDRIDAAGLAEFAAALLVRPDLGRYLKPLATAEQQDLVALVNRRRQLLTMLGMEEQRLAAARPAVRRSIQTLIRAIRKQLDEVDGTMARHVTKHFAELAELLRSASGIGAVASATLIADLPELGHLSRRQVCALVGVAPYACESGSMRGRRRIRGGRFELRRTLYMATLAAITHNPVIRAHYRRLLDAGKLKKVALVACMRKLLTILNAMVRTHTPFQTDYRKA

SEQ ID NO: 367901 - protein, 348 aa, unidentified
MNATPKSVVGVDTAKNVFQVYTVDQETGEVINQQIKRAQFLQWFANRAPCLVGMEACGGSQHWARKLQELGHEVKLMSGKMVKAFVCGNKNDAADARAIYMAAQQPEVKAVAVKSEGQQAVLAMHRIRQQLVKMRTAQMNELRGLLGEYGEVFGRGRKAFDAGMKASLERLTERLPAPLIDTLRDQWNELGRLEERIARIEASLLAWMRQDRAAKAISAIPGVGLLTATAAVATMGDAKAFSSGREFAAWIGLVPGQTGSGGKVRLLGMSKRGDTYLRTLLIHGARAVLQHARTPSPWLQQISQRRPPNVVIVALANKMARTIWAVLAHERVYEKEHVSLRPLAAAST

SEQ ID NO: 367902 - protein, 345 aa, unidentified
MPIVGGLDIHRKQITFDYLDTVTGEVKRGQIAPADREHLRAWLARFAGCGDVAFAMEGCAGWRYVAQELAAAGIVAHLGEPADTAAARGRKRHAKTDKTDARHLRGLLAEGRLPECWIPPPHILECRALLETYHDLRRAHTAWVQRIHAVFFHQGGPPLSDDALRTEAGLAGLRAAAAAHLSPAGQLQVAAALDMLTAVEARMGPLRKQLRETARHLTGARVLAARLYGVGPVTALALTCWLGGADRFSASRKAVRFTGLDITVHSSDRKGPPGRLSRQGPPMLRWAVYEAGKTHARSSAPDHAYYAAVKDRKNSKRAALSEARKIVRQACHILTELGDDALTAT

SEQ ID NO: 367903 - protein, 340 aa, unidentified
MTQHKIIGIDLAKNIFFLFEINHKGKNLCRKKLQRSKLLSYIANKAPCTIAMEACSGAHYWAREFSQFGHEVILYAPQHVKTQRRKQKNDYNDAEAIAEVALYKRPHPVPHKSVEQQDIQSLIRMRRLLVTERTRIVNQVRGLISEYGIIMPKGAAAFRKAIPEILENDENQLSCILRELLSHQYERYLYIDEQVKWFDEKLNQTIKQFENAKRLMSIPGFGPLTSQAVAVWLGSGQQFKTGRDASAAMGLVPKQDTSGDKVILLGITKRGNTYIRSLLVHGARAALRRAKFKSDNLSKWMLELQERRGPNRAAVALANKLMRIAWAVITKNEEYQPKQS

SEQ ID NO: 367904 - protein, 324 aa, unidentified
MADNVLGIDVAKGKFDVVLMRADGKRRWRTFANTAEGFAALLGWLEKQQALPVHVCLEATGTYGLALATFLHQADQQVSVVNPACIKAFSESELSRTKTDKVDAGLIARFCRAMQPALWQPLAPEVAQLQGLVRRLESLQGMAVQERNRLAAPGLAEPVRESVERTLAMLEQEMKRLRGQLDDHVEGHAALKQQRELLTSINGIGLTTANLLLAELSGCDFQKAREVAAYAGLVPQERQSGSSVRGKARLSKKGNRRLRKALYWPAIVAIRHNPVLAAFARRLREAGKPKMVVIAAVMRKLLHIAFGVLKHQRPFDPNWTACRP

SEQ ID NO: 367905 - protein, 387 aa, unidentified
MAQVNDLSRILTAFDPISTLVLVVEMSKAKWLVSGAVPGVERQPLKKLEADATALLRLIERWRNEAVRAGRPISRIALAYEAGRDGFWLARWLIARGIEGHLIHSASVAVSRERKRAKTDRLDAAMLMRVFLGWLRGERGHCGMVAIPTMEEEDARRPSRERECLVNERSRITNRMKSALARLGVRGFKPHLRKAPERLAGLRTAEGTDLPANIIEELRRDMARLALLREQINSIEKTRAARLERAPDTGPHAMVRLLARVIGIGIETADMLVREILSRRLRDRRAVARYAGLTGSPDESGLKRREKGLAKAGNARVRRGLIQLAWRFLVFQKDSALARWYRTRTEGPSGARKTTMIVALARKLLIALWRLVTTGEVPDGVALRPAP

SEQ ID NO: 367906 - protein, 457 aa, unidentified
MLAETQDDQEIIARVAALDIGKAELVCCVRVPHEDRPGRRLQEVETYATMTRPLLGLADRLACLGVTRVVMEGTSDYWKPVFYLLEAHGFQTWLVNARDVKHLPGRPKTDKLDAVWLAKVAERQMIRPSLVPPPEIRRLRDLTRYRADLVAARTAEKQRVEKLLEDAQIKLSVVVSDIFGVSGRQMLAALIGGQRDPKALAQLARGVMRRKITTLQEAFTGHFTGHHAFLLAKMLAQVDAIDADLAALDATIEQMAAPFAATLRRLAEIPGINIIAACAILAEIGTDMGRFPTAGHLVSWAKFAPGVKESAGKKKGKNTTGHGNRYLARVLGNAAASAGRTDTFPGERYRRIARRRGSKKAVVAVGRSMLVITWHLLADPGTHYAELGSEFYDTRINPERRKRNHIRQLEALGYKVTLEPQPDLPPNLTRLRHTPTGCCRAPANSPIFGSGLFEPRR

SEQ ID NO: 367907 - protein, 325 aa, unidentified
MELSAIGIDVSKDTLDVSIFTGGKPLGKQFANTEAGHAALINWLKHRKLGQVHACMEATGRYSLGVALALHAAGHVVSIVNPAQIHDFARTKLGRNKSDTVDAGQIREYGAMFRPAPWQPPAPALRLLCDLQTMRAGFVASKVEWENRAGSVGGDAAANALAATTIAHFTAQIAAVDQAIARTIDGDDDLRKKRDLLLSIDGVGQTLAALILAELPGPDVIRSSTQAVAYAGLNPRQFQSGSSINRPTRISKIGNATLRAGLFMPAMAAMRHNKAVAALADRLRAQGRLKPKQILVAAMRKLLVICFGVLKTGKPFDAEMAMPKA

SEQ ID NO: 367908 - protein, 401 aa, unidentified
MNAVGIDVSKGKSMVCVMRPFGEVVLEPFEVLHTAQSLNDLAGKLKALDGETRVVMEATGNYHKPVAFVLHDAGLFVSVVNPVLIHDYDNNSLRRVKTDRKDAVKIANYTLDKWTRLRQYLPEDDTRLALKNCYRQYQQAVAVRTMLKNNLISSLDLTFPDANKLFSSPAKSNGCEKWVDFIGDFWHSECVSSLSSDAFAKKYLKWCQKYGYNFTRSKSDTIYACAVNAASLPKSPTSKLLIQQQVAQLKAVSQSVAAFQQEMLRLSQQLPEFDTVMEMYGVGPSLGPQLMAEIGDVRRFSSKKSLIAFAGIEPQPNDSGKIVGNDSGISKVGSAVLRRTLFLIMTVILKTQPQDEPVFQFMNKKRSEGKPYKVYMMASANKFLRIYYARVKAVMDSKHSK

SEQ ID NO: 367909 - protein, 347 aa, unidentified
MNEISRIGLDTSKALFTLHAVDAAGRAVLRLSLRRDQLLKFFKKLPAVVVAMEACGSSHHWARRLSALGHEVRLIPPQYVKPYVKRGKNDGLDAEAICEAAGRPGMRFVPVKTEDQQAELLVLKVRATLLDQRTQLINTLRGHAGEFGMIAGKGTGRVVELLAAIASDASIPSVGKTMLALLGEQIDRLDGQIEALEAKLGAMHKANAVSRLLATAPGIGPIIALSFAIEVDPAAFASGRHLAAWLGLTPKEHSTGGRQRLGGISRAGNERLRALLVSGAMSVIRAVARPGSKLLTEWLAKLLARRPRKVAAVALANKMARTIWAMMSTGEAYRWPEGTVRRPAVVS

SEQ ID NO: 367910 - protein, 346 aa, unidentified
MQYIAFDVHRRYTWGRAEDKNGRVLRQERIEHKPAAVRKFLAALEPGSPVAVETVGNWYWMVEEIERAGFQPRLVNAGLAKVMMGQVNKTDKLDARGLNLLQRTGTLPTVWIPPAAVRDARELPRARMVLVGQRTQLKNRVHATLAKYGLPAPEVSDLFGVTGRCLLSQLVPRLPPHSALVTSTTLEHLDYLEQALAQLEKRIASVFHPTKESRLLRTLPGVGPILSVVLAAEIGDIARFPDAERFAAYAGTVATVHASGGKQWGGRTRRNCNPYLKWALVEAANAALLRPDTPANQHAVSLYRRLRARRGHGKAIVAVARHLAEAAYWVLTKEQAYSPPASSTRG

SEQ ID NO: 367911 - protein, 349 aa, unidentified
MTESVFTGIDLHSNNVMIGIVDQNGQRLKFQKLECDLQQVDQLLAPFKAHLKKVAVESTYNWYWLVDGLQRAGYPVVLANPAQIDQYSGLKHGDDKSDAFFLAELLRLDILPQGYIYDAELRPVRDLLRRRLSLVRQRSALLLSFKSLYTRTTGRDLELRAVKSMGPIQAGKLYEHPANRLIAGIQVEHIGQLTQSIARIEKVVLKASQALPYYKQLTSLPGIGIILGMTITMEVGDISRFADAGHFASYCRTVAAQRFSNDKKKGENNRKCGNKYLAWAFVEGAQFAKRGDKQCRQWYERKAAKCGSVVATKALACKLSKAAWFTMAQNIVYEPQRMFGSGASPTMKS

SEQ ID NO: 367912 - protein, 419 aa, unidentified
MVQKNGSTSVSVCHPVCCGLDIHKDLIVACLIKEKADGTEWSELREFRAFREDLIKMRDWLVEQACPIVAMESTGIYWRPVYNILEETVQVILVNARHVKNVPGRKTDMADSKWLAGLLRHGLLQGSFIPPAHVRDWRDLMRMRRGLIEHAGDYKRRIHKVLESANVKLGSVLVNIFGATGRRLLDLLMERETEITVDEVEVCMRGILKHTKEEIWEALQGNIRDQHRYMVRKYLQLLDSIEREIADLDNQVQALMTPYNPLILRLKAMPGIGDTAACQILAEIGHTLEQFPSSAALASWAGLCPGNNQSAGKRRSGKSPVRRHYLKKIMVEVAWAAIRKKGSYYRDKFYRLRVRLGPRKALVAVAHRLLNAVYHVIKEEKEFRDLGENYLLLRNQSRKLSALKRQAKLLGYELNPIAE

SEQ ID NO: 367913 - protein, 290 aa, unidentified
MPRHRSDLEAVATIGVDIGKNTFHLVGLGRNGAIVLRQKLSRRQVEARLANMPPCLIGMEACVGAHHLSRQLKALGHDARLMPARYVRPYSKGQKNDFRDAEAIAEAVLRPTMKFVAIKTAEQLDLQALHRVRERLVCQRTSVINQIRAFLLERGIAVRQGLRALRTEMPIILAMTDKLSPRMIHMIEDLCTDWRHLDRRIETVSDEIKTLSEQDDGAKRLMTVPGIGPIISTATVAAIGKGDMFSKGRDFGAWLGLVPRQMSTGGRPILGPISKSLSENIRRDYKVFGA

SEQ ID NO: 367914 - protein, 342 aa, unidentified
MNGTPTIGIDAAKRIFFLHGEDVRGKVVLREKVSRERLLPFLANQPVSTIAIEAGCGAHHWARAFSKLGHEVRVIHPKFVRPFVKSNKNDWNDAAAICEAAQRPTMRFVAVKSLEQQDLLAIHRVRERLVGQRTGLCNQIRGLLAEYGIVLPQAISRLRRALPEVLEDGENELTARGRELIASLSDELRSLEERIKPYERAIEHACVDSWTCRRLRSIPGIGPIGATAVVATMGDPKAFKNGRHFAAFLGLVPRQHSSGGKSQLGRISRRGDVYVRRILIQGAHSILKRIDQREGPRTDWLRGLMARRGRQVAAVALANKNARIAWRLLAHEAFYDEALAAA

SEQ ID NO: 367915 - protein, 328 aa, unidentified
MSASSEQIFIGIDVSKATLDVALRGSTKAGQFANSEPGVQALLAWLAKLRDQVGVVLMEATGGLERYAALQLCLDGYAVMVVNPRQAHDFAKSLGYLSKTDKSDAQALAQFAHTLSSSDKRDKLLLKVPSAQQDTLHALVTRHQQLIAMRVAEGNRLASAHRAQRKSIESMLQAINAQLKKIDDDIADNLDEHFRAKLDLLKGFKGIGVATQATLMACLPELGQLSSREIGKLVGVAPLNRDSGKMRGKRTTWGGRGGVRAALYMASLSAVRHNPVIKAFYQRLRSSGKLPKVALVACMHKILTIINAIIKSGQPWQADYGYPQTGKT

SEQ ID NO: 367916 - protein, 404 aa, unidentified
MVFVGVDWAEEHHDAWLENEQGEMLGKTRITNDVGGVRQLHELVAEHAHDPSQVVVGIETDRGLLVTALVGAGYQIYAINPLSVSRYRDRHGTSGAKSDRADAKVLADLVRTDRHNHRPLASDSDLSEAIKVLAREHQDLVWTRKRFINRLRGTLREFYPAALDAFGTDLGALDALAVLERAPTPWQGRQLSHAKIVSVLRKAGRQRNLEHKAAEIQRALRSEQLQAPSQLQAAMAIVVSSCVAMIKSLDLQLEQLAAEMTASFEGHPDAEIYLSLPGLGVVLSARVLGEFGDDRARFADAKARKAYAGTAPVTQASGTKKIVLARFARNRRLADACYWWAFSSLTRSAGAHHYYRALRTRGKTHHQALRGLANRLVGILHACLAAGQTYSESVAWPQPREIAA

SEQ ID NO: 367917 - protein, 343 aa, unidentified
MEITRVGVDLAKNVFQVHGVDAAGRQVWKRQLRRSNWLQVLSRTLEPGCEIGMEACGGSQHWARELRARGFEVKLIAPQFVKPFVKSLKNDVNDAEAVCEAMSRPHMRFVPIKTAEQQDIQALHRVRDSLMRHRKAKANQIRGLVTEYGLVAPTTIVALRRAVPEWLEDGENGLSGTFRELLYELWEDFRRLERRVEAMDRRLTVLSETHPDARRLKQLRGIGPLTSTALVAQLGDGRHFKRGRQAAASLGLTPRHHGTGGKNLIYGITKRGDSYLRSLLIHGARAVVSQAKRRDDSLSHWVTELAQKRHTNVAAVALANKTVRVAWAMLRHGTDYDPGLVRA

SEQ ID NO: 367918 - protein, 350 aa, unidentified
MHQRFLRSKEESEMNNSVIGLDIAKNIFHLYTIVEGKAIKKKLKRTELLAYFANYPVSLIGIEACGSAHHWARELTKLGHEVILLNARYVKSFVIGNKNDFNDAAGIFDAVTRPNKRQVMIKTIEQQDIQLIHKVRQGLVSKRTAVVNQVRGLLSERGIIMPKSLNKVREQLPLILEDAENNLTPISREVFSGQYERLVALDEEIKEQDQRIVRLCKTNATAKRFLDVPGVGPMTASIVASDIGNGKGYQRSRDYAASLGVVPRQHSSGDKQVYLGISKRGNRYIRTLLIHGARAVLKNCSKKEDKLSLWLQTLIERRGFNKAAVALANKNARILWAMASQEKEYDALLV

SEQ ID NO: 367919 - protein, 362 aa, unidentified
MATLSVGIDMAKATFTAACWNGGRGRGLGSSPNTPDGFAALADRLGAEQQDSGSLHLVLEPTAGYELALAGFACQQGWQVSLPNPRQVRDWARGTGRRAKSDTLDAVLLAQYGAERQPPCWHPLAAEVSELERLLRREGDVEQLIRQERNRQHALAGRPNVAATVHDTIARVIAALEVPLRELEEVIAEHLRAHPALHEDAKRLRSVPGIGAKNVAYILVLLHRWMTRTIGEGTEKGLAAYVGLDPQTYESGTSVRRRAVISRMGDQAVRRRLFMGALGGVRGPIPCECSTNAWSRGASPRWSRWSPPRASSSAGPGPSSATGPPSTPRGSPLRLPPTPHSPRGLMHAPTQPPLVRESVLQP

SEQ ID NO: 367920 - protein, 322 aa, unidentified
MTHTTTTIGIDVSKQYLDVFCRHDQQTVRMPNHSQGITALLAWIGQRTARPLIVIEPTGGYEHTLQTMVLDQGFSLAKVNARQVREFARAKGQLAKTDAIDAAVLADYGQVMAPRTVVGTSHEQQALAQLVKRRRQLVELATIEKNRLEKVSDDLATQSIQRMLRVLKEEIQDMDTRMAKLMKSHRSLSNVHDVVKPIKGIGPLTLATLLAELPELGRIGNRQISSLVGVAPHNVDSGMRRGSRHIHGGRVRIRCALYMAVLSAIQHDPAMKRFYQHLVGQGKKPKKVALVAVMRKMLVRLNAKMREYYLQGDGAPWQGQAV

SEQ ID NO: 367921 - protein, 414 aa, unidentified
MGGFPVFSLLLFQGGVALSALYIGIDVSKDFSAAQAIDEKGNKCFYLELAMTADGFDKLLKAITSHGKDIAQVTVAMESTGCYHINLFSFLTHKGIRCIIINPLLTANFARLSLRKTKTDKKDALTIAQFLLVHKDSLWKTDLSPDRQDLKDLAREHESLTNLIAGMKNDIRRMLQITFPELETVCNIFSETILDLLRQFPSARLIKIAKPNTIVKALLHEDKRKKISVSAEDIIRAAKASVASHGAAKEIILPEKISTLQHLIEKKVRMKKALVEACEGMMVEDIEIITSIGGISEITASRLLAEIGDYRAFSTYKHIIAFAGLDPSVHQSGKFEGISRISKRGNRHLRYIIYLMTTCVVRGDNIFRTYYQKRRAEGQPFKKAIMATAHKLIRVLFTMLSKRTTYQALEVNAI

SEQ ID NO: 367922 - protein, 409 aa, unidentified
MLYCGIDWAWEELTLMVLDEKGNSIKEDFKIQNSLDGFFFALSTIRQLCREQEIIFGIETSNHRIVEFLLSYGYKLYLINPISMDKFRKRYKTSGVKSDCLDAFVIANVLRTDLNTLRIITPKDELTEELGIVLRDRESLVELKTRLTNKLRASLREYFPQALKLFSDISCRTSLEFLEAFPTHEEALRTTKKRIGSVLTRSNSYSYDKVQEIYQALREQQFPSRAAVIRAKRELTLALISQIKPLTKQIEAYDRRINSLLEQHPDSQLFLSLPGVGNTLAAGMIALIGDERARFNSPKQIQALGGTAPITKSSGNYRHTQYRFSCNKDLRNTLSQFAFTSITKSLWAKSYYNKKRREGKTKSHALRCLANAWVKVIFAIWRNNTAYDENRHLASVSKHLMNQNSLSLT

SEQ ID NO: 367923 - protein, 340 aa, unidentified
MTITTIGLDLAKSVFQAHGVDENVTTVLVKRLHRKQMLPFFSKLAPCLVGVEACGTAHYWARTLAAKGHEVRLIPPSYVKAYVKRGKSDALDAEAICEAVQRPTIRFVPVKTVEQQPILMIHRARSLLVRQRSILANALRAHLAELGFVANPGIANLAKLAEQVMADKDALPPYAQSALEILIRQIMTISGEISVLDQQLKAWHTESEDSRRLAAIPGLGVITATAIAATVADPDQFISGRQFAAWLGLTPRQHSTGGKTRLGGISKQGDRYLRRLLVVGATAVMRHVKDKPTPMADWIRKLLEKKPFRLVSVALANKLARIAWAVLTRKEAYRPYAHLN

SEQ ID NO: 367924 - protein, 339 aa, unidentified
MKYTPVGVDIAKHLIQVHFINKHTGEVVDKQLRSQDFLTFFSNREPCLIGMEACGGSQHWARELKKQGHKVRLLQARFVKAFVMGNKNDVMDARAIWMAVQQPGKEIAVKTEEQQSVLVLHRTRMQLVKFRTAQINALHGTLLEFGETVHKGRAALDRELPAALERMKAKLPPYLITVLEDQYSRLSELDSLIDGLEKQLNSVARQNETCKRLMEIPGVGPLIATAAVATMGEASAFKSGRAFASYIGLVPKQTGSGGKVRLLGISKRGDTYLRTLFIHGARSASLCVKEPGPWITELKKRRPTGVAVVAMANKLVRTVWAIAAHDRKYDKNHVSIRPY

SEQ ID NO: 367925 - protein, 344 aa, unidentified
MDHFAGLDVSVKDTNVCIVDDSGKIVREVKVASEPDALLAVLRNRTYHFKRIGLEAGPLSQWLFSAMAEADLPVICVETRHMRAVLKARINKTDRNDARGIAQMIRVGLYRPVHVKTLRSQKLRMLLTHRKLLQSKAIAVDNDLRGTLRNFGLKVGMVGAARFEARIRELVEGLPDLAILVEPLLVVRRVLREQVGILHRRLLAIVRDDEVCRRLMTVPGVGPVVALTYRATVDVPARFRKSKSVGAVFGLTPSRDQSGERDRPGAISRCGDEMMRTTLYEAAQVMLMQSAKWSWLKAWAMKIARHRGRKKAIVALARRLAVIMHRIWVDGTEFRWTREEAAAA

SEQ ID NO: 367926 - protein, 405 aa, unidentified
MGDGRFAGIDWASQEHAVSVHDLDGRIVEGRRYRHDERGIRALCARLIELGVLLVAVERPDGLLIERLLDAGLHVIAIHPNQVAAARPRFSAAGGKSDSFDAFVLAELARTDSHRFRILIPDSDATKALRAVTRAREDLVQTRVALANELRAQLECFWPGAVAIFADIDSPIALAFLKRYPAPADARGLGEQRLERFLARNHYCGRRAAHELLARLRGAADGRAGTLESEARRQIVLGLVAALEPLVAQIAQLTSEIRSALHDHPDGETFRSLFKDPKTAICPATILAEMGDCRPRYPTKAALSGDSGQAPVAIESGKSKRARFRWACDHRLRDAIATLADTSRHTNPWAADIYDRARARGCSHPHAIRILGRAWCAVIWRIWHDHTTYQPALHGNYQRLIAARG

SEQ ID NO: 367927 - protein, 356 aa, unidentified
MSSEVKYIGMDVHKEAIVIAVRDTRGHVVMESIVETKASSILQFIRGLQGELHVTWEEGTWAAWLYDLLKPHVHRVLVCNPRRNALLKEGSKNDKVDARKLADLLRTGMLRPVYHGEHGLRTLRELARTYQTLSQDLNRVMNRLKALYRGWGIACGGTQVYAPRYRDEWLGKIEHAGVRRRAELLYQQLDGLQALRRTLRSELLAESRKHKASKLLRQIPCIGPIRAARLVALMQTPHRFRSKRQLWTYSGLGIETHDSAQYRFVRGELQRAKKPQQIRGLNRNHNHEMKDIFKGAANRASCGVGPLHDFYVALLDKGMKPEMARLTLARKIAAIALTLWKKEERFNAEHLKTQAA

SEQ ID NO: 367928 - protein, 354 aa, unidentified
MEEITIVGVDLAKSVFQIHAANADGRAIVRKRLPRARFLSFMSLIKPCVVAMEACATSHHWARELTALGHDVRLIPPIYVKPFVKRQKNDANDAEAIVEAAIRPSMRTVPVKSPEQQALAMLFRTRELLLTQKTQLMNALRAHLAEHGIIVAGGRRSIDPFIRVLDDLTNTLPDVVRKAGALYLDRIARTSGEIEALERQIDEHANEHEMAKRLRTIPGVGPVTAMAVEAFAPGMESFARGRDFSAWLGLVPRQHSSGGKHRLGRTSKMGQRDIRRLLISGAMSIIHWRGRDGGKPGSWLARMLTSKSRMLTAIALANKLARIIWAIMTRKDVCLLYTSPSPRDRTRSRMPSSA

SEQ ID NO: 367929 - protein, 340 aa, unidentified
MSEITTIGLDLAKHVFQVHGVDAQGTTVLRKRLRRGQVLAFFSRIPRCVVGLEACATAHYWARELGALGHEVRLMPAQYVKAYIKRNKHDAADAEAICEAVQRPTMRFVPVKTAEQQATALLHRGREQLVRQRTMLVNALRAHLAEFGIVAAQGLRNVGELIAIVRDDGDTRLPDVARQVLQVLADQIEQIETAVAGLERQLLAWHKTNPVSQRLASIPGIGPIIATAIATTVADPKVFRSGREFAAWLGLVPRQNSTGGKTRLGGITKRGNRYLRRLLINGASANLLRSKATKADPWVIGLRRRRPPLVVAVALANKTARIAWAVMLREKEYQPKAVAA

SEQ ID NO: 367930 - protein, 426 aa, unidentified
MVNSQKLEAITTNTVIIGVDIAKSLQWARFTDYRGLELGNALKFRNDKNGFENILSSIKTICKLKKLDKVIVGMEPTGHYWKPLANYLILNGITVVMVNPYHTKRAKELDDNSPTKSDIKDALTIARLVRDGRYYEVYMPQDVFAELRVLSTSRISLMKRHNALKNTITAVMDEYFPELLTVFKYPLKGKASMQIMKSCPLPSLILGLGVDGVLAEIKKAVKKTVGKKKAQQLVEAAEDSIGVTYGTTAAKLKLGLMIEELELLTKQLEQIESAMGLALADTGMKEIILGIPGIGIVTAASFLGEIGDPLRFEHPRQISKMAGYNLVEDSSGKNISGTVISKRGRKNLRNVLYQMARTMVAVNTEMKELYRYLKTRPNNPLKKKQALVVISKKIVTIIYNLVKKQTEYKAELVFGEFRRNQMQQAA

SEQ ID NO: 367931 - protein, 361 aa, unidentified
MLARGANDKEHAMSEKPNSAIAVIGIDIGKNSFHVIGLDDRGAIVLRQKWSRSQVEARFANMPPCLIGMEACVGAHHLSRKLNSLGHDARLMPAKYVRPYSKGQKNDFRDAEAIAEAVQRPTMKFVATKTAGQLDLQALHRVRERLVSQRTGIINQIRAFLLERGIAVRQGQRFLRAGLPGILAMPSDVLSPRMVRVIEDLAGDWRRLDERIEGLSSEIEAIARQDIGCERLMSVPGVGPIISSAMVAAIGAGDAFSKGRDFAAWLGLVPRQMSTGDRTILGKISKRGNRYLRVLFVQAAWVVLIKPKSWERHGLKAWLEAAKKRLHHNVLAIALANKLARIAWSVLARGRDFEASKLRVA

SEQ ID NO: 367932 - protein, 403 aa, unidentified
MLFIGIDWSRDKHDFAVLDPDGRLRESGQVPHAHEGLDQLAHVVAAHEPDPAQVRVVVELHDGALLAWLMEQGYTVYGLNPKSADRARDCYRPGGTKDDALDARILADWGRLHCATWRPLQAESPATLSLRSWVRLRARLVQDKTCACQRLRALLDEWAPTLSTLCDDFNRQWQQALLQRCPLPEDLAAWHLNGLRGWARQGHLRAEALARIDRTRSQPAIPIPSARRDALRFEIRLLAEEIARLCQAISHAEQALDRLLQTHPDAFIFKSLPVKGIATVATLLAAFGEDRGQDISWRERAARWGVAPVTVQSGKSRHVKRRCACDTTYNQAFLFFAFKTAFTPGCWAAGYYQAKRKAGVDHYSTLRALALRWVKIIHRLWHDHLTYNEQLHQTNRRLRGAAA

SEQ ID NO: 367933 - protein, 334 aa, unidentified
MEHYIGVDAHCEYCDIAVVNEAGRLVSHRSVKTSAQNLIEAVRNVKDTRIVVIEESTLAGWLQRTLEPYADHLAIVDPRRNALISRSEDKSDRNDAHRLAMLYRGGYTHVIHHTLDAGFLELKEMVLHYHDTANQVTRFKNKLKAVYRKHGLIRISEEVYDPVGGIECIKRLPFPSSRHRARWILSMITRAEQMKLGAHNKIRRMSARFPAIEMFTAIPGVGPIVAATVVAIVETPHRFPTKEKLWKYATLAVAKPGSAGKTQARYASKEGNKVLKKVLMLAAHNAARGDHRFGRAFRRHREKSLSNAQRTVARMILSTMYGMWKTGECYREMA

SEQ ID NO: 367934 - protein, 402 aa, unidentified
MNAVGIDVSKGKSMVAIMRPFGEIVSTPFEIKHTASDIHSLVELINSVEGESRIVMEHTGRYYEVLAHQLSEANLFVSAINPKLIKDFDNDSLRKVKSDKADAVKIARYALDKWQNLKQYNVMDELRNQLKTMNRQFGFYMKHKTAMKNNLIGILDQTYPGVNTYFDSPARSDGSQKWVDFASTYWHVDCVRKMSLNAFIDHYQNWCKRKKYNFSQSKAEEIYGKAKELVPVLPKDAITKLIIKQAVDQLNSASTTVESLRTLMNETASKLPEYPVVMAMKGVGTSLGPQLMAEIGNVSRFTHKSAITAFAGVDPGVNESGSYEQKSVPTSKRGSSDLRKTLFQVMDVLIKTHPQDDPVYQFLNKKRAQGKPYYVYMTAGANKFLRIYYGRVKEYLSSLPES

SEQ ID NO: 367935 - protein, 357 aa, unidentified
MITLGVDAHKQLHVAVALDDVGHEIGQWSGTNSAHGWEEVLRWAGAFGEPRRWGIEGAWGYGRGLAQHLVAAGESVYEINARWTALGRRRARRPGKTDRLDARSVAAFVLQEAPHLPRVGLEDVTAVLDLLTSERETLRAETTRLWNQVHALLLQIDPEYKRHLPSLESRAGLAALETYDAADMHEVHQERAAAVRRLVQRLRLAQQQAGELSRKIRAYTTAAGFDGLTEIYGVGLILAGTLAGILGPGCRFRTDAELAAYAGTAPLETSSAGLVRHRLNRGGNRRLNALIHLVALTQLRCWPPARLYVERRLAEGKTKREAMRALKRFLVRAIWNAWKRCLSGNEPGASPGTPVAS

SEQ ID NO: 367936 - protein, 276 aa, unidentified
MPHVTSIGLDVHARSVAAAAFNPFTGEVVHRDFGTDAAEIAEWALGFEEPRACYESGPTGFRMARELRALGLDCAVAAVSRMQRPAADARRKNDRRDAEFIARMLATHNIVEVPLPDAAAEAARDLDRALDDATADYLRARQRLNMFLIRIGRVWDERNADGTRKKAWTRAHWRWISETRLEGPQRDVLEHYVTAVRCAESDKRQLERRVVALAGTDRWRPAVEALSCIKGIDTLTAFRLAAEAGSFSRFRSAPAFASWCGLTPSERSSGETECGW

SEQ ID NO: 367937 - protein, 453 aa, unidentified
MKKDKKKEQKVVEMDAFEQINHNAAGIDVGAEEFYVAVPKGRDTESVRTFATFTADIHRLADWLAHCRVRTVAIESTGVYWIPLYEILEKRGFEVYLVNARHLKNVTGRKTDVLDCQWLQQLHTYGLLRASFRPSEQICAIRSLVRHRDMLVSYRSAHIQHMQKALTLMNVRLTNVLSDITGVTGMKIIRAIVSGERNRKTLASYRDTKCAKSEEEIEKSLEGNYKLEHLFVLKQALELFDFYDQQIQQCDQELESLYHEFEEPDQPGTPAPEKRKRKRRKNQPHFDLSTSLYRMTGGIDLTKIEGLDALTVQEVLSETGTDMSKWPTVKHFASWLCLAPNNKITGGKVKSSHTPPTKNRASTAFRLAAQSLMKSKSALGAYCRRMAALHDAPTAITATAHKLAKIFYFMLKRREAYRPLAVDYYEKEHRDKVVRSLQRKAASLGFRLETVTS

SEQ ID NO: 367938 - protein, 315 aa, unidentified
MYQNFIGIDISKKDFSVGIHGKNKATVYLNTQEGFTEFYSDYKSFLEKGLVVLETTGGYELCLIHYLQARHVHVHRANTRKVKHFIRSFGRLGKTDAIDALALANYGFERHHSLELFQVNSQQKLLKLVNRRTELKQMLVQEKNRRQAPDQRELTNSFNIIIKAIETEIKSLEKEIDEVLKSTPLLQDKKEVLKEIHGIGDIIAIELLALLPELGTINRKKIASLGGVAPHPNESGKKIGHRFVRGGRTEVKPILFLAAMTASRSKSSLGEFYTRLVSAGKKKMVAMTALMRKILVIANAKLRDFYLLKEIPQHG

SEQ ID NO: 367939 - protein, 372 aa, unidentified
MKHCTSKKPKLYCGIDLHTKKSYIYIINEQGTKVKSKEIDTEEQTFITFFESLIEENEIYSAIEISSLTFQYCNILKAIGISVYVVNTLKNAYISKSMKKTDKEDAKRLAISLWKEILPEPVYIPSEKEHSLRKLISHRADLVKSRTRLINRIRQRLREKEIKIPLRTLNKTKKIEPVLKSISSETQPILHFEISHMFEQFKLLEKQIEQTEQLIHSQINKDADFKEMYNLLLTVPGMGKITSAAFISRVGKNIERFKNVRKLISYFGQCPKIRESGGKTIGNQGITKQGNGMLRGYLSQVAIAALRSKSYNSIPLKKWYENIKRRKGWKKARVALSRKIAAICYGVLIHKRPYNPMLVTGENKCEKPLITT

SEQ ID NO: 367940 - protein, 338 aa, unidentified
MAIETLGIDIAKNVFQLHGVNCTGRVLLKRRVMRDQLLAVVAQIERCTIVIEACTGAFCWARKFEALGHAVKIISPQYVKPFVRRQKNDGNDAEAICTAARQPHIPLVPKKSVEQQDIQALHRARQRMVNHRTAVVSQIRGLLLDRGLAMAKSITRARRLIPELLSDCENELTTLAREAIAELYDLFRDLDRRIRVFDKKIQAVFQASEPCQRIAKIKGVGPKTATAVVAAIGDGAEFKNGRHLAAWVGLVPRQFSSGDRTTLMGISKRGSQHLRSLLVHGARAVVRTAPSKTDPNNQWVNQLRERRGFNRATVAVANKNARIIWAVLRTGAPYRAAF

SEQ ID NO: 367941 - protein, 359 aa, unidentified
MIAIGVDVHKRQCTVAMQGEDGELKCFGPMENTREGWQELLEQLPPAAEIALEVSTSGYFAMSVLEEAGWRERAHWVHTAGIDSLRKQKYDRLDAKRLARKLSVAERDPLPEAWFPPPAIRALRLRARQRCWLAVLRTQVKNRLQSLLQMHGLRPPVTDVFGVAGRAWLAAQTLPEATQESVEQLLRVHDFLCQELAKAEGYLRAVDRQFPELARLRTLPGIGEILAPVIWSEMGTLERFRSADAWVNYTGLVPSLYESGEVSIRGGITHQGSAWLRWALVQAANSVIQGVNPLARRYRRLRRRKLANVAKTAIARSLARCVYGVLKSGGNYQEARWGRRPTGVVRSWGAGKPEVAMGH

SEQ ID NO: 367942 - protein, 337 aa, unidentified
MIIIGCDFHPSFQQIAMLDTETGATEEHKLMHTSGEAESFYRKLASPAIVGIETVGNDQWFVQLLQQLGHEVCVGDAAQIRASYVRKQKTDRRDAKHILRLLVEERFPRIWIPDTEMRDHRQLLMHRHKLVQIRTRVKNELQHLMLNQGMQKKQKLWSTEGRAALASLPLAPWTDRRRKDLLSLLAMLDAQLESLNDAVTRVAQEYPGVPLLMSQPGIGAVTALAFVLTLGDVHRFPRGKQVASYLGLVPREHSSGGKQRMGGISKQGNRLLRFLLVEAANIAVRFDPELRKEYLHRCHQKHSTVAKVATARKLAIRMYWMLRTQTPYPQVLSSRVA

SEQ ID NO: 367943 - protein, 349 aa, unidentified
MRFYHHSHRFYCGIDLHARLLAICVLDNEGAIVLQTQIPANQQLLLDTLAPYRPDVVVAVECLFAWYWVADLCQAHNIPFVLGHALYMKAIHGGKSKNDDIDAEKIARLLRGGNIPVAYVYPKWLRETRDLLRRRMHLVHKRAELVTHIQIVNAQNNLPEFGKKLIYAKNRAELKIAERFQNPHVRKSVEVNLALIDALDVQIADLELYLERTAKLEDPQTYHLLKTIGGVGKILGLVLLYEIHDIRRFPEVGEFLSYARLVRCVHESGGKKLGYGGKKIGNAHLKWAFSEAVCLLLRSYPVVKIWQARKQKKHGKKKTLGILAAKLGRAVYHMLRKKEAFDVRRFLGQ

SEQ ID NO: 367944 - protein, 351 aa, unidentified
MTATVVDARGGILASEHFRVSGDGHRALEAWARSFGPIARWGVEGASGWGRHTAVFLCGRDHDVRDVCPTRTARSDRARQRGKSDMLDSERIARETLAHPLLPRAFKRAGDGQGPDEQRELLALWHNARRSVLTSRQHLLNEAESLLADLPLDVREQLPDSKAVRPRLAALAQRNRRRRHDAPTTLRLRLLDAHHARIAQLDREENNAVKQLEALVRVSASTLGELCGLSTRSVAELLVEVGDPRRFTEGGFARFNGSAPLAASTAEGPGEPVRHRYNPGGNRRVNAVLHRMAVTQLRCEPRAQAIYERARARGHTKREARRILKRHLSDVIHRRMMRDLKAASASALLAA

SEQ ID NO: 367945 - protein, 409 aa, unidentified
MEVIFSRCAGLDVHQETVVACARIQSGSKAGQEVRTFSTMTEGLLALSDWLVGQDVTHAAMESTGVYWKPVWHVLEASVELILANAKQVRNLPGRKTDVADAVWLADLLAHGLIRGSFVPPVAIQEMRDLTRTRTQFVREATRHTQRIQKTLEDANIKLTSVLSDILGVSGRAILRGIVAGTTDPPALAALRCPRGLKATEEQFVQALTGKVRDHHRFLLKLHLAQVDSIEASVSLVEQRIGEFLQPFRIEIALLTTIPGISDTVARTIVAEIGLDMSRFPSAGHLVSWAGLCPRNDESAGKRRSTKLRKGDTWLKTALVQSAWAASKKKNSYLRGLFLRLKARRGPKKAIVAVAASMLTSAYFILKRREPWKDLGINYFDTRDRTKLANRLVKRLENLGLRVQLSEAA

SEQ ID NO: 367946 - protein, 356 aa, unidentified
MYQVKTLDFTGQSIFCGIDIHKKNWSVCLRNEERELKIFSQNPEPGILAHFLNRFYPGANISIAYEAGFCGYWPQQVFATEGLSCKIIHPPDIPQPDKSRRYKTDRIDCRKLALELSKGFLNSIYIPRQSTIESRSLVRTRQQLVKDQTRYKNRILSFLNFFGIDVPEGYKKSTHFSKRFICWLEQLPLASSSKAALQVKVSVLKSIREQLGAINRKLRALAESQEYKHLIRLLLSIPGIGIQSALILATELEDITRFKNFDHLAGYAGFKPDVYSTGEKNVVKGITHQCNTLVRETLVECAWMVIGRDPALTQAYYEYKKRMHYNKAILRIAKKLLNRVRYVLLKNQEYQIGIVA

SEQ ID NO: 367947 - protein, 380 aa, unidentified
MKKFITHVGMDTDSQGFDIAIAEGFGSNNHEVRSWGRIPATLAALDKLIKQLRKQGHQELRFVYEAGPCGYGIYRHLLGKEGVVCVVVAPSRIPRQPGERVKTNRRDARKLARLDRSGDLEAIYVPSEEDEAMRDLSRGRAATVAAATRVKQQLKSLLLRHGIKYPGKGESWSSDYRQWLGGLQLAHEAQAYVLAEELVALEEAEARVSRLTERIRELLPGWRMQPVVAALQALRGVAMVTAVEMVAEVGDLTRFSKPRQVMGYLGLVPSEDSTGDKRRQGNITKTGNGHARRSLVESAWAYARPPRVTRALRQRQQGLSREVIEISWRAQVRLCGRYRRLSARGKNKKKIIIAIARELCAFMWAIALATGNKQVPARAA

SEQ ID NO: 367948 - protein, 338 aa, unidentified
MKITTLGIDIAKYSFHVLGADARGHVVLRKRLTRRRVLEFMANLPACVIGMEACAGAHYWARQFGALAHEVKLMHPKFVKPYVKTQKNDFNDAEGILEAVQRPTMRFVSVNTIEQQDVQALHRVRQRLVKQRTAIVNQIRGILQEYGVVVAQGVASVRRHVPGILEDADNELSDPVRRIIAGCYEELYALEPRVNEIEAQIEAVFRSRETCQCLAQIEGIGPLVSTALVAAVGDARNFKNGREMAAWLGLVPRQASSGDKTVLLGITKRGDRYVRTLLIQGAMAAVRTAVRKDDPRSRWINALKARRGVKVAAVAVANKNARIAWALLARGVPYRTAA

SEQ ID NO: 367949 - protein, 317 aa, unidentified
MNTINNQNEINVGVDTGKTQLDIYIRPLDIYFTVENNQSGIKHAIQILKKHPVTRVTIEASGRLEQPFIIACAEANIPFVIANPVNIKRFAGAIGQKAKTDKLDAQLIAHFGEAIKPPLSSLKPEQMRLMSDLLSRRRQLMDMQTMEKNRSQIMPKTLSSLIKPILTALKNQIDKVDLKLQKLIEECDEYKAKNAIIQSVPGVGYVVAFNLLSDMPELGYVNNKEAVSLVGVAPFNRESGVYQGKRMIRGGRPKIRTAMYMAMMSAIQCNSKFKDLYQRMVKAGKPKKVAIIACIRKLVVIINSMVRDGAMWDPKMV

SEQ ID NO: 367950 - protein, 329 aa, unidentified
MNYKWFVGIDIAKKTLDVVLYKKELQKKSPYCQILNDSDGFNNLMNWLKEQNVVVKHSLFCMESTGIYGMELVNFINGKANYCIESPLHIKRSLGLTRGKSDKIDAFQIARFCYLHREELVPSRAPSKIMLTLRSLINERERLVRARTIDKTIVKELNYKENKSCIERAENRIIFLTEDITQIEKEINLVIKENLDIECNYHLAKSVTGIGLINAVMFIIFTNNFSSITDARKYACYSGIAPFEHSSGTSILGKTRVSKLSNRRIKVNLTNGARSAIINDPELKLYYKRKTDEGKEHGTVMNAVKFKLITRVFATVKRGTPYVKLRQAG

SEQ ID NO: 367951 - protein, 343 aa, unidentified
MDYFAGLDVSVKETSVCIVDEAGKIVREARVASEPEALLQVLTNTLYRFKRVGLEAGPLSQWLLSTLAEAGLPVICVETRHMRAVLKAQINKTDRNDARGIAQMMRAGLYRPVHVKTLRSQKLRMLLTHRKLLQSKAIAIENDLRATLRNFGLKVGVVGTVKFEARIRELVENLPDMAVLIEPLLTVRRVLREQITVLHRRLLAIVRDDDVCRRLMTVPGVGPVVALTFRVTVDVPARFRHSKAVGAAFGLTPSKYQSGESDRSGGISRCGDEMMRAMLYEAAQILLMRSAKWSWLKAWAMKIARHRGLKKAIVALARRLAVIMHRIWVAGTEFRWTREVAAA

SEQ ID NO: 367952 - protein, 407 aa, unidentified
MLFFLGNDWAEEHHDIELQNETGRVLARAKLPEGIAGITKLHAVIGEHLGNEDEAEVIVGIETERGPWVQALVAAGYQVYPVNPMQVTRFRQRLGVSGAKSDTSDAHVLADMVRTFREQLRPIAGDSPEAEAVKVVTRAHKTMIWERTRHLLRLRHTLREFFPAALVAFDDLTAAEALELLATAPEPASAAVLSVDAIEAALKRARRHGRAAKAQAIVEALRAEYLGQPPVVATAYAATVRAQVAILTVLNEQVATMQEQIEVNFSKHPDADVYRSQPGLGAVLGARVLGEFGDAKKRYADAKARRNYAGTSPITRQSGKKKVVSARYVHNDRLIDALGLQAFAALRHSPGARAYYDQLRRRGTGHHAALRQLGNRLVGILHGCLKTSTLYDEAKAWPTGQDEHAAA

SEQ ID NO: 367953 - protein, 337 aa, unidentified
MNYNYFIGIDIAKEALEFCLLKDNKIIFQSSTPNSIKGIQAFIKEIIRLPGLNFSNVLFCMEHTGIYNNHLLKYLTDKQCHIWLERGAQIKYSLGLQRGKNDKVDAGRIAMYAYKNRDSVRLWTPPREIIVRLRSLTSLRNRILKCVYLLKVPLKEMKSFSHKQELAKLSAICKSSITALDKDLERVNKQIQEIIIQDPELNRLFNIITSVDGIGAVTAAEMIITTNEFKNITEAKKFACYSGVAPFEHSSGSSVRGKTRVSHMANKTIKQLLHLCAMAVIRKPGEIQDYYLRKVKEGKNKMLIINAIRNKLILRIFSCVKNDRLYQKNFKISLVES

SEQ ID NO: 367954 - protein, 408 aa, unidentified
MNPLFVGIDVSSKNNVVYLMKPDGSKHSSFSVQNNLGGAKLLSERIVSALGSMQLERVVIGLEATSIYGDSLVYALREDGHLGRFQRKIHVLNPKQVRKFKEAYSDLPKNDWVDAFVIADHLRFGRINREVYMDDYRYKALQTLTRARFDVIQNLTREKQRFANYLFLKCSGMAQDKDIQNTSATTIALMEHFETVDDLANADLEELTAFITETGRGKFADPDATAKAVRAAAKGSYRLPKTVNDTVNQAMAVSIASMRALKGQVKVLDKAIEQQFEIIPNTLTSIPGIGKVYSAGIIAEIGDIHRFDSQASVAKYAGLVWNRSQSGDFEAEHSRMIKSGNRYLRYYLLEAANSVRRCDSEFRRYYDLKFKEVNKYQHKRALALTARKLVRLVFRLLKDNRLYIPPEG

SEQ ID NO: 367955 - protein, 342 aa, unidentified
MSIVGGLDIHRRQVTFDVVDTVSGEAWRGQLCPADREHLRGWLPGLAGRGEVHLGMEGCTGWRYVAEEVAAAGFTPHVGDPAEIAGRRSPKRRAKTDRTDARLQRDLLVRGEFPDCYLPPWPVLDWRQRLESYHDLREQHTAWVQRIHAVLFHQGAPACAGLGTVAGRARLEQLAAQLTPAGQEHLATALAQLDLAAGQMARARRQLTAIAVHVTGARILATDLYGVGPLTALAMTAWLGGAGRFSSARKAVRFAGLDITVRDSDRHRPPGKLSRQGPPVLRWCAYEAGKTQARRTAPGHDYYAAVADRTDGKRAALSQARRLIRYATHILDGLGDRAFAPC

SEQ ID NO: 367956 - protein, 421 aa, unidentified
MFSRVKIACGLDVHYSKIVGSIVTSDGTHETRTFTTDIDDTLKLKDWILTHKCERVAMEATGIYWYPIYNLLEEHVTVQVANPFYIKGIPGRKTDQIDAEWIGMLCLNGLIKPSIVPTREIRNIRDLVRTLTSFTHERTRHKNRVHKILVRAGIRIGAHLSKLFGPSGLKILYGLLDGKSIDTILLDLKSPRIAKKRDELVRSICGTLDENDVFLIRLELDSIEFVDQQIEKLKQRLTNLMTPMNEEINILTTIPGIGQDSAMKILAEIGNIDMFPSGKHLVSWAGIAPGMNESAGKKIPGHITKRGSKYLRTFLIEPAHAIAVMKTDNQLKRYFGRMVGRLGYKPAIIALARKLLMIIYHLLANHEPYFEEKFSKKKPITLPVASPSSMTEDQILKVMSNAFANMSEVERAKFVRKLNRI

SEQ ID NO: 367957 - protein, 419 aa, unidentified
MFKIFRKNCCGLDVHKTWIYACIGITDESGRTDYKQARFSSFSKGLRELADWLALYNCKDVCMESSGKYRIPVFNILEATCRVTLSHPKYTKPQKGNKTDRKDAKWICDLFMCEMTKPSFIPPPDIRHLRDLMRYRFKLTNMLTSEKNRARNCLTVSNLKLDDVFSDVFGKSAMSITNYILEHPGEPFDVIPFVDRRCKSPVQEIQAAVDGSISREQAAKLREILNHIDELEAHKRNIESEIMQLAAPYAAALELIHTVPGFSSDPMTAVAVLSEIGADMSVFKTAKNLCSWAGCCPRNDQSGGKRKSTRISRAGVYLKPLLVQVANAVVKSDKHPECKERYRRLKARRGHKKAIIAVCRMFLTAIWNILNKSEPYTAEGYLTERPTNKSKVITKSQALSLMKLRGYIIKDDVAELAPV

SEQ ID NO: 367958 - protein, 318 aa, unidentified
MIVLGLDVSKNDLHAAVIGEGTKLGKHSFSNNPRGHQQLLKWLENRGVAKVHACLEATGGFGEDLAIMLGEHGHVVSIVNPRRIKAFGQSEGVRTKTDAVDAALIARFCQVHVPDPWTPPTPAERALQALLRRRDNLIDMRIQETNRSEAPRTADSIRSSIQEHIRYLEEQIAAIEAEIRKLVDGDSGLRAKSELIRSIPGIGETTANGILGEVPNLSEFRDVKAVGANAGLSPAHNQSGLSPGHSKLCKAGNARLRKIMFFPALVAIEKNPVIKAFADRLRARGKRPMVIVAAAMRKLLIIVYGVLKSGRPFMAPAS

SEQ ID NO: 367959 - protein, 340 aa, unidentified
MPKYIRIGVDIAKNSFQVHALESEDCSATKRKLSRSGIVKFLAEVEPCAIGMEACGSAHYWARRFRAMGHEVKLTPPIYVKPYVKRGKNDAADAAAICEAMSRPNMRFVAVKSEDQQATLMAHHKTRELLIKQRTMSVNALRGHLAEFGVIAAKGISHVEELVERAAADLPAMVQATLGVLLAQLRSLDAAIDELERAIVADHRRDPVSRLAASVPGVGALAASAILASAPDPQAFKSGRDFAAWLGATPKQNSTGGKEKFGSITKQGNRYIRRLLVLGAISVLRAAPKRKGALCDWLAALRARKPAKVVAVALANKLARIVWAIITTGEAFRTSIYAKA

SEQ ID NO: 367960 - protein, 309 aa, unidentified
MDTTYVGIDVSKDRLDVHVEPVGEAFAVGRDVAGQADLVDRLRGLHPAAIGIEATGGLESVVAASLAAASLPVVVVNPAQVRAFAIALGKRAKTDPIDAAVIARFVAATQPQIRPLPDEATQLLADLIARRRQIIEMMVAERQRARRATGRSKRSIARLLAALEKELSDLDQDIDDNIRASPAWREKEELLKSVPGVGDVTARTLIAELPELGKLDRRQIAALAGLAPWTRQSGKWRGKSFIGGGRAVVRSSLFMAALVATRHNQTLMAFHQRLLLKGKPKMVAIIAVARKLLTILNAIIRENKPWQNA

SEQ ID NO: 367961 - protein, 353 aa, unidentified
MSSLFGTGKGPVMQKNFYFIGIDIAKETFVASIYHKPDEPVLTKEDIPNNPKGYDQLIIWLGENRINKDNCQICMEATGAYSQGIAYYLLVQGYQVSVESPLKVKRAFHPAGHKTDPVDSRQIAEYAYRFCDQLIPWQPKEELLEKIRQLLSVREQFTKQKVAIKNAMGAYSQQKVQVKLINKAHKETLAQLEKQIARIDKELDKLIREDPDILSKFNKLDSIPGYGMLLSAHLLVMTESFSKISDYKRLAAFIGIVPYKYQSGTSIHRKDSIRHYGPMASRRLLRLAAQSVATHDSSFRQYYLRKLAQGKAKALVLNNIANKLLKVSCAMIRNNAGYIKDHHSVHPMYVKSA

SEQ ID NO: 367962 - protein, 350 aa, unidentified
MQKIYIGVDFHARQQTICYLTTDSGEIRLHQLLHHDKAAVRAFYAQFSGSVVVGLEASGYSPWFERLLEELGCEVWLGHATEIRRRARWRHKNDRRDAELILDLMLHDEFPRLYLPPLPSREVLRMLRYRQKLIKMRTIGKNSLQALALQSGLAKGPHLFTKAGLQELRTTPMSPAMQWQREQWLQLLEPLNQRLLETMFWLKQQSQADPRISRLRTHPGVGLLTALCLVHSLEPVSRFSNRRKVTAYAGLDPLERSSAERQRFLGISKAGSRVLRFLLVEAAHTAIRKDAQLGQFYQRLAARHGRPKAKVAVSRKLLIRTYIMLRDEIDYAEFQRRAVAARPVLPAHGL

SEQ ID NO: 367963 - protein, 347 aa, unidentified
MRFVGIDIGKAKCRAAIMDPDGLMLEEFTFTNNHEGIEGLTSKLTLADRVVMESTGSVWTNLYNHLDEKHIPVTLANPLKTKAIASAKIKSDKVDARILAHLLRSNLVAESYVPPKHLREIRTLIRHRVAIVKIRTMVKNEVHALIDQHGFTCPCSDMFGKGGLEWLRSLQLPALDRLILDNHLTHLESLNQQTERVDEEIHSEAVEDEDVRLLLSMTGLNVYSALLVKSEIGNITRFPHYKKLASWAGIAPSLHQSGSVEYHGSITKQGSRMLRWVMVEAARVAVNHDPRMRTFYERVKHRRGDQKAVVAVANKMLKIIWFMLTRREPYESRNEKRYQKKLNSITA

SEQ ID NO: 367964 - protein, 410 aa, unidentified
MNLTTLFVGIDVGKTTNVVRFMDGGGDTLSLFSAPNNADGAAKLQENLRYTLLHTDYSKVTIGMEATSIYANHLATYLHNDDFLHKWQCSVYVINAKLINNFKKSYPELPKDDNIDTLIIADFLRFGRIPKSTCLDEKHLALRNLTRARFQAAQNLSREKTRFLETLFQKFSTLDSAKVFSDTFGATALAVACDFLTVDDIIYTPIEQLADFVNRKGKGKFADPQAVATALQAAARSSYRVSKAVNDSLNQLLAIRLIGIRSIEQQIKSLDKAIESYLAAFQNVLISIPGIGPVYSAGLMAEIGDVRRFAGHPSLAKYAGLAWSKHQSGNFEATNTKMYVSGNKYLKYYLMEAANKVRMHDAEFARYYQIKSREVPKHQHKRALALTARKLVRLVYSLLSTNRLYMPPSQ

SEQ ID NO: 367965 - protein, 355 aa, unidentified
MESTKYVGMDVHEQTISIAVMNSAGKLIMESIIETKAITILQFIQGLRGDLHVTFEEGTWAAWLYDLLKPHVTKVVVCNPRKNALLKEGNKSDRIDARKLAELLRNGSLSAVYHGENGVRTLKELSRSYLTISKDLGRVMNRVKALYRSWAIPCAGTQVYAPRHRPEWLSKITEAGVRRRAEHYYQQLDALQALRHEVRKDLLVESQKHHATKLLRQVPCIGPIRAAQLVALMQTPHRFRTKRQLWTYSGLGLETHDSAQYRYVEGQLQRSKKPQQLRGLNTNHNHDLKNIFKGAATMASISSGPFHGFYEALLAKGMQPTMARLTLARKIAAITLIVWKKGARFDPQHLKQQAA

SEQ ID NO: 367966 - protein, 451 aa, unidentified
MPRGESAPDLCLFFRAPVQGSAEVAAARSLKQRGEGMSEQRWYAGVDWASESHHVFLTDGAGRKIGEKIFKHSGEGLAEMGAWLLSASGAASFSQIYVAIETPHGPVVETLIERGFMVHAINPKQMDRFRDRFTLAGAKDDSRDAEVMACALRTDPHCFRLLAALDPTVIELREWSRIASDLGAERNRLTNRLREQLWRYFPAMLELESDLGAPWLLDLWELAPTPGKAARIREGTVAKLLKRHRIRRFDAAHVLNVLRQPAVQVAGGTVEAASAHIKTLVARIRLVNGQVKEAHGRLDALTARLIPAEEAGAGQQKQHDVEILASLPGVGRIVLATLLAEAWDGLQRRDYAALRSLTGVAPVTKKSGKSCIVIRRQACSNRLANVMYHWARVAIQLDTASKAKYATLRGRGHSHGRALRSVADRLLGVACAMLKNGALFNPSFNAQNTPC

SEQ ID NO: 367967 - protein, 424 aa, unidentified
MDTIIERSCGLDVHQATIVACVLIGGPKGKVQKEIRTFSTFTRELLALKDWLQEQGITHVGMESTGVYWKPVYAVLEGHVELIVGNAQHMKQVPGRKTDVKDSEWIAQLVRHGLIRPSFVPPKPLRELRELLCYRRKLIESRTAERNRLIKLLETASVKLTSVASNAFGVSGMAMLRAIAHGEAKAETLAEMAKGVLRKKLPELTLALDGRIEEHHRFLLRLQLRRLEQVDRDVAEVEMRVEEKLLPYQQQRQRLTQIPGVNTQIAAVLIAEIGVDMSVFKSADHLASWAGVCPGNDESAGKRRSGKVTKGNVALKTALVEAGLAAGRTKGTYLKDKFHRLKARRGLKRAAVAIGHKILVAAYVMLSRNVDYAELGESYLDRLDRTRTVAALRRRIERLGFDVSLVPKESPSLGPDVPQGGVPM

SEQ ID NO: 367968 - protein, 412 aa, unidentified
MEILYAICCGLDVHKDSITACLRRLGGGGHVTQELRPFGTTTGELLALLDWLVAAGCTHVAMESTGVYWKPVFNILEGHFQQVLVVNAQHIKALPGRKKDTLDAEWIAQLLQHGLLRGSFIPPAPIRDLREATRYRKQLIRLRADETNRIQKLLEGANLKLGSVATDILGVSGRAMLAALVHGETDAAALAGLAKGRLRKKQPQLVAALTGRITPVQRTLLGQQLAHVEDLDRAIAALDALIGTLMAPYQAEAERLRSIPGIDTRSTENLIAELGVDMTVFPSDGHCASWAGMCPGHNESAGKRRSGKTRKGSKWLRATLTEAAWAASHTRTYLGAQYHRFARRRGKKKAVVAAGHSILVIAYHILKDGTTYHELGQDYFDKRDTARIQERLITRLAALGLRVTVEPMTQPA

SEQ ID NO: 367969 - protein, 346 aa, unidentified
MRDDMTYYAGIDVSLEYSSVCVVDGAGKIIREQRIASEPEALIAWFRGLGFGLERIGLEAGPMSQWLYAAMRAAGLAVELLETRHVRDAFKAMPVKSDRNDARGIAQLMRLGWFRPVHCKSMAAQEVRALLTARKLVQSKLLDVQMSLRGLLRGFGLKVGATTPSRFAGRIRDLVEGNATLEVIAAALLVVHETLRRELAGFEKRVRSIARSDGRVRLLMSTPGVGAIVALTYVAAIDDPARFKSSKGVGAHFGLTPKKYQSGETDITGRISKIGDEGVRTALYEAGHIILTRPLKGCTALKSWAMRLAKRAGMKKAKVALARKLAVIMHRMLVDGTLFASAAVAA

SEQ ID NO: 367970 - protein, 399 aa, unidentified
MKKGIRETEAEWKQRPERTVGIDLGDRFSRYCVLNGEREAMEEGQVRTNEAGFRRHWEGEPRQRMVIETGTHSPWISRLLQSFGHPVIVANARKLRAISQNESKNDRQDAEMLARLGYCDPKLLAPIRHRSAERQRDLNLLRARDTLVRARTMLINATRGLVKSAGGRLPAAASDYFVVRVSAAVPPELEAATQPLLHQIAALTAEIRGLDQAIEKLVERYPEIAILRTVPGVGPVIAAAYVLTLDGVDAVQRSRSVGAFLGLRPRQSQSGNSDPQHNISKTGNVYLRRLLVQAAHYTLGRFGPDSALRRWGLKLAAGGKRAKQRAVVAVARKLAVLLHHLWRTGQHYRNFPQDAASAVALQSTVASSSSRVVQSGTNQVGRRRLSPDSSSPDSLRPVH

SEQ ID NO: 367971 - protein, 466 aa, unidentified
MRQVEISTRCQRRAATRAVARGEVFPLVRPGAAGIDVGSRVHYVAVPPELGKPVRSFDCMTADLTEMAVWLKACGVRTVALEATGVYWIPVVEMLEDHGFEVYLVDARQTRNVSGRKSDVQDCQWVQRLHSYGLLAPAFRPDKSITVLRSYWRQRQGLVTSCSEQIQLMHKALEQMNVQLHKVLSDVTGQSGLRIIRAIVAGERDGEKLSALCHHGIKCSRAQVARALQGNYRPEHVFALAQALEAHDFFQRQLQACDQVLESEIATVPSRHTQPSSQHPDRPTRAKRRKNQPYFDLRAQLHRLVGVDLTRIEGIDTMTAFSVLSEAGMDMTRFPSEKAYSSWMHLCPNNRVTGGRVRSRRVMPGVNRAGQALKLAAQSLHHSKSALGAFFRRMKARLGPQKAITATAHKLARLIYRMLKYGEAYVAQTEAQYHELTRKRALRDLTNRARHLGFALVNTASGEVVS

SEQ ID NO: 367972 - protein, 341 aa, unidentified
MEEYIGLDVSMKETAVSIRRAGERIWRGKCASDPSIIAELIRKRAPSVKRVVFETGPLSVWFYHSLRTEGLPAICIDARHAKAALDMAANKTDANDADGLAQLAEVGFFREVRVKGFDSMLTRTLVAARTRLVRITTELSNQIRGVMKTFGLLVPAGKGNTFEKNVRSLLADQDRLASIVLPMLEAWRGIRVRAAELGRQLVRDARQSRACRILMSIPGIGAITATSFTTAIEEPDNFRNSRSVGAWIGLTTRRYQSGEVDYDGHISRRGDRPLRGLLYEAAAVILTRSSTHSTLRTWGLQLRERIGFKRAAVAVARKLAVIMHTMLKTGELFNPNAGAAA

SEQ ID NO: 367973 - protein, 347 aa, unidentified
MSQIQVIGLDLAKQVFQVHAIAADGEVVVKRQLRRSQVLTFFSKLEPCLVGLEACGGAHYWAREIAAFGHQVRLMPPAYVKPYVKRGKTDAGDAEAICEAVCRPTMRFVPVKTAAQQSEAMVLKIRNLIVRQRNQTINALRAHLSEFGIVAGVGITRVADLIAVVRDTDDTRLPGEARAVLAGLADQLDALSTRLRQLDEEIILQARQDADMRRLATVPGIGPITAASLKALVPDPAGFSSGRHFAAWLGLTPRSYSSGGKERLGRISKMGNPTLRTLLILGATTVLRHVRNGAPTSMWTTALLARRPPKVAAVALANKMARIIWALLVKGGVYRQSGFPEGATAGA

SEQ ID NO: 367974 - protein, 420 aa, unidentified
MKVVYQTCCGVDVHKSFLVATIIKTTSGVQPSYQKKRFSTFNNSILQFKEWLLKNECRDVCMESTGKYWVPVFNLLEDDINVTIANPKWVKAVKGNKDDTKDSKWIGDLFRLGLVPGSYIPCKSIRILREFTRYRYKLTSCRSSEKNRYQNALTVCNVALDSVVSDIFGKSATSVIDYLIEQSDNSINHEEIASRLLRSLKKKSNSVIESIEGYQMTDSQKYRMRLVRAHMDYITSTINDIDTMLDSLITPYENAVQLLCTIPGVDRNSAITVISEIGIDMTPFSNSKRLCCWAGLTPGNNESAGKKKSVRITRAGVYLKPALVQVAHAAVKSDKSPYYKQKYERIMKRRGKKRAIIAIARMILTAIYQILSTGEVWNPTDLYKIDMPEPLKAKQKEKAIKQAKKLLISEGIISEAQLAS

SEQ ID NO: 367975 - protein, 357 aa, unidentified
MKIVGCDLHARQQTIAMVDTESGEFTEKTLAHEGSAVREFYAALEGGAVVGIEATGAMQWFLELLEELGIEYRVGHPAKIRAKETRKQKHDRRDAGLLLELLVEDRFPEIWMPSSEQRDLRTLLRDRHQWVKMRSRLQHTLQAIALNHALRQGRGLWSAEGQARLQALPLPPYTGRRRNELLGLYRQLQKRIQELDKEVEGQARQRSQSRRLMTHPGVGPVTALATDVFLGDPNRFTTGNEVASYIGMIPCEHSSGKRQRLGKLTKQGNALLRYLWTEATIHAVEKDAELKRFYRRKLVQKGMGKAKVAAARKLGIRLWIMMRDQIDYQEFCRRGELRQKGKAQTGMPDFNSGPAQQ

SEQ ID NO: 367976 - protein, 413 aa, unidentified
METLYPCCAGLDIHKETVVACVRKVTADKVHQETRTFRTETSGLLALADWLTDEGVTHAAMESTGVYWKPVWNLLEGVVELLLVNAEHIKQVPGRKTDVKDAEWIAQLLQCGLLKASFVPERPVRDLRDLTRQRVQLVRQKVQVANRIQKTLEDANIKLASVASDVLGKSGRDMLRAIVNGESDPVVLAELARQRLRAKIPQLQEALLGEVTDHHRFLLRMFLEQVDFLEGQIARLSQRIREVLPVPFVEAVERLETIPGIDRRAAENIVAEIGADMKPFPSAGHLASWVGICPGNHESAGKRRSGRTTKGNAWLRVTLVQCAWAASHTKDTYLSAQYKRLAARRGKKRALVAVGHTLLGIIYGVLKKKGVYRELGADYLDRQDKAKLAARLLKRLEKLGVKVRVEAEAEAVA

SEQ ID NO: 367977 - protein, 428 aa, unidentified
MAKSKAQPVVQTDDDALYYERCAGIDVHKKLLVVCLRIGRRTESREFGTTTGEIREIVAWLKANGCQMVAMESTGSYWKPLYNIFEQEQVAAMVCNAYHIKNVPGRKTDWNDAFWIAKCLAQGLLKPSFVPDREQRELRDMTRFRKSQIEERSRNINRLQKFLEGGNIKLGSWLSDIEGKSAGQLLELVIGKPDFTLDDVKARMHGGMKSTPEEIFASLDGYLTDTQRAFFRHVVEIIRQQTEQIEKTDAMIKASLNEEQKAAVQALDVLPGIGVVSAEQIIAETGTDMSHFRNQHAFSNWTGTAPGNNESAGKRKSGKTTHGNKMLKSTLTQCAKSAVKNKNSFFSAQYSRLVSHRGKNRATMAVAHSMAIAIYFVLSGVEFKDLGADYYTQFNREKKISSHVKQLSKLGVTIPDDVLRAAVERPPD

SEQ ID NO: 367978 - protein, 347 aa, unidentified
MKFYTKTHQNYCGIDLHTKTMFVCILNNQGDILLHQNIPAKPGPFFELIADYRQDLVIGVECMFSWYWLADACAQQGLAFILGHALYMKAIHGGKAKSDKIDSEKIARLIRGGTFPLAYVYPSELRPYRDLLRRRNFLVRMRSEVLAHIKLTNYQYNLPAFEKHIGKVGNREGLAERFTDPSVRKNVEVDLSVADHMHVEINQLENYIIRHVKQFDPRTYYRLQTVPGIGKVLALVMLYEVGDIKRFATVQAFCSYCRLVKCAKESAGQLYGYGGGKMGNAHLKWAFSEAVALLMRESDRAKAFVARHEKKHGKGKAMSILAHKLGRAIYFMWKRNDAFDEKYFFKC

SEQ ID NO: 367979 - protein, 353 aa, unidentified
MKMYYVGMDVHQASIVIVVLNGAGKVVEESSLQTGVAAVRSYLQRLKGKVLVTFEEGTQAQWLYEVVQPLVTAVIVCDPRQNRLLAAGNKSDRIDARKLAELLRHGSLKAVDHRDHGVRVLKELVRNYECLVQDTTRVMSRLKAIYRGRAIACQGHELYRQDRKQQWLRKLSEPGAKARAGFLYEQLAAVRPLRQKAKLAMLREARRQAAYPWLLSVPRLGAVSVAQVLAIVGSPHRFRSKRQFWTYVGLAVVTRTSADQEVINGVLRRSRRPVATRGLNRNHNHLLKRVFKTAATSACHRGPFSAAYEARVKRGMDPALARLTIARQIAAITLSLWKRGELFQVERMKMLRA

SEQ ID NO: 367980 - protein, 434 aa, unidentified
MMDSPHPFDLIIGLDRSDKKADLYFIDTRTAQRHKQSLDTSPEALHQWLAQLRQQHPQGKLAICLEQPATSLILFLENYSWITLFPINPITLQKFREAFVTSRAKDDGKDSQYLAELLLTHHQKLKPWQPDDSQTRQLQQLVVHRRAVIDERTGLSNRLKALLKQSFPQALELCGQDLWRPLATAFLLKWPTLQCLQKAKKEKLKEFYYLQGSRSQQLIEQRLERLAKAIALTDEMAVLQSHTLRIQLICRQLMLLHQTIEEFDRNISAAFQQHPDRQIFAALPGAGPVLAPRLLASMGSERDRFARAQNLQRFSGIAPVTKQSGAKCCIHRRYLCPQFTKQSFHEYAQQSILYSRWAAAYYWQQRKKGCPHHTAVRALAFKWQRIIWKCWQTRTAYKEEIYEAALKKTGSPIIHFLDQIELGKSPFKTTVKQS

SEQ ID NO: 367981 - protein, 327 aa, unidentified
MQGWAREAGYSITNIVGIDVSKRELVVVVSGHAALRRYTNDAAGRRRLCRDLAKIVGTGTLRVGLEASGGYERKVAAALRKAGFEVIVFQPIQVRAYARYLGQRAKTDPIDAHIIALATAAYEGEIGHSDERLSSMAEHLTFIEQTEEDIVRLKTRLDGFTDTALKTRLAAEIKRLTTRRNAEIRSLRKTLRQHLDLATRLDLVTSIEGIGERTALTLIIRMPELGSLTREEAASLAGLAPFDDQSGKTDRIRHIKGGRAKVRRSLYAAALPAAFKWNTALVDLYHRLTARGATHKKALIACARKLLIFANAVLARGTPWIKSEATA

SEQ ID NO: 367982 - protein, 422 aa, unidentified
MDILYERVAGLDVHKDTVVACVRIAADGKTKRECRTFAATTEQLVELRAWLEDCRCTDVAMEATGVYWMPVFRILGEGDFELIVANAAHIKNVPGRKTDMNDAMWIADLLACGLIKASFVPNEEVQELRALTRTRKQLVREQTRHVQRIEKTLAEANIKLSSVISEIMGASGRRMIQAMIDGVRRPRQLAELAGKQIKATPKELYDALHGRLTDHHRFLLALHLKQWDGLDETIHKLDVEIAQRIEGMEARTAGKTPFRALIGLLTTIPGVSAVAAPAILSEIGPDMSRFPTAGHLVAWAGLCPGQNESAGKRKSSRLRKGAPWLKTMLVQCAWAAKRAKDSYYRAQFFRLQSKRGPQKAICAVAASLLTAIYHILKDGTEHHDLGLAYFDRRPTEVKAHHLVARLKKLGFTVQLQPIAEAA

SEQ ID NO: 367983 - protein, 423 aa, unidentified
MEIMHECVAGLDVHKATIVACVRVGTGRKVTRECRTFDTTTDGLLALLAWLVECRCSHVAMEATGVYWMPVWKILGEGDFTLIVANAAHIKNVPGRKTDMNDAMWIADLLACGLIKASFVPEEDVQELRSLLRTRKQLGREQTRHVQRIQKTLAEANIQLDSVLSDIMGASGRRMLEAMIAGVRNPRQLAALASAQIKATPKQLYDALHGRLTDHHRFLLKLHLRQWDGLDATIREIDLEVEARIMSMDKEVKAGTARFCDLIELLCTIPGVSTLSARTILSEIGLDMSRFPTAGHLVAWAGLCPGQNESAGKRKPARLRKGAPWLKTMLVQCAWAAKRKKDSYYKAQFFRLQSRRGPQKAICAVAASILTAIYHILKDGTEHRDLGAEHFNRRSTEAQTRRLVAQLAKLGFEVQLQPTAEAA

SEQ ID NO: 367984 - protein, 340 aa, unidentified
MKKDVKCYLGMDVSKLWVDITLMQVVDHHKQPTTTERFDNSEAGMKAMDKWLRKQQVPFDDNSLLVAENTGVYHRLVWDCCSTHGLPLHIGNATHIKYSFGIARGKNDKLDSQRLCSYACKNAEELKATPLLNRVLLQLKDLMRARSRLLSQFNSIKQYLSEVKLSNLKEVQQLLEQAHAAALEGVKASLKTVEDHIKHLIEQDAAIKHNYDLLLSVPGIGHLTAVYIICCTNNFICKISGKQLASYAGVAPFGNKSGTSVKGKDRVHMMANKELKKMLHMGALSAIKHYEEFRAYYQRKVKEGKHELAVLNAIRSKIVLRAVAVINNQHPYVDNYKKAA

SEQ ID NO: 367985 - protein, 416 aa, unidentified
MPDSTEICAAFVGIDWADRKHDVHVYPADGSAATHEVIEAKGEAIQDWILKMRAQFGREGRKVVICLEQSKGALIYQLMEHDFFVLYPINPKTLASFREAFRPSGAKGDVSDADLLCELGRLHRHRLQAWQPDDEQTRKLGSFCQKRRQVVQIGVRLVQQLRAELQTYYPLPLEMLELDTVLACDFLVRWSTLEQLRGAKVQVIRKFFYAHNYRRGDKLELLLAKLGTTVIVTSDTAIIEPAAAHVRLLAAQLRVILLAIPEFDQRIAELLEAHPDAPIFQSFPGAGAQLAPRLLTAFGTDRSRFESAEQISVISGIAPVRIASGKSAWTAKRWACPKFLRQSFHEFARCSLPQCAWAKAFYDDQRTKNKKHHTALRALAFKWIRILFACWKNRTPYDDTLYTAQLHRRGSAFACE

SEQ ID NO: 367986 - protein, 345 aa, unidentified
MPIVGGLDIHRKQITFDYLDTVTGEVKRGQIAPADREHVRAWLARFAGQDDVAFAVEGCCGWRYVAEELAAAGIAAHLGEPADTAALRGRKRHAKTDKTDARHLRALLAEGRLPECWIPPPHILEYRALLETYHDLRTEHTAWVQRIHAVFFHQGGPPLGEGVLRTEPGLEALQSAAAAHLSPAGQQQVATAVDMLAATEAQLGPLRHQLRQAAAHLVGAKVLAARLYGVGPVTGLALTCWLGGKDRFSSSRKAVRFTGLDITVHSSDRKGPPGRLSRQGPPVLRWAVYEAGKTHARASAPDHAYYAAVADRKNTKRAALSEARKIVRQACHILTELGDDALTAA

SEQ ID NO: 367987 - protein, 338 aa, unidentified
MSIVVVGIDLAKNVFAVHGVNSNGKPELVRPKVTRDKLPELIASLPPCTIAMEACSGAHDWARRFQIHGHTVKLIAPKFVAPFRMSGKKGKNDAADAAAICEAAQRPSMRFVPIKSAEQQGRLMVHRVRQGFIEERTATINRIRGLLAEVGIVVPQKANTVRRQVMGLLEDLPGRVNLVIGDLLSQLHHLDERIKQYDRHIAQMADEDHRAQQLMRLTGVGATTATALLAMIGSGHDFASGRQLSSWLGLTPAQHSSGGKTRLGRITKVGDGYLRSLLILGARAVLTAAKGKNDSISRWALALVERRGYWKAVVAIAAKNARMAWAMLTQGEKFAMPT

SEQ ID NO: 367988 - protein, 411 aa, unidentified
MQVVHERCVGLDVHKRTVVACVLLTQPDGSVQREVRTFSTMTVELIALGDWLEALQVTVVALESTGVYWQPVFNLLEDGRTVVLVNPQHIKAVPGRKTDVRDSEWLADLLRHGLLQASFIPPAPIRELRELTRYRKTLVQQRAHEVNRVHKVLESANLKLASVATDVLGRSGRLMLEALLGGEQDPAVLAELARGRLRTKLPQLRQALEGRLLAHHRVLLQQLLAHIDFLEQSLAIVQAEIERCLAPLGQAVALAQTLPGIAETAATAIIAEVGTDMSRFASDKHLASWAGVCPGNKQSGGKRLSGATTHGNPYLRAVLGEVAWAISHTKDNYLSAQFHRIARRRGKQKAVMAVAHSVLVILYHMLKDNRPYSDLGADYFDQLDRTRIERHHVRRLEELGYTVTLTPAPAA

SEQ ID NO: 367989 - protein, 322 aa, unidentified
MSETVLGIDIAKQKFDVALLAEGRMKNKTCKNSVEGFETLSLWLEKQGVQKVRACMEATGNYGEDLAIYLHEAGHTVSMVNPARIKGFAQSELIRTKTDKLDAGLIARFCLAMKPELWIPPAPEIRSLRALVRRVDSLIDMRSQEKNRMGTAHESVIVLIKEHIAYLDQEIEKIRKQIDDLIKRNPQLKQRKDLLDSIPGLGKATIPHLLAELDNLDKFTHVREMVAFIGLAPKETNSGSSIKGKPRLCKIGHARLRKALYMPALVSIQCNPVMIAFYNRLKERGKNGKVIVCAIMRKLVHVIFGVLKSGKKYDPNYKPTFA

SEQ ID NO: 367990 - protein, 340 aa, unidentified
MDTIGLDLHKRESQLCVLTEAGEIVERRIVTSRERFTAVLGSQAPARILVEASTESEWVARHLESLGHEVIVADPNFAPMYATRRRGVKTDRRDARTLAEACRLGAYRPVHRASAPQRHVRAQLAVRDALIRTRTRYVSVVKALVRRDGLRLPPGNPVHTEAKLAALPLPAPLAGELAPLRALFEPLNREITAADERLAAVAATDPVVERLRTAPGIGPVTAVAFVATLDAVTRFASAHQVAAYLGLTPREYSSGEQQHRGRISKTGNARMRYLLVEAAWRVLRTTDPAAAALRVWAEGIAQRRGRSIAAVALARRLAGILYAMWRDGTDYCAPPAAAGA

SEQ ID NO: 367991 - protein, 347 aa, unidentified
MNYIGVDCHISSLDFAVVNEKGTITQKAKVNTGVKEFMGFVKSIPKPRKIFIEEGELAGWMLETSLKFGEQLIITDPKINKWIGRSGQKNDTIDAEKLAQLARGKYIKEIYHPVNNRRRFKDLVFAYHDTVKSQTRIKNKIKANFRRNGIRCSGVTVYSDKHRDKWREKLSENKITHLIVEELWVQLDQLRESKEKLKRNIRIQSKQYPEIKMFIKVPGIGLIHASTISAIIETPHRFANKKKVWMYAGIGLMERSSGEKLYSRKLTREYNRPLKNAIKKAAEAAIYARDNQFRRQYLRLTIEKGIASHKAKLTVTRSMLATLYGMWKKGEEYDPEIDNKRNKGNKK

SEQ ID NO: 367992 - protein, 405 aa, unidentified
MDIVFGIDVSSRESSVCMLMDDTRKEFKISNDSFGFKELLKNLAVFSKHPQIIFEATGVYSRRLQKFLEDYGYDYVILNPLKAKKEMDQGLRHNKTDKTDAYNLARIQLQNRHKANKQEAEDYHRLRALSRSYEELTSDIISAKNRLHRILQLTFPEIETVVSTPKNRNYWELVKLFPHCQRVREIEAEDIINKIKDFKGYGIKRAQKIAQRLKELANKAYPVAELDSPETSDVIYYAQRLIQLDQDRDERLKQMVDISKKLPNRDLEILTSIPGFAQTTAVRVLAELGDIRRFDNPNKIDAFIGIDPGRYQSGQMDSRLGITKHGNAIARKILYRAVGQIDNASKTNPCHIADYYENKKSSQSKGFKKIAIASMHKLIRTIYALIKNDQLYSYEVAKQNQRRKS

SEQ ID NO: 367993 - protein, 359 aa, unidentified
MEIQSNKLDFSNQNIYVGFDVHLKSWKVTILTEKVAVKTFSQDPNPELLHQYLVRNFPGGIYHSAYEAGFCGYWIHNKLISLGIKSIVVNPGDIPTTNKEKVQKEDQRDSRKIARFLRSGELKAIYVPGLKTLEDRGLVRARTTMVKDLTRFKNRIKSFLYFHGIDYPESFTKSQSHWSKRFMTWLESIELTEESGKIALSSFIQQSKNLRETVLNLTKQIQKLSQTDTYHNNVILLRSLPGIGLLTAMTILTELESILRFDNLDKLCSYIGFVPSTNSSGEKERIGDVTSRGHSVLRNAIIESAWIAVRHDPALLKSHLEYCKRMDPNKSIVRIAKKLLSRIKYVLKNKQPYVSSWAK

SEQ ID NO: 367994 - protein, 344 aa, unidentified
MKVSVLGVDLGKNVCSLVGLDASGAVVLRRRVKRETLIGLAAKLPPCIVAMAACCGAHYLGRIFAARGHEVRLMSPEYVRPYVKAQKNDDRDAEAIAEAASRPTMRFVELKNQDQLDMQTLHRVRSRLVSERTALINQLRSILLERGIVIAQGKRKLEQCLIALLDAQDGSDLSPRMRILIADIRTQWQELDRRIAAFDAEFVAFAKEDQDARRLSTIPGIGALNATALTAAIGKAEAFEHGRDLSAWLGLVPRQATTGGRPKLFGISKRGNKYIRTLLIHGARAALPYLAERDTALGRWAKGLLARVHKNVAVVALANKLARIAWAVLRRGEKFAAKGLPSAA

SEQ ID NO: 367995 - protein, 394 aa, unidentified
MHLYVGIDAAKDIHWACVISADARPIFSHAVRNDPEGIEALIGELSTLETESITVALDLLGGCATLLCAMLADAGLRIVHTPGLAVNRARQGTRGGENKSDPRDAATIADLARTRPDLRPVEIETEINVDIRLLVGRRREVVVDQTRRLARLRDLLSSLFPALERHIDVKTKAGLVFLSLFAAPHELRNAKPGHVARTLAKAYPRMRGADVLAKEAIALAKVQTIDVPGAQTRAGLVKELAAEALAARAQRDRIDADLEVLLDRHPDAALIRSLPGMGVVLTADFIACVGSASRFQSADALAAAAGLTPVLRQSGKSRTVRRSTGGNKALKRVFFQSAFNALADPESRAFYDRKRTEGKRHNQAVIALARRRVNVVWAILQTRTPFSPNFKKAA

SEQ ID NO: 367996 - protein, 353 aa, unidentified
MQTKTTARTNMPRRKNQPTRYFGVDLHRDSFLVCVREEGAARCQRWSLEQVAEFAGGLRPQDELAVEATGNTRWFCQQVAARVRRLVVVNPHQFRVISESVKKTDRRDAALLAEYLEKNLLPEVRQKSAAESELAQMAQARDQLVKMRTMLKNQLHGLFSSYGVALPKKALASRRQRTALRGRSLSPLADVQRRVLLGQIEALDAGIAELEQTLTEAARSLPGYEHLVSVKGIGSLGATILLSAIGRIEDFSEPGKLAAYFGLVPRVEQSNQTEHHGRITRRGNKLARTTLVQCALIAKRYSPFLRRFYERIQHRRGTGKAIVATARKLLTIVYYTLKNHWTFRDFTQFQLAH

SEQ ID NO: 367997 - protein, 348 aa, unidentified
MQSIGFDLHKVHSQICVLDQEGAVLEEVRIQTSRERLAAVFGPRPSACVLLEAGTEGEWVAQCLEQLGHEVIVADPNYGAMYATRSRRVKTDRRDARALAEALRQGLYRRVHRVSPEQRQHRMELNVRRALVGMRTGAISLVRSLLRQQGLRAKSGAAEGFLRRLEELDLPQPLARTLHPLLVVLKSLNEQIAACDAVVAAMVRGNAELERLCTVPSVGPVVSSTFVAVLDTPSRFESAHQVEAYLGLVPREHSSGEQTRRGRLTKAGSSELRSLLVEAAWSIWCWKRPQTEPLWRWAEKIARRRGKARAIVALARKLTGILFALWRDGTVYDAQRLIHQQVVSQATV

SEQ ID NO: 367998 - protein, 312 aa, unidentified
MIASPDYVSVDVSKQHLDLAMAETPVLRIPNTQAGVRRLIVRLGTLRRPHVVCEATGSYTRLMARELAEHGIALSKVNPRRVRDLARADGQMAKTDAIDAQAILRFARLMQPQPDPHDPYALELTDLVRRRRQMVDMLAMEKQRSEHPEGQTIKASIKAHIDFLSTQIAAIDKQITEHIAQHAGLHRRAELLASIPGIGRVTAAVLIAEMPELGSIGNKQAAALAGVAPFVHDSSQMRGQAHIAGGRLSVRCALYMATISAIRANPPIKTFYQRLRSQGKPAKLAIVAAMRKLLTTANAILANDAPWIPSPA

SEQ ID NO: 367999 - protein, 328 aa, unidentified
MFYLGMDVAKAKLDCCLLLDEAAGRRKTKVVNNSKSGIAELLSWVAKLSVSAGELHVVMEGTGVYHEQAALALADAGVTVSIVNPAQIKDFGRGLAVRTKTDGMDSFVLARYGALVTPATWTPPAPEARMLQALLSRRDAIAQDLQRERNRQEKADATDTPELIRQSLADSIEFLTRQLAQLQKDIDQHIDRHPGLKDDLALLQSIPAVGPQVGSNMLSVLHCHDFGSAEQLAAYLGLVPVERQSGSSVLGRARLSKAGPARIRAVLYMAAVVATRCNPHVKAVYERLLARGKSKMSALGAAMRKLVHLCFGVLKTRQPSQPNYAKMA

SEQ ID NO: 368000 - protein, 411 aa, unidentified
MDRFVERCAGLDVHKDSVAATVHVPGPEGARLQETRTFATTTHGLVTLADWLASYGVTLVGMESTGCYWKPVYYVLEERFECWLLNPRHLRNVPGRKTDVADSAWICQLLEHGLVRASFVPPRPIRELRDLTRYRKTQVEERSREVQRLDKVLQDAGIKLSSVASKTLGVSVRRMLDALVAGTHDPELLAELACGRLRRKLPALQEALSGRFRSEHHGLLVAQILAHIDYLDETIATLSERIEQLIAPFSRECELLQTIPGVGPTGAEVLIAEIGVDMSVFPTDAHLASWAGQCPGNHQSAGKRRSGRPRHGSRWLQATLTESAKAASRSKGTYLSAQYTRLRGRRGPGKATGALRHSILIAAYHILDQKIAYRELGADYFDRRTTEQRTKRLVRQLEKLGHTVTLEPLAA

SEQ ID NO: 368001 - protein, 428 aa, unidentified
MSYMIAGIDVHKRMLAVVVADVEGEAEWAFTRRRFGSTPNEVRTLAAWLVEHQVEEVVMESTAQYWRAVWGILERAWTPHARQRPEAPAQAGTLHLAQAQSNRGRQGRKRDFPDAERLVKRLVADELVLSFVPDPEQRLWRTLTRTKYQLTRNRVQLRNRLEALLEQAHLKLSSLVSDLLGTSARRMLQALAEGETDADALAALADTRLRATPEQLRDALGACADLHPVYRRLVKMALADLALLETQIRQLDQEIAALLRPSQDAVGRLAEVPGLGVDSAQQIIAEVGPTAATFPSPGNLASWVGACPGTEESADENRNARAPQGNRQMRRLLNQAANAAVKCKGSLFQLLYRRYVARLGHNHTIGVIAHRLCRLVWKILHEGVRYEERGPAVNERTQQRHAARMIRTLRQLGYRVELANTQEEPLPA

SEQ ID NO: 368002 - protein, 297 aa, unidentified
MTITTVGIDLAKNVFAVHSVDQNGRTVLVKPKVSRAALPELIASLPPCVIGMEACSGAHYWARLFRQYGHEPRLMAAKFISPYRMAGKSGKNDAADAQAICEAVRRPHMRFVPVKDESQQAMQCLHRTRQGFIEEKTATYNRLRGLISEFGVIAPQSADALRHMVSVQKSSLPLQVQQCVDDLMEHVDRIEANITEYDRILSHIAKTDHRSQRLMELKGVGPTTACALVASIGNAHDFKNGRQLAAWLGLTPSQYSSGGKSKLGRITKAGDSGKIHEHARIYRLRSVAGSQILNFMS

SEQ ID NO: 368003 - protein, 366 aa, unidentified
MKHSTLFVGMDESKQTIEVAVAEAGGAREVRRYGSIPNTPAALRRLVGRLSATRSLHFVYEAGPCGYETYRKLTALGADCVVAAPSKIPRKPGNRIKNDRRDAETLARLHRAGELTAVWVPDKDTEAMRDLTRAREDAKYAETRAKQRLGAFLLRHGRRYSGYPWTYKHVKWIREQMFDHPSQQICLDEYLQALAEATGRVKRLDQQIEQLVPCWSQARLVQALKALRGVKTLTAATVAAELGDLTRFQRARDLMGFVGLVPSLNDSGQRHSSGRITKTGNMHVRRILTECSWAYRFPARRTPDLMRRMKSQPEAVQQISWKAQLRLCGRYRKMRARGMPQQKVITAVARELVGFIWATAQEVSAN

SEQ ID NO: 368004 - protein, 427 aa, unidentified
MSEKKSLELRVSVDVGSRRHSVAIGLPNGEVLEEFEISHRVEGFQEFFSRIEKHQRQRGCPVAVAMEGYNGWARPLDSLVRQRGYRLYNINNLKLARFKEIFPGAAKSDRIDARKGLELFQLRDHLPLAKEVLQEVGGTPHENEVLKRLSRRRRRLVDERVRVINNLQADLQAVCPGLLEITKDAANQWFLNFLVSADSLPKLARQKRTSLLKIPSVGVKCAGIIQDWQKHAHFSEEVQWVSEMIREDARRILELDQTIKALEVKTAEVAERSKIAKLLRSIPGYGAVCTSELAGEIGTIERFSKEESLALYLGMATLDNSSGKYQGTKRPKHVNTRAKAAMMVALDRHRKYVPQSQRYYEKKRAQGKGHNQAIRALGRHLCRIIYKMLKEEREYQIRPAKGDTQAKVKSRSSRIGQIRKKKISANS

SEQ ID NO: 368005 - protein, 369 aa, unidentified
MSKAITSFVGLDMHSDSIAIGVAPRGREEPHFVGTVPPQLGALSKALGRLGEPQALQIVYEAGPCGYTLARQLRAHGYACEVIAPAKVPRRPGDRIKTDRRDALLLARAARAGDLVNVTIPDEPDEAIRDLCRAREDAVRARLKARQQLKAMLLRHGRRYTGRSSWTAAHELYLASVSFKHPAQDIAYAEYRSAVREGNERVENLTKAMSEQLEHWRMRPLVEALMTLRGIDMLAAMTLVAEIGDFMRFARPRELMGFLGLVPSEYTSGDKRQQGELTKTGNSHARRVLVEAAWNYRFPARMSQPLQRRQDGQPKAVRQIAWRAQLRLAKRYRHLSARKLPLNKTCVAIARELSGFIWDIARQVKPFES

SEQ ID NO: 368006 - protein, 386 aa, unidentified
MQKLNDLSRSLTALEPNGTLIAVIEMSLSSWLVAGIVPGVERQPLKKLAVDESALLKLLHRWREEAEKAGRRIERIAVAFEAGRDGFWLARWLKARGIEAYVIHASSVAVSREHRRAKTDRLDTELLKRSFLGWLRGERDHCKMVEIPTMQDEDAKRPNREHDSLIGERSRIVNRMKAALVRLGIRGFNPKLKRASTRLDGLRTPEGEPIPPNALAELRRDMERRRLVNNQIRQIEEERLKRIEQAPCDGPHVMVRLLARVMGVGIETADMLVHEVLSRNMRDRRAVARYAGLTGSPDESGRKRREKGLARSGNVRVRRGMIQLAWRFLLHQKNSALTKWFRSRTENARGTRKPMIVALARKLLIALWRLVREGIVPDGVVLRAAQ

SEQ ID NO: 368007 - protein, 338 aa, unidentified
MKITTIGLDIAKSVFHAVGVDKAGKLIKKKMLRRKDLLPFLAQIEPCLIVMEACGGANYWTREFELLGHSVKLIAPQFVVPFRQGNKNDYNDALAIAEAAQRPNMRFVKPKSIEQQDVQLLHRMRERLTKQSTALVNQVRGMLAEYGIVIAKSKSAFKVQFPDILANETNALSTKGRAIFYQLYEEFTDIEKRLKGCDVQVLTETKNNVICQRLETIPGIGPVTATAFYAAAGEGKDFSNGRHFSAWCGLVPKQHSSGGKDNLLGISKRGNAYLRTLFIHGARAVLQHSCHKQDKFSCRAIQLAERRGFNRACVAVANKLARMAWVIAAHDEEYRLPV

SEQ ID NO: 368008 - protein, 329 aa, unidentified
MHVIGVDVSKAKLDCAVIVQVEPMKRRQKVVSNDPQGWAKLLEWACQNAGCEAGELKLVLEPTSSYHEGVAHYAHDRGARVWIINPKQMRDFAKGLGVRSKTDALDCSVLAQFGLKAQAVDWVPAPLPLRELQSLLRRLEDLQQTLQAELNRVEAAQARQAPALVMDSLQSSVSFLEQQIKRLNAQIDQHIDGHPQLKADYALLRSIPAVGPSSARVMLVKLRGRVFDSAAQASGFLGLRPVHWESGSSVHKLPRLGPHGDRLARRILYMAALTAKRNNPDARALYERLLAAGKKPMLALCAVMRKLVHICFGVLKHQRPYVPQIAASA

SEQ ID NO: 368009 - protein, 355 aa, unidentified
MNSEKYIGMDVHKESISIAVMNGAGKIVMECVIETKASVILQFIHGLSGDLQVTFEEGTWAAWLYDLLKPHVTKLVVCDPRKNASMKEGNKSDKIDARRLAELLRLNHLSPVYHGEHGLRSLKELVRSYLTITKDLGRVMSRVKAIYRSWGIPCTGKQVYAPRHRAEWLGKISELGVRRRAEFYYQQLDALRALRKQVRRDLLAECKKHQAWKQLCQIPSIGPIRAAVLLGILQTPYRFRTKRQLWTYSGLGIETRSSADHRSVDGQLERAKKQISIRGLNQNCNHDLKNLFKGAAIVASSKPGPFQEFYTTLLTQGIRPEMARLTLARKIATIALIVWKRGASFDAQHLKPQTA

SEQ ID NO: 368010 - protein, 355 aa, unidentified
MNTLNENSIVVGVDVHKYSHTAVAMNAWGEEKGKIDFSNNNLETYIEWLEQMGLKENIIVGLEDVNSYGIHLVEDLRKKNYHIRYVPAILTERERKSSTKRHKSDTVDAKRVGKVILTKYEDTLPAKESIANTRELETAKSLDLLLMERRDLTRNKTIVKNQLHCLIHQYYTESYREHCPRSFSKKAIKWFLADLKDNKTILATSILRRLTRLIFVEEQIYAISKEIDVIGQTSKEALTLTTIHGCGMVTACSIMAEVITIKRFKNKHHFSMYAGIAPTPHSSGRKNKMHTNPFGNRQLNRAIHVIALSQIAIKGDPTGEEYYQKKLKEGKTKLWALRCLKHQLAKVIFQKLRYC

SEQ ID NO: 368011 - protein, 414 aa, unidentified
MEQIHDRVAGLDVHRDVVVACARVPGVRGGTVTEKERFQTTTGALARLAGWLADRYVTLVAMEATGVYWKPVYYALEDSFEVWLCNAHHVKNVPGRKTDMSDAEWLADVAAHGMIRPSFVPPPAIRELRELTRYRKTQTDARVAEIQRLEKVLQDAGVKLTSVASKVLTQSGRLMVEALIDGQRDPAELANLAKGKLRPKIPELSEALNAHFGAHHAVAAARILAHVDFLDATIKALTEQIDVRTKPYQAARELLMPVPGFDRLTIDTVIAETGADMSKFPGPGHLAKWAGICPGNHESAGKRRRVGVTPGNPWLRRALVEAARAAARTKGSYFGAQYRQIAKRRGPNKAAVAVAHSLSDLIWHMLSTGEVYHDVGDGYFQRRRDPERETRRLVAQLEQLGFQVALTTLQDPAA

SEQ ID NO: 368012 - protein, 380 aa, unidentified
MRQVCGLDVHKDSVFVCIINENGVVFQEKYGVLTPELEQMLAKMLEYHVEEVCMESTSIYWMPVWRVLENYVSLKLVNPYFIKQLPGKKSDVKDAEWIATCLLKDLIKGSYVPDDLIQQLRQYDRRISDLNAECVRKLGKLDAALQRCNIRISNYVSTTDGKSYKEVVRLISEGTRDPAELAKVIHGRTVNRVGKDVVLASLTGVISETDIDIIRQLREEVALAERHKDECQSKMDAICQQYFPQQLKNLQTIPGIKGRSATAIIAEVGTDMSSFEDAAHLVSWCGLKPRNEESAGKIKARSTTHGNRYLRKTLIECAWAASKTQGCYFNKFSYHQVVVRRKNKMKVQVAIARKVLTAVWYVMHDNVAYRDYTPDIAPAE

SEQ ID NO: 368013 - protein, 480 aa, unidentified
MSQQKKHSKPLGEEKTAAGTGKRGRKGKGMCLEDRPILEANAAGIDIGAREVFVAVPPDRDEHPVRVFSTFTEDLEKLAQWLVSCGITTVAMESTGVYWIPLYDVVEKYGVKACLVDARGMKNVPGRRTDWHECQWLQFLHSVGLLRAAFRPEGDVCAVRSMMRYRTELVEMTSQHIQHMHKALTQMNVQIHHVISDLTGLTGLAIVDAIIAGQRDPVVLAKLRDPRIKASEETIRKSLVGNWRAEHLFTLEQSRKSYQHYQGQISACDEAIEKLLVAFVPRVDPTERPLPPDRKRKQRGRKKKNANPNTFDLRTESYKLFGVDLTQIPGLMAMVLMLFSEVGRDMSRWKTAGHFVSWLALCPDNDISGGRVLWRGMRRVHNRAGDLFRMAAYSLHHDATPLGDYLRRMKSKLGPAGATTATAHKIAIIFYTMVKKQVEYDATLWAQRDAEREKRFEAKLKRQAQQLGYKLVPIEERPAA

SEQ ID NO: 368014 - protein, 371 aa, unidentified
MKSIIYIGMDVHKKTYSLCALLKETGEIIGETKIPADVSLIIKFIENAKKSVDSDDVQIKTGYEAGCLGYSLYWQLAAKGIECDILAPSTMHRSAKNKVVKNDRRDAKNIAANLANGTYKSVYVPTDEDVEIKEYIRMMHDFKIERKKVKQHINAFLLRFGHHYPGKSKWIPAHIKWLKELELSDMYREILDEYLSQLEILSEKIERFKHRLEELSQKETYNEKIGQLRCIKGIDTTAAMTMHAETSDFDRFPTANAFASYCGLTPGEDSSGESYHRLGITKQGNSMIRTTMVEAAQVLVRGTIGKKGKKVKSKQKDQNVKVIDYADKAVVRLQKKYHRMVFRGVKRNIAITAVARELACFVWGIETGHIS

SEQ ID NO: 368015 - protein, 345 aa, unidentified
MLNCNVIAIDLAKNLFQVCKTDKNGKVIFNKLFTRAKLKELLTKEKKSLVAMESCGGTHYWARMAKNAGHQVKSIHARKVKAFRQGQKTDANDALAISVAARQPHIKESRLLSTQEQCLQSIESMRDLLVKQKVSLGNQLRGLLLELGHAIAQSDAKLRQAIPEILEDAENELTHSFRFSIDIIYQRFIDTIDEVKLIEDKLAKVIKQDKTCQRFQALEGVGPVCAILMKVALGNATHFKNGREAAACFGLTPVQHSSGGKEKIGSISKVVGNKKLRSALYKGALAVVSQLEKREVRSQKEVWLKGLTARRGKKVAAIALANKTVRTAFALLKHDQVYKPQLLVA

SEQ ID NO: 368016 - protein, 370 aa, unidentified
MLDTTTFVGLDVHARSIKAVSLDVMTGEVRCATFGYDAGAVAEWVRSVDPGARCVYESGVTGFDLQKRLSGLGVDCVVGAVSKMIKPSADRGRKNDRNDAEFLARMLSVGNVVEVWVPDDECEAARDLTRALEDARDDLSRSKQRLSKFLLRHGLVFDERTPTGRRKGNWTRAHWSWIESIRFAEGADNDVLAYYVDAVRRAAEEKARLEGLVEAEARKPRWRKRVDSLRCLKGVDTASAADLVFEAGEFSRFRNARSFAAWVGLTPSEHSSGESDRRGAITKAGNKHLRKTLVEAAWHYLTCSGRPKDLAKGQAPDPAARRHAAKGVRRLVERRGALLARGVHGSKANVATARELACWVWAVGLMAEEA

SEQ ID NO: 368017 - protein, 381 aa, unidentified
MATETVQSTLPKPITEVLYLAFELSQKQWKLGFTIGIGQPPRVRNIAARDLKALQWEIRQACQRFHLPENTSVVSCYEAGRDGFWLHRYLRQQGIANWIVDSASIEINRRMKRAKTDCLDVSKLLTMLMRYHLGERKVWRTVTVPDEACEDRRHVHRELADLKVERTRHINRIKGLLTGQGVCLPIQPDFIDLLGTVRLWNGNFLSKELRSRLEREYQQIQLINQQIDDLEAYRRETLRTSQQPHIQQVRQLMRLQGVGINSAWLFVMEFFSWRAFHNRREIGALAGLTPTPYQSGETSHEQGISKAGNRHIRAMIIEIAWGWLRFQPDSQLSQWYQQRFGQGSSRLRRIGIVALARKLLIELWCYLETGIPPDGSVLQPE

SEQ ID NO: 368018 - protein, 366 aa, unidentified
MKKIITVARNRNEIFKQPQLTIGLDLGDRISHYCILDEIGNVILEQSVPTTPKGMQQVFSKISRCRIALETGTHSPWVSRLLTQLGHDAIVAHARNVQLITESSRKDDRLDARTLARLARIDPELLGPVRHRSAKAQIHLTVIRARATLVSARTALVNAARGLTKSYGERLPKCGTEQMNREIAKGLSPELRDVLEPLLGEIESLKERIAEYDRRIEQIAKEVYPEVALLKQVKGVGTLIALTYVLTLDDPHRFRRSRDAGCFLGLRPGRRNSGRSEPQMHISKEGDAYLRTLMVQGAHYILGPFGQDSDLRRWGLKLAERGGKNAKKRAVVAVARKLAVLLHKLWVSGEVYEPLRNNHQVVSAVA

SEQ ID NO: 368019 - protein, 392 aa, unidentified
MQQSNDQSRSLVALEQDSTLIAVIEMSQSSWLVTAIVPGVTREPLKQLAPEPDLLRRQLQRWGEQARKAGCPIKRVTVAFEAGRDGFWLARWLRAREVEAHVIHPTSVAVSREHRRAKTDRLDLRLLRRAFLGWLRGEAAHCRMAAVPSLQAEDARRPSRERETLAGETTRIVNRLKGALARLGIRGFKPTLRGAAARLAELRTPEGAPVPANSLAELRRDMARLRLVKEQIKEIEAARLERLERAPASEPHAMVRLLARVHGLGIETADMLVHEVLTRRLRDRRAVARFAGLTGSPDESGKRRREQGLARAGSARVRRGMIQLAWRFLMFQKDSELAKWFATRTQNTKGARKTMIVALARKLLIALWRLATTGVVPAGVVLRAEPHAAGQA

SEQ ID NO: 368020 - protein, 330 aa, unidentified
MMLHAIDLHKRTLEVATMHAAGDGEPQVVRMAACERALGSYLRQWPASRHRVVVETTGSWYWIADLLREHGAELKLAHASKVQAITAAKVKTDHVDALTLLTMLRLNLVPEAHVISPELRELRDLLRMRLRLIEKRTSSLNSIARLLEKYNRASVEALPELAQVQAAFHQGQISLLAVQLKALEKRLYEVLKKNPTVKRLRRIPGIGRLNAWTLYLEIDGIERFASERKFFSYSRLVPGADNSGGRTRNKRSRAGNRYLKLAFSHAAVRAVQRYAEVGAAYRKKLRKKNKALAHAWVRKELARIVYHVLKDDVDYDDTFRGVALSRPKRT

SEQ ID NO: 368021 - protein, 339 aa, unidentified
MKFAGCDLHKQTITICVVDQSRRVLERRTVRCGEERTILAFFERLGDFEAVVEATASYEWFVRLIEPVAHRVLLAHPKKLRVIAESTRKSDRLDAQILAEFLALDMIPTSYRATPRQHEHRRLVRQRGGVQRRLTSVKNRLRRILCDYNADRPSLFTVEGLAYLAQVLLSGADRFAVDQMVEELHFGRRQLLAVNARLKEFAEAAPLREQEARTLLRTIPGVGFVTTEVVLAELADIDRFGSQKRVVAYAGLSPGQRESAGKSRELHLEKNGSTLLRSTLVEAAWRLVQHSLRWRRIYERLKLRVRAKKAIVAVARRLLCLMTAILKTGQPYSLSQQPT

SEQ ID NO: 368022 - protein, 403 aa, unidentified
MNAVGIDVSKGKSTVAIFQPGEQVVLKPRDFRHTQSGIGSLIEIIRGLDGDTKVCMEHTGRYYEPVATWLSDAGIFVSAVNPTLIRSFGDDSLRAPKTDKADAKKIARYTLDRWTKLKQYGRMDETRNQLKTMNRQFGFYMDQKTAMKNNLIALLDQTYPGANAFFDSPARSDGSQKWVDFVYTYWHADCVRGKSLNAFTEHYKSWCKRKGYNFCAAKAEKIYNDSADLIAVFSKNANTKMLIHQAVEMLNLASTTVESLREEMNRLAATLPEYPVVMAMNGVGPTLGPQLMAEIGDVTRFEKRGSLTAFAGVDPGKNDSGQHSQKSVPTSKKGSPHLRKTLFLIMESLIQRAPEDDPVYAFMDKKRAQGKPYYVYMTAGANKFLRIYYGRVNEYLASLSESN

SEQ ID NO: 368023 - protein, 414 aa, unidentified
MNRARQWYAGVDWARDSHLVRLIDEQGRDIGEKIFEHSGQALAAMADWLIAQSGADDPGQLHIAIEVPHGPVVEALMERQFNIWAINPKQMDRFRDRYSPAGAKDDRRDGLVMASALRTDPHCFRRLGATDPVIIELREWSRIAEELGAERTRLTNRMREQLWRYFPAFLDLGADMEAPWLLELWQLVPTPDRAKRVRQGSIAAILKRNRIRRLDAAQALDILRQKPITVADGTTKAACAHITTLIDRIRLINRQISDAHQTLDSLTAKLGDDQEAQPGQPKQRDVDILASSPGIGTTVLATLLADATDALQRRDYHALRCLTGVAPVTKRSGKSCFVVRRYACHRRLANAVFHWARVAVQHDPTSRTKYAALRARGHGHARALRSVADRLLRVICAMLRNGTNFSQTLALNAA

SEQ ID NO: 368024 - protein, 459 aa, unidentified
MKLYLGGDASKGYSDWVIIAESKRVVLEDTQLDDTYAGHCKLFSILKSYFDRSPGVQMYAAMESTGGYENNWLNSLKSFQKSLNLKVARINPAGVSFNQRAGMKRNVTDAISALNIARYMVDHGENIRYDQDEKWKSLCRHWNFVEMQKKQRVQTINQMETLLYGANPTLMRYKKDSLPNWLLELIIMCPTQAHLAKARPEKLAKIPYLGLSRAKELVADARQGIASLTDKNSAILLIRMARQIKAFDAGIKSQVRLIEAELSGPEIELLCSFTGIDTTSAIGLLLETGSIERFPTVKGYCCNFGLHPKFKQSGDKVMGIQMSKQGSGNMRKILFNIAKSAIQHNPLIKEIYERKQSQGMTGMAALGVCMHKILRIVYGMLKNKQPFNPEVDKLNTERAKQKQQDKERQKEAYRQRTRRHQAFDSKAPVSSRQTKKRKEHDLSQCEIETHNARDLHVPS

SEQ ID NO: 368025 - protein, 349 aa, unidentified
MLHVGLDLSRRRVDVCLISSEGELVEHFRAPADRDGLYGLTRRVAVYDEPVRGVVESMNGARFVHDELVKYGWEVLVADAQRVKGLAPLACKTDKVDARVLAELSFRDLVPAIWLPTPELRAERERSRWRLHLVKHRSILKNRVHASLIAFGHQVPMADLFGVAGRRLLAELEFPEPWLGHVQASLELIDDLDHRIGEIERWLRHSGADHRYIPLLMSAPGIGWITGFTIAAEIGDINRFSSPVKLTGYTGLCPRVSQSGDMDRRGPLAKHGPRYLRWGLMEAAIAASSHPLFKERYQRTKRRLGRQRGAKVAQIELARKLTEAIWYMLTRNQPFKPFAPAGAIIRLTA

SEQ ID NO: 368026 - protein, 339 aa, unidentified
MELYAGLDLHSRNTYIGIMDKAFNRVFKKRVPNHLELILQTLDPFRDQMKGFVVESTYNWYWLVDGLMDAGYSFAHLANPAAIKQYEGLKHGDDQHDAFFLAKLLILGILPQGYIYPKKDRPVRDLARKRMFLVQHKTAHILSLQSLIARCCAMKVRANDMRHLTVKELEGWLKEEYLVLSAQANLDSINFLKQNIKRLEKAIIQKVKLNKAFKQLMTVPGIGNILAMTIMLEVGDIKRFPKVGNFTSYCRCVPSRRLSDGKSKGHGNRKNGNRYLSWAFTEAVHLGRRYNERFRRYYNRKVAQANTSLATKALGNKLARICYYIMRDQVPFREELFCR

SEQ ID NO: 368027 - protein, 344 aa, unidentified
MQHYVGLDVSVKETSVCIIDKAGKVIREVKVATEPVAILAVLTEEPLALERIGLEAGPLSQWLYSALAEAGLPVICVETRHMKAALSAQINKSDRNDARGIAQMMRVGLYRPVHVKTLASQKRRMLLTSRQLLQAKALDIENDLRGTLRNFGLKVGMVGTVKFEARIRELVADHPDLAAIVEPLLIARRVLREQLDVLHRQLLEIVRHDEVCRRLMTTPGVGPVVALTFRATVDVPSRFTSSKAVGAAFGLTPRRQQSGEIDRMGGISKCGDAMMREMLFEAALVLMTHSGKWSWLKAWGMKIARHRGMKRAIVAVARRLAVIMHRMWMDGTEFRWSSKEVAAA

SEQ ID NO: 368028 - protein, 347 aa, unidentified
MLIIGCDLHTRFQQIALLDTETGEVVEKRLEHENGEAKRFYEGLKGPVLVGIESTGYTWWFAEMLSELGHELAVGDAAKIRASETRKQKHDRRDAGHILELLTEGKFPRLWLPRVEEREVRVLLEHRHQLVQLRTRAKNGLQAVALNHGLRQRSQLWTAAGLKRLEALPVGEGTKRRREDLLRLLHQLDAWVDELDERLKAEVARRPAAQRLMTHPGVGPLTALATVLILGPAERFAEVRQVTSYVGLIPAEESSGGRQRFGHLTKQGNRLLRFLLVEAGQSASRMDPGLRRAYKRLTFRKGRSIAKVAIARKLIIRLYIMLRDQIDYAEFCRRGSHAGMLGEVALV

SEQ ID NO: 368029 - protein, 358 aa, unidentified
MKGMAMTIVENTGTRTLTITGGIDTHADFHVAAAIDHNGGVLGVETFTTTIGGHRNLVRWLAAFGVIDKIGVEGTGSYGAGIARHLTGKGLTVIEVDRPNRQARHRAGKSDAVDAIAAARAVLSGTATGTPKTRDGKIEAIRVLSVARRSAAQEWIQIVTQMRHLCFTAPEEVRERFQDLSPIMLVRTTAALRPRSSDNDIVRYSTLTTLRELGRRALFIREQKQHLTAQMRPLIREAAPELLNIYGVGFDVAAKLLVAAGDNPHRIRSEAAWAHLCGVAPIPASSGKPHRHRLNRGGNRQANSAIYRVMLTRMSHDEATRAYITRRTAEGKTMGEIARMLKRYIAREIYKALPVTIN

SEQ ID NO: 368030 - protein, 405 aa, unidentified
MDKKNYDIYCGIDVGKSAHHAFALTTDGRRILSRDLPQDEAMLRALFGELAEHGSVLMVVDQPRNIGALPIAVARDSGIDVAYLPGLRMRRIAALYPGQAKTDARDAFIIADAARTLPDTLLPVTQDDDIVEGLRMLAGFDADLATEENRLSSRIRSVLLSVHPALERTIGKHLYRPVALTLLAEFGGPAGFAAANPAALRRVAKRSAPRIGDQIAESILAALAEQTVIVPGAEKSNFVLKTLARQLSEVRRARAELEEQFELELNKHPAGPILTSMPGVGVRIAATMLVEIVDIERFDSAGNLAAYAGVAPRTHRSGTSIRGEHRQRGGNSRLKRALYLSAFASLREPVSREYYDRKRAEGKDHRSALVCLARRRTNVLYTMLKSGSEYERRKTRTDRMADAAA

SEQ ID NO: 368031 - protein, 334 aa, unidentified
MWHVGIDLHREFIVMAAVRDNGEIMEPVKISCQDTDAIVDVIRSLKPFRAVVEASGTYRWLYDLLCPHGTILLAHPLRLRAMIQRRSKTDKLDAQLLANLLRINQIPLAYVPPEAYQRLRDLTRCRAKLARDRAEVKIKLRDMLARQNLLSPYKTPFGVRGLAWFRGQDFGMVGNMLRDELLARLEHFNRQIDVFDGQMSQLQPDFPQTAALADIHGIGLYSSLLIVAELGEVERFRTAKQVGAYAGLTSRVHQSGGHCYQGSITRQGSPWLRWILVEAAMKTIREDVALKNFYNRVRKRSSAKIARVAAARKLAEICWKRLRRWQREHVEKAA

SEQ ID NO: 368032 - protein, 314 aa, unidentified
MTPGSFIGIDVAKREFEVAERPRGARWTAGNDVTGIAGLVERIRAAGPVALIIVEATGGYEMALVAALSAAQLPVVVVNPRQVRDFARAVGKLAKTDRIDADVLAHFAEALRPEPRPLPDELTQALHGWLARRRQLLEMLVAEEQRLAVSTREVRRHIQQHVDWLRRQLRDVESELQTLIRTSPVWRESENLLRTTPGVGPVLATTLLADLPELGQLNRRRIAALVGVAPLNWDSGQQRGTRHIWGGRAPVRTTLYMATLAAIRCNPVIRAFFERLSAAGKPRKVALVACMRKLLTILNAMMHRRVAWQSAASV

SEQ ID NO: 368033 - protein, 415 aa, unidentified
MSLSVLYARCAGLDVHKKTVVACLLLTAASGKVSRQVRTFATTTAGLRALCAWLASQGVTHVAMESTGVYWRPVFNLLEGSFEVILVNAQHMKAIPGHKTDIKDSEWIADLLRHGLLKASFIPPKPIRDLRDLVRARKSVVQQRSQAINRVQKVLETANIKLSSVASDVLGKSGHDMLEAMLAGISDAETLAQLARGRLRAKLPALREALDGRVEPTHRTLLRHLLDHIGFLEGQLDQLHGEIEQQLSPWEQWLLRLMQIPGIGRIAAAAILAEIGSDMNRFPSAKHLASWAGVAPGNKQSGGKRLKAHTNKGNTHLRAVLAEAVWVISHTKDNYLSAQYHRLARRIGKKRAIVAVSHSLLVIIYHMLRANQDYHDLGPHFFETLDMTRQRDTAVRRLQALGYTVTLEEKKEMQA

SEQ ID NO: 368034 - protein, 485 aa, unidentified
MAKRRMSTFERLESGRLNRKQRRELGRQVAVADPGLTIVHANAAGIDVGNESHYVAVPPDRDPNPVREFGCWTAALNQIAEWLQSCRIDTVAMQATGVYWIALYDVLEQHGIQVVLANAQHTKNVPGRKTDVQECQWLMKLHTYGLLRDSFRLAQEMESVRTIWRLRDRHVKEAGRAVQHMQKALTKMNIQLANVISDINGLSGQQIIAAILQGERDPWKLADLKHYRVRASREEVARSLEGNWREDVLFELQQAVDSYHFAHRQMQECDRKLEGYLASLPARMLDIPVQPEDTQAATPKKKTKKAKRPRGNQPHLDLKTELKRICGVDLTSIDGIDVMTALTIVSEIGTDVSRFQDETHFASWLGLTPAKDITGGKTIGRGKRKVKNRVAVALRTAATTLLKSDSYLGARYRSLRRKLPSFASAVKAMGRYLAVLIHRLLTKGEAWVDRGATQFERRHTEQELASLSFKARAKGFKLIPITEAS

SEQ ID NO: 368035 - protein, 346 aa, unidentified
MKILALDLGKYKTVGCAYESESGAHQFKRGFTSPAGLTRMVQEVKPDRVVIEICSIAGWVCDLLWELGIEVQVANTSDDAWRWRKVKQKDDRRDALKAARLSAVNQIREVYIPALAVRHWLALITYRQQLIRRRTKIKNHIRDLLLREGQILARGSSCWSEVGIEPLAAQARSFRECGPAELRRGELQLELEQLREVQRQVVTVTAQLDKIGAGDTRVKLLRTVPGVGPRLAEAIVALLDQPQRFRKASQVSGYIGMVPKALDSGETERRGHITRQGSRVVRSLLVEVAWAGLRHNAWVRQTYQRLSGGKKARKKIAIVAVGRKLLVRCWAMLRDNRAWDWQPQIT

SEQ ID NO: 368036 - protein, 404 aa, unidentified
MADEDVRFFAGIDWGEEHHQLCVVDDRGQRRAEEQVSHDVTGLARLRTQLLRFGPGLPVAIERSEGLLVEHLQAHGHPVYPVSPRIAARARERYKVASVKDDRFDAYVLADTLRFEHQGWRPLSVPSPVLAEIKALTRDRDRLLETQQAIESQLRMILESYHPAPARLFSSVDRQITLSFVLDYPTPATASRVKATRMSGFLTRHHYTGRTSGQVLAERMRANLLTGSAGTVAGKSFSAQSYARLLGLLNSQLAEYDDAIASAVSEHPDAPIFASFPGVGPVLTGILLAEIGEDRGRYPDPAVLLAEAGLAPVTRASGRSHIVRFRYAANAHLREACMWWAFNSMKTSPWAAAAFKQAREDRKQHYHRALRGLAARWTRILWRCWQDGATYDPHRHTSAAALTA

SEQ ID NO: 368037 - protein, 339 aa, unidentified
MLIIGCDYHPSMQQIAWVDKETGECGERRLLHRSEAEEFYRQIKEKQVRVGIEATGHSRWFERMVAELNFELWIGDPAEIRAKRVRKQRNDRFDAQHILKLMLEGTFPRIWVPTAENRDLRQLVWHRHRLVGMRTRVMNQLPAVAMNEGIRRKKRLWSEKGRKELESLSLMPWTTRRRQELLQLLDQLDPNVDPLSQAIEQEAERMPEVKLLMTHPGVGPITALAFVLVLGTPERFGCGKQVASYLGLIPCEESSSEHWRLGHITKQGNKLLRFLLGQSAQSAARCEEQWHRQYAHLSMRRNKLIAKVALARKLAVRLFWMWRRGWDYQQLKKFGSHAG

SEQ ID NO: 368038 - protein, 350 aa, unidentified
MTSMTSARAVVTVGVDTHLDVHHVAVIDQVGRPLADAGFPTTPGGYRQLLAWAAGYGETVAFGVEGTGAYGAGLARFLRAAGQTVIEVDRPDRKTRRQRGKSDPIDAYAAAAAVLSGTAAGTPKTRDGTVEAIRTLRVARRSAIKGRTQAINQLKAVLLTGPAELRQALAGQNTRELLGSCRRLRIDKRPAKAADPVAAATKLTLRRLARRIAALTEEIDELDAELRPLVARAAPALLAIYGVGTEVAAQLLTTAGDNPHRLRSEAAFAQLCGTAPLPASSGRTTRHRLNRGGDRHANYALHIIALVRLSSHEQTRTYAARRRSEGLSNLEIIRCLKRYIAREIHHALTA

SEQ ID NO: 368039 - protein, 452 aa, unidentified
MEQATRFVGMDVHKDTIVVAVTATGEVGKATVYGTFPNTAAALETMVKRLRQAGDGPIKFCYEAGPCGYGIHRALTKMGENCMVVAPSMIPRKSGERRKNDKRDADGLAVLHRGGLLTAVWVPDAAHEAMRDLIRARLAAVRAVRAARQQLSAFLLRHERIYPGKRMPWTKAHRGWLADQTFAQPAQQIVLEESIEAVRLSEQRRDRVDGYLRAQIPSWSLFPLVQNLCALRGLDMIAAAGLAAAIGDPSRFATAPHFMAYLGMVPSEHTSGPKRRIGGITKAGDIHARTLLIEAAHTYRYPARIARHKLAAVDAVPEAVRAIAWKAQTRLCLRFRQMTAKGKPNQVVVTAIGRELAGFVWSIACITSDPVVVNNTVTGSSDEKTTSCHKVTADLEEVSQQVQKITPGMACSRAPRNQSLKGGAPRGAPSAKRRRIRGREPGAMISHCNRIG

SEQ ID NO: 368040 - protein, 338 aa, unidentified
MKIIKQNVGIDISKKELAVCLIFLRDDFGIKIKGTRKFLNNKSGFKAMMEWLERKKDSTKPLHFTMEPTGVYHENLAYFLHDMDQLVHIVLGNKAKKYAESLDVNSKTDKLDSKALARMGVERALELWNPGSPIYRQLKVLTRERSAILKLKVMVKNQLEAMLHSAFPNKKSTNRLKRLIKEFSSQVGKIEKDMDKLVENDLELKSKILKIITIPGIGFLTAVIIIAETDGFALIKSVKQIVSYAGLDIKLRESGKWKGKSKISKSGNVHIRKALYWPAYTSIAHTQTYKVFYERLFNRKEISLVASVAVQRKLLSLIYTLWKNGTVYIDNYENRMLA

SEQ ID NO: 368041 - protein, 439 aa, unidentified
MRIASSVPMPNEVPIEQEIVAYVGLDWADQQHVICWQAAGSARVQSAVVQQRPEELQAWVAELRQRFPQGLVAIALEQSRGAVIAALMHFDFLRLYPINPKSLARYREAFASSGAKDDPDDAGLLLELLVKHRDRLTPWVPDDALSRELALRVEHRRQLVNLQTKLIQQLRSHLKVYFPQALDWVGELDSLQACDFLQRWPTLAAVQKARPSQLEKFYHQHHCRRPQLIQQRLEQIRQAQPLTQDPAIVQAYSQMVLALVAQLRVLILTLQQWQQQISQLFAQHPDAALFASFPTAGPVFAPRLQAAFGSRRDRFGSAAEVLQFSGVAPVTKRSGKSRQVQRRWARPKFLHQSFVEFTGLSIPHCRWARALYQQLRARGHHHWAAIRVVAYKWIRILFRCWQDRVPYDEQKYLKSLERRNPTLWAAIQQLPAHPSRKEV

SEQ ID NO: 368042 - protein, 415 aa, unidentified
MMTESYRIFVGIDWGADAHQVWVTDAAGTAVGEQTVDHTGTAIAALVDWIVGLAEGDARAAAVALETPRGPIVDACLARGCQVFAINPKQLDRFRDRFSVAGAKDDARDAEVLSSAVRTDRRAFRHVTAEDPLTVQVREYSRQDTELGEDLRRLANRLRDHLLRTWPELLRLVPAADEPWFWALLKRAPTPVEGRRMRPAQVRQLLRAHRIRRITAEALLTVRAPSVSLAPGVREGVRVRILDLVDELPVLARQRRAAERRLATTLEAMTQGPDGESVREHTDVTILQSLPGIGTRIAATMLAEAADALRDRDYHALRLLAGAAPVTKRSGKSCVVIMRYACNHHLQTALYHWARGRLQRDPRSRAHYAQLRRAGHGNARALRGVADRMLTVLIAALKTHMPYDATRRRPWAAGA

SEQ ID NO: 368043 - protein, 336 aa, unidentified
MKLMPVGVDIAKNVMQVHYVDMNTGEIFSKAIKRAKFIEFFTNRSPCLIGMEACGGAHHWARQLSRLGHQVKLMPGEFVKAFNIRNKNDTADAQAIWRAVQQPGKAVAVKTEDQQAMLALHRIRSQLLKFRLMQTNALHGLLAEYGEVMRTGRASLIKNVPDILARLSGRLPAVLIESLREQLGEVERTDGRIADIERRIRELSRDDPSVKAVSAIPGVGFLTATAAVASMGSADAFRSGREFAAWVGLVPRQTGTGGKIQLLGISKRGDKYLRKLLINGAHSVIQNAREPGAWVTDLLKRRPVNVASVALANKMARIIWAVLAHGRPYQKETALY

SEQ ID NO: 368044 - protein, 386 aa, unidentified
MGKSSENLASVTRVGLDLAKSVFQVHGVDAKGAVVVVRKLRRGSVMEFFGRLAPCVVAMEACATAHYWGREVASLGHEVRLLPPSHVKPYVRRNKTDAADAAAICEAAMRPGQRFVAPRPLENQAQLMRHRVRELLSSERTRVLNALRSHLAEIGVVAPQGAQNVYRLKALLADGIDENGEIGVPACVRAALAPLAAAIEALDQGISAIDEELVAAAKADDKARRLMTIPGIGPVIATAIAATVRDVESFAGAREFAAFLGLTPRGASTGGKPRSKRISKMGDRYLRSLLVVGATSALRYAAGHNDALRRWARETLKRKAVLKYAFKLTAVALANKLARTAFAILRSGGTYDDRPVAASRWRRTLKRPKRVFVARRHAIGGDREAM

SEQ ID NO: 368045 - protein, 370 aa, unidentified
MQTVNRSQTLFVGIDVHKDTHTAVALSPFGEKIFEMTIGNEAEDFISLIEKTKVESEKAGLVPSFGLEDVHSWGERLSPFLVEEGLPVRAVAPILVDHRRSKMTHPEKSDSLDAHGVAEVMIQRIDSLPPYKLTDEAQEAKQIRELSCEREWLVKERSRLKNQLHILLHRIHNTAYRSQFKDPFSKKALRHWIRSVPKETDAILEQRMKRTVRRLLDLREEIQEIEEELEALMTASGQTLATASGCGIVIAAEIVGEVGDVSRFHAPGALAKYAGCAPREHSSGKTIRWRKTRSGNRRLNRAFHRMALSQISRSGNEAARAYFKRKISEGKTKAQALVCLRRQLVNVVWMMMKHKTEYRYPQEKMVDFLS

SEQ ID NO: 368046 - protein, 456 aa, unidentified
MPRFVGLDLARATVQVAILDEHGHQLRNQKLPLRREELERFIPATLDPTDEVAVEATGNTWAVVDLLTPHVTRVVVSNPLRTRAIASAKIKTDKVDARVLAELLRCRYLPEVWQPDATTRHLRGLTHHRAALVGQRTAIKNRIHAQLAHRLLHVPTSDLFGTKGLAWLHDLSLDAAGRAMVDAELRLLTAVDAEIAREDAALAGHGWKDDQIRLLMTLPGVSLVVAIGLLAAWGDLARFPSGAKAAAYLGLVPSTHQSGNVCYHGRITKQGASRTRWLLVQAAQHLDRHPGPLGHFFRRLSRKKNRNVAVVATARKLAVIAYHMLRASEPYRWAQPLATATKLAALRVAATGARRRGGSPKGKPRPTSYGSGERTRAVPSLAGVCKAEGLPAPRTLDDLPAGEIRVIKLTHSLTHARAIQNPTTRPRPTAKHLEEKTQPTKVPSQIIDSQRHAQGT

SEQ ID NO: 368047 - protein, 414 aa, unidentified
MKGEQQASERRYIGLDVHKHYITVGGMNQEQNVILRPRNVDMDRFKRWAAENLRDTDEVVLEATTNTWDIYDTVVPLVKRVVVAHPAEVKQIANARVKTDPQDVLRLVRLLIADLVPEVWVPPAEVRELRALLSYRWRLVKMATAIQNRMHSLLHRHNIQAPEGKVDTGENREWWEQLKLSELETLRLKQELKSLRMVREHILEVEKELGCLSTSERWSGPATHVMQLPGVGIVVAMTILSAIGDIRRFESPKKLVGYAGLGAGVHDSGQKHREKGITKSGRKELRWALVEASWQAIRSNPRLRAQYDELCQRKHPNQAIVAIARKLLVTLWYLLSRNESYTPSSDEDLAYKMLTWAWHMDKRAKRGMTNQQFAKYGLLQLGRGENLTRIFKGGQVRRIAPTEEVLAWIQPSPS

SEQ ID NO: 368048 - protein, 342 aa, unidentified
MDRTLYALDLAKQVFQVFWVEGRSRTREKRLKRAQVLEFFARVAPARVAMEACGSAHYWGRELMALGHEVMLIHPRYVRAFVKTNKTDAADARAILAAASQPGMRSVPVKSLAQQTVLALHRVREGRRDMRTALMNQLRGLLAEFGVVLKRGRQAGLAELRGRWPELEAKLPGVMMRLLREQCEAIGRLEREVHELEGRIRAEHAGDERFAALTSIPGIGPLGASALLAQLGTGQQFHSGRGASAFVGIVPRQHGTGGRVRLGAISKRGDPYLRTLLIHGARSVIAKSRHHSPWLKALIARRPKNVAAVALANKNVRIAWALLTRGGRYQPDHPPRARAAAQ

SEQ ID NO: 368049 - protein, 360 aa, unidentified
MKRVSTKSVSVVSGKKVFIGIDVHKDSWHVTARTDGEEVFNGRIPASYHSFMKLLERFRDCQIRVAYEAGPCGFSLYDELIEDGIATIVVPPSLIPIESGNRVKTDKRDSRKLARLLEGDMLKKVFVLTGEERMHRELVRTRRQLVGHRGSVARQIKSKLLFYGISSPFPSRYGWGRPYLQWLRGIVCQSQYLKESFEILIDLYEYLTKEIKRITKSVIDLSRIDKYAERMRLIRSIPGIGILTGMEILVEVQDFARFKTSEEIASYIGLTPSEYSTGPYIRQGRITRCGNKRVRTALIESSWILVGRDPLMRAKYLKLKSSKGAKRAIVAIARKLIIRIRAMLLHNAPYRVGGSMLQAA

SEQ ID NO: 368050 - protein, 416 aa, unidentified
MSNSSTSKKLKQVPSGTLHVGVDLALEKNLVVVINERAERIDRFNFATEWGGYQYFLERVVKVCQKQQASGVVVAMEPTNYFWKLLARALEEKEIPYRLVNAYTVKKHREGDRLDRSKDDPRDAEQIAELSRTGHFTETRLQNGAYEELRQYATLYTQTVQAIRREEQVVWGLAGQAFPELIQVFKDLEGSTSRALLLSCACARSIRQMTESDFVARVQAAYSGKKFRRSKVIQAYRLAATTIGASEGLQALQLAIQLHFSNLQALQSNLKQITQDMTTCLATLPEAPYLLSVKSWKAISVALFLAEVGDPKHYQSAAQWVKLAGIQPAPNTSGKKQRSKTPMSHQGRARLRTLLYFTCLRLIQYDPHFAQLYAHLQRRSNNPLTKMQAIGVLMNKLLHIVWALIHNHTYYQSSFA

SEQ ID NO: 368051 - protein, 369 aa, unidentified
MTQRTVPTPTIPTTTCVELPTTMGLDLSDRVSHFEVQRGDGHTLCTGKVTTTRADLAVLFERWKGCRLVIEAGGHSPWISRLGTECGMQVLVANPRRVEAISKSDRKTDRNDARMLAKLGRTDPELLAPITHRSERAQAELCVLRARDELVRARTSMINHVRGVLKSNGHRAPTCSADSFARKASNSVPAKLEAGLRPVFEMLESLCSKIEQLDLQIERLCTERHPITQVLRQIGGVGPVVALTFVLSLDDPKRFKSARDVGAYLGLVPRKKSSGDKDPQLRITKAGDVSVRRLLVIAANYILGRFGPDCDLRRFGIRLVGAGNDKRAKKRARVAVARKLAVLMHHLWRSGEVYDPLYLAKKRGELAAV

SEQ ID NO: 368052 - protein, 332 aa, unidentified
MSVVSTVGIDLAKNVFSVHAVDSHGATVVRRSLSRARLSELVAQLPPCLIGMEACSGAHEWARRFTAFGHTVKLMAPKFVTPYRKSGKNDGNDAEAICEAVARPNMRFVPVKSIEQQSDLSLHRVRQGFVEERTATFNRLRGLLAEFGHVLPVRTSELSRRVPQLLGKLPSRLAGCARDLLEHAQQLQAKALEYEREIKAHVHCNALACRAQTRLGIGPITASALVATVGNGRDFKNGRQFAAWLGLVPRQYSTGGKTRLGHITKRGDPYLRTLLVMGARAVLQRAASLTDPLSRWALAVRERRGYHRACIAIAAKNARVTWALLSKESVTA

SEQ ID NO: 368053 - protein, 322 aa, unidentified
MSQPNPLCVGIDVSKATLDIAASSDIAQFTVSNDSDGFDAVITGLRRHSVALVLMEATGGLEVAVACSLQAEGFEVAVVNPRQARDFARAMGYLAKTDRIDARVLAQMAEVINHHPERKRFIRALPDAERQALAAMVVRRRQLIAMLVAERNRLHPSHPQNKKSINTIIKALEDELVRLEKEMDSHIRNHFKEIAERLSSIKGVGTMTVSAMLAEIPELGTLSRREISALIGVAPVNRDSGTMRGRRTIFGGRAGVRSALYMAALVATRFNPVIKTFYVRLLAAGKAKKVALVACMRKLLTILNAMLRKNEEWDESYHHVAP

SEQ ID NO: 368054 - protein, 359 aa, unidentified
MEYIAFDAHKRYTLASVAQADGQLLREEQIEHERGALQAFLARCERGSPVAVETVGNWYWIVDEIEAAGCRPKLVHARKAKLMMGQINKTDKLDARGLNQLQRNGTLPTVWIPPGELRDQRELPRTRMVLVRQRTRLKNRIHATLAKYALRCDEVTDLFGVQGRALLRRHLEALPPHTAFTTRVLLEQVESLDRQVRALEDRMRSVFEPTPMVQWLMTLPGVGFILAVVITLELGDIRRFPDAERFASYAGTTPRVHASAGKTRYGALRPDVNRYLKGAFMEAANVINLHRRYYPRRHVTRLYVRLARRKGHPKAIGAVARHLAEATYWMVTKQEGYHEPIASRPSRLGRSRGASAVSP

SEQ ID NO: 368055 - protein, 360 aa, unidentified
MMKYMIKTQTPCLTAFKTIVSVNFETPIAIGIDVAKNSLMICYRYADNHILTKNIGNNDSDIKKLIKELKLLNFSGKIVSESTGRFHMLSAIMLSEKNFLMYVINPLMSKKYNSASIRKVKSDKRDAEILAEIAIKEEKLPDVFTADRKKLMIKKKISLVATMDKQIQAMQATVKEYQETAKTLKIKLTKAEKGILGVVKNLKEEKEKLEKEIENIFNEQSSVDAINIRRQEIFSSIPGVSNYAATLATVFFLEDHCQNPKQWIAYSGLDISVKQSGQWVGKGKLTKRGNGYLKKRLFSAAWGTIMHDAKFKEYYNYLREKKHSYVESLLMIARKIIRIMFYLSKNNCMYDPNKIVFTTN

SEQ ID NO: 368056 - protein, 366 aa, unidentified
MKKISTVAMERIDIFKQNQLTIGLDLGDRISHYCVIEEAGQVILESQLPTTPKGIEEVFGRIPRSRVALETGTHSPWISRQMSQLGHEVIVAHARNVQMISESSRKDDRLDARTLARLARIDPALLGPVRHRSAKAQIHLTVIRARATLVGARTALVNTARGLTKSYGARLPKCGSEQMGREIAKELSQELRDALDPLLAEIESLNERIAEYDRRIARVAKEVYPQVALLQQVKGVGTLIALTYILTLDDPHRFRHSRDAGCFVGLRPGRRNSGRSEPQMHISKEGDRYLRTLLVQGAHYILGPFGQDSDLRRWGLKLAERGGKNAKKRAIVAVARKLAVLLHRLWVSGEVYEPLRNNHKAESAAA

SEQ ID NO: 368057 - protein, 410 aa, unidentified
MEAIVERCAGLDVHQATVVACLNSGPPGKRSRKEVRTFGTTRHELGRLRDWLLASGCTLVAMESTGIYWRAVHAELEDHFELIVGNAQHIKNVPGRKTDVKDCEWISDLARHGLIARSFVPPRPIRDLRDLTRYRCKLSQAQAAERNCLIKLLESANIKLSGVVSDVFGVSGQAMLQALIEGEETPAEMAQHARGRMRRKRAELQLALDGNVNEHHRFLLRMQFERIKAAAAALEQLDERLRAKLAPYGGVLDRLMQIPGVNWVIAATIIAEIGVDMSAFVSADHLASWAGICPGNHESAGKQRSGKTRKGNVYLKTALVTAAIAAAKTRGTYLADKHRRLLARRGKLRAAVAIAHKILVAAYHIMATGSDYKEPGPNYLDQIDQRRTAGHLTRRLRALGYDVEITPKAA

SEQ ID NO: 368058 - protein, 460 aa, unidentified
MVSANLEKRKSKKRKRKPQLKEMNIHAAGIDIGSEVHYVAVSPKVSNEPIRHFGCYTSDLNEMGTWLKECGIKTIAMESTGVYWIPVYQVLESHGFDVNLVDARHVSNVPGRDTDVDDCEWIRKLHSCGLLRGCFIPDSDTVTLRTYWRHRADLVAMSSREVLHMQKALEQMNIQLHKAISDITGMTGQAIIRAIIAGERNPTVLASKRQRGVKKSEEEIEKALTGNWRDEQVYLLKEAVELYDTYQQKIEECDKKVEECMLAFETKADPDDEQAKLSKSRRRSENEPHFDLKKQLYRVTGVDLTAIDGIQSHVAETIISELGCDVSAFPTEKHFSSWLGLCPHNCITGGKIRSRKTRKVQNRIADALRLAAQCLHSSKSALGAYFRRVKGRAGAPKAITATAHKLACLVYRMLRYGMEYVDQGQEAYEKQYQERVFKNLQRSARAQGYVLVKATTGEVS

SEQ ID NO: 368059 - protein, 353 aa, unidentified
MMRILALDLGKYKTVGCEYEAETGRHRFATVLTTPKGLHDLIVDCEPQRVVIEICSIAGWVGDLVRSLGIELQVANTADERWRWRKVKQKNDRNDALKAAQLSAVNQLCSVHIPELQMRQWRALIAYRSKLVQRRTKIKNHIRDLLLREGQLLPRGRTAWTEAGMAALAEMTKPLAEVGGDELWRGELGVELVQLKELQQQILIVHTKLDELAAADPRIALLRTIPGVGPRLSEAIVTMFDDVTRFKTAGQVGAYIGMVPKQFDSGETARSGRITRHGNRLVRSLLVEIAWASLRHNPWARQTFQRISGGKKSRRKIAIVAVGRKLLVRCWGMLRHQTPWHWQTSVATQSSDG

SEQ ID NO: 368060 - protein, 343 aa, unidentified
MQTVTTIGLDIAKSVFQVHGVDTVGQVVIRRQLKRRHVLAFFEKLPPCLVGIEACASSHHWSRELQALGHTVRLMPPAYVKPYVKRQKNDMADAEAICEAVARANMRFVPTKTPEQQSCLMLHRTRHLFIRQQTALINSIRAHLAEFGIVAPVGRKGVTELLRVVADPNDKRVSEVARACLAALGTQLLALKEQILEFDRMILAWHRSNQTSKRLHYIPGVGPMLATALVASVADPRTFRSGRNFSAWIGLVPKQHSSGGKERLGSISKQGNRYLRSLFVAGALAVIRYAKIHGTEHRPWLTALLGRRPTKVAAIALANKIARMAWAMMAKGERYKQPAALAR

SEQ ID NO: 368061 - protein, 418 aa, unidentified
MKGTKDTSGQEKRYIGLDVHKHYITIGGMNARQELVLRLRNVEMERFKRWAEENLRQTDEVVLETTTNTWDIYDTVAPLVERVVVANPAEVKQIANARVKTDNQDVVRLLRLLIAGMIPEVWVPPMEVRELRALISYRWRLVKMATAIQNRMHSLLHRHNIQAPEGKIDTGENREWWEQVQLSGLERLRLNQELKTLRLVREHIEEVEKELGRLSTSERWAKQAVHIMQLPGVGIVVTMTILSAIGEIQRFPSAKKLVGYAGFGAGVEDSGEKHYEKGITKSGRKELRWALVEAAWQAIRSNARLRAEYDQLCKRKHPNQAIVAIARKLLVILWCLLNRQESYNPATDEDLAYKMLTWAWHMDQSAKRGMTNQQFAKYGLLQLGRGEHLTRIVKGGRPRRIAPKEEVLALMPELSSKE

SEQ ID NO: 368062 - protein, 341 aa, unidentified
MKHKMHVLGIAIAKRVFHAVGMDNRGNVVYRKRLSRHDLMPFIAKLPPVRIGIEACGGAHYWARRFGAYGHEVKLMAPQFVKPYVKSHKNDSRDAEASAEAVTRPTMRFVPAKDVDQQDIQALHRVRERLIGERTALVNEVHGLMHEYGMVMPKGVAKFRQAVVSKLEAEKDKLTPLSQEMLWKLVEEFAALEKQLAYDQEKLEALAATHPECQRLMTIPGIGPLTATALVAAVSDASAFKNGRQFAAWLGLVPRQYSTGGQARLLGMSKRGESYLRKLLIHGARATIRWVGRKTDRRSQWIRQLSERRGKNRTAVAVANKHARIVWALLTSHQDYQPATS

SEQ ID NO: 368063 - protein, 416 aa, unidentified
MSLALPPAEFFVGVDWAAEVHAVCVINIEGKVLSQFTVKHSADGIALLVHRLAKFGEPIDIPIGIERPDGRLVDLLLEAGHPVVPVSPNAIKTWREGEVLSGAKSDAADAAVIAEYLRLRRHRLTAAAPYSSETKAVRTVVRTRDDLVHMRVAAVNQLAALLEAYWPGANAIFADLESKIALEFLSRYPTPTAAAHLGEKRIAAFCAARGYSGKRPAAELLTRLRAAPAGTTDPHLSVALHDAVLALVEVVKAVNTAVKDLDKSVAARLGEHPDGKIFTSLPRSGQINAAQMLAEWGECRQAYETPDSIAALAGCTPVTKASGKHKAVHFRWACNKRFRVAITTFADNSRHASPWAAKIYNEARTAGKDHPHAVRILARAWIRVIWRCWHNNTPYDPTKHRAAHALTAQSSVDLAA

SEQ ID NO: 368064 - protein, 388 aa, unidentified
MIYVGIDIAKLNHFASVVSSDGEVLVEPFQFSNDFEGFRCLSFVLDKYDRDQLLIGLESTAHYGNNLVEFLVAKGYRFCVLNPILTSDTRKRNIRNVKTDKMDTFTIARTLMQGDHRLFEKQDLDFLHLKNLGRSRQDLMKKRTAAKIKLTSLVDQAFPELQYFFHGIHHKSVYALLKEAQTPEAIASMHMTHLAHLLETASHGHFKKDKAQELRVLAQKSVGSNDNSISIQITQSIEQIELLDRQIDDDEAGIEQIVKAMGSVIMTVPGIRYVEAGMILGEIGDVHRFSSYSKLLAFAGLDPTIRQSGKFTAKKTRMSKRGSRILRYALVYSAHNVVKNNETFRKYYDLKCSQGRGHYAALGHCAGKLVRILYKLLSEDIPFNPMRL

SEQ ID NO: 368065 - protein, 343 aa, unidentified
MQAVTTIGLDIAKSDFQVHGIDAEGKVLIRRQLKRRYVLAFFQKLSPCLVGIEACATSHHWSRELKALGHNVRLMPPAYVKPYVKRQKNDATDAEAICEAVTRANMRFVETKTPEQQSCLMLHRTRQLFIRQQTSVINAIRAHLAEFGIVAPVGRKGVEHLLAIGTDGSDQRVPEVTQACLAALGAQLRMLKAQILEFDRRILAWHRSNETSRRLDAIPGIGPALATALVASVADAKAFRSGRNFSAWIGLVPKQHSSGGKDKLGSISKQGDRYLRSLFTAGALAVIRYAKIHGTQHRPWLTALLARKPTKVAAIALANKIARMAWAMMARGERYREPVALAA

SEQ ID NO: 368066 - protein, 403 aa, unidentified
MLFVGDDWAEDHHDVHLMNDTGERRASRRLPEGLAGIRQLHELIAGHASDPAQVVIGIETDRGLWVDALTAAGYQVFAINPLAAARYRDRHHVSGAKSDPSDAKLLADLVRTDRHNHRPIAGDTSAVEAVKVLARAHQSLIWARTRHANALRSTLREYYPAALEAFEDLADRDALAILGRAPTPADAKRLSLAKIRSALKAAGRQRNLDTRALQIQEMLRTEQLAAPAAVTAAFGATTRATVGIIAELNHQITDLEAELATHFEAHPDADIYRSLPGLGVILGARVLGEFGDDPNRYTTAKCRKNYAGTSPLTIASGRKRAVLARYVRNRRLYDAVDQWAFCALQSSPGARLFYDHHRAAGDLHHQALRALGNRLVGILHGCLRHHTHYDEHKAWAHRQPAAA

SEQ ID NO: 368067 - protein, 423 aa, unidentified
MRAVALDVHRDFCEVAIVAEGRVRSAGRIAARPEALELFAQSLDPRDWVALEVTGNAWEIARIIEPHVARVIVVSPSDTGIRQARAKTDRLDARALAKLLWAGELDGVWTPDERIRAMRRRLARRAQLVRARTRAKNEVHAALMRCLKDRPPASDLFGVKGRRWLAEQDLAVCERETVDSAVRQVDFLDTEIAQVERLIAADALSWPEVKRLMTVPGVNVIVAATFMAAVGDIRRFGDRRKLTAYLGLDPRVRQSGAAPAAHGHISRQGSVSARHALVEACWSTVRQPGPIAGFYQRIRARRGHSIAIVASARKLACLFWCLLTRGDDYAFAQPSLTRKKMRRLELQAGAQRWQGGRTVWSTNDAMRAAERELALQAQRAYERTITDRQASKVGAGATPGRASQRPSSGTAARQTSKPQRSAL

SEQ ID NO: 368068 - protein, 542 aa, unidentified
MISVTLVIQGTTLGWVVRRLGVIEEESTLPEPEPEPETAQARAEIATASLDAVREHRDSTEVTEHTEAAAELVQEYKVHADRASIEGQDPETISDQLEAQQRLRLVAITAAREKLADRAETMDTEAHRALGPSAHRPYERGRQFSKHVWSTVIRLGGCVMTTVPAPLPDLRTTLVVVVEVSKTAWVIGAHVPGLPGVKVKQRLEPRAEALLDAIARLRPRAADKGGVVERTIAAYESGYSGFWLARILQRAGIAVHVIQPVSVPVDRRARRAKTDAIDVDLLLRTCLAFLRGEPRVCSMVPVPDEEDEDARHPGREREDLVAERIALTNRIGGILTTLGVEGYDPLRRDRRHRLSQLRTALGAPLPAHAEARILRMLDRLELVLAQISALEAQRDAVLERAEQAAPAETMIKRLASLRGIGAQTATLLVREGFVRTFRSAKALGSYAGLVGTPFASGGIEREQGITKAGNRRLRTAVVELAWLWLRYQPGSGLATWLRQRLGEAGGRMRKVLVVALARKLLVALWRFATQGLVPEGTVAKAA

SEQ ID NO: 368069 - protein, 388 aa, unidentified
MQIAAVRPQAPTAIRTDLGAIFVSLELSRSTWLITSLAPGGGEKMSKHSVRGGDVAGLLERFVQLHEKARARTRQCFRIIVIHEAGLDGFWIHRVLQAEGIESHVVDPASIATSRRRRRAKTDKIDGEALVRALLAYKRGEPRVSAMVKVLTPEEEDRRRLCRERKVLTAERVRHVNRVKGLLFAQGITGYEPRRRDRRERLEELQTGDGRRLPEHLKSQVRRELDRLELLLEQIKAVEVERDVLLAAEYTVTPAPAAMLLDIKGIGPEFAAILWSEGLFRHFDNRRQVAAYAGLAPTPWQSGSVDREQGVSKAGNPRLRTTLIQLAWLWVRHQPQSALTLWFEERVKRNGGRLRKTTIVALARKLLVALWKYVTAGVVIEGAAMKTA

SEQ ID NO: 368070 - protein, 330 aa, unidentified
MEAVVGLDLHLKKTQGTVMDKEGIVLKADRFETTKEGVSKFLESVPKGSIVALEALGFCWPWIDFIEELGYVPKLASPSKLKVIADTRIKTDKIDSETIAQLARMGWLPESYVPTKEFRRLRSLVRHRSGLVKIATMCKNRTKASLRKYGMNGDMNLKTALGKKLAESSGLLEVEQNLCVLENVEELIKQDEKMLEKQYGNEEAMQILQSIPGFGLINALCIYAEVCNIERFASTDKFAHYCGLAPSTRQSGENTYNGKMMKANKWLKWAMIEATWMHVFHCQGSRITKAYKSAYRRKKNKNKAIVVAARKMTNVIYHIWKNNEKFNINA

SEQ ID NO: 368071 - protein, 370 aa, unidentified
MTKHTLYVGLDTAKNSIAVAVAGPLPFGAVRTWGKIANTPAAVDRLIGKLRGEGRAIKVCYEAGPCGYGLHRQLAAMAGVTCVVAAPSLIPRAPGERVKTDRRDALKLATLLRAEEIVSVWVPDRAHEAMRDLVRSRAMAVEDLTRCRQRIGGFLLRQGIAYIGKPWTKTHRGWLGSLAFEHAAQRVMVAEFLAALDQAAARRDRLTESIAELVPAWSLAWLVEALQALRGYRLIHAATLAAEIGDPRRFDNPRQLMAFVGLVPSEYTTAERVRRGPITKTGNRRARKVLIEAAWSYARAAKGGAITAPPAIAAIAEKARHRLSRRYRRLVAKGRRAPVAVTAIARESLGFVWAIARAAAPPAGGPRSQP

SEQ ID NO: 368072 - protein, 409 aa, unidentified
MEVMITRGAGLDVHKASVVATVRVPAADGGRLMVTETFGTMTPDLIALREWLQAYGVTHVALESTGVYWKPVYYVLEDAFALLLINMLELKRVPGRKTDVKDSEWLAHLLECGLLRSSFVPPPPIRELRDITRYRVQQTRERSREVNRLQKVLEDAGLKVTSVLTDVMGVSGRAMVNALVAGTTDPQVLADLARGQLRKKLPALRRALVGRFRPVHAFLLEEILAKIDYLDEALERLTAEIDRRVAPFGPMLTALDTIPGIDRIGAISLVAETGGDMSRFPTAAHLCSWGGMCPGQDESAGKRRSGKTRKANRYLRTTLIQAANGASHKKQSALQARYARVKSRRGHKKAVVATGHQILEIAYYVMRDGVTYHELGSDYFQRRDRDRTVRRHVKQLEALGYVVTVQPAA

SEQ ID NO: 368073 - protein, 317 aa, unidentified
MAMQAGRLIVGADVAKAELVIHHDSSDEVIKLKNSKADIKRWLKQQPLNTAIAVEATNVYHLDLVELAHGLGFSVYVVDGFQLSNYRKSVGGRVKTDPSDARLLSRFLRNEGEDLRPWSPPPAVYGKLQSLLRRRAALVSARTAMTQSWANETLLKAAFEAFVTSIDRLDLLMQKKMKEVLREAGLHEQVARCQAVEGIGFLTATALVMAFVRGEFKSSDSYIAFLGMDLRVSDSGQKAGRRRLTKRGCSEIRRLLHNAAMAASKSTAWKGIYEQHRKSGKATTQALVILARKLARVAFALMKNQDEYVTKASKPAC

SEQ ID NO: 368074 - protein, 369 aa, unidentified
MKKKVKYIGLDVHKNSISIANADQGRDSEVRYYGKVAHDMDQLLKVFRKFISQGVELRCVYEAGGCGYHLYRFLISNGIDCTVVAPSKIPRKSGDRLKNDKRDCISLARLHRAGELTPIYVPNEEDEALRDLVRARGDAQNANKKAKQQLSAFLLRYHIVFSGKSKWSKAYFNWLADISMPHPAQQITLQEYINTVNMCGERVSRLTEQIRLLSEQSRLNKLIKAFQSMRGISLIVASTLAAELGDFSRFEHPEEIMAYLGLIPSDFSSGEKQHKGSITKTGNGHVRKALIEAAQSYRLPARKSRAILKRQEGVPKEIRDIAWKAQLRLCSRYQHLVMKGKNPNVAKTAVARELAGFVWAIAMELPQAA

SEQ ID NO: 368075 - protein, 453 aa, unidentified
MISKKKRKDGSTSPTLTPINGRAAGIDVGSRFHVVAVPPDLDHEPVRSFQSFTGDLNRLADWLAAVGITTVAMESTGIYWVPVFEILEARGLEVVLVNARDAKNVPGRKTDVNDAQWIQQLHSYGLLRASFRPRAAIVALRAYLRHRERLLEYAASHVQHMQKALMQMNLQLHHVVSDITGVTGMRILRAIVGGERDSEVLVAFRDVRCKSSVDTIREALTGNYQPEHVFALRQAIELYDTYQGKLQDCDAEIERSVRALPREDASASPPPPPRSRAKQKNELGFDVRPVLHALLGVDLTQINGIGPYSALRIIAECGTDMSRWRTAKHFTSWLTLAPGSKISGGKVLSSRTRRSSNRAAVLLRLAATAVGKTNTALGAFFRRLAVRTGKAKAVTATARKIAVLLYNTLRNGMAYVDPGADYYEERYRKRTIENLRRRADALGFALVQTPAPG

SEQ ID NO: 368076 - protein, 407 aa, unidentified
MDVIHAKCAGLDVHQKTIVACARVMTGKTVQHHLQTFGTTTDALLALGDWLAHHEVTHVAMESTGVYWKPVWYALEGQFQLLLANPMHVRNVPGRKSDVNDATWIADLLAHGLVRSSFVPPEPIQELRDLTRTRKQLTREIARHTLRIQKTLDQANLKLTGLLTDILGMSGRAILDALVAGERDPERLADLASGRLKASRAQLVTALHGRVTPHHIFLLRLHLTQIDALQAAVRDLEARLGDALTPFRAAVERLTTIRGIGPLAASVLVAELGVDMSRFPTPGHLRSWAGLSPRQDESAGKRRSTRTLAGNPWLKTTLVQAAWSAVRKDNTYFRAQFLRLKARRGPKKAIVAVAASILTAAYHVLQREVDYHDLGGDYFNRRDKVKLAKRLIARLHDLGVTVEVKAA

SEQ ID NO: 368077 - protein, 404 aa, unidentified
MVFVGIDWAEKHHDVCIIDKEGVILVRGRVADGVEGISKVHEMVADHIEEPKEAIVGIELDRGLLVSALRAAGYEVFAINPLSVDRYRDRHSTSGAKSDPGDAKVLADIVRTDRHNHRQVAGDSELADAIKLLARTHQNFVWQRQRHINRLRSHLREFYPQALEAFGTDLAFMDAVAILSIAPTPELGRRLSRSKIASALKKGGRQKNIHTRAEKIQLALRSEQLEAPATVTRASGTVTSSLMRLIAGLNEQIADLEREIESSFESHPDAKILRSLPGLGIVLGARVLAEFGDDRTRYVDARARRNYAGTSPITRASGKHRVVLARYARNERLFNACYLWAFAALTASPGSRAYYDVQRGRGKTHNQALRALANRLVAILHGCLRRDQLYDESTAWPGEVRVAA

SEQ ID NO: 368078 - protein, 343 aa, unidentified
MEQLTIGCDLGDRWTQICVLAGGGESIEEARVRTTPAGFRRYFSKRPTARVVIEVGTHSPWVADLLAELEHDVVVANPRVVRLIYANRTKHDRLDAEALARVGRIDPNLLSPVQHRGRQSRADLALIRARDELVQARTKLVNHVRGVVKSAGERLAGCETATFHRKVREAIPPSLGPALNPILVVLEQLTEQIRHYERLIEDRAERAYPETSQLTQVHGVGSLTALAFVLTLGDASRFEKSRTVGAFLGLARRQRQSGESDPALGITKHGDRYLRRLLVGSAQRILGPFGEDSDLRRWGLEIAKRGGRGGKRRAVVAVARKLSVLLHRLWISGEEYVPIGYTG

SEQ ID NO: 368079 - protein, 356 aa, unidentified
MSEITRVGVDLAKHVIQVHAVDAAGKIVTNRPLSRDKFMAWCAQLPAGCMIAMEASSSAHHWARKLVVLSLDPRIIAAHLVSPYRLQGKGGKNDANDAAAVCEAASRPNMHFVPVKNTDQQGILCVHRLREGLKEERTASINRIRGMLTEFGLVASKSPEKLREKLTDMLEDASNDLSGLARLVVQEAYDQWKDLDKRIEWCDERINAHVKDDAQAKAAKELVGVGPVTASAVVATVGDFNQFKNGAQFGAWLGLTPRQNSSGGKNSLGGITKRGDMYLRMLLIQGAKSAVMTAHKRSDPISKWLYELREKSGWQKAAVAMANKNARILWAMMTKGCRFDPRHVSVKPAGLATAMA

SEQ ID NO: 368080 - protein, 356 aa, unidentified
MNYLGIDVHVKTSVWCLLDANGEVLERGKSDTTAPALTALITNLSADSELLAGQEVGKLSYFVHDVLTAAGVKLLSFNAYQLRMIASSRKKTDKRDSYWIAKALQSGMMPHPVYIPTGDVRLLRNLLSQRQSLSVERRRWLARARAHLQAAGHKTRILRSVPKLVEAALAGSDGVEEHLAASLDCCARMEAAVNAELALVDKRLMNLASQNDDIQRLKTIPGVGDIVAITLYAWVGDISRFPRASQLSAYAGLVPSAWQSGDTRRSGGITKEGASQLRSVLVQSGHTLLSRCNTEEAKPLKDIAMRVHTSRARYKIAVVAAARHILRVAYYVLRDGTRYDPKRLRSATTEAGQTAA

SEQ ID NO: 368081 - protein, 414 aa, unidentified
MQHASNHTLPAAGPGHRTAGVDWARDDHAAAIVDASGQVVERFSVAHTATGIRDLVRRLSKMTAHEVAIERPDGPVVEALLEAGLTVVVISPNQLKNLRSRYGSAGNKDDRFDAFVLADTLRTDRARLRPLVPDSPATVALRAACRARKDLVAHRVALANQLRAHLQRAFPGAVGLFADIDSPISLRFLARFDCQERADWLSSRRLAAWLASVGYCGRVTPATLHARLTSAPRGATSTEGAAQAHVTRAFLAALSTVVQQIKLLSEQIDEQLALHTDAHIFTSLPRAGRVRAARLLAEIGDCRARFPTPDSLACLAGVAPSTRQSGRFRAVGFRWAADKQLRDAICDFAGDSIRANPWAADLYRRAIARGHDHPHAVRILARAWLFVIWHCWQAGTPYDPAQHRALQALLKPAA

SEQ ID NO: 368082 - protein, 378 aa, unidentified
MNRIIKIGMDVHTTNYTLCIFEPSFEHDGTVHCITQVKPEVKNIIHVIETFKKKHENEELNIVCGYEAGCLGYSLYHELKEKGIECVILAPTTMKTEKGGRKLKNDYRDAKMIAECLAYGGYSAVHVPTELDNSVKEFIRMRDDIKENLKSIKQQIIAFLTRNGKQFEGKSFWTRKHIDWINTVSFSEPLLQDTLKEYMIEYNHLCNRIETLDRQIEEISLKEEYVEKVQQLQCLIGIKTHTALSLIVETSDFNRFKKGNMYSAYLGLIPGDDSSGGHENKVGITKAGNSHLRRLLVEAAQGYTRGRVGFKSKDLKSRQEKCSSEVVAYADRANERLRRKYYRMTLRGKKFNVAKTAIARELACFVWGIMTDHIDLCS

SEQ ID NO: 368083 - protein, 329 aa, unidentified
MKRTCFIGIDISKKTLDICLYIPGSTTPKKFFKIENSLKGFKSFIKELKILNANLKETFVCLEYCGVYGLELGFFLEGKIEYCFCNPLHIKRSLGLTRGKSDKLDSFKIARFNYLFRDELDPMSMPSECMLRLKSLMAERSRITKSIVIDKQALTDLQKTLGINARLRAERRLEMLQADRKAIDKEILNLIESEDCILINYKLLISIIGISLVNATMMILCTNNFEGITNPRSFACYCGVAPFEHTSGTSIKGRTRVSPYANKKVKANLTNAAKSAVQHDPEIKIYYKRKRAEGKDHGTVMNAVKFKIITRAFAVVKRGTPYVKLRQAG

SEQ ID NO: 368084 - protein, 369 aa, unidentified
MGDRITYVGLDVHKDGIVVALAKDGLRGEVRDYGRIANTPAALQRLVRKLGQEGVELRFCYEAGPCGYGIQRQLSASGHDCVVVAPSLIPKRAGDRVKTDRRDAGGLAKLHRAGELTAVWVPDPGHEAMRDLVRARLDAVRALRRARQQLSGFLLRQGCHYRRPAWTKLHRRWLAGLKFEQAVHHIVLEDYIATVEAAEARRDRLTAQIEAMLPDWTLAPVVAALQTMRGMALVNAATLIAELGDLSRFANPRQLMAYLGLVPSEHSSGASVRRGGLTKAGNSAARRLLIEAAWTYRFPARLSRELLLRQEAQPKPIREIAWKAQLRLCARYRKLARTGKPANVVTAAIARELAGFVWAIARRVPPAAS

SEQ ID NO: 368085 - protein, 419 aa, unidentified
MDDVVHERCAGIDISKGDVKVCVRLPGAGRRRKSEVRTFSTMTRDLLVMRDWLLAERVTVVGMEATGSYWKPVFYLLEHDLECWLLNARHMKSVPGRKTDVLDSEWICRLVEHGLVRPSFVPPEPIRQLRDLTRYRTEIVRERTREAQRLEKLLEDAGVKLSLVVSDLLGVSARAMLEALIAGERDGQVLAELALGSMRRKRTILADALSGNFNEHHAFIARTMLDRIDACRATEARLDAQIDEQVRPFRRQLDLIETVPGASRRTAQVILAEIGADPARFPSAAALASWAGMCPGNNQSGATARNGPTRHGDPWLKAALGQVAVSAGRTKGTYLAARYRRIAARRGKKRALVAVGHSVLISVWHMITTDLPYQDLGPDHFVNRLDDRGKARTARRLVDQLGQLGYHVTLQPAPVPAPG

SEQ ID NO: 368086 - protein, 449 aa, unidentified
MREPEEIQDEEYEQVLERVCAIDVAKASGTVCTRVPHESRPGKRRTRVWDVHATTNAILELGEHLAGERIEKITLESTSDYWRIWFYLLEAAGLDVQLVNARDIKNAPGRPKTDKLDSVWQAKMTERGMLRPSFVPPVEIRRLRDYTRLRVDLTRERTRYWQRLEKLLEDSLIKVSAVASTLDTLSVRDMLEALIAGERDPKVLAGLARGRMKAKRAALIEALTGRFDDHHAELARMLLDQIDALTAQIGKLTTRIEDLIAAIPAAQGADADGSTGPGAGRGTDAAVLPAVDRLDEITGIGREGAQSIIAEIGLDIDRFPTAGHLVSWAKLSPRTIQSGSKHRGGKTGKGNPYLKGVLGEAAAAAARTNTFLGERYRRIVKRRGKLKALVAVARSILVIVWQLLADPTARYRDLGADYHNTRIDTTRKIRNHVSQLAALGYRVTLEPAA

SEQ ID NO: 368087 - protein, 335 aa, unidentified
MQIYGIDLAKEKFDVSFLRQSAKSAVAAPVHKVVSNTESSIRTFLKSVPAGSILVAEHTGVYGERLLKMCTDMNVKIAYVGGHVIHTYKAGPDRGKTDELDCSLLREFGERFTDRLRLATFPTEAIYELQQLSRQRTMLVEERKRVATADKAEECRPYRSETVRRSMRNLMDMLDEEIRDIEKAMLDIIGKDEGLSNSYDIITSVNGVGLVTAVELIVKTKNFTTIKTAKQYAAYAGTAPYEKSSGKMNRGAHISKWGNRRSKTLLYICAESARRYNKEIKLYYERRTIVDKKAHHYVLNAIANKLLKLVFTLIAKNEKYDPCYIQHDPRTFNKK

SEQ ID NO: 368088 - protein, 355 aa, unidentified
MKIIGCDFHTRQQQVAMLDDESGELVERRLEHEEGEARRFYEQLRGPVIVGIEATGYTRWFEQLLAEMGHELWVGDAARIRASVVRKQKNDERDAAHILTLLVEQRFPRIWMPTPAERDLRQLVLHRVKLVQMRTKVMNQLHALAMGEGLCRKKKLWSQAGRAELEALPLGPWAAQRRKELLELLDQLDKPIAKLQQAAQEQAAAHPGAARLMTHPGVGPLTSLSFVLTIGRVERFRRSRQVSSYLGLDPRLNCSASRMRIGSISKQGSSTTRWLLVEAGQTAARKDPELRRLYQRLKFRRGSQIAKVAVARRLAVRLYWMLRRQADYAELMAQLVRMQGSSGSAVMEAFGPSRG

SEQ ID NO: 368089 - protein, 354 aa, unidentified
MSEIATIGLDIAKNVFQLHAVDRSGKIVLRKALRRSQVQGFFSRLPPCLIGMEACATAHHWARTLMAFGHDVRLIPPAYVKPYLRRQKNDAADAAAICEAVTRPSMRFVPVKSPQQQSTLMRHRARDLLIGQRTALINALRGHFAELGIVVAQGARNTRQLLAFLHEEANLDFPTAARIALQPLATMLLGIETQIARLDKAILAAHRSDPISVRLAAIPGIGPIVASCLSASVPDASLFQGSREFAASLGLVPRQHSTGGKARLGSISKMGNRHLRKLLVVGAHAALDRMKSGKTRTALADWARSLLAKKPFKVVAVALANKIARIAWAVMARNTAYEPGNKGAAAPTASYTAA

SEQ ID NO: 368090 - protein, 368 aa, unidentified
MKEGAQVNTSKSRNAVAIADSGRGGEVRYLGEFPATEAAIRKLVAKLAAKCCHLTFCYEAGPTGYGLYRLLKSLGHDCLVVAPSLVPKKAGDRVKTNRRDALSLAKLLRAGELTAVWVPDERHEAMRDLSRARLAVKKDLQGKRQQISSLMLRLGRIYPGKTTWGRAHMRWLMEQKFEHREQRIAFEELLEGIRQESERMERLEDAIREVVPDWSLAEVVAALQAMRGIDLIAAVGVLAEIGDLSRFQNPRELMGYLGLVPTEDSTGDKVKRGGITKAGNGRARRILVEAAWSYRYPPRVSRDKQPKVEAAPRRAREIAWKAQTRLCGRFRSLERKGKRRTVIVTAIARELSAFIWAINRELLPPRQA

SEQ ID NO: 368091 - protein, 416 aa, unidentified
MKRNKTKKLGKVNGNTLIATIDIGKKANYGYFRAPDGQDVKPFAFCNLRDGFEKFWTKLAEFQKGHSLDEIVIGFESTGPYAEPMLHFLKKKKVTLVQTNPMHTKRLKELTGNSPNKTDEKDPKVIADVISLGHALTLVIPEGPAAELRRLSQARERAIKSRTSMSNQLQHLLFVIFPEFSWAMKTKTVLHLIENCPTPESIVGMGLEALCAMLRKVSKGKLGQERAKEIFEAAQKSVGITEGRESILKEIGHLVSNIGNENRFIDGLEKEMKHYLEKIPYSHSILSIKGIGEVTAAGLIGEVGDFRKFSTIAEITKLAGLDLYEISSGRKKGQRRISKRGRPYLRKILFFAAINVVRSEGILHAQYQQMLGRGMAKIKALIAICRKLLRITFAIVRDNTVYASDHQHGCQSKLAA

SEQ ID NO: 368092 - protein, 451 aa, unidentified
MPTTHPYDLVIGLDRSDRKADLHLIDTRTGTVQKQTVATSPEALHDWLVQLRQNHPQARVAICLEQPAANLIVFLETYSWITLYPINPISLQKFREAFVTSRAKDDGKDAQYLAELLLSHPDKLKPWQPDDSHTRQLQQLVLHRRAVVDQRTGLTNRLKALLKQYFPQALDLCGEDLWRPLATAFLLKWPTLQSLKKARKESLKQFYYLQGSRSQTLIEQRLERIDKAVPLSDELALLQSYTLRVQLLCKELQLLLKTLQQFDQQIAKVFQQHTDRPIFEAFPGAGPVLAPRLLASMGSERERFAQPENLQSFSGVAPVTKQSGGTCSIHRRYLCPKFLKQSFHEYAKESILHSRWAAAYYGQQRNKGCGHHTAVRALAYKWQRIIWKCWQTRTIYKEAIYEAALKKNKSPLIGLLDQIELGKSPVKSRAKNLKKTACRITSEVSSPTATN

SEQ ID NO: 368093 - protein, 280 aa, unidentified
MNYVGIDWAYGRAAYCAMGESGKIEAEGLIPADEDGLARLALKLGPEVRACVEMMSGAIWVKDQLSLAGWSVEVAHARKVRDIAPLACKTDKVDARVLAELCRRDLVPAVWVASLADRATRERLRRRAHLVKARTSARNRIFGLLTQFGLRVSFTRLRRPDAIELLERRGVPAVWRDSIAGHLAEIEELDRRIEPIDRELAPLARSDPRAQLLQTIPGVGPLIGLTFAAEIGDVSRFSSASKLVGYAGLAPRISQSGERSSIGRLSKAGSRLPEPSGDAA

SEQ ID NO: 368094 - protein, 345 aa, unidentified
MTIVKTRAITGGVDTHADVHVAAALDPIGGLLGVREFPATVAGYAGLLGWLGGFGAIALVGIEGTGSYGAGLARHVTAAGIRVVEVDRSDRQDRRRQGKSDPLDAVSAARAAQSGRARGAPKGRDGAVEAIRVLMVAKRSARSERVQTINQARALVLTGPDDLRIRFARHTAAGLVSGLASLRPRPGDVVGYATRIALRELGRRAEFLDAQLERLDELIGPLVAARAPGLLALHGVGPDTAALLLVAAGDHPERLRSEAAWAHLCAVAPLQASSGKVTRYRLNPGGDRQANHALWRIVLTRLSAHPPTLIYVERRTKEGKSKKEIIRCLKRYVAREVYRHLRAAG

SEQ ID NO: 368095 - protein, 338 aa, unidentified
MVVIGIDPHKGSHTAVAIDEEETKLAEVRVRADRRQLEGLLKWAIEFPQRCWAIESAGGLGVLLSEQLLEAGEEVFDVPPTLSARVRVLATNRSQKNDENDAYSVAVAALRSPRLRAAENDEHVTVLRLLWNRHKNLTSLHTQAMCRLHALLVGILPGGARRRLSATKAAALLAGVRTPTAVEQTRKAQAQLLIADVRRLDAELKASKRRIAAFVATVPTTLGELSGVGPIATAIILAHTGDVGRFTTADDYASYNGTAPIDASSGPRKRHRLNPRGNRQLNHAMHIIAISQLSHPGSGRDYYERKLAEGKTQKEAIRSLKRRISNVVYRQLRIDAGK

SEQ ID NO: 368096 - protein, 477 aa, unidentified
MKKKGSGNLPAREAKPKRRRRNKGMCLEDRPVLEPNAAGIDVGAREMFVAVPPGRDENPVRVFPTFTEDLERLTDWLEQCGITTVALESTGVYWIPLFEILEQRGIRPCLVNARHMKNVPGRRTDWHECQWLQFLHSVGLLRAAFRPGQDICAVRTLLRHRNELLSAASQHVLHMHKALTQMNLQIHHVISDITGVTGLAIVDAILAGQRDGAELAKLRDSHIKADSETIRKSLEGNWRPEHLFTLSQSRDLYRIYQQQIVKCDLKIETMLSEFEPRIDPTKNPLPPDQKRNRAGRKRRRKNGHPHPEFDLRTETYKLFGVDVTQIPGLEENALPLFSEVGRDMSRWPTAADFVSWLALCPDNDISGGKVLWRGTRRVKNRAGHLFRMAAFSLHHSPTPLGNYLRRMKAKLGPKGATMATAHKIAVIFYTMVKKQVEYDQTIWNARDTQREKRFEAKLKRQAKQLGYELIPIEPKAA

SEQ ID NO: 368097 - protein, 332 aa, unidentified
MYTLIVGADIAAKTVAIYWEQQTTGKISQLDIEQTEKDFRLLSRQLQRFASPQQTHIVMEATGTYWLRLAFFLHEQGFAVSVINPSQSRDFARTTLRRTKTDAIDAQLLCHFGKAIRPDLWTPPPAIYHQLHQNLSLRDDLLKTKIAYTNRLHALRQNPHAQAVVIQRIQALIDNLKAEIAELDQIIEDLLFADHDWACAAHRLLTIPGIGPITTAWLLTTTQAFERCQSPEQAAAFAGLVPHHRHSGTSAKGAGHISGGHDQLRSVLYMAAGVALQHNPIIKVFYQRLVTRGKIKQVARVAAARKLIHIAWAVVVKEHDFDPNFQFQAKVA

SEQ ID NO: 368098 - protein, 332 aa, unidentified
MMAQNDCVVVGIDVAKDKVDACIRSLSQRQTFPSTTEGRRALIRWLRKHKVGKAAMEASGGYERDWAKALREAGIEVRIVDPKRVRSFARSAGRLAKNDAIDAAMIAWFAETFTDAPGQTCDAARDKLVQIVRARQSLLDLQTSLQNRGEHAAPEVVEKMQARLLKTIAREVAELEAAIAALVKATPHLAELAEIIESVPGLGKITSAGLVAAMPELGQVSNNVAAALLGVAPYDDDSGQRRGDRHIKGGRRKVRNLFYMACLGAATRHNPVLKTFYDRLIAKGKEPKVALTACMRKLICILNTMIARRQKWDANRYKMSDPARLPPSACPA

SEQ ID NO: 368099 - protein, 342 aa, unidentified
MGEISIIGLDLAKQVFQVHGARVDGSVVLRKKLTRGQLLVFFSKLPPCIVAMEACATAHYWAREIGEFGHEIRLVPPAYVKPFVKRQKNDVADAEAIAEAATRPTMRFVEPKTPEQQARAMVFRTRELFVRQRTQTINALRAHLAEHGLIAPKGLWNLSSIRQLIDQAEDTVDGLIVETARIYLEQIETFSTRILSLEAVLKKEAARSDASSRMMTMPGLGPITAMAIEAFAPTLSVFKRSRDFAAWLGLVPRQHSSGGKQILGRTSKMGQRDIRRLLIIGAMSIIRWASKKAPIHGTWLHAMLLRKPRMVVAIALANKMARSLWAMQTKREDYRDPLLTVA

SEQ ID NO: 368100 - protein, 341 aa, unidentified
MQDVTLIGIDLGKHSFHVHGQDRQGKALLRKKFGRKQLIEFFATFHACTVVMEACAGAHHMARQLAGYGHDVKLISPQFVRPFVKSNKNDFVDAEAICEAASRPSMRFVTPKNEAQQTLSALHRVRESLVRDRTRACNQIHGFLLEFGISLPIGDAAVRRLPVVLEEQRLPPRLVQVLERLHAHFKYLSEQIAAIEKELTSQLSDDDLGQRLMSVPGIGPITASVLATEMGDGKQYRCGRDFAAALGLVPRQHSTGGRNTLLGISKRGDKNLRRLLVQCARAYMQRLERQSGQLASWVRALLTRRHSNVVACALANKFARIAWAIAAHHATFETKEALMQA

SEQ ID NO: 368101 - protein, 315 aa, unidentified
MVKSIGIDVSKGKLDLGLIEDDRATKNLQFANNQEGIPSLVETLKSYQEKIEDIPIVIEATGGYHYGITFSLMEKGFRKVLVINPLITKKHLSGQVRKLKTDKKDALLLAKIGLLEELHPYQESQKEVLFKRKVRLFHFLKKQLQQINNRISSVQSLALQNNDFEKDILEQTKNDLEMNIEKVKKEILKSMTVNFSKIVGVSEFNLKAIAAELGNVKRFNNHKQVIAFAGLDPSVKESGSSVRGKSQLSKRGSKTIRYFLYQSAWGVMMHNPKYQEYYAKKRSEGKHYYSCLSAIARKLLCEIYFNLKEHSYSIN

SEQ ID NO: 368102 - protein, 338 aa, unidentified
MSNLPVFVGLDYHQDSVQVCVLDQRGRVLMNRPAANDCAELARLVNPLGRVQRVGIEACCGAADLGQELVERLGWNVSLGHPASVARMKASPDKSDYSDGRLLADLTRVGYLPHVWLPPAYIRELRQLVNHRQRLVDHRRAIKLQVGAVLREQRVTIGRDRGSRWSKAWAASVRDNEQLSTHARWIVNDLLDELVHYGGKIAAVEGRLREAVVDDPVVARLMRQPGIGEVTAWVLRACIGDFARFKTAKQLARYCGMSPRNASSGEREADAGLIDACNKTLRATVVQAAHRLVRTVERWQKLAASLKARGKPTCVIIGAVGNRWVRTLHHVMKQELTN

SEQ ID NO: 368103 - protein, 403 aa, unidentified
MFYCGIDIAKYKHEATVIDQAGAAVQESISFANSKEGCEKLLALFQRLDISKEGLLIGMEATGHYWLSVYGYLLEQGFEVKVINPIQSEAFRKMYIRQTKNDRKDSFIIAQIMRFGQFSATNLAEEGIVAMRQLSRYRLALVDTCGDCKRRVIALLDQVFPEYDSLFSDTFGVTSKEVLSQYPTPEGMLTVSIRKLTTLLEKASHGRFGKEKAEQLKAAAASSFGVNFAKDAFAFQIRQLIEQLEFLERQVAELEEQIFSLLKQTGSYITTIPGIGDTLGAIILSEIGDIHRFDAPNKLVAFAGLDVRVTQSGEFTGTRQKISKRGSPYLRRAIWLAASRAAFCDPILSEYYQGLRARGKHHLTAVGAVSRKLCNTIYTILKEDRPWQPIPPKGKKVSNYTEE

SEQ ID NO: 368104 - protein, 318 aa, unidentified
MGMSEKLLESFVGIDVSKNTLDVRIEPRGESLHVAYDEAGVAKIVRRLAEVVPTLIVMEATGGLEIRLASELAARGLPVAIINPRQARDFAKATGQLAKTDQVDAAGLAAFARAIRPAIRPLKDADTRALDDLVSRRRQLVDMRVQETLRLGSAASKPLQKNLSAHITWLDKQIAKLDDDLRKRLRNSEVWKTKDDLLRSIPGVGAVTTLTLLAKCPELGVLNRREIAKLTGIAPLANDSGKHRGKRSIWGGRADVRAVLYMAAVSAIRCNPVIKAFADRLKQAGKPAKVVIVACMRKLLTIMNAMIKNNSPWSPKIA

SEQ ID NO: 368105 - protein, 388 aa, unidentified
MSKPFDLSKSLAALDQDSTLIVVIEMSQSSWLVAARAPGLARDPLKKLAPDPEQLFKLIDRWREESRRAGRVVRRVCVAFEAGRDGFWLARLLRQHDIEAHVIHPTSIPVKRDHRRAKTDRLDTELLMRAFLGWLRGEADHCSMAAIQTLAEEDAKRPTRERESRVNARSRLVNRMKGALARLGIRGFNPKLRKAAEKLEELRTGAGEPLPPNTLAELRRDMAQLRFVADQIKQIEKAREARLEKAPREGAHPMVLMLASIKGVGLETAEMLVAEVLSRKLRDRRAVARYGGLTGSPDESGSRSREKGLARSGNARVRRGMIQLAWRFLMFQKESALAKWFEARTANGPRGVRKTMIVALARKLLIDLWRFVEDGTVLVGVELFDSRA

SEQ ID NO: 368106 - protein, 322 aa, unidentified
MSTSVLGIDIAKQRFEAALLVNGKIKNKSFRNTSEGFEALALWLDKQGSQKVHACLEATGNYGEDLAIYLHEAGHTVSIVNPARIKGFAQSELIRTKTDKIDAGIIARFCLAMQPDPWIPPSAEIRVLRALVRRADSLIDMRSQEKNRLSTAHESVIPLIKEHIDYLGREIEKVRSQIAGLIDRDPTLRQKKELLVSIPGIGKVTIATILAELDDLEKFHHVRELVAFIGLAPKETLSGSSIKGKPRLCKIGHVRLRKALYMPALVSIQCNPVMIAFYNRLKEKGKNGKVIVCAIMRKLVHIIFGILKSGKKYDPNYKPAFA

SEQ ID NO: 368107 - protein, 341 aa, unidentified
MENKYILGVVVGKIRLEFCLLFGDKVLKQVEVMNETTAIRQAFSLLLNEFHISNDQLLICAEHAGQYNYPLIYTCESGLYKLWLENPGRMKYYCSGLQPAKNYKLNCKQIAVYASRNADKIAMCQPPDSEVEHLKQVYNELNMLEGDSAKLQSQLFEMKNYMSEEVFDVNAKRLVDLIKGLEAAIITVENEIKCIFAGNSHLARQLELLISIEAIGNDVALKMIVETDAFTRFENSRQFCSHAGMAPVHKDLKAVQHLQPNGVVTRDKSIRLLLNQAVESILKKDDSELKNYYFRKLKEGKDEKVVINAIRVKLVARMFALIKNNQVYQPVIQEELQCHQQ

SEQ ID NO: 368108 - protein, 419 aa, unidentified
MLTARWFVGIDWATEAHEVCVLDPEGQVCDRRSVAHSATALQAFVDALLERAHGDASTVAIGIEVPRGALVDVCVERGFGVYAINPKQLDRFRDRFTAAGAKDDRRDAHVIGDSLRTDPQAFRRVRLDHPLVIQLREWSRVDEDLAGDLTRMTNQLRDLVYRIAPGLLTLCPAADERWLWTLLRDAPTPADQRRLSLRRLERLLRDHRVRRLEAAQVREVLQKPSVYTAPGVVDAVAAHIQLLLPRVDLLAGQRRDAEKQLERLLDALDAQEPAAGDQREHSDVAIVRSMPGIGTRVAARMLAEASQPLVERAYHVLRATMGVAPITKQSGRRRTVSMRYACNARLREAGYHWARTGAQKDPASRAYYAQLRARGHSHGRALRSVADRLLRVLMTLLNHGQLFDLTHGQHAPATIGAGA

SEQ ID NO: 368109 - protein, 428 aa, unidentified
MNYNTQNAKIASITEETLIVGIDVGSEMHYARAFDWRNYEYSKKPLEFSNTEAGFLTLTAWMEDIAERHGKTAVIPGMEPTGHYWFALGKFLQDSGMKPVHVNPHHVKKSKELDDNNPNKNDRKDPKTIAALVNEGRFSYPYIPTGIYAEIRSLSNLRFQTQEELTRIKNRIARWFSIYFPEYKDVYRDLKAVSGRMVLKVAPLPEDIIKLGAEGVNQIWRDAKLRGAGMKRARTLVSAAEHSIGSKEAPEAARMELKNLLSDMDVYASRLEELLQSIEEKLKEIPYIDKLMAIKGVGLVTVSGFIAEVGDIGRFDNPKQLQKLAGYAIVANDSGKHIGESRISYRGRKRLRYVLYEAAISLIGKNAEFREIHEYYRSRKENPLKKMQSVVAVACKVIRVFYAILTKGVDYDAEKLMGDIRRPQMQAA

SEQ ID NO: 368110 - protein, 372 aa, unidentified
MIVVGVDPHKKTHTAVAVSSQLGEFRGEVTVRARAQGHAKLVHWARALDPERVFALEDCRHVSGALERFLISRGERVVRVPPKLMGEARRGARSYGKSDSIDALAVARAALREPDLPEAHLEGPAREIQLLVDHREDLVGERTRIQNRLRWHLHDLDPALDEQAKRLERSQRRLERLRCQLARREQTAQVRVCRDLFRRLKALSRDIKTLEAELEQLVSRHAEPLLELPGCGILTAAKLVAEVAGIERFSNDAKLARLAGVAPLDASSGKQQRHRLNRKGNRQLNCALHRLAVTQGRVHAPARAFLAGKQAEGKSRREALRCLKRHLARVVFKLLRTIASRSHPESENLFPSEKERQLHSPAQAASRLVAAT

SEQ ID NO: 368111 - protein, 418 aa, unidentified
MARSVAQKLSRFKPGMLYVGVDLGLDRNEAKVMDERAKVLTSFSFPHSCSGYQYAVERMVACKQRHHATGIVVGMEPTNYFWKLFAAELERRHIDYYLINAYTVRKHREGDQIDRSKDDPRDAFVIGDLLRTGKYTQTRLLHGVHAELRQYVTLHDRLQGDIACQKTLLRNAVGQLFPELTSVFGDLTGDTAAAMLRNHAAAVVIRQLSEEDFITAVRADLKGRRLMVSKLRRAYQLAQVSVGLVDGVQALQLAVRTHLEVLRALQEQADAVLCALKQTAQAMPETKYLLSLRGLGLVTTATILAEIGDPSHYRNGRQLIKLAGTQPAPDTSGRKRHSLTPMSHQGRPRLRTAVYFACLRLIQLNEDFAQAYRRYQERAKNPLTKKQAIGALMNKLLRVIWALIRQQVVYDPALAQGA

SEQ ID NO: 368112 - protein, 420 aa, unidentified
MPNIEIGVDSMVKENFIYVGIDLHKETHTAVMIDCYNQKLGEITFPNRPAAFPKLVTKVKKCNTDGKEVVYGLENAYGYGRALAVWLIDKGYLVKDVNTAISHRQAKHRGAMYRKSDSDDAEAIALATLNMLDKLPDACPNDAYWSLGQLVHRRDNIMKQRTRLVNQLHEQLHISYPSYKSFFNDISRPTALYFWENYPSRKYLKGKSVEDLREELVPVSHNKCSTKTCQAILDAVAGDKVKNIDYQDARDMVTLSIVSDLQHYDSQLMEVDKMLEQMYKMLGCTLTTIPGVNVITAVKILAETGDIKRFSNANKLAQFAGIAPLHLSSSGKGKDFATKQGNRRRQATIYFLAVQMIQVSSKGTPRHPAFRAYYEKRKAEGKTSQQALICISRRLISIIYGMLKNGTEYRMPVVESAGEK

SEQ ID NO: 368113 - protein, 349 aa, unidentified
MSQNLNSAVAVIGIDIGKNSFHVVGLDDRGAIVLRQKWSRGQIEARFANMPPCLIGMEACVGAHHLSRKLKALGHDARLMPAKYVRPYSKGQKNDFRDAEAIAEAVQRPTMKFVATKTAEQLDLQALHRVRERLVSQRTGIINQIRAFLLERGVAVRQGLRFLRAELPRILATPPDVLSTRMERVIRDLAEDWRRLDERIDHLSSEIAVLARQDVGCERLMSVPGIGPIISSAMVAAIGTGDVFSKGRDFAAWLGLVPKQISTGDRTILGKISKRGNRYLRVLFVQAAWVVLIKPMSWERHGLKHWIEAARKRLHRNVLAIALANKLARIAWGVLAGGRTFEASKLQAA

SEQ ID NO: 368114 - protein, 451 aa, unidentified
MARKQNKKRKNTAISLHVLQANSAGIDIGATEIYVAVPDGRSNESVRRFDTFTDDLHEAAKWLKECGIKSIAMESTGVYWIPVFQILDTYGFDVVLVNARHVKNVPGRKTDVQDCQWLQYLHSVGLLRGSFRPDQEICAVRSLLRHRDNMVKAASSHVQHIQKSLTQMNLQIHHAISNITGVTGLAILDSILAGERNPEILANLKDPRIKADHKTIVKSLTGDYRSEHIFTLKQALQAYRHYRQMIRDCDTEIERHLNEFESRIDLDNSSDPTPKPRRRPRDNGPAFDLNMHMHRLLGIDLSRIDGISDLTAHVFFTEVGPDLSKFKTANHFCSWLGLCPNNKISGGKILSSRTRPGSNRIAQALRISANSLWHSKSYLGDYFRRMRGRHGAPKAITATAHKLARIIYHLVKKQKGFDETIFAEQEEKHQIRLTQRVISQAKSLGLKLVTA

SEQ ID NO: 368115 - protein, 353 aa, unidentified
MQYIAFDAHKHYTWALVEDEAGRKFVEGKIPHVKGSLSDFLQICEAGSPVAVETIGNWYWIVDEIEAAGMVPRLVHARKAKVMSGCINKTDKLDVQALNRLQRSGTLPTVWIPPGELRDARELPRTRMVLVRQQTQLKNRMHATLAKYGIGTGELTDLFGVRGRAVLKEKLTQLPQQTRFAAEQVLEQLEHLRDRIKCFEERMRDAFEETEELKLIQTLPGVGFILGVVITLEVGDVDRFPSASHLASYAGMTPRVHASGGRVRYGQTRPDVNRYLKWAYAEAANAGMIHRRRSPQRHVSQLYERVKRRRGHPKAIVAVGRHLAEATYWMLHKGEPYRDPALDREEVVSNKEA

SEQ ID NO: 368116 - protein, 409 aa, unidentified
MELLIARCAGLDVHQATVVATVRVPDEQGGRRSVTETFGTMTADLFALREWLQAYGVTHIALESTGVYWKPVYYVLEGAFTLLLINMQELKRAPGRKTDVKDSEWLAQLLECGLLKASFVPPPPIRELRDLTRYRVQQVRDRAQEVNRLCKVLEDAGLKLTSVVTDVMGVSGRAMLRALVEGTTDPAVLADLARGVLRKKLPELRRALQGRFRRHHAFLIEQIFAKIDFLDETLDRLTTEIEGRLGPFEPMLTALDTIPGVDRIGAISIVAETGGDMSRFPSAGHLCSWGAMCPGQNESAGKRRSGKTRKGNRYLRRTLIQAALGATRKNGSALQARYYRVKRHRGHKKAVVAVGHQILEIAYYVMHDGVSYDELGADYFDRRHAERAVRRHVRQLEALGFHVTIEKAA

SEQ ID NO: 368117 - protein, 358 aa, unidentified
MAVTEGTRRIVGGVDTHKDLHVAAVVDEQDRVMETRSFATTRQGYRQMLAWMRSFGELQRIGIESTGSYGAGLLRFMQQAGITVLEVTTPDKQDRRRRGKNDDLDAQNAAHAAFASQRTVTPRSRDGMIESLRVLMACRKTAVSARRVALQMIHNTIVCAPDGLRDQLRSLTRMQLVRTLGSWRPDLTAYRDLESAYRIGLKSLARRYLELHDEIADLDAMIAAIVDELAPNLVARNSIGHIGAAQLLLTAGGNPERLRSEASFASLCGVSPVPASSGKTVRHRRNRGGDRAANSALHIIAIGRLRTDQRTKDYVARRIAEGHSKLDAIRALKRYLAREVFTLVAQRRREINATRFAA

SEQ ID NO: 368118 - protein, 349 aa, unidentified
MRFYTKQHQFYCGIDLHANAMYVCVLNSTGEVVLHKNIPTKPKSLLRLIKPYRENLVIGCECMFSWYWLADLCADEDIKFVLGHALYMRAIHGGKAKNDRIDSYKIAVLLRGGSFPLAYVYPKSLRATRDLLRRRNHLVRKKSELFAHIQNTATQYNLPDPLGRIAKPSERGDLLQKFPDPVVRKMVEVDLLTIEHYEQLLGTLEWELERLTNRQAPIELALLKSINGVGRILGMVMLYEIEDIGRFPRVQDFVSYCRLVKPEKQSNGKSYGHSGKKIGNAHLRWAFGEAVVLMLKGNKPLQAQLQKLASRHGKGKALAILSHRLGRAVYFMLKNQVPFDQELFMRKGT

SEQ ID NO: 368119 - protein, 451 aa, unidentified
MSNGSGVSRGDRNRNARLARLRTLVPTTNAIVGIDLADKKQMVVVTDHDSKVLARKTFRCHAWDLGAALDWAGKQASAKGFASVTVACEPTGHRWRVLGQLAGERAMPFVCVQPMLSSWARRSEDLTFDKTDEKDAVIIARLAAQLRCYVPEPVDETWGRLRHLGARRAQLLVESGRQVQQMRALLECVWPAALQTARQPFRSSTWIAVLSVVVDRDGGDLNRTRRLGMARLETAVRREIIRRGRKKPCLRILHLMFAALTDTAGVIDHRLGALERVALLLHDWFDTHHRLDDAETRMTSVLDELRLTELVTSIPGLSAIGAAAILAETGDPNRFASARALVKHAGLAPREKLSGTFIGRTKLTGQGRPGLRLAAWRAVWGAQRANPVYAARFAHLTTRAQNKLTVTQAQAVIAAAILRQLHAVVTTGRAWDPAIAAHGTTRLTAVLPIAA

SEQ ID NO: 368120 - protein, 342 aa, unidentified
MFYIGCDVSEKSSYVYVTDGKGRKVESQEIPTDKDGYRQYFKRWMNKPVKVAVEAGGHSRWIHDTLKKLGISVYIVNPNKVKLIAKNKKKTDKVDAIFLAKLLRIDELPERVYMAEGDSRELRDLLRSRHQLLKSSTCLKNHLRGMLRQEGIKLKTKAFDDESIFTRLQENKSVPKHLNPIVESYGKAIAELRKQKDVLDDVIADYQNKDVALLKSVPGVGEVSSKTYYAAISTITRFKRAKQLTSYCGLVPSVFSSGERADYGHITREGRSEVRHVAVQSAHAILRSTNSESKPLRKWYERIARRRGNKTAVVALARKLIEIIFYVLRDRKPYDASLLRTN

SEQ ID NO: 368121 - protein, 368 aa, unidentified
MDKRITSFVGLDVHQDSTAIGVADAGREAPRFLGTVGPDVTQLLKALKSLGKPNSLQVVYEAGPCGYELVRQLRARGFACEVIVPGKIARRPNERIKTDRRDALTLARLARSGDLVNVIVPDERDEAIRDLSRAREDAVSARLKARQRVKAMLLRHGRRYSGRSSWTLAHERYLADVSFAHPAQHIAFTEYRQAVKEGQERVERLTEALRAQSEQWRLKPVVEALSSLRGIDFVAGVTLAAEIGDFSRFSHPRELMGFLGLVPSEYSTGQTRRQGEITKCGNVHARRVLVEAAWNYRFPARISRILQIRQEGQPKAVRDIAWRAQLRLAHRYRRLSARKMHQNKVCVAIARELAGFVWDVARQVNVKS

SEQ ID NO: 368122 - protein, 340 aa, unidentified
MQYIAFDSHKRYTYAVVEEKEKGRVMEKRIEHRRGEIGAFLSQCEVGSPVALETIGSWYWIVDEIEAAGMLPRLVNARKAKMMIASSKKTDRLDAKGLNTLQRTGTLPTVWIPSSELRDIRELYRTRMVLTQMVIRLKNRILSCFSKYGISFDETSDAFNIKGRASLEAALEILPTQTCFAVKEFEARMLQVQSNDPEIKLLQTIPGVGPILSYVIAYETGDIHRFPSASCFASYAGTTPSVHASGGKVRYGHTASDVNHYLHWAFIEAANVISMRHEVLRFRHTARLYERLRQAKGHDIAVGAVARHLAEATYWILTTKTAYREPNQNKQVVVVSSKEG

SEQ ID NO: 368123 - protein, 417 aa, unidentified
MLAVGIDWAEDADVVALGQPGEGVIEVSSIPHSAEAVGTLIERIGTLEPDAAEVRVAIETKHGHLVESLLDAGYTVVPVNPDLVARRRGPARKKDDAEDARILCLLALDRHQALRPLVPHGEAAAELRAIARDDERAARDARRLLNRLRADLIAVHPAALAFAGEDLGAPTLLKLLERWPTQEALTGVSDAELDAFFRQARHGFPDRAVRRLRQALASSQFRPRPHLVRAKAETIRLTCSQLLLLHAQRRAWERRMGELLAALPEVGWEQPGQRLPGGEVYRSFAGLGARLAARIAGEIGDHPWQFESPNSLQCYAGKAPVTRRSGRSELVVACRLACNRYLANAVQQWAFCSLERSGWARDFYDSQRARGKGHHAALRALGNRWLEILWHCLKKGVRYDEAIHVANRNRALGKQAA

SEQ ID NO: 368124 - protein, 514 aa, unidentified
MSEGTAQPPFSRLCPRLLRKHSAWLIRHIPLTQKFHPQPLAPAKMADWVHAHYARVRSPYAAQDKPFASDFTNPYRNGGDIMVKINYMSTLFVGIDVSSKSNSVYAMDFEENKYLSTSFGNNQPGADELVNRIAACMQKHKNLDTLLIVLESTSVYSVHISNFLASSEVLMPYKPYVFCVNPKATSNYRKSYIGMEKTDPTDAYLIADFGRVGRTKKLEPWRGGQFIALKRLTRHRMHLSECITREKTYMVSNLYLKFSELQLLEGDDKPFGNLYGATSSAVLTEFLSPQEIIDMPEEDLLAFLAQRSRNRICDLSKTSELLRKAARDSYRLDKCMYEPLNISLASSFNCIQAYQKEIRLIEQAIEKCIKGMNPNALIILQSIPGIGPVWASGILSEIGDISAFHSSDALAKYAGLYWPKGDSGDFISEDNQMSKAGNPYLRHYFGEAANSVRKHIPEYADFYARKYAEVSKHQHKRALALTSRKFVRLVFGLLAKNQLYTGEKLDTEHNTESN

SEQ ID NO: 368125 - protein, 347 aa, unidentified
MTIVGGFDVHRAQITFDYLDTDSGEINTGQIRPATRQVLRTWLSRFDGCGQMAFAVEGCTGWRFVVEELIAGGVEPHLAEPADTATQRGRKKRAKTDRADARLLRELLTQRRLPESWIPPAHMLEVRTLGRLYVTLMDERRRWQQRIQAQLFHQGVPAVSGLLTIAGQAALAEAELSPAGRQMVDTAMAASRSLTMQIQPLRAQLQTLGEHQPGVRALTSHYGIGLLCGIIIWAELGDCRRFSSSDQVVRFAGLDVTVWSSDSKRAAGRLARQGSPELRWALFEAAKCAARSTSPDHAYYAAVQERLDGKLATLSMARKLARRCHHTLRELGETAWVAPSPPRQQAA

SEQ ID NO: 368126 - protein, 350 aa, unidentified
MDRYIGLDAHASSCTVATVGPSGRRLHSQVVETNAGALIRVLRGIPGTRHLCLEEGTHATWLYEVLSPHVEEIVVAAVRESRGPKSDKLDAFGLAEQLRIGAVKRKVYKKQGEFGALRHRAKAYTLLVSDSVRVQNRIKSLFRSRGVAVAGKGVFRAAERDAWLKKLPATARSLAELLMLEHDGLLELRKKAEKEMVAEARKHRAWRLVKSCPGLGEIRTAQLLPIVVTPYRFKNKRSFWAYCGLGIVMRSSSDWVRTQSGEWVKAPIQQTRGLNRNSNRTLKGIFKGAATTVIGQAKDEPLYRHYLQLLDGGTRPNLAKLTLARQVASIMLAVWRNQEVYDPARVDQAV

SEQ ID NO: 368127 - protein, 441 aa, unidentified
MPRRIGLDVHREFAQIAVWEDGVVRQAGQIATTPEAIRVFADSLLPTDEVAIEATCNTHAIVKLIASRVARVVISNPMKTRAIAEAKVKTDKVDAAILAQLLAADYLPAVWMPDEHTQALRRQVARRAHLVRQRTRLKNQVQAILQRNLIPKPPVSDLFGIKGRCWLSNQPLPPDEELAVEALLRQLDFHGQELRIIDASLGRIALDRMEVKRLMTIPGVDATVALSIVAAVGDFHRFPAPGRLVSYLGLNPRVRQSGGQPASHGRITKHGRAHARGMLVEAAWVAVRTPGPLRAFYGRIRSRRGMQIAVVATARKLAVLCWHLVIKDEDYAFGRPSLTEKKLRALELRAGMPARRGKKGNAAAHNLTDVRRRELELSEQAEHAYRQLVADWQAKRPSQKVGVAAANGTRLKRPSMGQAARQASVPEPALRSGVDHALSKA

SEQ ID NO: 368128 - protein, 354 aa, unidentified
MNPIIGCDAHRRYSVFAVFDTSTLSVEQVRVNHQPGAIKEFLSDFPEGTPVALETVGNYYWIVDEIEQAGCVPQLAHAAKAKVIMGNVNKTDKLDAKGLATLVHLGSLPTVWLPPGEIRDERELHRTRMALSKVRTALKNRIHATLAKYALNTSEYADVFVGRGRAWLDRSLKALPPETGRCVDQELALLDSTMEQIAILEERILQRIQLTPHMQRLKTIPGVGSILAIVIAREIGTIDRFPSAGHLAAYAGVVPKVHSSGGKTRYGRMRKQANNYLKWAFIEAANVVVSHRHHPSWRQKKVSQVYERICRRKGHATAVGAVARNLAESAFWILKKGEDYQDPALSRQDSPKLV

SEQ ID NO: 368129 - protein, 359 aa, unidentified
MRIIGCDLHARQQTLAMLDTITGEVAKATLKHEGNNVREFYSALPRPVRVGIEATGSMQWFVNLMEELGVECLVGHPAEIRAAEPRKQKHDRRDADLLLSLLVEERFPAIWLPTKELLDLRALLRHRHQWVCLRVKIQNALQAIALANGLRRGSSLWTQAGQHAIAALPLLPHAAYRRDELQAMYVKFEAEIEKLNQRVEQQARERFGARLLMTHPGVGPITALATEVFLGDPSRFAGTKELASYVGLIPGEHSSGRRQRLGGLTKQGNPLLRFLWSEAAIHAVRRDPELKHFYRRKLIQKGLGKARAAVARKLGIRMWIMLRDRIEYNEFCRRGQRQPESGDACAGMPAARYGAKVTG

SEQ ID NO: 368130 - protein, 342 aa, unidentified
MSEIITVGLDLAKNVFQVHGADGAGHAVLRKNLRRAQVLEFFGQLPPCVVAMEACGGAHFWGREIGLLGHDVRLIPPAYVKPFVKRQKNDAADAEAICEAAVRPTMRFVPVKSEATQGAAMVFRVRELLIRQRTQAINALRGHLTEFGQIVPQGAANTSKLIAVVEDSDSGIPADAIATLKVLVMALANLDAEIGKLNAEIARRAKENDVARRLMTVPGIGPLIATAIAVLAPPPETFRKARDFAAWLGLVPRQHSTGGKQRLGATTKMGERSLRRLLIIGANSVIIKRHVHAAAKPGTWLGGMLTRKPPMLVRVALANKMARIVWALMARGGVYQSPTAAA

SEQ ID NO: 368131 - protein, 316 aa, unidentified
MISSPLFVGIDVAKATLDIALRPSDQLWQIIYDDAQVEALVTQLSELSPTLIVVEATGGLERTLVAALVAAKLPVVVINPRLARDFAKAIGRLAKTDRIDAQVLAHYGEAIRPSLRPLPDADTQQLRALVDRRRQLMDMMSAEQSRLNTSSARIRDSIEYHLTWLRQQVASLDDDLDGMLKASSLWHDYDAILQSTPGVGPVLSCTLISQLPELGDLNRKEIAALVGVAPFNRDSGTWRGRRTIWGGRASVRAVLYMSTLVATRHNPVIREFYERLLASGKVKKVALIACMRKLLTILNAMIKNRQRWQPNVVKNM

SEQ ID NO: 368132 - protein, 400 aa, unidentified
MLSIGIDVSKGKSTVCGMKPGGEIVYAPFEVQQTREGMLELVSLLRSSGEEVRAVLESTGSYHCPVVAALLENGIFVSVVNSLRMKRFCSQSIRKVKTDRIDAMQIALYGLAYWQELQPTRLPEDTYRELQLLARQYYQMTSMLIKAKVDFNAICDQVLPGMQELMNDHAGRHKLSDFVLRYHHTTHILEMGETRFRKDYCKWAEKKGYRNCERMAAHIFATAQNGIPVLPNAPSTQIVITEAIRVLHTVEASRDAILTQMQALAKTLPEYSLVREMPCIGDTLAPRLIAEIGDVRRFHSKRALIAYAGIDAPPYQSGKFCANNRHISKRGNRYLRKTGYEVMQSYVMHKPANDPIFTFIEKKRGEGKSGKLAMVAGLNKFLRVYYGKVTELYRSLPAIE

SEQ ID NO: 368133 - protein, 355 aa, unidentified
MDSVKYIGMDVHKEAISIAVLNSSGKLVMECVIETKAITILDFLKGLRGSLHVTLEEGTWAAWLYDLIKPHVSELVVCNPRRNALLKEGSKSDRIDARKLAELLRSNLLRSVYHGEQGVRKLKELARSYLAISKDLGRVMSRVKAIYRSWGIPCGGKQVYAQRYRSEWLGKIQEAGVRRRAEFYYQQLDALRPLRQQVRQELLAEAKKHSAWKLLRAIPFIGPIRAALLIALIQTPHRFRTKRQLWSYSGFGIETHSSAEQRFINGELRRAKKPVSIRGLNRNHNHDLKNLFKSVATVAAAKAGPFQEYYDALVAKGMRPEMARLTLARKIASITLIIWKKGARFEAQHLKPQTA

SEQ ID NO: 368134 - protein, 368 aa, unidentified
MKGEKKKTAAARHVGIDLGKRTYEAAIVGEGGKVTKSNGKTTVAGRQWLYNKLRAGDKVALEAGNMAFIMAKEIEAAVGCQVYVLNPSHLALIYGSMKKTDKEDALKLAHILEDCKEERLPVVPVPTDKEMKRRKILACYRRGQQSRNREINRLHGLFVAQGITTKVRADLSTNEAREESIKELTGIERQEAEYLVECLKLHDKQIKALEKAIKEESAGDEQIERLQGVPGVGPMVAFAFVSYVSAERFENPSQVSNYFGLVPRVYMSGDVVKYGKITKRGNSYARALLVQAAWALIRTKAGGKLKERYEYMTVEKSKSKKKAIVAIARRIAELLYTLMRDGTKHEPRPFIREKKAAEGIAAQLAKSA

SEQ ID NO: 368135 - protein, 337 aa, unidentified
MKRYLGVDLHRTQFTVCTRLENGRTYLRQWPMRDLKLFAAQLREEDELAVESTGNTRLFHDAVIEQVARVAVVNPSQFKVISQSVKKTDKNDAELLALYLAKGLLPEVRMKERKQRELSHLAQTRDLLVKQRSALKAKINNLLSAEGINLKREALSSNKALERVLALPLSPLMLAEARVLVGQIRGLNQSIAELEELIEEEGPKLAGHANLMSIKGIGSVSAAVLLSVIGDIRDFSDAGKLAAYLGLVPRIQNSNGTEHSGRITKQGNKLARTCLVQCALVAKRYSSFLQNFYQRIQRRRGGGKANIALARKFLGVIYHTLKNNWVFEDFPNFVLAS

SEQ ID NO: 368136 - protein, 348 aa, unidentified
MNRLSKSKSDDKVSMFVGMDLHKNYLQIAVMNEEGRVLRNSKIDNNLRQISRFFDDVNNDKAHVVMESSSVWYNIYRYLSEERSFDVVLSNPVKTRAIASAKIKTDKLDAVKLTDLLRGGYIAECYVPNNKIMELRELVRHRIVLVRMRTKLKNSIHGIMLMKGIQLSNTCTNTFTLEYIDELKKLNDYRINHYISLIESLDQEIKDVSKKIILLAKENKMAKLLTTIPGIGHYSALFLVSEIDDINRFPDSYHLCSYAGLVPSTHSSGGVTYHGNITKTGSKHLRWIMLECVHAHIRTDKSSNITQFYQRLAKKKGNSKAAVAAASKLLRVVYWVMKERREYQQRCS

SEQ ID NO: 368137 - protein, 492 aa, unidentified
MKPKPKRKSVYRSQNTSLRVLFERAGDPRKVICVALDYAKRKHVALVCDGHGDILKGAFPVENNPAGVAWLIEQISATARHRKIPNNQIFLGGEDEPAYVANFTAALREAGYLVLRVNAHEAKENRENHAASTDQLDLIGIAKTLLSRRARSSGDGSPANPAYHHLRELARCRRSLVRQKTATDNRIHALVDQLFPGFLDNSKTGLTAFCDASIELMKDRFSAPEIARRKPTALARTLRRLCVHHPDEVAVKIINLARSVLPPAPNRVATLQRTLTATVDLHQCLSRNAQELRTDAALTLATTPYALLTSIQGIGFVLAAGVAGELGDPATLGTTDSLCCYAGIVPKTLQSGGPDSPPVQGHVSPRCNRILKDWVVQSAQKIHLYGVPELKDRITRWNTEGRSGLYAGARHYLRLLRSLVKNQVPYLAPAGRVRGTTSQEHAAAAQDAWKVMQNKWRTIPGGLDLMLDEAHPLGFWRRVLKEVHDIQLPTRP

SEQ ID NO: 368138 - protein, 354 aa, unidentified
MKRTTKHVGLDVHQATTVACVRADSGRVIAEAILPTEGAAVVEFFRGMRGTIQVALEEGTQAQWMHDLLLPVVDRVVVCDQRGERRQGNKGDRMDAAVLADRLRRGELRPVYHGSHERVALQELTRAYTNLVEDGTRVMQRLKALFRARGIRAPGKRIYHPSAREEWLARLPERGVRFRAGALYRELDVVRELRPQAKAAMVAEARRDPAWAVLISIPFFGPVRVALLLATMKTPWRFRTKRHLWAYAGFAVVTKTSAEYGWEGGRPVRRRRAPLTRGLNRNHHPVLKAVFKGAATAAKSRPGPLQDWYRARVAGGMAEALARVTLARKVAAIALRLWKKGARYDPAQLTVQAH

SEQ ID NO: 368139 - protein, 330 aa, unidentified
MAKNVYSVGLDIACDDFVASIYQSPKQSIITKEGIENTFEGFNVFILWLKEHGLSKTNCIVCMEATGVYNEAIAHYLVSQGFRVSVEPPLKVKRAFDPVGHKTDAVDSKQIAEYAYRYSDELRFWQPKDEIIEKIKHLLTAREQFTKQSTAIKNAMKSYEKHVVQVSLIVKAHRQTLREIKKHITEIDKELDRIIRQNPSISNMNNQLKSIPGFGLLLSASLITLTGAFSDISRYKTLAAFLGIYRQPHMRSFGPAYPRKLLNLAARSVATHNDFFKKYYARKLAEGKAKQLVLNNIANKLIKLACALIKNNSRYTVTYRSINPMFLNIS

SEQ ID NO: 368140 - protein, 388 aa, unidentified
MHVYVGVDIAKELHYAAIMDSDGVVTKPFSFENNDKGFNLLLSHLAPYNKESILIGYESTAHYQENLAFFLKSLGYRTAKINPLQTAALRKANIRNTKTDSVDARLICLALMNHNIQGDQRDSARLDDLYQLCKMRMDILKKRTTCKIQLVATMDRIFPELAPFFDNNLHTNTIYRLIESYPLPSQIKKTRIDILTKLLHKASKGHFKKEKAQKLKNLADISVGIPSDIFAFQAQQLVHQIEFYTDQIQTIEERINTNPDVMSSPLMTIPGIGTFCVACILSAIKNINDFDAPCKILAYAGLDPIIRQSGKFNASHTRMSKRGNGLLRYALVWSAGNVVKNNNTFAEYYRHKTEDQGKSHYQALGHCAKKLVKSIYHMLKYNESFNLD

SEQ ID NO: 368141 - protein, 340 aa, unidentified
MNKVTTIGLDIAKNVFQVHGVDAEGNVLIRRQLRRSRVLPFFKDLAPCLVGIEACATAHHWARQLIALGHEVKLMPPHYVKPYVKRNKNDAADAAAICEAVTRPSMRFVALKGVEQQSVLMGHRTRELLVRQRTMVVNAMRAHMAEFGIVAPVGVPQVKKLLDIIADGDDARLPALARTCLESLARQFVSLHGEIVAAERRIHAWHRSNEVSRRLETIPGIGPITASALAASVSDPSVFKSGRELAAWIGLVPRQNSTGGKHRLGRISKQGDQYLRWLLVAGAMSVIRHAKRRGTSHLPWLADIITRKPTKVAAVALANKNARIVWGVLMSGESYRPAAL

SEQ ID NO: 368142 - protein, 399 aa, unidentified
MAESALLIAGADTHLDTVHVAAITSTGTAVGDREFPATRAGYSAAIRFLSSLGRVERIGVEGTASYGAGLTRALMAAGIDVVEVTRAVKSTRRLKGKSDPLDAYSAARTTLAGDGLAIPKDDATSGLRALHIARRSAVKHRTAAINQLKAMLVSAPDAVREKYRGLTTFKLIEAIARCRPDAMADPWAQSVLVAAKLLAQRVQFLESQAEILQAQIDALVTEANPGLRAAYGIGPDTAAQLLITAGANPHRLESEAAFAALCGAAPVPASSGKTTRHRLSRGGDRAANHALHRIALVRMSSHQPTKDYVQRQLLNGHGKMEILRKLKRAIAREVFKLLTRQIAVPEYGDLRAARQAKNITVTAAANHFGVWPTVISRIERGLQRDDQFADTYRTWLKAA

SEQ ID NO: 368143 - protein, 349 aa, unidentified
MQYVGIDWAYRHARWCAISEHGELTAEATTPADEDGLLRLVARLGPDVKACVEMMSGAVWVRDRLEQAGWQVEVADARKVKALAPLAAKTDKVDARLLAQLAFRDLVPALWVPSLSERALREQLKRRAHLIRLRSSAKNRSFGLLSQWGLRLPLARLREPDAMELLEARGVPETWRRSICEALALIDHLDRRLAPLERELLPLARADRRVQLVESIPGVAAILGLTFAVEIGEVARFPTARKLVGYSGLTPCVYQSGESSRTGRLSKAGSATLRWAAVEAAQHAWRESNPWHRLYSDVKRRSGKTNAAKSAVARKVLIAAWHVLSKGEPFKPCRSRGTVPASSPQPLAA

SEQ ID NO: 368144 - protein, 337 aa, unidentified
MNSNVVGLDTAKSIFHLYSQTATDKPVKKKLKRAEMLSYFANLPVSLIGLEACGGAHYWARELTKLGHEVVMLNAKFVKAFVVGNKNDFNDAEAIFTAVTRPNKRTVAVKDDAQQDMQMLHRLRQERVAERTALANQLRGFLAERGIVLATGLNSVRKALPLILEDADHALTPTGRELFAEQYQRLVTMDADIKAQEQRISRLCEQNALSKRFRDVPGVGPITATILASDIGDGKGYTRARDYAASLGVVPRQHSSGDKQVLLGISKRGNRYLRTLLIHGARSVLKVCRGKTDPLSRWLQGLIERRGFNKAAVALANKNARILWAMATQGKAYQAAV

SEQ ID NO: 368145 - protein, 339 aa, unidentified
MQIHSVGIDLGKTTFHLVALGAAGKVLVRKKFTQKQLLTFTANMQTSLIGLEACSGAHFLGRALRKQGHDARLIPAQFVKPFVKSNKNDFIDAEAIAEAVERKNMRFVPIKTDDQLDLQAIHRVRDRLISRRTAVINQLRAFLLERGLVFAQTPAKLKAAMADILENAEADLTPRMRNLIDMLWSEWKLVEQQIEELNDELERISAADAGCTRIRKIPGIGPVVATAIVAAIGNGAAFRKGREFSAWLGIVPRQYSTGGKAKLFGISKRGNAYLRRILIHGARAAVLHIKRDRAPIGAWLDALDARAPKNVVVVAMANKLARIAWAVLSSGNEYRPVAT

SEQ ID NO: 368146 - protein, 380 aa, unidentified
MTIHAQFIPRDYDVFAGLDVDKKSMAVIFTDHGQLMQSLRLPYSAAQLLSYVRKHFAGQRVAFVYEAGPTGFGLHDDLVAAGHPCLVVAPAMVPTAPGQRVKTNRLDARKLSENLRGGQLRSIHVPSSCYRELRHLVQLRDSHVSQVTATKCRIKALLLFEGITFPGSGRWSAQVLRQLAALPCSAAVGFKLEHLIGTLHFHFNSAATVQKEIRRHCQNDPELRQSITLVKSIPGIGWIVAAHLIARLGDWREIDNVRSIAGFLGLVSSEHSTGEKQNRGSITRAGDSRLRNKLIQSAWVTIRKDPELREFYRRIYDRHPKQVAARKAIVAVARKLTTRIYAVLKEQRPFVVRPCSIAPLTAEETGGPRDRLDGQQSEQL

SEQ ID NO: 368147 - protein, 446 aa, unidentified
MFKHSRLWLRRSVNAVFPYNSLNLTVLKGVPMALKIVYKICCGIDVHKTFVVACVASTSDKGITSYESHRFSTYTSGLKTLLQWLLDRNCKDVCMESTGKYWIPVYNILEKGCSIVLAHPKYVKAIRGKKTDKKDAKWIADLFKHDLVSGSFMPPADIRQLRDLMRYRFKLTCFKSSEKNRLQNCLTVSNIQLGNVVSDTFGKSAQAILDKILENPEDTSFDLEPLVFKSLKKKLPELRDAIDGYITPEQAGKLKIIKAHYESLESRKAELEELILALAAPYQQELTILQTAPGISSNFTAIGIISEIGTNMEAFPSAKHLCSWAGLTPTNNESAGKKKSVRVSKAGCYIKPLLVQCANAVVKSSKHPEMRNRYLRLKKRRGHKKAIIAIARMLLTALYHMLKNGENYNAELYRKSDLPPVDREITVEQAILIARNQGYKIKSATT

SEQ ID NO: 368148 - protein, 344 aa, unidentified
MSNRDTCGIEVSAKQLVVRLRRDEALEPLRTFANSPEGHALIVLYLRRAGRVVRVCLESTGLYGLDLALALHAAEGLEVMVANPRAVRNFAKALMQRSKNDPIDAGVLEEFAARMPFQAWQPPSPTALALHALTRRLHDRVEILAAEKNRQHAAGLSQTIPATVRRDLARSVRAQERAIQRLTQQTRKLLAQDPQLTERFQLLDTVPGIGETSALQLLGELAVLSPDLTARQWVAYAGLDPREYDSGSSVHKQPRISKAGNQHLRHSLFMPALVGVQHDPHLRAYYQHLQVLGKVKMQALVAVMRKLLHAFHAMFRTHQPFDGSKLFRLAPTPTPEVNRALVTA

SEQ ID NO: 368149 - protein, 359 aa, unidentified
METQLDTRSGYVVVGVDTHKHLHVAAVMDSVAGILATLTIPTDTPGFRQLLAWAQSYGQILVFGVEGTGSYGASLTSYLRRHGHSVVEAGRPDRRLRRMNGKSDTLDAENAARAALAGMATAIPKTGDGTVEMLRQLKIVHDTAVKDRSAAMITLKTMLVHGDDQLRANTNKMTQIKLARHLSRLRPADVTTVAGTLRYSLRTLAHRWLYLDTQIKELEAKIHALVADYRPALLHRFGIGADTAAEILIVVGDNPERIKSEAAFAKLAGISPIPTGSGQTSGRHRINHGGHRQLNAAIYRTVIVRMQHHEPTKAYIAKRTAEGKTKRDIIRCLKRYVIREVYHLVKAQPTTIAHALKAS

SEQ ID NO: 368150 - protein, 475 aa, unidentified
MSRHVKPSSAKRNKPHHVQHPNVKPTLEELSIVHPNAAGMDLGAEEIWVCVPADRDAEPVRAFGTFTPDLHALVDWLAQCEVDTAAMESTGVYWIPIYELLEARGIKPYLVNARQVKNVPGRKTDVLDCQWLQKLHRLGLLSASFRPDAEMVTLRAYLRHRAELIERRAPHILHMQKALLQMNLQLTQVLTDITGTTGLAIIRAIIAGERDPLKLAQLRNPACQSSTEEIAKALTGTWKPEYLFVLKQSVEGYDFYTQQLAACDAEVERLYAAIKPRWERPEDLPKLPPRKFHSHSKNQPAGEVRQAVYRIVGVDLTAVDGLKEASVQEILSEIGTDMSPWPTVKHFASWLRLAPHNDISGGVVLRSRVLKSNNRARQAFRQAAESVARSDNAFGEFYRRKRAQYGPKVANMATAHKIARVVYFMLKNHVPYEAVTAEEYVTKQRARELTRLKRQAAHLGYNLTPHPTATESPVA

SEQ ID NO: 368151 - protein, 400 aa, unidentified
MDRVEQGWVGIDAGKGHHHVVLIDGNGRPLLSRRAVNDELELAALIDVIRDRVTDLTWAIDLADGAAALMIALLLHRDQPVFYLPGIAVSRASAGYRGEGKTDARDAAIIADQARMRRDLRQLRLLDGDIVRLRLLTAYRADLAADRTRSINRLRGLLVGIFPALERVLDFTNQGPLILIGGFQTPTAIRRLGQARLARWLEKRRVRGAARLAAAAAEAAGRQTVEISGEAAAASVIARLAQTILELDRQLAVIDREAAAIFHTQADAAIITSLTGIGDVLGAELLAAIGGSLAGFISADHLAGYAGLAPTPRDSGYRTGNLHRPQRYNRQLQRVFYTSAMISIQRSPASKAFYDGKRAQGKRHTQAVIALARRRVNVLRAMLRDHQPYQERQQKPALAA

SEQ ID NO: 368152 - protein, 392 aa, unidentified
MVVSVGIDVSKDKHDCFIISSEGEVLADVFTIPNNMDGFNCLLQRIQDCTTPQDKVKVGLEATGHYSYNLLGFLLDNSLSTYVLNPLRTNLYRKSLSLRKTKTDRVDARTIAAMLLSDAGLKPYTDTVYHNEELKSLTRYRFDKVKERAKLKSSVSRLVCILFPELEKLTPTLHMPSVYALLDEFPGAKQIAEANLTHLKAILHNASKGRYNRDKAIDIRESARASIGAVMPAKSLELRHTIRLIRELDAEIEDIEAAIQSIMNEMHSPITTIPGIGTRMGAMILAEVGDFSRFDSPDKLLAYAGMSPSTYQSGQLKNCYPHMEKRGSRYLRYALYNATKYVCLWAPTFAAYLAKKRAEGKHYNIALSHAAKKLVRLIFAMEKSRQPYCSAT

SEQ ID NO: 368153 - protein, 318 aa, unidentified
MEIDTVGIDLGKTVFHVVGLSTAGEVVVRRKFSRLQLVRFTANLRVRLIGMEACGGSHFLGGRLREQGHEVRLMPAQYVKPYVKTNKNDYVDAEAIAEAVGRANMRFVPIKSDDQLDMQSLHRVRDRWVARRTSVINQMRGLLLERGITFRKGRRHAEASLPGVLEDPENGLSGPLRMLLSQLQSELRQLQIQIDEADTLIGKAAREQEACQRLMAIPGVGPLTATAVVAASIGNGTEFRKGSSFAAWLGLVPKQESTGGRQKLLSISKRGNHYLRRLFVSGARAVLQCRNKQSPGLSVWLGQLASRVHERCGCRIGQ

SEQ ID NO: 368154 - protein, 416 aa, unidentified
MEEEVYYERCAGIDVHKKLLVVCLRIGRKMEVREFGTLTAEIRGIVAWLRDNGCQMVAMESTGSYWKPLYNIFEQEGLPAMVCNAYHIKNVPGRKTDVNDAQWIAKCLSQGLLNPSFVPDREQRELRDMTRFRKSQIEERSRNINRLQKFLEGANVKLGSWLSDIEGKSATELLELVIGKPDFTVDDVANHMRRNMKSTAEELFLSLEGSITPTQREFFAHVMAVIREQTAQIEKTDTMIQHSLNENYKAAVEALDAIPGIGRVSAEQIIAETSTDMSRFKNQHSFSKWAGVCPGNNESAGKRKSGRTPPGNKTLKSTLTQCAKAAKKNKNSFFSAQYSRLVVNRGKNRATMAVAHSMLIAIYFVLSGCEFKDLGADYYTQFNREKKINSHVKQLFKLGVVIPDDILQTAILCATG

SEQ ID NO: 368155 - protein, 346 aa, unidentified
MNYIGMDCHITTLDFAVVNEAGRLVKADRVATSVNSFIGFVKTVPPPRTIYMEEGTLAAWALETCVRFREKLVITDPKKNHWIGSSGQKDDAIDAVKLVQLARGGYIKEIHHPVGQRRRFRELMIAYHDTVRSTTRIKNKIKARFRQNGILCTGATVYSETYREEWKAKLPQEATLLLILDGLWRQLEQSEQTEKELLAAARAQAKHYPEIKHFQALPGIGFIHAATISAMLETPYRFADKRKVWMYAGLGIMTRSSGGKTYSEKLSTDYNRLLKYTLKQAAEATIQAKDNPFRRKYLDMTLLHGIAPHRAKLTIARYMLATMWAMWRKGEKYSPEIREKAAYKQG

SEQ ID NO: 368156 - protein, 344 aa, unidentified
MAIVGGLDIHRRQITYDWIDTTTGETGRGQLSPATRLELRAWLAQFDGPQADFALEATTGWRFVAEELERAGFRAHLAEPADTRALRGPKRRAKTDRTDAHHLRELLRAGTLPESWMPPPHIADARTQVRLRRALVGERTGWYQRIHAILFHHGLPERSQLLTADGRAWLARIELPPVARQAVDLALRMIDHLEVELDTLDTQLARIARHQPGCTALMGRYGIGWLTAVAIWAEFGDVRRFANSRQAVRFTGLDITISESDGKRARGHLARQGSPVLRWALHEAAMCAARPSSPDHAYYLQVKQRLGGKRAALSVARKLAREAYHTLRELGDQALVPAELPTAA

SEQ ID NO: 368157 - protein, 339 aa, unidentified
MDHVAIDLGARKSQICVRGGDGEIVEERRWETWDLKRYLASRPKSRVIVETCAEAFGVAAMAKELGHETRIVPATLVRTLGVGARRTKTDQRDARALSEVSCRVDLPSVHVPRPESREKKTFCGMRDALVSARTKVINTVRGWLRGQGRRLGKGSTPTFAERVRAVCGAEIPSYVERQLKAVDELTTQIKAADRELEELAERDEICRRLMTVPGVGPLTAVRFVAALDEVGRFANAHQLESYLGLVPGENSSADRQQRLSITKAGPRALRWVLVQAAWSLRTQCRQPSAVPLQLWAHQIELRRGKRTATVALARKLAGILYAIWRDGTEYDGSRGAKML

SEQ ID NO: 368158 - protein, 412 aa, unidentified
MDEVVEFCAGLDVHRDTVVATVRFPQGRQRGSETKTFGTDTAELVALGDWLISHRVTRVGLESTGVYWKPVFYLLEDRIEQLWLLNAQHLKNVPGRKTDVVDSAWIAQLVEHGLVRPSFVPSPPIRELRDFTRHRRALSEERTRMVQRLEKVLQDAGIKLTSVASTVLSKSARAMLEAMLAGESDPVVLAQLAKGRMRSKIPALTDALRGSFRVCHHGVLVRQILAHVDFLDAQLAEIDEQITTRVATFEPIIERVQTIPGVARKCAIGMIAEIGVDMSVFATPAHLASWAGICPGNNASGGKARSGRTRHGPVALKTVLTEAAQAAARTKNTYLGARYHAIRGRRGTFKAVGALRHDIQIAYWHIVTADVGYQDLGVDWVARRHSREHQIARRAKQIEKLGAAVEITMPAA

SEQ ID NO: 368159 - protein, 347 aa, unidentified
MNFYTQQHKHYCGIDLHAKAMYVCILDHSGTKLVHKNLPTTPDAFLRVIAPYREELVVGVECMFTWYWLADLCQKEGIAFVLGHALYMKAIHGGKAKNDKIDAHKIAVLLRGGMMPQAYVYPAEMRATRDLLRRRSHLARKRAELLAHIHNTNSQYNLPEIGKRLAAKSNREGVADHFPDPSVQKAIEVDISLIDHYDQLLGEVELYLTRSAKTHDVQTFARLQSVPGIGQILALVILYEIHDIRRFPRVQDFVSYCRLVKCAKESNGKRLGTSGKKIGNVHLRWAFAEAAVLFIRQSQPGKEYFAKLEQKHGKAKALTVLAHKLGRAVYYMLTREQAFDLKRFVAA

SEQ ID NO: 368160 - protein, 391 aa, unidentified
MGRVVIGMDPHKRSATIEAIDEHEKVLVQGRYATDTAGYQRMLAAGRQFPDRVWAVEGCAGIGRHIAQRLVADGETVLDVPAKLSARVRVFDTGQGRKNDPVDAHSVAVAGLRSPGLRQVQIDDATVALRLLVDRRDELGRTRTETINRIHQLLLELIPGGAKKFLTRGQASYLLRTAPEPVGIAAETRHQLAGELIDELTAIDAKIRAADKDLRKLVTAAGSSLAELNGIGPSGAARLIGDIGDIARFRTAAHFASWNGTAPIEASSGDQRRHRLSRLGNRRINRVLHIMAVVQLRHDTPGRAYYRRRLAEGKTTMEALRALKRHLSDVVYQRMVHDAKRSRTGGTGPGGHSGATLQSSADGPIPTAASSDKSQPGPATTKRRTNLAATP

SEQ ID NO: 368161 - protein, 328 aa, unidentified
MRDQYIGIDLHKAFFQACAVTPSGDRLWEGRFPRTGAGMEALTARCTTRTALAVEASTPTWHFADALVGAVGDLRIVDPLKTKLKAGYAAKTDRLDARRLADALRRDSVVGIYYPPLAIREVRELGRARHALVQVRTALINRLRAVLLRQGVADARRLAKTRDDSWLAALSLPPQAAASVARLRQVLAVVRTEAAQAEAEVRRASDGDPIAITLQQLRGIGPVLALTIRAEIADIRRFPTAGDLASYAGLVPRVAASAGRIRYGRITRRGSPWLRWALIEAAIHGTTRSDRIGRWGRGLAVRKGALKARVALARVLCEEIHRLWSAVI

SEQ ID NO: 368162 - protein, 355 aa, unidentified
MAGYVGQQYVGIDLHRKRSVIVRMTDAGEVLEAVRIVNCAEGLTEVIARAGESPEVVLESTYGWYWAVDALQAAGASVHLAHPLGVKAFEYRRHKDDLRDSCDLADLLRMGRLPESWIAPPATRELRELVRHRGKLVALRSHCKAEVHAVLAKCGVAVPMSDLFGVAGTQLLDRLALPKPYAARIDSLRRVMDLLDFEIDVFAGLARGRLAKDPGFTAVQTIPGIGPTLGAVFVAEIGDVHRFGTAEQLTCWAGMTPKHHESDTKVRRGRITKQGSRLVRWAAVESVQRLPKHTQLGAFRDRIADKRGHNIAVVAAARRQLEYVYYALRDHHVRGLRPPTCQPQPATAPAAAAAS

SEQ ID NO: 368163 - protein, 374 aa, unidentified
MKKVRCLGLDVHAESIAVAIAEPEGEVRSLGTIANRAEAVRKLVRKLGPVEQLRACYEAGPTGYVLYWQLAELGVACDVIAPTLVPMKAGDRVKTDRRDAERLARSLRAGDLTAVYVPDAGSEALRDLVRAREAAKQDQLRARHRLSKFLLRSGQRPAAGVKAWTQAYLAWVRQLRFAQAAQESTRLDYLHEVEHMEERVKRLEQAIAEAVKLASPAMQEVVKGLQALRGIAQISAVTIASELGEISRFASPRQLMGYSGAVPRENSSGQRTQRGSITKTGNAHLRRIAIEAAWSYRLRPGVGPALRKRQEGVPEEIKEMAWKAQHRLHKRYMRLAAAGKDQRKIVTAVGRELLGFIWAIGTRAEAACKQKSAA

SEQ ID NO: 368164 - protein, 423 aa, unidentified
MDILYERVAGLDVHKDTVVACVRIVAGGKTTRECRTFAATTEHLVRLRAWLEECRCTRVAMEATGVYWMPVFRILGEGDFELIVANAAHIKNVPGRKTDMNDAMWIADLLACGLIKGSFVPDEEVQELRALTRTRKQLVREQTRHVQRIEKTLAEANIKLGSVISDIMGASGRRIIQAMINGMRQPNRLAELAGKQIKATPKELYDALHGRLTDHHRFLLALHLKQWDGLDETIRSLDVEVAQRIERMEAMTGANKTPFRDLIGLLTTIPGVSTVAAPAILSEIGADMNRFPTAGHLVAWAGLCPGQNESAGKRKASRLRKGAPWLKTMLVQCAWAAKRAKDSYYRAQFFRLQAKRGPQKAICAVAASILTAIYHILKNGTEHHDLGVAYFDRRPVEVKASRLVASLKKLGFTVQLQLNAEAA

SEQ ID NO: 368165 - protein, 370 aa, unidentified
MKEYSEAFIGFDTAKKKHAVAIADVGRKGEIRYLGEIDSSPLMIERMIRKLAGRYEKLHFCYEAGPTGYGLYRQVRGLGHDCSVVAPSLIPKKSGERVKTNRRDAVSLARLFRAGELTSVWVPDTVHEAVRDLVRARETASQDLRRKRQQLLSFLLRHGRIFSGRQHWSRAHLRWLAQQKFDHPAQQIVFQDAVDAIDDAAARLRRLDEQVAAIVPSWSMAPVVEAYQAMRGVSFVVAVTFVAEIGDLRRFDNPRQLMAFLGLVPSERSTGERVRRAGLTLAGNKRARRVLIEGAWSYRYPARVSQTLQARLEGLPKAVREIAWKAQIRLCARYRRLTAAGKKLPVVIAAIAREMAAFLWAIARHVAPAA

SEQ ID NO: 368166 - protein, 344 aa, unidentified
MPQPYYVGLDISVKETTISVVDELGHVAHRAVVATDPAALVEHLVRLGFTYRRIGLEAGPLSAWIYAGLVDAGLPAICVETRHMHAALSARINKTDRNDALGIAQMMRVGLFKVVHVKTPASQQRRLLLTARKLLQRKVNDIENDLRGQLRNFGLKVGTVRPSAFEQRVRELVADMPFVAAVVIPLLDARSALRAQLAKLHKMLLDIVRSDPVCRRLMTAPGVGAIAALTSRTCVDNPARFSRSKCIGAHYGLTPRLYQSGETARIGRVSKCGDAMMRVALYEAAFVALTRSQGRWNPLKAWGVAIAKRRGIQKAVVAVARKLAIILHRMWRDETDFRWTAAKV

SEQ ID NO: 368167 - protein, 409 aa, unidentified
MDQPLERVAGLDVHRKTSAVGVRRPGEPGERVQHIRPFGTTAVELLTWRDWLEAHRVTDVALESTGVYWKPVVDVLEEAVQCRLVNAQHVQKVPGRKTDVQDCVWLAQLLEHGLLRGSFVPPPPQRELRDLTRYRKVLIQERTREANRLHKVLEDAGIKLATVATDILGVSGRAMLQALLGGTTDPTVLADLARGTLRKKRPALRQALAGRFRPHHGVMVSQPLGPLDDLDEAIDTLSGRVEEAVAPLAAALPRLDRIPGGGRRTAEVLLAEVGVDMRRFPTAAPLASWAGLCPGQNERAGTRRSGRTRPGNRGLRMTLIEAASMAARTRNTAWAARYHRIARPRGHKKAVVAVAHAMLVTAYHLLDRPLDYPEPGADYFDRRHPERATRRAVRALERQGYRVPIEPAA

SEQ ID NO: 368168 - protein, 371 aa, unidentified
MSELPVGTRPARLNVEASPRPPGARKPETELGAASTIAVPHPDSRSGPSPHSQGRVMDEQRAVFVGIDVSKDRLDVHLRPSGEAFCVLRDDRGLADLVSRLQRLPVVLVVLEATGGFEATVAAVLAGIRLPLCIVNPRQIRDYARAMGRLAKTDTLDAEVIALFAERVQPEARLLPEPERNHLVELVGRRRQLIEMIGMETNRGRQAAGKHLARRLARHVTYLQKELDAVDHDIGNAIKQSPAWREAEALVKSVPGIGDVTARTLLAELPELGTVSRHQIAALVGVAPINRDSGLMRGRRAIAGGRTSVRAFLYMAALTAIRRRSPFRAFYDQLTARGRPKKVALVAVMRKLLTILNAILRDHTPWRHADA

SEQ ID NO: 368169 - protein, 351 aa, unidentified
MENPTTIAVDLSKSVFEIAVERGGRICQRKRLNRREMITFLSQCPKATVLMETCGTSHYWGRKAQELGHDVRLLPAQRVAKNRIGNKTDRRDTGAILRSGTDERVVPVPVKSVEQQTIVSLHRIRAALMKTRTARLNTVRGLLREFGVTIAEGAERVKPALVEALSQAPSPVPEALHAALLAMMAEASELEERTCDVERQLKALAQAVPLVERLETIPGVGLLNATAFSAMVGNFPRFKSGRRFASSLGLTPKESSSGKRRWLGSISKAGDPYLRTLLIGGARSMLLSAHRTKRPHYLQAWALEVEKRRGRNRAAVAVANKLARIIWAVATRGEPFKARFEIQNAPTTVPA

SEQ ID NO: 368170 - protein, 382 aa, unidentified
MTEPRLTELRDWLLEKTKAAPGQIAVAIETPHGPVVEMLLDHAFLVFAINPKQLDRFRDRFTVAGAKDDSRDARVLGSALRTDRHAFRRLVVDDPVVIELREWSRMADELQQERIRLANRVRQQLWRYYPQAVELTDDVADDWFLALWQQVPTPATAAKVSAKTITRILKDHRIRRLDAATVLLTLRKTPLFVAPGTTEAACAHIRNLAARLHLVNQQIKEAHRALDGLCAKLEAATENPLGQIREQHDVTILRSWPGIGRIVLATLLTEATEPLRRRDYHALRALAGTAPVTRRSGKQCFVIRRLACNKRLQNAVHHWSRVAIQHDTAARRRYDALRRRGHGHARALRTVGDRLLHALCAALKRQTTYNPNCQTAQMTASL

SEQ ID NO: 368171 - protein, 344 aa, unidentified
MGEVTTIGLDIAKSVFQVHGVDVAGEVVIRKRISRAKILEFFAELPPCLVGIEACPSAHHWGRELQGLGHTVRLMPPSYVKAYLKRSKNDANDAAAICEAVTRPSMRFVPTKTKEQQTALMLHRTRQLLVRQRTMLSNALRGHLAELGIVSAKGRNGTGELLKIIADSVDNRVSPAIRDILNVLARQYSAIGAEIGSIDKSILALHRSCEASRRLAEIPGIGPIVATALVAEIGDWKTFSSGRNLAAWIGLVPKQHTSGGKDRLGHITKQGNRYLRWLLVVGAMAVIRYAQKHGTKNRPWLGRLMERRPTKVAAVALANKIARMAWAIMVRGEKYKESKLLLAA

SEQ ID NO: 368172 - protein, 315 aa, unidentified
MFVGIDVSKDWFDAAWQAEGQLRTQQFAYTDEGIEQLMEQMPPEAVCVMEATGTYHARLALKLFEAGRGVSVVNPLVIKRYGQMKLLRVKSDRADAQLILGYAQQERPALWQPASEQVQELQQAHGWLNDLIGQRVRLLNRQHAVSHRAKPSAFVVGQMAAQLQQLNERIDECERHLEVLVKKSFAELYERLLTIPSIGAKTALELIIVTDGFTRFEDVKQLGAYIGVSPTTLRSGSSVKGKGSIAKLGQGRMRQLLYLCTWTAKNCNPACKKLHQRLKAQGKPAKVINIALAHKLLRQAHAVATKNVSFSAEMA

SEQ ID NO: 368173 - protein, 427 aa, unidentified
MTRISVGVSKNRSTVCIMDQDGKVIMRPFLVWHSTEELDFLADTLKRLNGEVRVIMESTSVYQYPIALQLKERGLFISIVNAYEMKQFANIDFRGGKTDKKDSRTIASYGISYWDKLVEWQIPKDTYFNLDLLNRTYMNAKKHRQIILQELQHYIDCAMPGMDKELHSLNLNTKKDFMLDFVEKFWHRDEIVNMTEAEFTEVFTAWAKEKGYRPGKGKAAKIYAIAKSCIPYYPANPTVKTILQCIVDKLSGVNRTLVTIVTQMIEEAKKLPEYQIVREMPGVGDPLAARFFGSAGDIRRFKNSKALVAYAGIDSPPDESGDFSSTHRHITKKGSKVFRDTGYEIMMALRAQKRTWEKVRKNPEVYDHMLKKKAEGKPRKVAKIAALNKFLRIVYARIKELYDNMALAERAKTKTRSKTRAKTKVTA

SEQ ID NO: 368174 - protein, 453 aa, unidentified
MAKRSQVKKARRLDALEQINRNAAGIDIGGEEVYVAVPPDRDAESVRSFPTFTADLRRMAEWLKACRIETVAMESTGVYWIPVYDILEAEGFEVYLVNARHLKNVSGRKTDVLDCQWIQQLHTYGLLSPSFRPPEQVVAIRSLVRHREMLVQYRSAHIQHMQKALTVMNLRLTNVLSDISGVTGLKIIRAIVAGERDPKKLAQFRDERCAKSETEIAKSLEGHYKPEQVFVLKQALELYDFYDQQLRGCDLQLEAMYRQFGPPENPGTPPPSPRTRKRRKNQAHFDLAPALYRMTGVDLTQIDGVDELTIQKVLSETGTDMNRWPTVKHFASWLRLCPNNRITGGKIQQTGVQPTKNQASTALRVAAASLKHSDSALGAYYRRMRARNGAPAAVTATAHKLARIIYFMLKDRKPYHDMGSDYFEQQHRDRAIRNLNRQATRLGFRLELAHPNP

SEQ ID NO: 368175 - protein, 365 aa, unidentified
MKERKSGGIRYVGIDLGKRTYQMAIVDHRGKVTLSNGKTGAASRQALYKKLRPHDKVALEVCALAFIMAKEIAAAVGSVVYVLNPSQLAVIYKSMKKTDKEDALKLAHILEDTREERLPTVAVPSDAEMARRKLLASYRREHQSRTRGINRLHALFVCQGLTTVKKKGLATAENRQAAILMLDGQEREEAEHLLACLVLYEQRITVLDKRITEEAAKDEQMVRLQSVPGVGPKVAFAFVSHIASERFANAGQLSNYLGLVPRVYMSGETVRYGKITKRGNGYLRALLVQAAWAITRTKAGGKLKSRYEYMTKEKSVSKKKAIVAIARRLAELLYTLMRDGSSYEIRPFVRNKQVAEIIAQLALSA

SEQ ID NO: 368176 - protein, 381 aa, unidentified
MKIYVGIDIAKLNHFAAAISSDGEILIEPFKFTNDADGFQLLVSKLESFDKNSIIIGLESTAHYGDNLVRYLVAEFYQVCVLNPIKTCQMRKNNVRKTKTDKVDTFVIAKTLMMQDDLRFITFFDLDMMDLKALGRFRQKTIKQRTRLKIQLTTYVDQVFPEIQYFFKSGLHQNAVYALLKEAPSPKEIASMHMTHLANLLKVNSHGHFTKEQAKELRVLAQKSVGANDSAISIQITQTIQQIELLDSQLEKIEAEMTDIMKFNDSVIMTIPGIGYINGGMILGEIGDIHRFSNPNKLLAFAGLDPSVYQSGNFQAKTTRMSKRGSRVLRYALVNAAWNVVRNNATFKAYYDAKRAEGWSHYNAPWSLCRQACQSHLEDAH

SEQ ID NO: 368177 - protein, 356 aa, unidentified
MAEGTWVGLDVHARKTVAGVLDAVTGEVRSLRAPTPVGEAVEWLRGFPGPVRVAYEAGPTGYGLARACAAAGIVCTVAAPSKIQRPSGDKVKTDRRDAERLARLLRLGELVAVRVPEPHEEAARDLVRAREDVRGDLMRARHRLSKLLLRHGLVYEASAWTGAHDAWLRRQRFASRPLTLAFDESYGAVVHAKARRDALDQAIAELAAEAPFAEIVGRLCCLRGVSTLTALGLTVELGDWARFRPQALGPFLGLTPSEDSTGERRRLGAITKTGNTHARRLLVEAAWHQRRPLRVSATLERRRQGQSAAVRARADQSSRRLHHRWHALEGRGKRRTVVAVAVARELAAHCWALATM

SEQ ID NO: 368178 - protein, 339 aa, unidentified
MQVTTVGLDLAKDVFQVHGVSSDGALVFNCPIRRRQALAFFRKIPACLVGIEACGSAHHWARELKAIGHAVRLMPPSYVKPYVKRGKTDAVDAEAICEAVTRPTMRFVPVKSEDQQAVLAMHRTRALFVRQKTQALNMVRGLLREFGHVVGDGPVAAMRLVNACRAGDLPDIPELAKGVLSTLCDQVIALERRVVFFDKLIERHAQVDERAARVRTIPGVGPITASAIVATIRDGRQFRNGREFAAWLGLTPLNRSSGGKERLGRISKKGDQYIRRLLVIGMTSQVQRARKFPDRVHPWILKLLERKPVRLATIAMANKAARIIWAVLTSGAEYRRSLA

SEQ ID NO: 368179 - protein, 413 aa, unidentified
MVNTARKEGLMDFYVGIDVSKFKHTVAIIDQNGEIRKKSFDISNSREGFDSLLNELGLLGEKEQIKIGMEATGHYMNCLVRCLISNGYQVQIYNPSLISMFRDSESVNLAKTDNLDAMLIAKYVATHPFTSSPQLSYLIGEIRKISRAKYFLFGDKIACYNHLLRYLDEVFPEFVSFFKKNEDGTRKNMGRNLFESPTIRWLLSEYTSPQKMARMRSETGETLRRMSKGAISFNRFNQLRELAKNSIGYSTEVDEQIIRNLVTQVTIIDEEIDMLNELLEPLMEELNSPILTIPGIGINLAAMIIGEIGDISRFDNPEKLIKFAGLDVKVYQSGTINHKGHIRKRGSPILRYALALSVQKLRIHSPVFSEYYYSKLKQGKATNVAIIATTRKLIRVIWKMMTTNQVFENIKRD

SEQ ID NO: 368180 - protein, 408 aa, unidentified
MEVVHERCAGLDVHQHSVVASVRLAADGKVAQEVRTFATTTVGLLALCDWLAAHGCTHAAMESTGVYWKPVWHVLEPSVTLVLANAMHIRNVPGRKTDVNDAMWIADLLAHGLIRARFVPPTPVQELRDLTRTRKQLVREIAQHTQRIQKTLEDATINITGVIRNVRGTSGRALLEALVAGETNPERLVALTSGRLKASRSPLVEALRGRVRAHHRCLLKLHLAQIDALTLAVRAVEARGGETLTPLHERAHLLTTMPGISETVAHVIVSAIGIDLSRFPTAAHLISWAGFCPRNEERAGKRRSTRVRKGAPWLKTTLVQAAWAAARKKDSSLRAQFLRIKSRRGPMQAIVAGAASMLTAAYHILRDGVPYRDLTGSYFDSRDRTTLTKRLIRRLADLGVHVDIRSAA

SEQ ID NO: 368181 - protein, 331 aa, unidentified
MKKIIIGIDVSKLKLDVGHYTSEGRVKSNCVEIENNTTGYNDMLTWFKKKKFKLKDILICMEHTGIYTDQLTKFLEKKKIPYTLQSPLHLSKSLGIVREKNDAIDAFRLSEYADEKKGKIKVSKRAPENQIRLKQLASERKQAVYALAKVRQVKTEITVHQKVSSQKRKEKQIKLFNKIILEIEKEIQSIINSDNELYKNYSLLCSIPGIGLVNAINIIVFTRNFTLFPDARSYACYVAIAPFEHQSGSSIHKKTSVSKIGNHYLKAILGQAARSAINCDPQIRKYFNRKFNGKKGPESNYGQVLNAIKFKLICRMFAVIKRQTPYIRLDF

SEQ ID NO: 368182 - protein, 325 aa, unidentified
MKTMSGSSVMVGIDVASAHVDVAAIGAELPATLNQVGNDAEGHSALADGLARLQPELVLMEATGGYEAALACALQAAGLRVAVVNPRMARDFARAMQRLAKTDRIDAATLAEFAGVLARRPDCARFIRPLSEPEQQDLAALVTRRRQLVSMQLAERQRLRLARPVARPSIEALLAAIAHQLDDVEAEMAHHVEQHHGQMAKLLRSVAGIGRVAAATLIAELPELGRLNRRQICALVGVAPYAHDSGASRGRRRISGGRFEVRRAIYMATLTATRHNAAIRAFYERLVAAGKLKKVALIACMRKLITHLNAIARDHLNAQARPTIA

SEQ ID NO: 368183 - protein, 328 aa, unidentified
MSKQVMYIGIDVGATELWGAVEDVRPKKFAHSATGIRALHRWAVKQGKGNMVHLCMEATGVYSQSVAMRLVNLPGTEVSIVNPACIKAFANVQLRRCKTDMIDAEVIRCYAESQRPSPWRPTRKAMRQLYELVVQADAVKASLLQWQNRDHSHSYIPDLPKAVVKSQRGIIRTLQRQLQHIEDAIDQLCAIDATLAQQVMLLETIPGIARKSSVQILAYGGRWLTDRTQKELVAHAGLAPHHHQSGTSVRGRSRIDKRGDRRLRKALYMPALVGIVHNPILKPFYQRLLDNQKLKKVALIACMKKLLLISRSMLIHKTTFNPKYQHLT

SEQ ID NO: 368184 - protein, 295 aa, unidentified
MSDYPTPIIFGADVSSTEIVVASANSKQVVMTIANNRKAIKAWLSQLPKDAVIGMEATGHYHCTLADCAALRGHRVYVINPKHLSLYAKGVGQRGKTDPLDASVIARYVAREGDRLHPYTVPTATQRTLRNLLSQRAGIVKHCGAIRQCLRATESIGGATLKRAHKKALCGLQALIAEIDVQLLAAIKQDAPLEQKCAMLQTITGIGLLNGLALTHRFNRTPFANSDAVVAAYGLDPRPKDSGNKVGKRHLTKQGNAEDRRLIYLAAQSAAKTKTFKPLYFALQAKGFPPLKPSS

SEQ ID NO: 368185 - protein, 396 aa, unidentified
MLQENEGTISTQDQPTGSDIFVSVEMSRSKWMVGIHTPLADKIGLHTMACGDVEALLALIDRARVKLVASGSNSPAAMICYEAGYEGFWLYRRLIALGIRVVVIDPASLLVDRRAKRAKTDRIDARAMVRALMAWARGERQVLREVRVPTVEQDDARRGLRERQRLVKERTGHGNRIKGLLKTQGIMDFDPRAADAAARLDAIVTGDGRPLAPCLKREIVRELERLALAMRQIDQVETERDAVVQACDAGAGTDALAAEPEREAAMIGELNRLKGIGMNDATILVREAFWRDFRNQREVGGWSGLAPSPWASGSVLRDQGITKAGPPMLRAHMIQMSWRWLLWQPDSDLAQWFRKRTEGATGRMRRIMVVALARKLLIALWRYATTGMVPHGAIVT

SEQ ID NO: 368186 - protein, 382 aa, unidentified
MSLIYRRCAGLDVHKKSISVCVRVRTGSDRSETESANFGTFTHDLKEMAEWLKTRKVRHVAMESTGVYWKPVWNVLESGKWKFDLVLVNPQQVRALPGKKTDREDSARISAYLQQGLLRGSFVPPKQTRELRELTRRRTHLQGDRNRVINRMGRLLETANVKLASVLSNLVGKSGRAILNAIQSGESNPQALAGHTFGRLKCTRQELEQALEGRYDDHLRWSLRQLLEDLDALDRHVAAVDLRIGELTVEQRDGIARLGTLPGVDITTAYTIIAEIGTDMSQFPDARHLASWAGLCPGNSESAGKRFSGRTRKGNRYLRRILVQNAWAVAHMKDCALTALFYRVAAHAGMKKAAVAVAHRILMLAYYILRDGTEYREAGGDC

SEQ ID NO: 368187 - protein, 417 aa, unidentified
MKNKALHFAAFVGVDWADQKHDASVSSGDGGKPIHQVITHTPEALNEWMLSLRQQYPDGQIALCLEQSRGALIFHLLGYDFLTLFPVNPKNLARFGEAFTGSGAKGDPSDADYLRELVAVHHDRLRSWEPDDEQTRTISFLAQGRRKVVGERTRLTNRLRSTLKMYFPQAIGLSGGTLYKTMALDFLRKWPQLSDVQRAKDKTIQLFYSTHNSRSAARIKKRLELIHSTIPLTSDQAVIKSCLIIVEMLIGQLNQLNSTIDEFDMALKELYNNHEDKSIFDSFPGSGEALGPRLLCAWGTDRQRYDSAESMQQYSGIAPVTKASGQSKMVIRRLACPKFLLQTFHEFANSSRRSSIWAQAYYEMLRKRGKSHHTAIRSLAFKWIRIMYCCWQNRTPYDEVKYIQALKRTSSPLLKFV

SEQ ID NO: 368188 - protein, 412 aa, unidentified
MQDILTCAMGLDVHRDIIVACLVKGAVDAEPEAETRTFSTLIPEMQKLRDWVIEAECRNIAMESTGIYWQPIYEMLESCFDGEISILVVNARHMKNVPGRKTDMKDAQWIATLLRAGLLKGSFIPDKAFRELRHLTRYRKSVVHDITAQKNRIDKFLQSSGFRFTAFLSDTFGASGRNIIRHLIEHGSIDREALDKCLKTKTRNRIDEILVALNGSLSEHQRRFLNMVFRHLEDLEAHKHTIEDEITEEVLKHTDALNLLCSIPGIDVTAAAAIVAEIGTDMSAFPDSQHICSWAGLSPGNNESAGKRKSVHINKGNPYLKSMLCETAWIMASHRKLYLSGWYWKVKQRKGAKRATIALARKILSIIYTMLKTGTPYNEECFEQRRQRCERKRANRMVNELQKLGYTVVAPD

SEQ ID NO: 368189 - protein, 346 aa, unidentified
MAISVVGVDLSKSVFQLSIADSKHHIVDRKRLSRAQFHRFLAQTEATRLVMEACGTSHYWARTAQSLDHEVKLLHANYVKAYVRRTKTDAADADALVLASSDKSLHPIPIKPEELQALQSVHRIREQWKRARVARICEARALLAEFGITTPAGVRGISKKLTLATEQAPMLIQPTLLDLIQEISELEQRLKRVDRALAAYADTNPDVQALLGIQGIGITIATAFVARVSNIHTFKRGRSFASWLGLTSREYSSGQNRRLGRITRQGDRYLRTMLIHGARAALMAARRKQANGKELTRLEIWAVNTQARVGHNKATVALANKMARIIWAVWTRHEKFNGDDALRFAA

SEQ ID NO: 368190 - protein, 335 aa, unidentified
MKEITTVGVDLAKSVFTVHGVDAMGRVVLRKTVRREQLMELIAGLPPCLIGVEACGGAHEWGRKFQIHGHRVGIMMARFVAPYRKSSKNDGNDAEAICEAVARPNMRFVPVKSAEQQAILSLHRVRQGFIEQRTATINRIRGLLAEFGIVLPQRAEQVRRAAVVVAEELPVLAREAIADLRAHLTYLDERITRYERQLVSLARQREAAVRIQRLPGVGPLTASAITASISDGHEFANGRQFAAWLGLVPRQYSTGGKPRLGRITKRGDPYLRTLLMLGARAVLQSAAQKTDRLSRWAVALRARRGYHRAIIAVAAKNARIIWALLVKNRDFVLPA

SEQ ID NO: 368191 - protein, 352 aa, unidentified
MSVIHYIGFDVHKKSVNFCAKTTDGQIVEEGKLLAERPALRQWASERKWPWQGAMEATMFSAWIYDTLKPFAEQLDVAHPAMMKAIAAAKKKNDTLDARMIADLVRCNLLPVCYVPSPEIRELRSMLRYRSLVIRESVRMQNKMAGLLMEAGAPFNKQKLHGKKYFTKLLNELEEVPESVKDLLQLSRGALEMFETTQKRLVKRLLADEKLSQRVERLSSIQSVGPITALTWALEIADPRRFSSSARVVSYCGLSSALKSSADKQQRGPLSKQRNVWLQTALIEAAKLAPRWNPQLAVVHARELERGHRNRATLAVARKLAAYLLAVDKSGQPFQIRMPPVAETAEITAKAS

SEQ ID NO: 368192 - protein, 368 aa, unidentified
MTSIIYVGMDVHTTNYTLCCYSAEDDRVFATVQVEPDYLNIIKYLNRVKANYGRECQIVCGYEAGYLGYVLYHQLTDHGVDCVILAPSTMSSAPNERKTDRRDAEKISRCLAYHSYKPVYIPTAEDDAVKEYIRMRDDEKATQKRIRQQIMAFCARHGKHFDGRSHWTQKHIGWLNSLTYNDAILNETFQEYLALNRQSSDKVERFDKRIEELAHRDEYRQNVAKLTCLLGVKTHTALSLIVEVGDFSRFPNAQRFSSYLGLVPGEDSSGDKRRLGSITKAGNSHLRRLLVESAQCYSRGKIGYKSKTLKARQSGQEPKVIAYADRSNERLKRKFHKMLYRSKRNIAATAIARELSCFVWGMMTGNLA

SEQ ID NO: 368193 - protein, 367 aa, unidentified
MKKISTVAAKQIKNFREQKLTIGLDLGDRSSWYCVLDEAGEVRLEQKLGTTPKAMKEVFGKMPRSRIALETGMHSPWVSRVLSELGHEVIVAHARNVRLIGESRRKDDGFDARTLARLARIDPQLLSPVQHRSAQAQAHRMVIRARAGLVRVRTSLINTARGLTKSYGERLRGCSPRNLNVETARQLSPELQAALEPLLGAIESLSQRIYEYNQQIAKIAKESYPQVARLEQVKGVGTLIALTYILTLEDAQRFRKSRDVGCYVGLQPGRRNSGQSEPQLHISKEGDPYLRTLLVQGAHHILGPFGADSDLRRWGLKLAERGGKNGKKRAVIATARKLAVLLHRLWVSGEAYEPLRNSRQVLLPAAA

SEQ ID NO: 368194 - protein, 427 aa, unidentified
MNFTQNNKLMQIKPETMVIGVDIGSEFQYARAFDFRGFEFSRKALKFPNTRDGFEAFDIWVTDLMKKNNKTHAFVGMEPTGHYWYGFGCHLQSMGVEFGMVNPYHVKRSKELDDNTPTKNDRKDPKTIAMLVKDGRFLVPYMPEGVYRELRNLMELRRQCVVQLISIQNRVKRWLAIYFPEFSTVFKKWTGKAAMLTLKHFPTPQAVIETGEEKIVATWKEEVKRAVGHKHAKKLIEAAESSIGLKHGLDSAALEIETLLDEYRIYSLRNQKIMGIVEEQLKQVPNANKLLEIKGIGIVAVAGFIASVGDIGRFDAPEQIVKLLGLNLRENSSGKHKGKTTITRRGRSDGRYAIFQAVLPLAARNPEFRKLHQYYILRENKPLKKMQSIIALCGKLIRVFYAILKTGSNYDAQKMMNDIKRPIKVAA

SEQ ID NO: 368195 - protein, 404 aa, unidentified
MEVRYPRCAGLDVHKKTVVAAVRIAEGRQVRPEVRRFATTTTALLALGDWLAAEEVTHVAMEATGVSWKPVWHVLEDAVELVLANAAHIRQVPGRKSDVPDAQWIAELLAHGVIRGSFGPPAPVQELRDLTRTRKQLGRELTQHNLRIQRVLEDATIKLGSVISEVLGVSGRAILDALVAGETDPGRLAAAAKGRLKCAPEDLVEARRGRVTVPHRFRVGQPLQLGASLRARMAAFDAESERRLEPFPPAVERLTTIPGVSEGAAQAIVAELGVDMTRFPTVSQLRSWAGLCPRLDESAGKRRSTRIRKGAPWLKAMLGQCAKAAARAQGTYRQAQKSRRGGKKAAVAVAASILTAVYYRLRDGVEYRDLGADPFTRRDKVKIAARLARRIRDLGYEVDIRQAA

SEQ ID NO: 368196 - protein, 353 aa, unidentified
MKSRMESKMSSPVVIGVDIGKDVFHLVGFTADGKIAFRRRIKRLALKDVFEKLPPCIVAMEACLSAHFVSRTLRALGHEPRIIPAIYVKPFVKGQKNDYNDAEAIAEAALRPNLRFVQEKSQDQLDLQACHRVRSRLVSRRTATINQIRAFLIEQGIAVRVGPRALRKSLFVILENRKEEISPRTAKLIRGLYDDWCCLDERIETVTGEIEILSRSEAKCRQLMSVPGVGPLISTAMVAAIGSGEAFERGRDFASWLGLVPRQYSTGGRSILGRISKRGSKYLRTLLIQAAKVLLMRPHNWARYSFGPWLNAASERLHRNKLAVALANKLARIAWSVLRNDKAFDTHLEVAAI

SEQ ID NO: 368197 - protein, 393 aa, unidentified
MEGPIVSIDVSNGNSHYMCFIKNNKRFGKVKKIDHDIEGFKRLLEDIQKLEAETNEKVCAVFEATGVYTKPLERFLSKNSIKTYMINPLESARKRTDKLDPISISKVYYDKEKMMELKKKDETYNWLRKKNRLYEDQLNHLRKYKVTFQNQLSICFPGYLDLFKDGYSDIPMTILKKYPHPDLLKNKKAETVARYLEKNTCHNHKVSLEYALKIIEFAKKTYPGCEKDDVEVEIFKILLDKVIETQRECEKTLNEMITVVSTLEEYRYILSIDGIGTNLAARIIAEIGDIEEFKSREALVAYAGLDPHIYQSGDQDGKHLKISKKGNKYLRCLLFLAVGCSIRGAKDNPVNRFYQKKKQQSNPLNSKAAKTACTAKLLKIIYGICKNKTTYER

SEQ ID NO: 368198 - protein, 342 aa, unidentified
MKQYVGLDVSQRETAVCVVNETGQVIFEGKAKSNPGALTDLLSKYAPHAERIGFETGAMASWLWHELRRVELPVVCIDARHAHAALSVRMNKSDQNDARGLAELVRVGWYREVKVKSEESQKIRAILVARSRLVSMRRDIENQVRSLIKECGLLFPRAIGQQFRNQVSELLGVDHLLLSVISPLLSIHENVCQQQGKFDNEVRRLAKLDETTRRLMTVPGVGVVTALTFRHTIDDPSRFRSASTVGAYLGLTPRRSQSGETDTNGKISRWGDRLLRTYLFEAATVLLYRTKKWSSLKAWGMKLAKRIGMKKAKVAIARKIAVILHCIWVDGTSFDWGQPKPI

SEQ ID NO: 368199 - protein, 408 aa, unidentified
MNPLYVGIDVSSKSNVVYFMLPDGSKHCNFSVANSHTGSSQLVKRILSAMPSCSLDSVLIGLEATSVYGDNLVYFLREDAALARFNSKIHVLNPKQVSKFKEAYNDLPKNDLIDSFVIADCLRFGRINKEVYIGDYRYKALQNLTRARYFAVSNLIKEKQRFMNILFKKYSTMTQEKVFSDTFSTTALAVYDEFESAEALADMDLHELTAFIMEKGKNRFPNPNAVAKAIQKAARSSYRLPKTVNDSVNQVLSISITSIKALEAQIKEFDKAIATQMELLPNVLISIPGIGPVFSAGIMAEIGDINRFHNQAQLAKYAGLAWKQHQSGDFEAQTTRLINSGNRFLKYYLCEAAFSLVRCDKEYSDFYHLKYKEVNRYQHKRALALTARKFVRLVFRLLKDNRLYTSAE

SEQ ID NO: 368200 - protein, 366 aa, unidentified
MSEITRAPIVRVGVDLAKQVIQVHAVDVSGRRVAARAFKRDQFLAWCAQLPAGCLVAMEACSSAHYWSRKLRALGLDARLIAAHFVTPYRMEGKNDANDAAAICEAASRPCMRFVPVKTCEQQGVMSLHRVREGLKEERTACINQIRGVLTEFGLVFGKSPKVLRAVLADVIEDASNELSTMARLVMQRAFEHWRELDEHLRWCDRQVGQHVRANPEAKRAAKVFGIGELGASALTAGVGDFKQFKSGHQFGAWLGLAPKQDSSGGKTRLGRITKRGDDYLRTLLIQGAKAAVMSADKRDDPTSRWLAQLTARAGWQKACVAMANKNARILWAVMTREEGFDPNHVSVKPRNPVAVAPSDPAACAA

SEQ ID NO: 368201 - protein, 344 aa, unidentified
MGEVITIGLDIAKSIFQVHGVDEAGAILIRKRISRAKMLEFFANLKPCLVGIEACPAAHHWGRELQALGHTVKLMPPSYVKAYLKRSKNDANDAAAICEAVTRPTMRFVPIKTKEQQAALLLHRARQLLVRQRTMLSNAIRGHLAELGIVSAKGRSGTGALLEIIADAEDNRVPPVARGVLDVLARQYSALGAEIGSIDRTILAWHHSSEASRRLEEIPGIGPIVATALVAEIGDWKAFGSGRSLAAWIGLVPKQQSTGGKDKLGSITKQGNRYLRWLLVVGAMAVIRYAQKHGTLKRPWLGRLMARRPTKVVAVALANKIARMAWAIIVHGDRYKEPRASLAA

SEQ ID NO: 368202 - protein, 384 aa, unidentified
MNKHSILFIGLDTHKEFNEVAYIEEHRGAQPVHLGRVSSSKVAVQKLVRQFESKYPGATLHFVYEAGPCGYWIYRLITSLGHCCYVVAPSLIPKKPGEKIKTDKRDALKLAKLLKSEDLTPIYVPEPEDEAVRDLSRAREIAMKDLKDAKYQLKALLLRNNINYKGTANWSQKHLRWLTELVLPHPAQHIVLQEFLHTITERISRLERLDNELTHHVHQWRYYPVVKAIQAMRGVRLLVATGVVAELGDLSRFDHPRKLMSYLGLVPSEHSSGGKRHIGAITKCGNGRARRLLVEGAHTYRYAANISTDMQKRQEGLPKDIIDIAWKAQIRLCKRYKKMIAKGKHYNLVVTAIAREMIAYIWAIAKEVVLTPVNTKLRLARVPA

SEQ ID NO: 368203 - protein, 367 aa, unidentified
MTKSITVAVQQTRDFAEKKYTVGLDLGDRWSWYCVLDERGDVVFEHKLSTTPKALREVFGAMPHSRVALETGTHSPWVSRLMKELGHEVIVAQASKVRLIGESRKKDDRLDARTLARLARIDPELLGPIQHRSARAQADLIMIRARAGLVRARTALINAARGLTKSYGERLRGCNPRNMDAEKRKGLSAELQLALEPLLRAIESLSQQILDYNERIEQMAGDGYPEVARLRQVKGVGTLIALTYVLTLEDPQRFRKSREAGCYVGLQPGRRNSGSSTPQLHISKEGDAYLRTLLVQGAQHILGPFGVDSDLRRWGLKLAERGGKNGKKRAVIAVARKLAVLLHRLWVSGEAYEPLRNQRAVELPAAA

SEQ ID NO: 368204 - protein, 393 aa, unidentified
MSVVGIAIGKNQHVAAVCREQCQEAERGVLRLASGRGGFEQLDAWMARQGEVSRVGMESSGHYWMPLASHLRSLGGAVAVVNPLRAKYFAKSRLQRTKSDPADARMLAVLGMSTRPTPREPLQGSELREASRFVMTLVQEQAKVCQRLQRLIDLGFPELGDAFEDPSCASALAVLRVAPTAAAVRRKRVASVAAMKAPGGKRSLGAKKGAELKALAERSVAPPELEAQMAFEIPILIGQYDLLESQIRGAEAHLASLLDDDVARRLQSIPGVGPATAATLMAEIGDIWRFDDVDQLLAYAGVHPREASSGQKGSNPEPSWHMAKTGNAHLRTAVYRMALVGTQHNPVIAAHYRRKREAGKSKMNSLGHCMSKSLSLVWGVWRNGQPFDPGYRA

SEQ ID NO: 368205 - protein, 346 aa, unidentified
MLHAGLDLSRRRLDFHLLDRNGVTVEVGAAPPDADGLRLLAERVGRHGRPVRATVESMNGARFVHDQLELHGWQVQIADALRVKGLAPLACKTDRIDAWVLAELSRRELVPAIWLPDPSVRAERERARWRLHLVRRRSSLKQRVHATLLAHGKPCPVADLFGRSGRALLGRLQLPEPWAGTLVASLRLIDELDREIAGCESELRRLGAEHRYVPVLLTVPGIGWVLAYTIAAEIGDIHRFPSPRKLSGYTGLCPRVYQSGESDRRGPLAKQGPRYLRWALIEAATHARTHPAYRDRYQRTKSRLGKQRGAKVAQVDLARRLAEAIWHMLTRNQPFAPAGATDPLAA

SEQ ID NO: 368206 - protein, 352 aa, unidentified
MEQITQSICEKAMLFVGIDMHQAKWQITIRDEANVLWRGSIPGKWEELKRRLDRYSGYRIRAVYEAGCFGYWLHDNLQEYGVECVVTPPSLVPIEYGNKVKTDRRDSDKLAQLLAKDLLKSVYVPSKEEVLHRQTFRQRNQLVKDRVQTQNRIKAALRFFGLRIPDIRAPFSATYISNLRHVNFGNHSYQKSFNFLLNEYEFLTELIRQQNKLIADMAKLPQYREKVEMLTRTKGVGVLSAMEIILELQDVSRFPNGDHIAAYVGVTPSQHSTGPHVRMGRITGIGKPHLRGTLIELSWSLIRYYPEEREFYLKLKARAGSKRAIVAVARRFIIKVWYMLVTNTPYHVRAAV

SEQ ID NO: 368207 - protein, 357 aa, unidentified
MSIQTAVGWDIHRKFSQLSVVQRNDDGEIRIVKRMRLEHADRAAMRNELAKLPPATPVALEGAFGWPWIADLLNELGLDPHLGHPPAIRVLAKNEAKADRMDADRLGRFWLRGIFPESYLSTPEVRQLRERMRYRTAVVQLRTGIKSRIQAILHRHGVLHDYSDLFGKGGRAFLSMLELPVACRAALDGWLAQIDLLDSLLTDVEAWMKQHLEEDEITRLLQTIPGIGLILAHVIRAEIGQLTERFPSRRHLASYSGLAPLANDSADRHGHRHIAAACNHTLRWSFIEAAQCAINSKNCPANLRRLHHRLTHGGRTNKSQAKVAVARELCELVYVIWKKGEPYREITSPVQSQRTKR

SEQ ID NO: 368208 - protein, 336 aa, unidentified
MEKPIDSQAPAYILGVDVSKDSLDVCLATCSDGRMLHQKFHNNTSGFKRMKAWLKQQGCEAGPDTLCCMEHTGLYTRQLVHYLLARDVRVWMESALQIKRSIGMVRGKDDKVDAQRIARYALLHQQEAKCLSLSGVTLERLKDLQANRNRLIKALKSLKSTINELLQVDPVSGKTLEQVNRKAIKGLEKSKEQVEEKMQQFIEKDTELKRKYDLLTSVKGVGKVLAISLLVYTQGFTKMEDGRKLACYCGVAPFEYRSGTSVMSKTGISKFANKELKHVLHMAAMNSVRYNQELKTYFERKVGEGKSKMSVLNAVRNKLLHQVVAVVKRGTPYEVR

SEQ ID NO: 368209 - protein, 347 aa, unidentified
MVTLGADCHKQSHTVVATDGNGRQLGTRTVRATPAGHLDALQWAKQWSERCWALEDCRHLSRRFEADLLSSDEAVVRVSPKMMAGARRSARTRGKSDPIDALAVARAAVREPDLPVAQPEGASRDVRLLVDHREDLVAERTRIVNRLRWHLHELAPGYELPIRSLNRTSSWTAVAELLDRQQGLVAELAAELLARIKELTARINELEQRITKMVGQLVPSLLELPGCGSLTAAKLLAETGDISRFHSRSSYARHNGTAPIPVWSGNRDRVRLNRGGNRQLNAAFHRVAVTQLRLDCQGRDYFARRLSAGDSRKAAFRVLRRRISDEVYRRLQLDLLPTQQEAHRHAA

SEQ ID NO: 368210 - protein, 345 aa, unidentified
MNQIIRIGMDTSKHFFQLHGVDATERPVLRRRLRRNEVLAFFAKLPPTVIGMEACGAGHYWTRELRKLGHEVKLIAPQHVKAYIKRNKNDGRDAEGLCEAMSRPTMQFVPMKTQEQQSALMLAGVRQNLITRRTQLSNAIRGCATEFGLITAKGLDKIEPLLARIAQDESLPELAREMFAVYGREYARLQVELKAIEVRLLAWHRANADSRRLAQIPGIGPIGATALVMKTPDPRLFPSGRHFAAWIGLTPRDHSTAGKTRIGKITRAGDEMLRSVLVAGATAVIQQARHGRGRPSPWLMALLKRKSAKLAAVALANKIARIAWKLMVTGQSYDGARMPSALAAA

SEQ ID NO: 368211 - protein, 394 aa, unidentified
MRFVGIDIGGERHAVAVVNDDGALLVRSTLFGEEAAGYQRLRELLGDPNDCLVAMEATGHYWRNLFAFLVSHGFEVALLNPLRTRRFAEEELERTKTDSVDALGIARFAAQKRPAPTPVADEVTGELRELVRLRTRYVDELSDRMRQLHRAVDLGFPEFTRHVRIKTLLATAILARYPTARSFARVSIRKLARLAYDGRHHVGEALARALIEGAKVSVGNHHSESYQLQVKYTCADIELLRGRVKQLEQDIERKLEDHEVGKFLTTIDGIGARTAACLIAELGDPSRFRDAAALASYVGVVPRLRQSGKRAFSGARGLPLGNARLRHRLWMPTLVAVRRNPWLRAHYERLLAAGKRPKVALVACMRKLLCAVYSVARTRRPFVPVLAPGSSTLK

SEQ ID NO: 368212 - protein, 334 aa, unidentified
MKSDTVHIGVDVSKEKLDVFVPAQKEGMRPTAREVGNCVAGFREIRDLARKAKATVCVEPTGGYELELIAFLHKFEVPIAYTDALRVRQFARAEGCLSKNDTIDAALISRFADKIGVRVLEPQEVEAVELKRKAKFRQTMTDSRTAMINRLETEVDPEMKALLKEQIKHMDKVIGKAERLCLETVEKDERMNALRERFTRVGGVGDMTAISILAGLPEIGKLPDAKLNRLVGIAPEEKQSGTKEWQRRIWGGRKDVRNALFMACLASIQWNSILGAYYHKKRAEGHLHKWAMVPTMRKLLSLLNRIARDPNFTPKPEPESTKKNTRAGRKKKTA

SEQ ID NO: 368213 - protein, 474 aa, unidentified
MIPGIVYETGFTRKGVVMESYYMGIDVSKGYADFVILDAKKNVVEANFQLDDTFGSHCKLFEILKRFFDHHSGSLLFAAVESTGGYENNWLHSLSGFQGALNIRSARLNPLGVRANSQASLRRVITDKISARDVAEYLIAHPEKVAYQQEDSLAGLRRQWGFVRLLVKQKTQILNQFASLLYTANPELIAYCKSGVPAWLLKLVKQYPTAAKLAKAKATSVARIPYVTTDRAGALIDQAKKSIASATDETTGGLITVMAEQIIRMEETIRIQTQQMAKQCTIPEVALLKTFPGISDASAIGLMLEIQSVKRFSSVKKLAAYFGLHPAFKTSGDGTSSVRMSKQGRKEPRKILFMVAMVALTANPHIRKIYEEHTEKGMKKMAAIGLCMHKILRIIYGMLKNNRAYDSQVDQKNRENRTVRKTTHAVKNENRRYERFDQQAPISRRQSTKRKEWKQSQGDNITKCGIGVPIPSVA

SEQ ID NO: 368214 - protein, 414 aa, unidentified
MEDILECCCGLDIHKESIVACLLKGPIGEDAKPKSEIKEFGTQLKDLIALRKWLEEHTCRYVAMESTGIYWQPVYAILETSLSDEMHLLVVNARHMRNVPGKKTDMRDAEWIAILLRAGLLKGSFVPEHDIRDLRQYTRYRKALIRDITSQKNRIEKLLQSSGFRLSSFLSDIFGRSGIAVMQQLVQVGSVSEQSLMICLKGRARLKTTEILSSLNGTLSLPQRQLLKMQLAHLKDLQENLKEVEEEIRTDFSQFEGPRDLLDSIPGIDLTAAYTILAEIGSNMSAFPTAQHICSWAGLAPGNYESAGKKKKQRVTPGNNYLKTILCEVAWVIASHKNQYLSGWYWRLKQRTDSKRAIIALARKLLVIIYTMLKTNQPFDERKFLERKETSNRRRVGRMVTELARLGYVISAPA

SEQ ID NO: 368215 - protein, 370 aa, unidentified
MQTVRSFVGMDVHKETISISVAEDGRNGPIRFIGVIPNQPDDIAKMAKRLAKHGELDFCYEAGGCGYNIYRQLTALGHSCTVAATSLIPRKLGERIKTDRRDSQKLAILHRSGDLTQVWVPDATHEALRDLVRARVDASMHLMRARQQLLAFLLRHGRSYPTGKHWTQRHRSWLAGQTFHQEIHGIVFQDYVETVWTAQERRDALIERIGAMTASWSLGPLVEALRGLRGIDLLSAATFICTTGDLSRFESPRMLMGYLGLVPSEHSSGGSVRRGGITKTGNREARRMLIEAAWSYRYPARVAKEKAEILVRLPKNIRDIAWKAQTRLCARYRTMIARGKKPTVVVTALARELAGFIWAIGQEMRTPMTT

SEQ ID NO: 368216 - protein, 343 aa, unidentified
MDHFAGLDVSVKETSVCIVDDTGRISREVKVASEPDALLAVLTNPAYHLKRIGLEAGPLSQWLFSALAEAGLPVICVETRHMRAVLKAQINKTDRNDARGIAQMMRAGLYRPVHVKTLRSQKLRMLLTHRKLLQSKAIAIENDLRATLRNFGLKVGVVGTVKFEARIKELVENVPDLAMLAEPLLIVRRALREQVGILHRRLLAIVRDDDVCRRLMTVPGVGPVVALTYRATVDVPARFRNSKAVGAVFGLTPSKYQSGESDRTGGISRCGDEMMRAMLYEAAQIVLVRSTKWSWLKAWAMKIARHRGMKKAIVALARRLAVIMHRIWVDGTEFRWTREAAAA
